United States Patent Application Publication US 2005/0228172 A9 - sequence listing, part 185

SEQ ID NO: 832799 - DNA, 612 bp, Homo sapiens
cattgctcagcccatccacaacttttagcaaaaacttcttggaaagttcaggaaaatagaagggggcattatggcatcaatatctcaaagctgtactrtatgtggtgattcccagagaacagcagttcagatgtacctcatgtcccttcaagctgggattctactgagatatggaaatattattcaaaagatatgagaatagagatcattttaagaaaatcaatttttaggaaatcaatttcagattcctcaacttccatatgaactctctcctaagaacctgtgaaagtgcttttagtaaactaagctttttctaccttctcctttaataactgcctttctcttaccaaaaaataaacttacctctcacccatacgtttaccatagcgtattaggagaccattttccatgggttttttcatgttctgcaggtcttgagagtaaggcatcaactgcccttagttctgcactatctctacaggtttcagtgggaagatggctctgccatcaccatgtcagacttctagcctgcagaactgagagacaatacatttctgttgctttaaaccatccaatttttggtattttgttatgggagctctaggaaaccaa

SEQ ID NO: 832800 - DNA, 456 bp, Homo sapiens
ggattctatctcctggcttcagaagcagatactgaacctcaaatctgctaagactgccctgagtgtgagtcttatctcccacagataaagaactaaaattatggaraaccagacacgagttcttatgcaagtcgctgacctgcaatgaaagatacatgcacagcctcaccaggtgtctactgttaaagtgagggcattgattagaaaagaatgggaccctgcaacttggaatggggatgtgtgggaggaccctgatgaagctgggggcactgagtttgtaaaccctgatgaaccttttttgccagaagaaacagcttccctatccccagtagcggcaacatcccctccctgacccatgctgccatcagcctttccacctttgtctgaggagataaaccctgtgctgcctgaggcaatggtgatggcctcccatgaggcagctgccaggcaagataa

SEQ ID NO: 832801 - DNA, 666 bp, Homo sapiens
gggaagtgttttggtcatgagggtggatccctcatgaatgccttggtgccttccccacagtaataagtgagytctcactgtattagttcatgtgagagctggttgtttaagaacctgtctgtttttggccggccgcagtggctcacgcctgtaatcccagcactttgggaggccgaggcgggcagatcacgaggtcaggagatcaagaccatcctggctaacatggtgaaaccctgtctctactaaaaatacaaaaaactagccggccgtggtggcgggcacctgtagtcccagctacttgggaggctgaggcaggagaatggagtgaacccgggaggtggagcttgcagtgagccaagattgcaccactgcactccaacctgggcaacagagcgagactccgtctggcaaaaagaaaaaaaaaaaaaagaaagaaaaaaaaagaacctgtccattttttttttgctccctctcctgctgtgtaacatacctgctccctctttgccttacgctgtgatcgtagacttcttgatgcctttgcagaagcagatgccagcagtatccttcttgtatagtttgcagaaccatgagtcaaaacaaacctcttttctttataagttacccagtctgaggtattccttcatagcaaaaaaaatgaactaagac

SEQ ID NO: 832802 - DNA, 576 bp, Homo sapiens
tagagaaaagaaaacaaaaatgttttcttaccttctcttgattgaacctgattttcaaggaggaattttcaggagtttctctttggcatccttcttttctacccagtccactcctttctcttccttggtgccttttgttcttgcctcaataatgaacatggaaaagaggtaaactggcttttttttttttttttttttaagaatctgttatatgcaaggcacttgtgtcattctatcttacataacaaccttgtggggaaatattatcttatttgatagtagagctaattgagatgtgaagaggttaagttacttgcccaaggtcacaggaaaggtgatagaaccagattaaaatccaggagtgttcaggagcccatgttcttcctgctacagtgtgctaccatggtatcaccaggtttccacgttagccacttactcccaagtattacataygtaaccagtgcttgcttcagtgatcctttaatctgcatttccagttccagtagtgctgttgatctcagctaatctatgaggaaagtagtcctattaaattaatttacagagtccaaatagtaa

SEQ ID NO: 832803 - DNA, 623 bp, Homo sapiens
gaataagctggctgaaagagaaaagcttggtgccatttgaaccaaaagcaacttccctacagctatggtgatgattgacattgcatgttaataaytgttggtaccttattttttccaggttagagttgaaatcacgttggggtgcttaagcaaagccccttgggtacagccaacaggctgagttgtgaataggaaatggaaaaaagagagaaagtagcccaagagtaagaatagggaaggagggaactaagaaaaaaaaaacatgttgtaagatcacaaggttaggagatcaagaccatcctggctaatatggtgaaaccccgtctctactaaaaatacaaaaaattagccaggtgtagtggcgggcgcctgtagtcccggctactcgggaggctgaggcaggagaatggcgtgaactcaggaggcagagcttgcagtgagccgagatcgtatcactgcactccagcctgggcgacagagtgagactccgtctcaaaaaaaaaaaaaaaaaaaaaaaaaagatcctgccttgagtattttagattccctgtgatagctctccctacccataatttcacatgtatatagtatgtaaaccagacagttcaaatatgtttcttaaa

SEQ ID NO: 832804 - DNA, 605 bp, Homo sapiens
aaaggcatagttgaaatgtattagcctttactgttattcctgtgaaggcttatagtgttggcatccattccctctggatttcgagtctgtgttcacagytgataatctcacattgagccatgatactctttgtatcattatcattacctgatataaagaaaccagacagaccattacctgatacaaagaaacttcacagtgaattcatagaaaagacagaaaaaagttttgctgaatatgtcgtatatacatatatataatattttattttaaaatgtcattgaacatatacatttctttagctttttccaggggacattgcacctaagtttcaaaacacacaaaatagatcccctttactaaacagttttcattttggggttacaaaaaagtcaatgtttcacaatcacaaagcataaaggtacatggttctgaaacaatttccaggcagatttctctcattcactgtactagggtagttttggaaacccagaccatgatccattccttacaaatgatctccaccatgggcctccctgggtctccagaaaaaaaacaaagaaaactgggggcaaaacaggagtaaaataataacctcaggactc

SEQ ID NO: 832805 - DNA, 605 bp, Homo sapiens
aaaggcatagttgaaatgtattagcctttactgttattcctgtgaaggcttatagtgttggcatccattccctctggatttcgagtctgtgttcacagttgataatctcacattgagccatgataytctttgtatcattatcattacctgatataaagaaaccagacagaccattacctgatacaaagaaacttcacagtgaattcatagaaaagacagaaaaaagttttgctgaatatgtcgtatatacatatatataatattttattttaaaatgtcattgaacatatacatttctttagctttttccaggggacattgcacctaagtttcaaaacacacaaaatagatcccctttactaaacagttttcattttggggttacaaaaaagtcaatgtttcacaatcacaaagcataaaggtacatggttctgaaacaatttccaggcagatttctctcattcactgtactagggtagttttggaaacccagaccatgatccattccttacaaatgatctccaccatgggcctccctgggtctccagaaaaaaaacaaagaaaactgggggcaaaacaggagtaaaataataacctcaggactc

SEQ ID NO: 832806 - DNA, 645 bp, Homo sapiens
caccccccactcacccagagtcatttttagaagactccagttaaggttagagcaatgagacaaatgtcagggtaagagtctgagctctagagtctgacaaataggggttcaaatccctgctycagctgtttaaccttgggcgagtgcctcagccccacagactgggcattgctctgttgcatcatgagggtctccagcctcgctgggatttgttgaggatgacgctatgtaaggcctggcagagtgctgggccagtgctgggcgggtggcaggtgctcctataatggtggcccatcctccatctcttctagtaggagcctcagtttaccctcagtttagagaacaaatgtggcccaaactcttggtttccttgggagtaagggctgcctctggactactgtggtcactgagttcaggggacaatattctattggcctctggcactggtgtaacatcacccccagggctccatgttgagggaaggagcaaagggcaagaggcacggggagtccaagggccttcctgggaccttgtgattcccagtgtcacaactgcctcagtttcacaaagaatcttccaagtcccagaagccccgcaaaaaccgaattccccttctgggtgcatcatctcagcactaatgcacac

SEQ ID NO: 832807 - DNA, 460 bp, Homo sapiens
ctccagagcccaactgatcttcccacctcagcctcccaagtagctcggactacaggcacacaccaccacaccaggttaattttttcttttttttatagaaatgaggacttattatattgtccaggatggcctcaaactcctgaacccaagtgatcctctgccccagcctccttaagtgttgggattacaagtgtgagccactgtgcctggcctacacactgtatgaaaatcttgttagagctatgtgtctttgcctagggatatttgtctttgcttttaatcctagacagtcttccttgatccaaaaatttgatcatgtatcttgattttaatttgtattagytaaacttttgtagaggttattcttcatatattgcgtgtgttaggacataaatttttctccaaccaattactccagttttggagatttaactggaccaacaaataacagcccttcccc

SEQ ID NO: 832808 - DNA, 604 bp, Homo sapiens
tcttacagatgccaagaaaatgatgcccagtcacaaaaggaatgggcaaagtcaaaggaaatagtcaagggacttatcccagcagggtggaaattttcaaatattaacaactgggatgggccrggcacggtggctcacgcctgtaatcccagcactttgggaggctgaggcgggtggatcacttgaggtcaggagttcaagaccagcctggccaacatggtgaaaccctgtctctactaaaaatgcaaaaattagctgggtgtggtggcgcgtgcctgtagtcctagctattcaggaggctgaagcaggagaatcacttgaacccaggaggtggaggttgcagtgagccgagatctcaccattgcactccagcctggtgacagagcaggactctatccccccaaaaaaaaaaaaaactgggatgaaaaagctgaatattgatgattcaaaagaaatatcttattgcagcactatggaaggttcagtggactcacaggtgcccctgctggtgttccaacattgaagggctctaaacagatctaccctatttacctgagtttgcaggaatttgaaaagactgaacacaaagatgaaaatgagaaat

SEQ ID NO: 832809 - DNA, 622 bp, Homo sapiens
catacatttataaacacttaatactctgcttagcacatagtaaatgcttaacaaagattagttattgttgttactgttgtttctaaacctaaacagaagctgcaacagctccaagaaaagaagtgccggaggaacccacacacccctcagtgacaaatatgcatcttgacagcatgctagcagttctcaaaaagcattctgctgaactgatgccttctgctttaggagatgggccatttcagccaaggcaccagaatcccaccagctacagtcctgcctcaccccaggcttggaaagccatgggggctgtccagggttgagggctgcccaggttggggcttccagttctgttgcagtgtgcactatgggaacactccacactcatacagtcagcctcaaccttggcccttagcatgtggtaggcaaggaaacactgtttgcttcttgcaggaggagacgtgacctgagaaaatcaagttgccattatctcaggcacaggcaaccctgaagactatatcaattcccccrgtttattgaaggagatgttcctagggttatctttagaattcccactccaaatgctttagcaagaagagaattttattgattagcaatgagatga

SEQ ID NO: 832810 - DNA, 619 bp, Homo sapiens
tccataatggttgaactaatttacactcccaccaacagtgtaaaagcgttcctatttctccacaccctttcaagcatctgttgtttcctgactttttaatgatcgcctttctaactgctgtgagatggtatctcattgtggttttgatttgcatttctctgatgaccagtgatgatgagcattttttcatgtctgttggctgcataaatgtcttcttttgagaagtgtccatatcctttgcctactttttgatggggttgtttgatttttcttgtaaatttgtttgagttctttgtagattctggatattagccctttgtcagatgggtagattgcaaaaattttctcccattctgtaggttgcctgttcaccctgatggtagtttcttttgctgtgcagaagctctttagtttaattagatccaatttgtcaattttggctttttttgccattgcttttggtgtttcagtcatgaagtcatgaagtccttgcccatgcctatgtcccgaatggtattgcctaggttttcttctaggggttttatggttttaggtctaacatttaagtcwttaatccatcttgaattaatttttatataaggtttgaggaagggatcca

SEQ ID NO: 832811 - DNA, 596 bp, Homo sapiens
gggaaaaaatcactctaaactacgacagcagaaatatgcccagacatatacatactccaaagcaaaggaagttctgtactgtttcaattactaatcatttaacacaacaaattccaaagaaaacacaacctacatattgaatatattctttagttatgggaagatttaggacaaactctgtaagctaaataacttgaaagtgaactttttgtatgaccttttctttaaaatatttattattttaatgtagtctacatgtagactcctaatatttatttataataaatgtactataggagcataaatcctgatttatttattttaatttacaaatacatcaatctgattaatggagtcatttttctgtcctatcacattaaattacatccatagccaaacccctaaagtaaattataggcttattcagggaacatcctgtcaagaaactatttggcacactgtaaacagccaataaatattgaaaatagtaaacatgtattctatcaaggcatatatagtgtagattttcacatacttgtaaattcttcagttgaaacgttaacagtmcagtttgtccctcatccaatacacttgag

SEQ ID NO: 832812 - DNA, 661 bp, Homo sapiens
tgttgaaccatttgaggaactgccagcctgttttccaaagtggctgtattattttgcattcccaccagtgatctaagagggtttcaatttttcaacattcttgaaaatacttactgtcttttttattctagccatcctagtgggtgtgaagtggtaatttattgtgagctgagtcacatttttgatagcatcaactaagtcttgtgggatactgaagccctctgcacacctgattctcagtgagttcaagtctaagtccccaggctccctcctgctccccagacctcattgctctttttctacaatgactgctgtactccaatccctcccagcccctggtcctgcttgaagaaggcccttatctacatgactccaaagatctacatctgagtgtcagaccctcctacaataagcttgcagattttgtgtcagcttccaggagcttactgaaatctctgaaattctatgcgcccctggagcatttgttgatgctcattccatttcattgaactacatttatcaggtaatagttaaaattaagaaatctgagctttttttgctctttgctttcccactttaggttgccttctgggycttcacttaccaatggtcctagggcaccaaaggaggttgacatgtcgccatggatccatctacttca

SEQ ID NO: 832813 - DNA, 594 bp, Homo sapiens
ttacttcttttctcagtctctcatctccacctgatgagaaatacccacacgtgtggaggggcaggcccccttcaaagaaaggtgggtaaacaggtgcaggactgctamatcggtgagcataactaatccgataagcagaggtccatgggtggttacacaccctggaaagaaataagcattaggaccatacaggacgctctatgactaatgcttaccagaaaatgactaggggtgctggcatccctgtgttcttttttcagatgggaaatgttccccccaaggcaaaaatgcccctaagatgtattctggagaatcgggaccaatttggccctcagacgctaacaaagaaacagcttatattcttctgcactaccacctggccgcgatatcctcttcaagggggagaaacctggcctcctaggaaagtataaattataacaccatcttacagctagacctcttttgtggaaaagaagggaaatggagtgaagtgccatatgtacaaactttcttttcattaagagacaactcgcaattatgtaaaaaagtgtgatttatgccctacaggaagccctcagagtctatctccctacc

SEQ ID NO: 832814 - DNA, 645 bp, Homo sapiens
ttagtttactgataggttttatgctgctaagaatccaaccaacagcctcacttaacagaggaggtaaagggaggttttcactgtgggtgttactgcaggcctccaactgggatgaccagcaatgagaaagattttgggaatgtgatcattcagaaaagacaggtcagcagggcagtcccctcaggttccagccctcagcagggacaagacatcagggatgttggtgtctgcttatctacagccctaatctgctgattgaacagtgaaaatcttttggcagctagatccatactaggcacagagctttctatttaggtcagaaagctttgggatgaacccctgccagccagaaggggtgtcctgcagtgccaccagaagtggcagcctggatggacaggagaggtttctcttttctcctcatttccaaagaaacaggattttatggagtgatggcccgggacgtccggccttctgtggggcagagaggatagggaaccactttgatatagtcatctgttttggccacktctgttggccatgagtgtcttggtggagaggtggggatgtatctgacagcagcagccttgccttaatttatatctggtctcccgtccagaagtgtttggcccgtggtgtagatgagct

SEQ ID NO: 832815 - DNA, 606 bp, Homo sapiens
taacacacatacaatgcacaatacagaacatacaacacaatgcatatagcacacacacaacacacactcctcttccttctttgagtggcactttggtatttggtgtgtgcrtgtgtgtgtttttttccccatagatggtcatgggatctatgcactagagcaaagcatcttggctacgcccaagtttagttttctgatacaagggtagcatggacaaaggacagggaaggtgtggagaaaaggactttggagcagatgaatgggggaagcacagagaaatgagcaggggtgatctgacctgggagcacttcaggggaatcatttcctagttttccagccaagaataggatggccccagaggctctgaaagcctacatgccagggccggtagaggttgggcagggtaagcccagggtgataaacaaaaagccaaagaccctccagatgcctgtttttaatctaaaccttatttaggacccagaaactgaccatagttcatctcactggtctcccagaacaaagtatccttatgtgggagaggcacaaggtcatagctaacattaaaccacaccatgaaaaatatattcctttttccttatttctact

SEQ ID NO: 832816 - DNA, 564 bp, Homo sapiens
ctttgcatccttcaatctaatgaagttgacacgtcatattagccatcacaggtggatacctacgttgtttccagctcctttccaccactrccaccatacagatctgtgtaagattttcccaggaagtagacttttggatcctgagatatatcttatttaaatcagaatagattttattcaagtcatgttgaaataaggatgtcaaagccacttggtaggtaactttctcggaacccttcctctctatgagtgtacatttacttgcatttgtataaagaggggtttagatgagaaaatatctaaggattctaccactattaagattccacgactaattttcaagccagctgtgtttatcaaacaaatgcaaggaaagttggatgaaatctgctagtccatcatccaaatatttggaagtaaccagatgttcagcatcttgtagacaccacctaggaggcctttgtcagtgttctcaggtatatttgtgttattttagtttcctaagaattctccttgctcagagagctggtatagattcagatttgcaaagatcctgcaatacct

SEQ ID NO: 832817 - DNA, 563 bp, Homo sapiens
tcaccaggcccccaaaggagtccctggtccttctctttctctttctctctctccttacctccctcctttyctctcattcctcttctctcctccttccctttcatctctctcttgctctctctgaattattgtgttattcttgtgcagctgacattgctttctttacctgtgagagcatacctggacagttgtgggttccctctgtgtgtgtatatgtgcttggatggctctgtatatatctccatgcatatgtagtatcacatatatttgtaaacctggtagctggcatgttctttttggggccctgggagtttgtgtctatgtgcatgaagggtttcctctatgtatgtgtgtgtttcccctatgtatgtgtgtgtgtgtttacttagatgcttgtgtgtctactacacctgggtggctccaagcttttgagtgtgtacactaggatatttatccatatctgtgtgtctctgcatgtcctcttgatgtttgcttttctctgtgggtttatgcctagatatctgtgtgctcctgactgcctctaagggtgtgaccccttgtgc

SEQ ID NO: 832818 - DNA, 549 bp, Homo sapiens
ttctatagattgcatatttctttttctaggtaaggatcataagttcttgtttacttacaggttctataattttttgttgaaaagaacacatttccaattatataatatgtgactctgcaaatcagaccatctgtattccccaagatctgttgttacttcctgttgtagttgttactgtttttttgtttttatttttctgaactaattctgtaaagtctgtatctttgtagtatgtggccattgaaatctctattcaattagcttcatggtcagctaatgattggacaaaaatttccttaaaggcctagagctaatatgtctcccagtcttttttgagtgactctgtgtatatggtggggaatgcctttaacactcagccaggtgattacaactctgccttagccttcacttcctgcttgggcagagacttgaggtcagtcaagtctctgagagattargacctactctggtctttcataagcatgtgcacagctgtgcacagctctggtcatatatgtagacttctagcttctcagaaatatgtcaaag

SEQ ID NO: 832819 - DNA, 586 bp, Homo sapiens
ctttccatttagtctgaggtgcagatattcgaagaatatctgcaggaaaaggggcagaagtgtggaccctaaaggaacatcatcagctccgcagtcttgtccacacaaagccgtattttcctcagtgaactcgttagggaaggcaccctagtagttggagagtggactttggagtcaacctcatctgggtttgaatcccagctccaagcttagagggcttgagcatttacaaaaattatgtaggctggatgcagtggctggtgcctgtaatcccagcattttggaaactgaagtgggacgattgcttgagaccaagaagttcaagatcagcctgggcaacatagcaagaccctatctctataaaacttaaaaaaaaaatcatccaggtgagttggtgcatgcctgtagtcctacctactgggaggctgatgcaagaagtttgctggaggtgagaggttggaagctgcagtgacctatgattatgccaatgcacaccaacctgggtgacacagtgggacmccatttctaaactaaataaagaaaaataaagaaataaaaaataaaaaaattatttgcacatttattt

SEQ ID NO: 832820 - DNA, 625 bp, Homo sapiens
tttgcttataatacaagaaatagcttagtacaaataattatttcaaccactactacaatgatcattttgtgatgtttttaagcattgtgatgcttgttggaaacattagaccaaactcagttcagacctgagtctgccttataatagctactgattttacatgaattatataacctctctgagtttcagtttcctcatgtataaaataggcataatctcagtacctgactcataaggtaatgatgagtcttaagtgagatattgtctgtaaagtggctggtatagcacctggaatgtagtaaataatcactagttaccataataaaaacagtaactaaagcttgtgttaccattttgagttgtcacagtactttcacttcgacattctcatttcatgctcagggaatgagagaagggtcattaatattattgccatcactatcatcattatacctatttataaaataaggaggggttcagtgacttgcctaagatcacagggcaggtaaatggtcaagtagggtctctgtcctagtaggcattacaagtgattttcaaagtgatcctttggcctggagagaattcctcttcttatttgtacaayggatcagcagtgataaggata

SEQ ID NO: 832821 - DNA, 536 bp, Homo sapiens
tttttgtagtctacagttctatgagtgttgacaaatgcgtagaattgtgcattcatcacttacagatcatttccatcaccctcgtgctgttgcctatgtaytcaaacccatctccccatcccaccacccttggctatcactcatctcttttcagcttccatggttttgccttttccagaatgtcattaaattgaatcatacgataagtagccctgggatgatctagcttctttctcttagcaaaatgcatttaagatgtatctacgttatgttaatcaagtttgttccttttcattgctgagtaatattctactgaatggattaatcgcatattgtctaatcattttctagctgaaggatgttgggttgtttctcttatgtgtcatgcattcgatgtcatatctcaacattttttgcataagccaagattacccaacttttctcatatgttgtcttctagcagttgtataattttatgttttacatttaggtcgatgatgatcaattttgatttaatttttgtatatatcttgagg

SEQ ID NO: 832822 - DNA, 536 bp, Homo sapiens
tttttgtagtctacagttctatgagtgttgacaaatgcgtagaattgtgcattcatcacttacagatcatttccatcaccctcgtgctgttgcctatgtattcaaacccatctccccatcccaccacccttggctatcactcatctcttttcagcttccatggttttgccttttccagaatgtcattaaattgaatcatacgataagtagccctgggatgatctagcttctttctcttagcaaaatgcatttaagatgtatctacgttatgttaatcaagtttgttccttttcattgctgagtaatattctactgaatggattaatcgcatattgtctaatcattttctagctgaaggatgttgggttgtttctcttatgtgtcatgcattcgatgtcatatctcaacattttttgcataagccaagattacccaacttttctcatatgttgtcttctagcagttgtataattttatgttttacatttaggtcgatgatgatcaattttgakttaatttttgtatatatcttgagg

SEQ ID NO: 832823 - DNA, 472 bp, Homo sapiens
ctgtagtggtcccccaccttttgggcaccagggactagttttgtggaagacattttttccatggaccgggcggtggaggaataatttctggatgcttcargcacatcatatttatcatgcactttatttcttttattactacattgtaatatgtaatgaaataagcatacaactcaccatcatgtagaatcagtgggagccctgagcttgttttcctgcaactagacggtcctatatggaggtgatgggagacagcgatagatcatcaggcatttgattcttataaggagtgtgcagcctagatccctcgcatgtgcaattcacaatagggttcacactcctatgagaatcttatgctgctgccgatctgacaggaggcggagcttagtcagtaaggagagggatggggagcatctgtcaacgcagacaaagcttcagtcactggcctgccactcacctcctgctgtgctcc

SEQ ID NO: 832824 - DNA, 471 bp, Homo sapiens
atactgatcaggaattttgtagaatgtccttcagttgggtttttctgatatttttcttgtgactagactggggttatgggttttcaggagcaagatcacataggtaaagtaccattctcatcacatcatatcaagggcacatactatcacatgactcatcactgttgatgatcttgatcacctagttgaagtagtgtttgtcaggtttgttactttccccactttccacactgcacgctataaaaggaagtcactctgcacatcccacacttcaggagtggggagttacgcctcgcctctttgaggacagcgtctctaaacaaattatttggaattgttctcagcacaatcttccataaccaggtcctacctacattttgggcttcatcyccagctgctccctccctctcccattccaggctcatcatactacaggtcagcacctgcagatcctgcatggtgccattcttt

SEQ ID NO: 832825 - DNA, 471 bp, Homo sapiens
atactgatcaggaattttgtagaatgtccttcagttgggtttttctgatatttttcttgtgactagactggggttatgggttttcaggagcaagatcacataggtaaagtaccattctcatcacatcatatcaagggcacatactatcacatgactcatcactgttgatgatcttgatcacctagttgaagtagtgtttgtcaggtttgttactttccccactttccacactgcacgctataaaaggaagtcactctgcacatcccacacttcaggagtggggagttacgcctcgcctctttgaggacagcgtctctaaacaaattatttggaattgttctcagcacaatcttccataaccaggtcctacctacattttgggcttcatccccagctgctccytccctctcccattccaggctcatcatactacaggtcagcacctgcagatcctgcatggtgccattcttt

SEQ ID NO: 832826 - DNA, 616 bp, Homo sapiens
ttaaagaagctcagaacaaaagaatacacactatatgactctatttacataaaattttgaaatagaaaaaattaatccatagcaaaagaaggcagaatgtttgcctttggtgaagggtggagaaagagtgacagtaaagggatgtgagtgaactctttgggttgatgaaatttatcttaattggggtagtgtttatatacttttgaaaaataatcacctaacagtacacttcagtgtatgtatcttattatacaaaaatgacattctaataaagtttatttaaacggtaaacacccaaactccatagtatatgtgcctctgatcatgaaaccaattctattttatatttcccccaggagcatataaccatgtcttttttttctacactggtaacaaccgctcagcctcccaaagtgctgggtttacaggcgtgagccaccatgcctggccaggttatttgatagatcacttaaatatttctcctaatataactaattgtagaaagaaaagttaaataggattcagaaggcctgagtactatcccatctactarctttgtgatgttgcagaagtaaattaaactctatttctcaatttcatcacctgtataaaataa

SEQ ID NO: 832827 - DNA, 639 bp, Homo sapiens
taccaaatgtttaataagcaactgttatatgtggttcattcatttactattcaaatgcttattgagcacatacaccagtacaggcagtatcccatagttaggttgaaggmaagcaaatataaagtgaagaagtcctgtcctcaaaaccttttaagtttgtttgagtctattttttcagtctaccaactggagaccaatagcctgaatggtgtctaattactaccacacccaagtcctccaaggagaactagatgcattcttaggcctgtccagtgggtcagttttaataaccttcaatttaaagagaaggaaaagatatgcaaaaaagtaaaatcttctcatctgtactccggtctttgggctgaaatgtcaagggattgttaatgctgcctcatttaatgattagaaatctaattacctggaatggagggctgcattaggaaagtctgggagcagaaagaatctttcctatcataaagtgctgccacccctcttcctggggatcatcagtgctgattttttgtcatgtgagggtcaaacgtgttgagatgacatagcatgtttcatttaggatattcttcatcagtgcattgggcttgatcctgctttagttttcttaatattcttcatgctctgaga

SEQ ID NO: 832828 - DNA, 357 bp, Homo sapiens
tatttctagagggcaccctcttaagagtctataaaattctgagttctataaatacacattttcaaaaggaagcaaatgaaaggctctagaaacatcttgttgctcaaaagagtgaagttatgacagcactttcacattatgtcacagttcactactcaattgcttagttgtctaaggatggtctattatgccctagctttcatgtgagattttgcagttggctgttgtaaaacatttatagaagtgacttctagcactcgagttggtgatttaatactatacagagttcactagtcatggtatstacatcaattttctacagtagctattattgcctgtcaggatttctgccactac

SEQ ID NO: 832829 - DNA, 529 bp, Homo sapiens
atggattatctggtctggcatgatgctagaagggcagttctcattagaagtactaatttaacctgagaatgrtgtctcttgttcgacaaccacataagtctctagatttgccctttctgagacttcgcatcatgtaaattacataaatctggtgtttgactggatgctggatgccctggtggagtggcagcacctgcagagatctgcatgtgtgtttttcttggttcagagctattttgaacatagggtaccaaaagactgtctttagaaccctgagatttttgtatatttcaacttaaaatttaagaacatttatgaacataatattaatcaataatattcacatcttattgccgtttacataacacttttattaaacagttttagtagttataaaactgatttgcacttaattattttcgtagttataaaactgatttgcacttaattattttcagttgaagtgttttacaaatgatatggtcatgtttcacaattacatgtaagcagcatacagtggtgatctagc

SEQ ID NO: 832830 - DNA, 525 bp, Homo sapiens
ttttgaatctgtcaagtgcttatgccagctgggcttctttgctttgatgaatttaattttcctttgggaagatcaaaacccaaatccaaatctaactctcattatttatatgttaagattacaaaagccattgatacttcatatatttgctaaaatgttgtatctaataattttgaatcaaagaataccctatttatccaaatcattggaaacaataaatctttgtttctagaccgccaacaaaatgcaggatgtccccctaaatcaaagaaggcagtttcgccaattactgactttcaagtatttggttaatatttcttacactagaaaggtttctctaatgcttagtttcatttttattttgctacatataaggccctttcctctatttctgttcaaaaaaccattttgtcaatgcccttcagttactggaaagttaggaaggtagaaatcctttttckgtactaagcaattttacagcatttaaaatggcttttattttccacctttatgcctttcttggat

SEQ ID NO: 832831 - DNA, 513 bp, Homo sapiens
tggagtcattctgttttttcctttttgttccagggtagttacatgtacttaatttgtttgaaacatgcaagtagattatggaacattaatataagctgtctataagttatccaacctatccgagaagcattcaacagtagtcactgtgtatttgggtgaattagaatataattgacttctctagtagacttttgagctgagttcatccttctggtttgttgactcctcacctggttctctatcgaattcatattttggaagtcatacctctttttttattgttagtttttaagggtgaatccagaatcttctttaatttctaatgctaacaagggcatagtcttaagttttctgtttactttattctgaactgcaaaactaggaaggagaatckgggtataagtgctctctgttctgtcagctcacatgcttcgtagcataagcaggtgtgtgatgattatttcagagcaaaaggaaagacttagtaaaatttgtatgtatgtattcaatttg

SEQ ID NO: 832832 - DNA, 634 bp, Homo sapiens
aacgaaaaggtggaccattgcagcatctgtcattattgtttctcattttgccttcttcttcctgtcttctccccattgccrtctcattttctctgcagccatgagcaggaactgtatgcaaagtacaaaagactgtattcctgaaacagaacttgttgaccccattttcttgactcttatttgacattgctttctaagagaagggttttggattacacactcacacacacacacatatgtacacattcatagtaataaatgtatttatcaactcagttgcaatgagattctgcttgttggaatatcatataataaatagctatattggtatttattgaacattggctttttatatgactgcaataagatttgatgctagtatttttaactgttgctccctctctgcctccatgcttagctgtttaacatgacattcattcatcaaaaataaatgtccaagtcaatggagtgtttctgtaacagatattagtcaccttaaacttgttactcatagcccataaactcttatcattctttctcagataacccagttgaccctacattagtagaaattgagagctctgagttcatttttgttgttatttgatgaatatatcacttggctgactattag

SEQ ID NO: 832833 - DNA, 610 bp, Homo sapiens
ccttcctaaatgaggtcatgaggtcaggagttcgagaccagcctgaccaacatggtgaaaccccgtctctactaaaaatacaaaaattagctgggkgtggtggcacgctcctgtaatcccagctactcaggaggctgaggcaggagaatcgcttgaacccgggaggtggaggttgcagtgagccgagatcacgccactgtactctagtccgggtgacagagcgagactctgtctcaaaaaaaaaaaaagaatgtccatgtgaatgttgcaaacgctttcttatagggaccagtattaaatctttgtggttttaccctgagtcagaacactaagagcctggtttatttactgaccacttgctttgacgctcgtgagaaggctgttctgttgaagtcgtaatgctttgcacccagtaggagctcaacaaatgcctaatgagctgaactcaattgagaaggtcaaggggctaagcaaacatgggggtgctgcatcattgccatttagagagtaacgagttatctgaaccagcgacaggaatagtgaatggtgagtgttgaaggggcagaaataaagaaccaagggatccgttacagaaggctcagaccttgag

SEQ ID NO: 832834 - DNA, 294 bp, Homo sapiens
aaaaagagtgtttccaaattcctgaatctaaagaaaggttcaactctgtgacatgaatgcacacatcacaaagcagtttctcagaaaatttctttctagtttttatctgaagatatttcctgtttcaccatatgtctcaatgttatctgaaatatccttttgcagattctacaaaaacaagatttccaaactgctsaatgaaaagaaaggtttaacactgtgagatgaatgcacacatcatatagcagtttatcagatagcttccatctagtttttaatcctgaaatattctct

SEQ ID NO: 832835 - DNA, 496 bp, Homo sapiens
atgcagtttctcagaaaacttctttctagttttaatctgaagatgtttcctttttcaccctaggccacaatgctctctgaaatacccctttgcagattctacaaaaacagtgtttccaaattgctgaaggaaaaggatgatttaactctgtgaaatgaatgaacatatcacaaagcagtttatcagatatcttccttctagttttgatcctgggatattctctttttcacagttggcttccaagtgcccccaaatgtacattcgctgagttgacaaatactgtgtttcaaagctgctgtatccaaagaaaggtttaattctgtgagatgaatacacatatcacaatgcagtttctcagaaagcttccttctagtttttatctgaagatgtttcctatttcatcacaggcctcaatgctctctgaagtatcccttggcagattctatgaaaacagtrtttccaaactgctgaatttaaaaatagttttaactctctg

SEQ ID NO: 832836 - DNA, 218 bp, Homo sapiens
gaatggaatcatcattgaatggaatagaatggaatcatcgagtggaatcgaatggaatcacaatcaaatggmatcgaatgtaatcatcatcaaatggaatcaaaaataaccatcatcaattggtattgaatggaattgtcatcaaatggaattcaaaggaatcatcatcaaatggaaccgaatggaatcctcattgaatggaaatgaaaggagtcatc

SEQ ID NO: 832837 - DNA, 510 bp, Homo sapiens
tatcgaatgcaatcgaatagaatcatcgagtggactcgaatggaatcatcgagtggaatggaatggaatagtcaatgaactcgaatggaatcatcattgaatggaatagaatggaatcatcgagtggaatcgaatggaatcacaatcaaatggcatcgaatgtaatcatcatcaaatggaatcaaaaataaccatcatcaattggtattgaatggaattgtcatcaaatggaattcaaaggaatcatcatcaaatggaaccgaatggaatcctcattgaatggaaatgaaaggagtcatcatctaatggaatcgcatggaatcatcatcaaatggaatcgaatggaatcatcattaaatggaatcatcatcaaatcaaatctaatggtatcattgaacggaattgaatggaaccgtcatctaatgaattgaatgcaatcatckaatggtcccgaatggaatcatctacaaatggaaaggaatggaatcatcgcatagaatcgaatggaat

SEQ ID NO: 832838 - DNA, 319 bp, Homo sapiens
tgcaatcgaatggaattatcgaatgcaatcgagtagaatcatcgaatggactcgaatggwatcatcgaatggaacggaatggaatagtcaatgaactcgaatggaatcatcattgaatggaatcgaatggaatcatcgagtggaatcgaatggaatcacgattaaatggaatcgaatgtaatcatcaaatggaatcaaaaataacaatcatcaattggtattgaatggaattgtcatcaaatggaattcaaaggaatcatcatcaaatggaaccgaatggaaacctcattgaatggaaatgaaaggagtcatcaaataa

SEQ ID NO: 832839 - DNA, 319 bp, Homo sapiens
tgcaatcgaatggaattatcgaatgcaatcgagtagaatcatcgaatggactcgaatggtatcatcgaatggaacggaatggaatagtcaatgaactcgaatggaatcatcattgaatggaatcgaatggaatcatcgagtggaatcgaatggaatcacgattaaatggaatcgaatgtaatcatcaaatggaatcaaaaataacmatcatcaattggtattgaatggaattgtcatcaaatggaattcaaaggaatcatcatcaaatggaaccgaatggaaacctcattgaatggaaatgaaaggagtcatcaaataa

SEQ ID NO: 832840 - DNA, 401 bp, Homo sapiens
atcgaatataatcatcatcaaacggaatcaaaaataaccataatcaattggtattgaatggaattgtcatccaatggaattcaaaggaatcatcatcaaatggaaccgaatggaatcctcattgaatggaaatgaaaggagtcatcatctaatggaatcgcatggtatcttcatcaaatggaatcgaatggaatcatcatcaaatggaatcgaatggaatcattgaacggaattgaatggaatcgtcatagaatgtattgaatgcaatcatcgaatggtctcgaatggaatcatctycaaatggattagaatggaatcatcgcatagaatcgaatggaattatcatcgaatggactggaattgaatcaacatcaaacggaatcaaacggaattatcgaatg

SEQ ID NO: 832841 - DNA, 549 bp, Homo sapiens
ttactaatagggagtttctcttcagataacttatatgtagagtmttttatgaaagagcataagacttggaggcagatgcagtctggctcaaatcccaaccttgcctctattacattgtgtcatctcaagtcactactcagcctaactggagacttagtttcctaatctataagccaaagataatagctatcctaaagacttataatgaagataaaaaattaggatctataatgcactgaggtcattgctttgaatatcactcattaaatgaaaatgttttgatcgtgaactttaaataccaatatttgtaattattttggtctaccctggaagtggtatatggtatgtgtacttcaatggaccagaattatgagaaaaactcaaaatataccaagttagaggtaagtcctcacccaggttccctggaaaacagatcccccaggcaaaactgtatgtgttagattctacgattgtcatttatttgatattctaggacaggtaaagcttgatactgaaataaatcagaacagtggttgcctaggaatgtga

SEQ ID NO: 832842 - DNA, 596 bp, Homo sapiens
ttttcttttttatctctcatgtcaggggctaattcagacttactgaagttatttagctcaaggagcacgaccacatccttgttatcatttcattgataatttaagagagattctgtttgctctacattgggttacgttcccattccaggctctcttcaatccctaatgctaagtaaaaagttaaaaataaaaggcttacttcagttacattcaacaaacgtgtagatcatacatgtgccaagtagtctgctatgggttggaatacagaaacgatagataatcagacaatgcccatgaccaagtagctctcaattaaacaaattaaacagttaagaatgatcctgctatgtatatcctgtgtgcaactggtaagtaaatcattcgaacaccctgggaagagcaaagcttcccaacaggataactaaccttttgttaaggtttaatgtgttttacaaaaccaaagatttcttactaacactttargaaaacaatgtggtatctatatatatttttaattcgttttgacttctcacatcctgtgctattagttattacaggactaaatgtccatcgatgttcatgtaaagtgggaaaac

SEQ ID NO: 832843 - DNA, 646 bp, Homo sapiens
ctagagtaagtcatagcctgcttaactgcagggaagctgagaaatgttgaggagcttatggaatgtttgcagattcatccrtacctgtcacaccattcatttattcaaactaagaaaataaaatgccatgggcataattagatccccctcaatattgattttcagattcttatgttctaattattattagttaatgattatacactaccacccccctttaaccttttggagaacaaggataacaaatacatgtcaactagaatcccaggtctactctctgaatttctttttatagtagaccttgcagtggaaaaggatttaaattaataattagttaattataataattgattataaaattaatgacaatttcaaaggaaagaaagaaaaaggaggcatatatattcccttaatagacaaaatttatttccctaaaaggaaacaagaaaacagttacatatttcttctgcattgtcctgtgtggctgattgttgttcaatatagtcatcatcttttccctcacttctacgggcagtggttccccttcttttgattcttggcttggctcattcttgctttgaccaatgggatattagcagacctgactcaagccaaggcttaaaaaacacctgtgagattggatttg

SEQ ID NO: 832844 - DNA, 489 bp, Homo sapiens
caggagaagataagactaagggaactcacattttttgagggcccacaaaaattattttgtccttatcctcacrgtagccctttgaagctggctattattattcccatttttaagattaaaaacctgaggctcaagaattaagtgacttgaaccaggccatgcaaattaaaagtgatagaatcctgttcaactccaaatgctggggttttcccacttttctgcatagtttcatgaaaagtgtacatagtagcatctttcccaaagccatcatgggcatcaggaggcaaatatcttattttctctgggtaccatagaaccaactctaattcctaattttaaacagctttacaattttaattgtaatattttagaccagtcattgtttctcgtgtgtcttaaaaggctgacctatcctgtcaatgagccacatgcattttctttattttttgcttatcttttttttttttagaatacattctataaacaaca

SEQ ID NO: 832845 - DNA, 556 bp, Homo sapiens
gctgccagtggcttcttgcctccaattcacagtaaccttgatgaatcattgatctcaatcactcctgggtggactcctcatgcctcgcctttctgaactgtagttgtaaccgtcctcaaagggttaayaagaattacatgctgggctctgggcagaaatatagtcataattaagcattaaacaggctacattttggcccacatccttgtaaccaaaagtcatgttgctgtagatgctgaatgtttgcatacccattgtttttatagatagaatttctgacattggaatcataagactcttgtttaagaattgcttaaaatgttctttagactgtatgaagtcatcggctcttctctaagcaaatgtataggccataaaataaatcaaatcagtatgctttacaacttgtcaaaaatgcactattttgctaaacgtatgactctgcaattttataatatgctaaagtatctggttagatatttatatattaaaatctaaaagtgatctttgctagcaattttacatttttgttcagaaaacccacatgcattttttt

SEQ ID NO: 832846 - DNA, 585 bp, Homo sapiens
taaaggccaaggagtcctacaacatgmcaactgcaagatggagacacaggaaagctgctggtttaattaagtttgagtacaaaggcctaagaaccaggaaagctgatgatgtaactctcaactgaaaacaaaggacctgagaatcaaagggggcaatggtgtgagtctccagagtctcaaggccaagagattctttgtgcaagagcagaagataaatgtcccacctcaaggagagggtcagtttgcccttcttcttgaactcttgttctattcagactttcaatggattgggtaatgcctgcccacattggtgagggtggaccttctttactcattctaccaattcaaatggtaatgtcttccagaaacaccctcatagacacaccccaaaataatggtttaccagctatctgggcatcccttagcttactgaagttgacacataaaattaaccatcataccctccccaacttttctcttagtttttaaaattgtttagttaacttatttttgcccatattaattgtgacttgtgtcttattttctagttagaggttgctacactaaagggatgctactgatttt

SEQ ID NO: 832847 - DNA, 416 bp, Homo sapiens
gggccgggggtggcggggcgggatgggggcgggtgaaattcatgaggacagtcggagacaaaggcaggaggtgggactagcatccacggactggggaactctactctgtatcttggccaaaagagacatcaaatcagagtggctgttcagcagcactaagaggtatgtttcatggatcacctaggcattaaccactgggcagtttttccatactgcaaggatatcccctttgagactcccccatctgtgaagggcgctgcttcaaagtttgcttgagccaaggcaaacctgggcttaagagccatatactgccaaaaaggaggaagtgttgcagcaaaaaaagtattcaacaggtatattacaaagaattctctaagcaaacayactcaataaaaaccaaaacaagccagacagag

SEQ ID NO: 832848 - DNA, 641 bp, Homo sapiens
tattgttctaagtcagacccacttggtaattagatttggaatctaaaatagtgatcatgcctacattgtttagaattgtatcataccttcttacattagaggtaccaaccttagtattaatattttcctcagagcaagtcagacctaaagccattacatggggtagatcagagctagaaaatatattgagcctgctttgtgaggaaacaattggctgccttcttgctctgtctcctcacaatgaggctggcttatccaaggagggaaaatacactgtatcttgcttgcctagagtgttgtgttgcaaagaattctgaaacaacttttgagtcatttattccatttattcaacaattatttattgagtgcctacaatgtgatattcaaggtactattctaggtcctgggaatatagcaacacacacaagagcaaaatcagttaaccaatcaatcaatacttgccccccaaagagctgacactggaaagaatggtgtgatggattatagatgtcttccataaacatgggagggaggaattgaggcatcttaccatrtatttgccatccttccagattaaatctagtcatagcatcagattttcaggcagttccacaattgtgtgtatcttatctttggagctc

SEQ ID NO: 832849 - DNA, 600 bp, Homo sapiens
gtcactatatcatttggaagtctgagcttgagctgaggagtttgagaacagcctgggtaacatagggagactccgtctctacaaaaaataaacaaaattrgccaggagtggtggcacatgcctatgatcccagctactcagcaggctgaagtgtgaggattgcttgagtcctggaggtcgaggctgcagtgagcccagatctgccactgcactccagcctgggtgccagagtaagaccctgcctcaaaagaaaaagattattttgcagttctaagtagaacacttcacctccattacccccgggtttacccagattcacacgtaccatgggatggacattgggcttctttttgttcagaacccagcatcaaaaacagcagaaaaaagaatgccagtgatctgcagaaaatgcacaagactgaggaaatttacaggacaagacctgactgggaacttaagaattccagagtgagccgtggcatgctcccaaaatagaagagtggaacactgggagaagagaaaagattttttaaaatctatgaagaaactgtatgaagaggaaaagagaggtaaagttagaaaaacaggaaccatttcaga

SEQ ID NO: 832850 - DNA, 590 bp, Homo sapiens
ctctgttgagctagtgtcaaaaagttgattgtccactaattacattagataatcagatccagaagcagctaccagtgataygagttcttgtgtcaacattgaactctgagctttcagtggacttgacagagatgagtgtccaagtgccgtgggaagagcctgtactaagcaggtgtcagcatgtaggcttccaaatgccctctattcctggatgactgggagacctgatttgggctctgccagctgctctcctactttatgtggctcctcctcagtgctcactttctactgctttaattactatgattgttctcctccccagttacacccaattagcactttatttcttttctcacctcctaccctatgcaccacttcatgtgttcaattgagtctatcagttatcctgtgacctggccagtgcgctccctatgtaatagtgaagagactaagactagtttttaattatatagatatgcagtggccgagttgagctttgagctccaatgtcagtgcccattttatggtttctggagggtgcagacccttcctacatatcattgtcacctgtcatgctcagggcatgtggt

SEQ ID NO: 832851 - DNA, 509 bp, Homo sapiens
gaaagtatgtaaaggccttggatggcgattccatggcaacgtatttaaatctagatttcattgaaacccagccttcatgggtactgaaagaaatgtgaagtcttgctgacattcatttcgtggtttccatcaaggtccagtggaacaaatgccataattaggcctcagaagagaggccagagattgactgtgaggtccctccagtcatgcctccaggccttactagactgggacgctcacactgtcgctctctgctttgtagctgtttgtgcaagaacaaaaggacttcagtctcccttgctattaatccaacttcacaagcatgaaatttacagacacacacaagaattcatcattgaaaccttttccccttgtcatgttcagctgctgaaaagtgggcacactcttggaaatgaatgttaataaaaaaagagaaaaaaaaagaatgggcaagctttctgaatcagctccagacaccgwctacccccgcctaaactacaggtcgacat

SEQ ID NO: 832852 - DNA, 662 bp, Homo sapiens
agggatcctgacacataccraggtcttgaggtgaaatcttgctagggaaacataccgggaggaggttgcaccaggagtagcaaggcaccaccgtgctgatacccaggcccaaagtactgcagtcctttgatggcattaacttggtacagccctagcatttcattctggcagaataagaagtaaatcctctctggagtgtgaaaattattccagagcccaaacttgcttctaaaatgttgtagggcaagtatcagtttaaatctacatagatattaagtgtattaaacatagtgtgatttcaatcaacaatacccaaacatacaaaatggagagaaaaaaaacaggcaacagaaagggaccaaaataatttgcggatattgggacaatagtatattatatgctgaatgcattctatgacaagatcaagaattttagcagagaacaagaaactataaaaagaaatcaaacaaatgtcaaatataaagtaattcaaaccaataactcaatggatgaatgtaacggtaaatttgacagttaaatttgctcttgcaagtgatccactggaagtttggtcaggccatgaggcaatttgtaataaataaaaagaataaaatcatttctagacaaatatgatgaacgtgatttgatttaattaagtgtaa

SEQ ID NO: 832853 - DNA, 662 bp, Homo sapiens
agggatcctgacacataccgaggtcttgaggtgaaatcttgctagggaaacataccgggaggaggttgcaccaggagtagcaaggcaccaccgtgytgatacccaggcccaaagtactgcagtcctttgatggcattaacttggtacagccctagcatttcattctggcagaataagaagtaaatcctctctggagtgtgaaaattattccagagcccaaacttgcttctaaaatgttgtagggcaagtatcagtttaaatctacatagatattaagtgtattaaacatagtgtgatttcaatcaacaatacccaaacatacaaaatggagagaaaaaaaacaggcaacagaaagggaccaaaataatttgcggatattgggacaatagtatattatatgctgaatgcattctatgacaagatcaagaattttagcagagaacaagaaactataaaaagaaatcaaacaaatgtcaaatataaagtaattcaaaccaataactcaatggatgaatgtaacggtaaatttgacagttaaatttgctcttgcaagtgatccactggaagtttggtcaggccatgaggcaatttgtaataaataaaaagaataaaatcatttctagacaaatatgatgaacgtgatttgatttaattaagtgtaa

SEQ ID NO: 832854 - DNA, 601 bp, Homo sapiens
ccctaatcccaggctttccccctggaagtttgayaggcttctcctctaagtatgttgtcaatttattttcttacttgcttgattcctggggaaacaagtcctttcaagcctaggcccttctgagacctcagggatgcaaggcaaaaagagcaaagcagctgcacgtgtatgagactgaattggtcacctaaactgtcatttaacttttttgctaagtcattgcttttctctggaaatagtttttcaagatgcaagtatttgatttttaaaacatgtgtggctttaccaaatgcttttcttctaagtcttcttctccacaagtccaagttaggctaattatatccagtaaagtctggtagcccttctctaatagctcctctttccatacccctagcaacactcagtcataatcccactgattcatcagatgacaaatgcaaaaacttggaaaaatatatattcttcataacaaatgctatatattttaaactgaggccctagactttcatcttctccaatattgtgtctcaactgtgtgaattatataatatggcagcaattgtatttcaatctctccagttaggagcagctcagtgcttgc

SEQ ID NO: 832855 - DNA, 601 bp, Homo sapiens
ccctaatcccaggctttccccctggaagtttgacaggcttctcctctaagtatgttgtcaatttattttcttacttgcttgattyctggggaaacaagtcctttcaagcctaggcccttctgagacctcagggatgcaaggcaaaaagagcaaagcagctgcacgtgtatgagactgaattggtcacctaaactgtcatttaacttttttgctaagtcattgcttttctctggaaatagtttttcaagatgcaagtatttgatttttaaaacatgtgtggctttaccaaatgcttttcttctaagtcttcttctccacaagtccaagttaggctaattatatccagtaaagtctggtagcccttctctaatagctcctctttccatacccctagcaacactcagtcataatcccactgattcatcagatgacaaatgcaaaaacttggaaaaatatatattcttcataacaaatgctatatattttaaactgaggccctagactttcatcttctccaatattgtgtctcaactgtgtgaattatataatatggcagcaattgtatttcaatctctccagttaggagcagctcagtgcttgc

SEQ ID NO: 832856 - DNA, 566 bp, Homo sapiens
ggatgttgtgatgactcagtctccactctccctgcccgtcacccttggacagccggcctccatctcctgcaggtctagtcaaagcctcgtatacagtgatggaaacacctacttgaattggtttcagcagaggccaggccaatctccaaggcgcctaatttataaggtttctaaccgggactctggggtcccagacagattcagcggcagtgggtcaggcactgatttcacactgaaaatcagcagggtggaggctgaggatgttggggtttattactgcatgcaaggtacacactggcctcccacagtggtacagccctgaacaaaaacctccctgtggagtggcccagctgcccacatgtggtgcttgtctggggagcagctcagcagggtctcagaatctgtgtaagaggaagatgctggagaaccagggaacaattcacakctgaggactctggactttgagagcccagccacacctcaggcaccactcctttatgccctgccagttgccaccaccttgactgtcataagcagcaggagaatgaggggtccaagtgccctgt

SEQ ID NO: 832857 - DNA, 566 bp, Homo sapiens
ggatgttgtgatgactcagtctccactctccctgcccgtcacccttggacagccggcctccatctcctgcaggtctagtcaaagcctcgtatacagtgatggaaacacctacttgaattggtttcagcagaggccaggccaatctccaaggcgcctaatttataaggtttctaaccgggactctggggtcccagacagattcagcggcagtgggtcaggcactgatttcacactgaaaatcagcagggtggaggctgaggatgttggggtttattactgcatgcaaggtacacactggcctcccacagtggtacagccctgaacaaaaacctccctgtggagtggcccagctgcccacatgtggtgcttgtctggggagcagctcagcagggtctcagaatctgtgtaagaggaagatgctggagaaccagggaacaattcacatctgaggactctggactttgagagcccagycacacctcaggcaccactcctttatgccctgccagttgccaccaccttgactgtcataagcagcaggagaatgaggggtccaagtgccctgt

SEQ ID NO: 832858 - DNA, 620 bp, Homo sapiens
gcataattaaatctgtagttttaaccagacagacaacatatacagtaaaaatttggtttatagcaagtggtgtataagacaaaattaataacaagtctccagagtatatttttacacataccaaaaagtaaggacacacatacaatcaaaattttattcatttcttcatcacaggcaccagtttggagcctggagatgctgcacgttctcctgtgagcagaaaactcaccaggaccctgcacagcccgagggcctcaaacgcagcctccctaggaggctcagcctctcagtgcagcaccagcaactgcagcgcccagagatggagtccacagcagatgggctcaggtgaagatggctggagagcctttgaagaggaggtcatgagtcctcacttacaggcatgggctctacttctgtgcgaacagggccagggcccccaggaagcctcccagagcctcttccttcctcccaacttagggtgttcaggccccacagactctccagggagtggctgccatgtcctctctggagcaaccatgaagttccctgctgccctcatggcttcagggatgctcgttcacgtcactgggasgggatcctggtgggtcgtgacctcacct

SEQ ID NO: 832859 - DNA, 644 bp, Homo sapiens
gcagacatgtgacgctgggctgccccacctgctcttctttgtgcagccatctggtgacaacacttctcagactcagcctgagttttgagggttattgggagattacggaagagggggccatgaaggtgtctctccaccctaagtctctttcctctcatggcaatgtctcttcgaatttagtaaagaaaggagattagtctacctgaggagtctgtgttatggggtaattgaaattcttacagtaaaatggaagccacacattccaagcaggaattgttttaactgagtgaattagaatctaaactatagcctttgaaagcctggcatatgttattcatgaagcagatactagagatggggttctctgatgcaaaaatataaatatttattgatctgtttttaaagatactaagataaaacttaaaaatgttgtcactgtatcaaatatattgcatcatatatctataaaaacagtaaaatttgtgtcatttatgaaaaatgcacatatttgagtgtatataacatacatattaatccatatatatttatttgataacttgttagctataaatactawgtacacatattcatgtgtagataagattatttaaatatgtttatatatatatatataagcaacacat

SEQ ID NO: 832860 - DNA, 217 bp, Homo sapiens
atgtggaaacatggggacaatgcctctgggctattccatctgaggggagagagctggggtatgttatcatactcctgttatcatctactgatagtgtctctcttagtctgttgtgtcttggtataacagaatgcctgaaattgtaaytgataaagagcagacaattattctctcacacttctggaggatgggaagtctaagatcaaggaactgtcag

SEQ ID NO: 832861 - DNA, 628 bp, Homo sapiens
tatcaacgtatttatattttatatacatttatatacttatcatattgggtatccaaatgtcccaatgatcttataaacaatgctctatagatctcaaktaaaaaatgtgattaaatgataaggcaatgagtttcataggtcataacatttgggggtatttgatttggctacttactaactagaactcttatattctactcttgttatgaaacaattgacaaataagaccaaaaaaaaaggaatgagataaacaaaagtcaaaatgtcacccttattaagcagataatggagaagatgatttagataattttgcaattctaaaccaagacttagacagattgctgcactgcatccaggcataactggactaaaggcctttattcacatgcaggtaggaaagagagtgcgggtcacacacatcagactttccccctaaagacaagagttttatgaaattctttcctgtccccagggtagctgtgagtgatagggtgagagagcattgttattgccagtggaactcaatgaatggatgaaaacgttggaggttcccaagagtgagaagcagctttttattcttttaatccactgatttaatcactaaatctttgcttaactaagaatgaga

SEQ ID NO: 832862 - DNA, 494 bp, Homo sapiens
actgggcagttatatgccaagattgttcatgacaatgtctggagacattttttgtttgtcaaaatgatgtagagaacttgctcctgacctctggtgggtggaggccagagatgcttctatacattctacaatatataagacccctccaccattcccataccatcaccaggagaaaaaatatctagcccaaaaatcaaaggctcttgctgagcttgaggaactctctgtaagatgataatcatgtcagatctttataccatctcctagggaagcaacaaagttaactttttccctacagcattaaactagatcctcaaaggatttctgcttccaatgtagtatgtgagaaggtatagaaaaccttcagtcataacaccaagtaaaatatgggtrgtataaacatcatacatatttttgtaacctttgaataattatggatgcaagaaagtcttgagaaaataatttccagagaatagagtcctgcacagctgagc

SEQ ID NO: 832863 - DNA, 536 bp, Homo sapiens
ctgctggcaagtggtccatggtaaagagttttctacattatgtataaactcgaggaattatgacttaaagtatgcaatgaatctttaattgggrgaaatcatttgtacacgataaaagtacgatgggaaacccatgtgtcctttttaattatctataacgaatgctgattgtgagccatttgaaaagaatatgttgcactaaatcactatgccataatcaagttagctcagcaacgtatgcacatacatttgttatagaagtcaacaggttatttctattctcagtcatctttgactgcggtctaattgttagctggagttacatggaaattaaactaggttgattctttcctggaagccaataaaatcactctatctcaatgatttcacaagtgagatctaacttatttttaattgtgaattgaagttttcttagatttttctcaatagtagagagagaaggtcttgataagacagagaaagtgaaaaaataccccccagattgtggaaaaagagttaaaaaaaatatatatatg

SEQ ID NO: 832864 - DNA, 630 bp, Homo sapiens
tataccagcctattatcagatacatattttgtgaatattttctccctttctgtggtttcccttttatttagcagagtattttaactgtgatcaagtccagtgtgttaatttttccttttatggcttgtgcaatttgtgtgcaatataaagcattttttctaacccaaatttacaaagactttctcctttgttttcttctataaggtttacagatttttttattgttgcaaaatgcacataatattaaaattaccattttaaccactttaaagtatgtaattcagtgatattcactaccttcacaatattgcaaaaccaacatcactatctacttcaaaaacattttcatggccaggcacagtggctcacacctgtaacaccagcactttgggaggccaaggtgggaggatcgcttgagccgggaagttggagaccaacctgggcaacctcgtgggactctgtctctacaaaaaattaaaaataaaaaattagctggsgggtggtggtgtccactagtagtcccaggtactaggggggctgaggtgggagaatcatttgagcccaggaggatgaggctgcagtgagtcatgatcaccctgctgcactccagcctgggtgacagagcaagac

SEQ ID NO: 832865 - DNA, 630 bp, Homo sapiens
tctcagttcttcctgtttccactgtttccaaacacacagtgttgtcgggattatgagcraatttaagcctatggtttgatggtgatgaaatgaagcaggattttacaatttgttcataattggtatacacagtgaacacttaaaaaatcatgctttgccatccttttctttttgcccatgaggaatagtttcgaaagagttcttaagaacttgctgtgagttacatgtctagtgagtggcagggcaggggtgctaacctgggtctgtgggacactccggcgtccagctttagtccactgcacgtagtgtctttctgcaacatgcagatctgaacagagggtggtatttgcacatatccacgtaagtggggacatttgaacagttaactgtttccccagtgagttctcttagcaaccaaccttccagtgtttggtgtttatagatggaaaatgaagccatagccccatgacagagcagcaggagagcaacagtccccaaagaataacttctcatttctgttaataaggagcctaatgggtggacgtttagtcagcatgcattttctctctttggttgcattaagagctgtggtctctatttctgcatttgttttctctaaatgagcaactg

SEQ ID NO: 832866 - DNA, 494 bp, Homo sapiens
caatttcagggaagtctgaatggtaggagccaggttttcacattctggtctttaatgcatagtggccattcattccattaggcttcttatgtcatgacataatttcatctctgaatgttggaccatttggtggacttggacattgtcagttcatcaaacagttttgaatttgtggaaagttctcattctgagattctgaacattcaaagattaatccgatgtggcaggctcattagtgccaccacctgcctgcatggtttgcaagataacatcacttcattgtttgatttgagctaaagaagattaatgatctgaacaatgataatttatcaatattcttctatgaaattcaaccaaaaccatagatctcgtttcgtgatgcagagtctaaaatagtcaatggactatttctagcccaacagtacactgtagactagartaatatgctgatttagtgaaacagaaacctggatccaaaacccacaaagtactct

SEQ ID NO: 832867 - DNA, 165 bp, Homo sapiens
caactctatgtctctgatactattttctagaaatgtgtgtgtatgcgtgtgtgtatgtgtctgtgtatgtttgtttggtaaatccaaatcacacaatcaacgtaaatctttcaggctaagttttgccccagttatttttrtgctgtgctttcaaaaaggtcaaaa

SEQ ID NO: 832868 - DNA, 601 bp, Homo sapiens
gggataggaggatgacagtgagggaaggtaggagaaggtggaggggaaaactggacttgatgtcgtccttctccttccactgacctcaaccccaactggctactggttctgtgctttagactatcaaagattgttaaccatattcctttaataaataagcatattaataatggaagtagacatttgggattctggatttaaatctttttacactcagattttggtttctaatttttccctaaaaaaaccccagagttccttggcagaatgactgattctaagtctggggcaggaaatacacaagatgagcctggagcctctagttataccagaaagaaagacaattagagtcttttaaatggactcacttgcccacttaacagggctccaactacaaagagtggggacaactttattgaaacacaccaaaaacagaatgaatctatgatttcctcatgatatacacacacacaaaaatcaccattgcyacctcctcactggtcacccttgaagaataaaagaaaatcaactcattccgaaaactgttacataaagggaaagaattaagcatttattgttcttttctgtatgaaccaatagt

SEQ ID NO: 832869 - DNA, 532 bp, Homo sapiens
tctgggcacagtgctaagcttttctgtgtattacctgatttatttttacaacaaccctgtrgattgtgtattataggcatactccattttattttactgtactttgcagacattgtattttttagaaagtgaaggtctgtggcaaccctgcatcaagaaactctattggtgccattttctcagcagcatgggctcatttcatgtctctgtgtcatgttttgataattctaacattttaaacttttttcattattattatagctgttacagtgatctgtggtcagtgatctttgatgttactagtctaattgctttacagcaccacaaactgtgcccatgtaagacggtgaacttaatccataaaaattgtgtgtgttctgaccactccactgaccagctgctcccccatctctctccctttccttgggactctccatttcctaaacacaacaatattgaaattaggccaattaatatccctacaatggtctgtaattgctcaagtgaaaggaaaaattgtgtatctctcact

SEQ ID NO: 832870 - DNA, 549 bp, Homo sapiens
tatatattcataatgggtatatcgtcaaaggaattagttgttaattttggttgttatctttgtcagatatggtataagataatgttcacccaggaaatgaaattccaaacttttgaaatatcttcatagttagaagttatttaaaagcataggaattatctcttaacagtttgaaaacaatcaacataaaaagatcttcagcattatttttttcccttaacggtttgaaaactttcccaacttttttggtcattagtttatttagttatatcttgacacaattttgtaattattagcacggaattttaactagtagtttcttaaattttttaaattttttctacatatttagttatatctcatcctgattcctacattaatgtgccttttcctttattatattttccaagtcttaacaaatatttggttttctcaaaatcctagattttggaactatttactaactactttttactattacagaatttattaatttsttttatttgtttaaaattaattccctccacctgctttctttgggactatttc

SEQ ID NO: 832871 - DNA, 629 bp, Homo sapiens
tttgtgaatcttattgttcatcattatacagtaacaagtggtttgctgataaactggctctgaagaaaataattgaaaagccctgatttgtagcatttgcaacccttgtggtrtaaatgcttccactgtggcaaatttccaagttactgatacaaggtcattgcactcagagttggggcaagatggatacaactaactggccctcaggagcaagctccaacataccactgatagtaagtttcttttctttttttcccccgagactgagtctcactctgtcacccaggctggagtgcagtggtgtgatcttggctcactgaaacctccgcctcctgggttcaagcaattctcctacctcagcctcacgagtagctgggattataggcacgtaccaccatgcttggctaatttttgtatttttagtagagacggggtttcaccatgttggccaggctggtctcaaacccttgacctcaaatgattcacccacctcagcctcccaaagtgctaagattacgggagtgagtcaccatgcctggcctgaaagtaagtttcttatgctttctgatctctgcctttcactctgttttaatactaaagatcatttgtttttgtgtttgtttacatcc

SEQ ID NO: 832872 - DNA, 604 bp, Homo sapiens
atatttaattcctactccctatcattgcatcatatactacagagttatcacatttagggtgcatcagaaacacttggaaggcttgtttacctacagattgacagcctctacacccagatttctgatttttgcatttctaacaagttccaaggtgactctgctggtccaggacaacacttgaagaaccattactctataaaatccctgtccagttttctgaaactctgaaacaatgtaggacatggcatgccatgatttccagcacacacttctctctagaacacacttgctctctgtatttccctacagggctttccctatgaggtctttcaaatacaatgtgcctcctccacaatctctcattctgtttcctaagaagttattggcagggcagctctgacttcaactagttgtaaaatgatgaagtgtggggagcagtaggagaagagaagatatcaactcccctagtatctacattttaggttggcacttatatacagttaagctccagaggcaaggggaagggaagagcattaagtacgttcctatcattttcccgattatstctgtttcatgtgaccaagacaatgtctgtctttttctg

SEQ ID NO: 832873 - DNA, 554 bp, Homo sapiens
cccgattatgtctgtttcatgtgaccaagacaatgtctgtctttttctgtgcagtccttttttatggtcagtatmgcttcacttcaaacgttggccgttagttgtctacttttctacttttaatgtgtgtaaatatttcagtagatctttggtgagagctacatcagagcctattagccaggcactgttttgaacaaagacaccattttacaccaaaattctttttgcacaacttggccaatatagaaagctcagggatcctgacttaactttccagccatcccatttctgactttatgacattaataaggaacacaaagtcataagcttcatgcaactgaatattcctataactaagtgcaaactgccactaatttcatttctgaagctacttaaatacaaaccttatggaaaagggagtcagatgttcctatgttcctacagaaccaggctctcatatattatacaggacgtgactgactacaaataatgtctcctcttgcattttagacctccaacatcacaagcaccatcaccacgatctctaccagcag

SEQ ID NO: 832874 - DNA, 371 bp, Homo sapiens
aatgggcctccttgccagataacagacacattttgttccagataagagtagcgttttaamaactgccctcagtgcctaaccaccacaggcctggtaggtgaacattggggtgggcaaggggagcatctcagttcctcctcaaacacagctccaaactgtgccctagaacaagaccaatcctgctccagttcccatcacgagcagtgtggggacaatgtttccaggatcctttgctttgcttgtgataagaaagtccagctgaaaagtctgtgaaggtgagaaacggaaggtgaggtcctatccatgcagccattatctgaaccattctgcgaacttcccctctctagagaacactcccctcctcaatccca

SEQ ID NO: 832875 - DNA, 511 bp, Homo sapiens
tgcagtggtgtgatctcggctcactgcagcctctgcctcccaggttccagtgattaccctgcttcagcctcttgagtagmtgggattacaggcacccaccaccacacctggctaatttctgtattttcagtagatacggggtttcaccatattggccaggctggtctcaaactcctgacctcagatgatctgccctcctgggcctcccaaagtgctaggattacaggcatgagtcactgtgcccagccatgactgccatttttaaaatgacctgctataatgttatcccttgcattttatcaatcaaataattttaatgtgagttttgttgtttttttttttccagacagcatcttgctctgtcacccaggctggagtactgtggcatgataatggctcactgcagccttgatgtcccaagctcaagcaatcttcccacttcagcctcccaagcagctgggactacaagcatgtactaccgcatccagctaatgtttgtattttgtgtaga

SEQ ID NO: 832876 - DNA, 660 bp, Homo sapiens
  misc_feature 411: n = A,T,C or G
gcttcacatgccccacaactgccctaggagttgagtactctatcaccatccctgtcttgtagatcaggaagctgagagtgagagggtgtgatttgcccgtggttttggagctcagagagaggaaaatcctgagctcagagagactcagtcctcgcagcagctctgagagaggaactgctcgccccatttcacagacaagggcactaaggccagcagaggggcggcggcccgtcctggtcacccagggcacctccagcacttcccctcccatggggaatggctgccggcgtaggtgcccctcaccttgcagctctggggttagcatccagggctggagggctcggaagaacccagtcacccagcacatgggattcgggcacagcaggagcgggaggtgcaggtgcagccagncctgaggtgggtttaggaactcaggactgggtccagcctgtgacagggggtcatgctggggtttcaagccggggcagctcatggtcatgtttggatttgggagctgcctggcggtcccatggtgagtggatcagagggaaagagacccacggctgagcagkcaggaggaggctgcaggtggccagggggagagggaaggggtgaggacagaggggtgagcagggatcccacagacgtgaccagcagagt

SEQ ID NO: 832877 - DNA, 660 bp, Homo sapiens
  misc_feature 411: n = A,T,C or G
gcttcacatgccccacaactgccctaggagttgagtactctatcaccatccctgtcttgtagatcaggaagctgagagtgagagggtgtgatttgcccgtggttttggagctcagagagaggaaaatcctgagctcagagagactcagtcctcgcagcagctctgagagaggaactgctcgccccatttcacagacaagggcactaaggccagcagaggggcggcggcccgtcctggtcacccagggcacctccagcacttcccctcccatggggaatggctgccggcgtaggtgcccctcaccttgcagctctggggttagcatccagggctggagggctcggaagaacccagtcacccagcacatgggattcgggcacagcaggagcgggaggtgcaggtgcagccagncctgaggtgggtttaggaactcaggactgggtccagcctgtgacagggggtcatgctggggtttcaagccggggcagctcatggtcatgtttggatttgggagctgcctggcggtcccatggtgagtggatcagagggaaagagacccacggctgagcaggcaggaggmggctgcaggtggccagggggagagggaaggggtgaggacagaggggtgagcagggatcccacagacgtgaccagcagagt

SEQ ID NO: 832878 - DNA, 690 bp, Homo sapiens
ctgtagcccgggcctgagaacatgcctggggaaaagctgccccggccctgatgcatcccattggagggtgacagtggaggacacctggggaggacagattcygaggcaaggaaccccaagaggaattcgccaaggggaggagttggggcacaagtgcaacccgttctcagtgagaggtgtgatggggtgagtcccggctcgggtgccctggccacaggggccgagaggtcaacctgcatgaagaccccagccaaagggtccccatcatgggaaccgtgtgagtcccccactcaccacagaaagaggggttctcggcactcctctcgcattgctggtttctccccttgggaaaggaggtctctgggtttgcggggagggacttttgtgtgtccctgcccagaggctgtgaggggcccttcgtgacttgacacagattcctgggctatcacagagccagctcctggcggacagccacagcgccgcacctcccagacatggaggccagctcgccatccatgtgcccaccttccatggtcagggacctcagcagccaccctagagtgaaggaaaggggcaggggacagccggagtgggcgggcctcttcagctgttcctaggtgccaatcacagtgcaaatactttttaaaattattttttcaaaatcccccaaaagcaggggttcttagcatc

SEQ ID NO: 832879 - DNA, 566 bp, Homo sapiens
gaaatgtttgattcaagatctggatcaaggaaagtaaaaagtaattggggattttttttggtccagaaaacaaggaagtgctcaatggaggtcacattaaaaggacacaagaaagtatgctccctggccaaatttgggacaatttaagtattctaaaaaatagtgatggtaatgggtaatcacaattcagttaaaaattacaaaaacaagttcgtataaatgttaataaagggtgagagtgggggacaggaagacagctcttctttacaaaagaatgcctgctgatacacagagaagaaatgacataattagaaagtcaccgttttgcaaccccagtggaacaattaatttgggcaaaaatcatcactggatgctaaaaccattgggtgaaacatgttgggcactacatgcacacggtcgtctcagagtatcatcttgacacttcgagtatcatttcacagatcatacttattacaaagtagggggaaratacctttataatgtagagatctggaggccaacaccttgacccagtgatcaaggttggcatcaccagcagcaggaca

SEQ ID NO: 832880 - DNA, 555 bp, Homo sapiens
gggaagttctcctggataatatcctgcagagtgttttccaacttggttccattctccccgtcactttcaggtacaccagtgagacgtagatttggtcttttcatatagtgccatatttcttggaggctttgttcatttctttttattctttgttctctaaacttctcttcttgcttcatttcattcatttgatcttccatcactgataccctttcttccaattgatcgaatcggctactgaggcttgtgcattcgtcacgtagtttttgtgccatggttttcagctccatcaggtcatttaaggacttctctgcattggttattctagttagccattcgtctaatcttttttcaaggttcttaacttctttgccatgggtttgaacttcctcctttagctcggggaagtttgatcatctgaagcgttctyctctcaactcgtcgaagtcattctctgtccagctgtgttctgttgctggtgaggagctgcattcctttggaggaagagaggcgctctgatttttagaattttcagcttttctgctgttttttccc

SEQ ID NO: 832881 - DNA, 555 bp, Homo sapiens
gggaagttctcctggataatatcctgcagagtgttttccaacttggttccattctccccgtcactttcaggtacaccagtgagacgtagatttggtcttttcatatagtgccatatttcttggaggctttgttcatttctttttattctttgttctctaaacttctcttcttgcttcatttcattcatttgatcttccatcactgataccctttcttccaattgatcgaatcggctactgaggcttgtgcattcgtcacgtagtttttgtgccatggttttcagctccatcaggtcatttaaggacttctctgcattggttattctagttagccattcgtctaatcttttttcaaggttcttaacttctttgccatgggtttgaacttcctcctttagctcggggaagtttgatcatctgaagcgttcttctctcaactcgtygaagtcattctctgtccagctgtgttctgttgctggtgaggagctgcattcctttggaggaagagaggcgctctgatttttagaattttcagcttttctgctgttttttccc

SEQ ID NO: 832882 - DNA, 623 bp, Homo sapiens
ccgatctgtggaaaattgtcttccatgaaaccagtctctgctgccctaaaggttggggaccgctgccttacagcacgttttctacttatcaggggctaaaagttggttggatcaatatacctgctacattatagcaaaaagaaggagtgctgtgatcctggattggcaaggcaatttaaataaccacagcctagggcatctcttggtaacattctttcctagttttttgtttgtgtttgtttgagaggaacgggactttactggaaggcttggactccatatacacttacgagtgggataatcacatgggaaaacctcatgcaagaaagtgtcagcacattcaactctgcctcgatttcctctttctttctctctcttctcattttcctagcccagagttttcacttcactggggataggatcttcaggaaaggatatcagggagggatggtgagagagaggatgtgagtgcacagaagactatgtgtgtgttctagwgtaaataaagcagagaagagagtttatgaagctcagagcaattgcatattttaatcttgcagaagaaaatactaagccccatcagtctcagacggatctcactacgtgtctgagtcctagctgca

SEQ ID NO: 832883 - DNA, 556 bp, Homo sapiens
catttgattattggcaggattcagtttcttgtggcctgttggactagagacctcatttacttcctgggtattgaccagcggctgccctcatttcctgycctaacacggcagcctgcgtcaccaaaacgtgcaagttgtgaaggcaatagagagtctgttagcaagatgggtattgacagtttatgcaacacaactatggaagtgacatcacgtaatctttgctgcattccattggttagaagtaagtcacaggcctgcccatgctcagggtaggggataagacaggggtgagaacactaggagggagagtaattgggggccattttagagtttgtccaccagtaataatttggtctcacatagctgtgggtggatggggttgagaggctgtgctttaccttaaagtctgcaggatttgatctgtgccgtgtatttgtcatcctgctcagagtacgcaggttagtggggaatgtgcttctcacagtattggcagaggcacaagacagcaagctgaactacatgcgtgtgtttctgatatctacttgcatcacattca

SEQ ID NO: 832884 - DNA, 503 bp, Homo sapiens
ccaggaatgttcagactattgaagaatctcaacctttccctgagggtaggagtagtgtctggtatagcttagcatcatctctgataggcaataataagagtaaggccatctttgctggttgctgattctttctgttctgtaatttctgtttgataagatcaaatgggctcaacgtactgtgtaggccagacagagagagagtccaaatctggtagattttaggataagacagtgggccttgcttatatcactgagttctctgggctttgatagaatttgatagaatttattggccttcaccgtgttcctaggtcaggtggttttctgtcctcttgttccaggtataatggcggggcactaagttactccagcacttagtgacttgtgctcatggattctgtgggtcaggagatcagatagggtakacccatttggggacagcttgtctgtgctctgggtggttggggatcctcatttgggaagactcaaaagttggtggtaac

SEQ ID NO: 832885 - DNA, 507 bp, Homo sapiens
gaccctcacaaaggtgacctacattctagttttaactgggattctcctggcttgggtagtgaaagtccagctttttagtaatcccccaatcctgggcacactgcaatggttggtccccctaacctggacyccttcaattatcccattctgacatattagtttggtgcaaaagtaattgctgcttttgccattacttgtaatgaaagtaatgccattacttttaaagaagccatgaataatgaaagctatagcttttctccacgaaagagaaaaatggcaagagcagcaattacttttgcactaacctaataatagacctttttctttttctcatgaatggaaaaaatttaggataggtcaaaattaagcccagggctttcatatgtgaacaagtttatgtctatgtctctggagagaacttgcagatatgggcataaatttttctcaaagatttcttaatacttctcatttccccatgctcatctatgtgttgtccttctgaaaatt

SEQ ID NO: 832886 - DNA, 549 bp, Homo sapiens
ttataaggtgcagcttaacattgggtagtcatggagataaagatgacagtagacactggggcctaatagaagagtgggcaagggttgaaaaamtaaatattaggtactatcttcagtacctgagtgtggaattattcataccccaaacctcagcatcatgcaatatacccatgtaataaacctgcacatgtacccctgaatctaaaagttgaaaaaagaaaacatatgtgtacacacatacaaatatacataagcatatatgcatgtataatttataattataaataataaaacaagaagtctgaataatttcatcaactgcaaaattcactcataagcagagaaacagaaacaaaacctaagatcccataggtttgttgacatccttttcctttttgaactaagccatggtttgcaaatctctcataagtacggtgacagtggtgacaaaaattgtctatgtctataaagccctgtgaccatgtaaagcctttcttgaacagtgtaggctggcaaggtggaatgacattaaaagtctaaaggtatgct

SEQ ID NO: 832887 - DNA, 571 bp, Homo sapiens
caagtaaacctttctaggcctcacttttcacaattataaaaatgaatgaaagtaaaccacacctttctcatartgtgtatgatatgaataaggcctatgaagtatatgccatagatacactgttaacataggttgggtgggggctgtaggactgtgctggggctctgacctggtggcatcctcagctgcacccagcccaaaggcctattgtggaaagatgactttctctctctcttcctcctccctctccttctctctcttacccttgcacttttttgttggatccttccctctcctcccaccctcacatctaaattttctttccttccctctttcctgaattacagtagatctaagtaccttttcacttaataacaggccccaccaccactggtttccttaaatctcacctttgttaagtatttggttttgatttttattttttctttgttcttttttttgtttgtttgttttgttttgtggtaagaacacttaagctaagatctacacacttagcaaagtttcaagtgtataatcctggcctatgttactttccctgtgttacctaaag

SEQ ID NO: 832888 - DNA, 536 bp, Homo sapiens
gctgtcccacttctggatatatatccaaaggatttgcaatcagtatgtcgaagagatatttgcactatggtcatttcagcattacagtaaccaagatatggaaacaatctaagtgtttgttaaccaatggacggataaacaaaaatgtagtatatatacacaatggaatactatacagcatttacaaagaaggaatttcagtcatttgcaacaacatagatgaacctggaggacgctgtgttatgtgaaagaagccagactcatggaaaacaaatcatctcacttttatgtggaatcttaaaaagttgaacccatagaaggaaagagtagaatgatgactaggggaagtggtggaaggggaaaggagaactgttagttaaagggtgcagagtttcagttagacaagaggaataagttwtagtgatctattgcatagcatggtgaccatagttaatgatgtattgtctacctcaaaattgctaaaagaatagattttaaatgttttcaccacaaaaaacaataggtaaaatggtgaa

SEQ ID NO: 832889 - DNA, 634 bp, Homo sapiens
ggtctcttaagaataataaatattattcagatatgtcggttttgttcagtgtagtttttgcagggatctggaaactccatggacactttatgttttcaatgagtcaggcaataacagaataactgaatgaatatgtgggtaaatggtgacaatgtgtcatgaaacaaggattattatgatccgattttgtgcattgcccattaaaacatggaataaaaagagaatggcaataaatctcattctcttttgattgcccccaactaaagctgatcttcatttctgtcatttattcctcatttttagcctccctttcttttccagattaggccctgaaccattgttttgctatatcttaacgcatggtcttcagaataatgtgatataatcaggccatattccttcaatttattgtttcttcttcataaagtagatgactgagagttgttttctttgagatgtttttaaatgagcaagtcatggaactcagatggctttatgcttagttttttgttaaaccacagagatttaraagatcgtttgttactggatcataacagcctattctgattgatacagacatataatgaactactcaataacaatagtaggagccagaaggactgaaatggtattt

SEQ ID NO: 832890 - DNA, 585 bp, Homo sapiens
tgttgcccaggctagtcttgaactcctgagctcaagcaatctgcccaccttcacttcccaaagtgctagaattacaggcgtgagccaccgcactcactggccagcattctttaaagtacagtaccatattccagaagcctccacatgagtcatctcggatgggaatgacctctccggatgaccattagcaactgaactaagcagagaattacattatgcagcctgattacagtgacattattacaccgacaagctctctgatgggttaagtatctactaatctattttttgagcagatcatcaataaggaccgagcaaatgttattatactgcaacgacatccatcactcataactacaggttaaaaatctactcaaacaggaagaaaaacattagcattagatagtcccagggtaacagactttcaattccaaagataaatttgtcttggcagcaactgttggtatccrtctggatatctggaggaaatggctaatctctctgatgcccaatttcaagtattttttcctttagctggaatacttctgctggatatctgaaatcaaaatgtataaggcacatgat

SEQ ID NO: 832891 - DNA, 646 bp, Homo sapiens
ctacctgataactcccagaccgctcatctgaagtccagatagagacaaccaactatctaaaggtttraaggaaacttcaaatgttgcatgtccaaaatcaaacccctgacactcatctaccaaaatgtgattctgccaagaatcttacctatcctagacagtggcatctcctcccacctggtttctgtggccataaaggcttcattcatctgggtccttttatatcttattctttcttatggcagaagctaagtccttacagtggactgcaaggttctaggatttgactctgatcccctctgtaagtcacctctaactatttttcccttgctctatttgtcccaactctatagctcttgatttgaacttctaggaatgttttgacctcagggccatacttatttctccttcctatatcctactgacacttcataactggtatttctgctttatttttcttcttatttttaacacattctggtgtagtttgttttaataatatatttttctccctccacccactagaatgtaaactttataaaataagaattttaacattttgtttttgtcatttttttcagtgaattatctcctgcacttggaatagtctctgtagaaagctttcatgccatatttcttaaattaa

SEQ ID NO: 832892 - DNA, 638 bp, Homo sapiens
gggggataataatagtacatatctcatagtgtattagtctgctctcacccttctataaaggtactacatgagattgggtaatttataaaggaaagaggtttaattgactcccagttccacatggctggggaggcttcaggaaacttacaatcatggccaaatgttaagcaggtaccttcttcacaagggagcaggagagagaagagaaagctaagggggaagagcccctgtaaaacctttagatctcacaagaagtcactcactatcatgagaagagcatgggggaaactccccctcacgatccaatcacctcccttcctccacacatggggattacagatccctcccttgacatgtgagaattacaatttgagatgagatttgagtggggacagagagccaaaccatataagtgtcttagtgaaattaaatgctaaaatctacataaaacatcaatcctgtaaattacatggtatttcttccattatgcgaaaagaaaatttgagaaaaagttatataagttattcataacaatatagctagtaagtggtattgctgagaataaaatccatgttaattaactccaaatccagtacacttaattwccataatatattgcccatctcaggcaaactaaa

SEQ ID NO: 832893 - DNA, 610 bp, Homo sapiens
ctaccaaaactgctatcgcgtgccataaatcttcagaacagcttttaactaaatacaaaatgaatattggaaaacagggacgcatacttatacatcaataaatttaaggttttagaagatatataaatggcattaatttttcaggaattttttatgtcttatcctttgactctgaaactatttagtgagtttgatggcacgataaaaagtgaaaattttaacactcacagataaatgtgaactttaattactataacacagcagctaacatgaagtctacctcaattcagataaagaaatgactccatttaaaaataaatccaaccagtggcatttactgtgtttatctggtgacaaacattagcattgctgagtttggacaacagtaatatttttaaaagtaaattaaaaaaatatttttttcggtaaatgaggtaattacactcctttatcttgccaatatatttcacatgggtacttcatccacaccmaaaccaaaaatcacttaactttgtttcaacaagactggacttgatcctgaatggcctctctgcaaagggatcagaatcaacttgcacataacagtctagctaagcagaatttcaagaat

SEQ ID NO: 832894 - DNA, 641 bp, Homo sapiens
atgtgtaagtataaatagatagatttattataaggaatttggctcatgtgattatggaggtgggccaatggttttgtttcagtctgagtccaatggcctgagaaccaggagcactgatgttgtcattcctgtctgagctggcgggctcaagacctaggaatggctgatgtttcactttaagtccaaatacatggaaaacctgatatctcagctgaaaggcagccaggcaggaaagaattctctctgactgggggagaatcagcctttgtgtttgaggcccacccacattagggaagacagtctgctttactcagtctactgatttgaatgctaatctcatccagaaacacccttatagaaatactcaaaataatatttgaccaaatatctgggctccccatggcccagtcaggagaatacataacattaaacatcacaatggcatatttatccattctcctgttgatgggcatttgcttatttccagggttttgctgctataacattccagtacytgaatcctagaaaatatctaggatcacaattgctttagcagaaggtatgtgaacattaaacttaataagctaatggcagtatttcagcattttctactttgattacttttatattggccatcattt

SEQ ID NO: 832895 - DNA, 661 bp, Homo sapiens
tgttgttcaggcgggtcttgaactcctgggctcaagcaatccacccccctcagactcccaatgtgttaggatacaggacttgagccatcacgcccagctgcttgaaatactggatacaatccctgagatccattttctaatagcaccatgtacccccacttctaaataatgtcataataaaaactcttccctgacaaaattttcaatgatctaaatgttaaacacatagtagtggttactgttgagttttaatgctatataggcttcaaatcagcacatattaattcatttacctatataacaaagaaataaattgagacggagtctcgctctgtcgcccaggctggagtgcagtggcgcaatctcagctcactgcaacctccacttcccaggtttaagcgattctcctgcctcagcctccccagtagctgagattacacgcacgtgccaccacacccagctatttttgtatttttatagagacggggtttcaccgtgttagccaggatggtcttaatctcctgaccttgtgatccgcctgcctcagcctcccaaagtgctgggattataggcatgagccmccgcgcccggccaaattatttaccttttaataaatatgtcttatatggaagttaatccagaaactccctggttatgtgaa

SEQ ID NO: 832896 - DNA, 550 bp, Homo sapiens
atgggtgaaataagaacctagttcaccccgtcacaggctgaataatgaccacccaaagatttcaggtcmtaatcagtggaacctgtaaatgttaccatataagtgaaagaagaccttgacagtgtattaaggatcttgacctagcagagtatcctggactattcaggtgtccattaatccaatcacaggtgtccttgtaatagagagacagagggaggtttgacacacacagaagaggggaaggcaatgtgaaaatgggggcagagattggagtgatgtggccacaagccaaggaacaccagctgccaccagaaactgggagaggcaaggaacagattcttgcctagtgcctccagagggagcttagccttgtgaacactgattttggcttagtgaaactgatttgggacttctggcctccagatttgtgggagaacaaatttctgtcactttaagccaccaaatttgtgttaatttgttacatcagccacaagaaatgaatataacacctcatcaaatagttttcctaaaaccataaagaatccttctc

SEQ ID NO: 832897 - DNA, 576 bp, Homo sapiens
actggttagagtcacatgaccaamcctgagctaatcactgtgacttgggaaatggaacactctcattgatggagctgggtcacatatacacacccagagcctgggaggagcgtctatcttacctgaacaatggaatgctattttcagaagaaaggagaagcctggacaggccaaaagaacagactgggtcattttagcacatttcagtttcttactacctgaaagatcctgcctaacataactaccattcagaaaagcaaatcctcttttttctatcatgtactgtcatctagtcctatgggcacaatttgaatactttcagggacagcttactaaacctccaggtgggctgcctgatatgctgttgaacagcccacaccgtagcaagtccctcattcatatgcatccacctgcctgctgccaattctccttggtcctgttctgtcctatgcaacaacactcccaaatgtcctccctcctccacatgacagccttttgaattttatgacagttaagaattaagaatgattacagggaaattaaaatcgggcaatcatttgctggaaagaacatatt

SEQ ID NO: 832898 - DNA, 519 bp, Homo sapiens
ttaatgattttttccttttttagtttattagttataactctattttgttattttagtcattgctttagggtgtttaatatatagatggttcttaacttatgaagatttgacttatgattttttgatgacacaaaaacaatacaaattcagtagaaaccatactttgagtacccaccatacaaccattctgtttttcactttcagcatacagtatttaatagattatgagatattcaatgatttaatagattacaagatacttattatacaataggtcttgtgttagattattttgcccaactctaggcaaatgtaagggttctgagcatgtttaaagtgggtgtattagtctgttttcacactgctataaagaactgcccgaggctgggtaatttataaggaaagaggtttaatgagctcacagttctacatggttggggaggcctcagraagcttacaatcatggcaaaaggggaagcaggtgcatcttacatggtggcagatgagagagagtgaagg

SEQ ID NO: 832899 - DNA, 600 bp, Homo sapiens
ccaacatgttcgttctcctgactccctctccacagagacaaccacttttgackctttaacctgttccttctagcattttatgctttcaaataatatgtgaatactgctctcctttgattcatcaatttagacataatgtattgagtttctaatatagcagatgaggatttaactcccttatattaccatcctatccgcttctcctcacttattctcctggtttaattatgctccaaattttggttaagtatatactcaacgttaacattactatgcctatccaagttttattcacagctgaaaactgtaatatctgggtttccaaggatcaggccctgagacaaggattcaagcacaagcagttcatttgggaggcacaggaaacaccagtaggggaggaaggaagtgataagcggaagaaaaggcagtaatcgagggtgcgttatcaagaagtaaccactatgggtaattggagcttaattctgtgagggaaactctgggaactggtgtaaaactcataattcagtgccatcccacctgaaaggtgagggagctggggtatttgtataccagtttctatcagccacttactgaaggctg

SEQ ID NO: 832900 - DNA, 656 bp, Homo sapiens
ctacttgtaaaggcctctaaagaaatattgtataatctttcacagcagtcatgaaaaaatttggctcttctttttgagaatcagaatcattcattmagctctaaagtcctcagaggaagtgataaggtgagggttttcagaattgttgtctattgcctggactccaacagtcaagtcagggagaaaaatgaatataaaagattaaaaaacaagaaaccaagggcacagcaacaagacaaaggaggcacgtgtggcatacagaggactcccacttccttctgatacctggggagggagattctctcccattctcatcccagcacctgttcatcagatctggcctgactgttctactacgaaaccatccaaggtaaaaaaaaatacttcccaatcacaaaattcctctttgcaattgactcggcttctttaaagctgcatcggaaacttcttgtcctgtcctctgttgacgtgaaaatgagctaactataattttctgcctcataaggttgctggtacttgaaaaccgttactacaactcagcttcctaatttccagaacgataccagcagttttctcctagatttcattttctgactcccaactgtaactataactctcattcaaaccctctatacaatgtctatctcttctttcag

SEQ ID NO: 832901 - DNA, 601 bp, Homo sapiens
acctcatcttaatgtgttttgctttattgcacttcacacatactgcattttttataaactgaaaagttgtgaacaaccctgcatggagcaagtcaactggtgccatttttccaatagcatacactcacttcatgtctctgtgtcatattttggtaattctcacaacattttaaacttttcactattattacatctgttatggtgatctatcatcagtgatctttgatgttactactgtcattgttttgggtgccacaatctgtacccatataagatggcaaatttaattgttaaatgttgtgtgtgttctcagtgctctaccaaccagctattccctcatctccctctttttccttgggcctttctattccctgagatacaacaatattgaaatcaacccaattaattaccctacaatggcctctcagtgaaaggaagaggcacacatctctcacttcaaatcaaaagctagaaattattaagcttagtgaagaaggcatgtcaaaagcctagayaggccaaaagctaggccacttttgccaaacagccaagttgtgaatgcaaaggaaaaattcctgaaggaaattaaaagtgcttatct

SEQ ID NO: 832902 - DNA, 666 bp, Homo sapiens
tttgcaaaagagcagttacgtgtgtgtgtgtgtgtgtgtgtgtgtgcacgtgcacatgctaggcatttcaattctcagctttataatctctaaattataccttgtcactgttatctcattaggcrtacataattaatcttttcaaggaataattccagaagacagagttataatatttcacatcactctaactattgctttatactctctcataacatgaggacttattcctattgaacttttaataagttatatcttctgtatttgtagatataagtgaaaaatctacagcactcatagagagggatacattatgtaagggctatcagaagtaaggacatctactactaattaataccaagggtattcatgtctatatctttctaaaaagtgaagtttcttaaaattataaatgtaattaaaatgcaatgtataaaatagatttaacaagtcaagtcaattatttaagcatttccatggccaataagaaaataatattgataacgtagcacgtaacactgatgtctcttaaaaaatgtaggaaatattttcacttgaaaaatgtaggaaggttacatgaatacaagagttaaaagatctgatatttcatagtcagatcctaatatttgaagtcattattacttttctctttttttgtttcacatg

SEQ ID NO: 832903 - DNA, 691 bp, Homo sapiens
taaaatgggtagtaagtgaatggatttccattgtgtttctttctttctttgtgttttttttacatttattctataaacaattgttttatattcttaaaatgagtaagtgtgaagcatcccgtttgtctcaagtggacatttctgagttactgagatattttagaatcagaccagtgacatgtcaacctgaaaattgttctcaggagtttggatttgaattgactttcagtaggaaatgtccatgaattctggattagaaagtattgctatgaaaattgtggttgatcatcgttaaactgtatattacatttatatacttcactgaaataagttaagaccagagaaaaggacagataaaatatcttttgcaggaggcaagtcatgagggtgattcctaacctaaattctaggggttgctatggagacacaaaggaaaaggcagcagctagatctattgcaaagaaaggagtggcagaatttggtttaagattctgcaattaaaggatttcagtttttttttctgtcattatctaggcagaccaagtgaagacatgaacaatataaggataattctgaccagaatatgatatgagagtattgtattaagagctgggagytggatctgagctacgttgttggataattgctctatttttttttttttttttttttttttttgctgctgctgcag

SEQ ID NO: 832904 - DNA, 439 bp, Homo sapiens
gatgcagaaactttagtcttgagtagaagtttgtccagtggtctactagaacaatgctcttcttttcttttcccatcacctggacaagaaagtcaagatactttaaaatgtatattttatttgacctaataaaggcaaaataaaaatgagtagctggtactcatttgttcgataccttgagtttcgtggtaacaatttgaagaggaccatagtatacaaagtaaagattaccagaatttaaagtgtcctatcacactgacaatttataagcagagatttctaagtctcaacattattaataatttgtgcaatctattttttaattttggaatwgtttaattttaaattatagtaatattctattttataaaatttatatattgcaaataagatgttttaattttattttatacagattaagagattctatagaatctct

SEQ ID NO: 832905 - DNA, 526 bp, Homo sapiens
gtgtatgggaaaaacagtgccttcaaacagtgtttgtagcagtgtacactggcaaaatattttttacaattaggaaagacataatagatccttaaaccttgtcaacactttggcttagtgattttacttctggaaaaatacatataattacatctttttcatgtaaaaaaaattaaacagtagattcttctcaaggttggtggttatgggaggtgacaattgtagcatatcatctcccggcttcaagagtgggcctgtgttatactagtcatgaaacttcagcttcgttgactatgccagttggtccaggggctgaccacacaacccatgacaaagatccaaagggcttttcattctgaaataagcacagtaaatttctttctgccctgtgcaatttctgccttgttctttagatgggaacytacggttatagccacatgggaatcatgagaactgacagcctgagaggctaaatccaaaagacagccagaagcagggaaaaaagagaacagtgataagacagaaa

SEQ ID NO: 832906 - DNA, 635 bp, Homo sapiens
atgatgacaaaaatttataggaaaaaggttttaattaccccaagtcgatttatataccattttgaatytcatgccattgattgggggaaaatttcctatcatcttctactctccagggtatacttccaaatggcataattctctgtcataaaatatttccaatttttcttcaaatttcagtagaaagggattgaatttgaagagtcatcaccgcagttctgctttcataaacaaaagcaaacaagcaaacaaaaatcactacgagtgttttgtaaagggagaaaggcaccaataggttattaaagttgaattaccagggccatttacgctcattcccagtgcctgtgtcacacataacccctgaagaaggaaaatagcaatacttagtgaagcaggtaaacggaatttccagccaaggagttcaacagacaatctgaattctggctggccttttaactcagaggtaattacagtagatttgggggcctaaccttagtttgcaatatttttttaactgatattatattttatgcaggccaagtcaaacacttgaagggcagagggcaagatgtaattaaattactaccttatttatgttaattattcattcttattaaatgaggacaaagatgtga

SEQ ID NO: 832907 - DNA, 601 bp, Homo sapiens
ctctaaagtactttgtcactagttcaaaaatactccaaaggactctggaggccaaggtgggaggattacttgaggccaggagatggaaaccgtgtctctaaaaacgttagctgggcatggtggctcgtgcatgtagtcctacattatgtaaactccaaagttctttcttgctagctcaaaagtatttcaaaggactcaggaggctgaggcagaaggattgcctgagcccagggttcaaggcttcagtgagctgtgattgtgccactgcgctccagcctaggcatcagagcaaggccctatctctggaaaaaaacaaaaaacaaacgaacaaaacacgccagagcaaaatgtcttagtgttcaatcattctttacacttgttttatttatttttaatttttattttttgtgggtacatagtaagtgtttatgtttatggggtatatgggatatttcaataaaggcatacartgtgtaataatcacatcagggtaaatggagtatccatcacctcaagcatttatcctttgtgttacaaacaatccagtcatactcttgtagttatttttaaacgtacaattacattattctttatgcctgtt

SEQ ID NO: 832908 - DNA, 615 bp, Homo sapiens
agggaagagagcatgcctctaatacagaaatcaggtatttagggggaagaacaatctaataaaacactttggacagcccgtgatagtgttcagacacacagttctagaagagaaataagaaagcatttctttggccaaatgtgatctgaaccatccgggtttttgcctcacatactgtaagagacatttattctcttcactattcaattattttgccagcgagatgtgggaattaaagtagcagcaatcatgataacatgtgtgaagcatcaaaatactttgcactgagcagacagagatgccaattgtattttcagcttgggtttacatatggaaaatattgttattatttccttcaatgtcatcagtttttaatggctcctattccatccaatttttaagctgtaaatatagtctagtatttgaaaagaaaatctaagtagttctaatgccagaggctggaactagtttgccagcaaaattcatctttagtttacatgtatttggatgcttgattatatgtccccaaatccagtcataatttagcccagaattttaractaacagaacgcaagtgtagatacatttgtttgtctcatgcagtttaaaaaaaaa

SEQ ID NO: 832909 - DNA, 593 bp, Homo sapiens
agggggaagtgctacacacttttaaacaatcagatctcatgatagcttcctcaagagacagcactaaggagatggtgytaaatcattagaaaccacccccataatccaaccacctctcatcagggcctacctccaacactcaggatcacaatccaacatgagacttcaatgaggacacagagccaaactgtatcattccatccctggcccctcccaaatctcatgcccttctcacatttcaaaacacaatcatgccttcccaacagtcccctaacgccttaactcattccagcattaactgaaaagtccaagtccaaagtctcatctgaggcaaggcaagtcctttctgcctatgagcctgtaaaataaaaaaacaagctagttactttcaagatacgaatgacgtacagggattaggttaatagactcattccaagagagagaaatctgccaaaacaaaggatctataggacccatgcaagtcccaaaattagcagggtagtcattaaattttaaagttccaaaataatcttctttgactccatgcttcacatcctggccacagtgatgcaaggggtgtgcttccaaggcct

SEQ ID NO: 832910 - DNA, 611 bp, Homo sapiens
aggggaaaccaccctcatgattcagttatctccacctggccccatcctttacacttggggattattacaactcaaggtgagatttgggtggggacactgtcaaaccatatcaatgcatgagtgyatgtgtgtttcaatgtaagattacatgtaaacaaagatttctaatgctaagaaaagcatttaatccaccaaactagttcagtttcctcaatttacagagtagattcctgaggctccaaaaggtgaagtgtgtgtcattctgatgcccagttctgtgtactgtatacaagtaatgatatctcactttgctctcaacatgagtgtcaatgatggtagcaaatttaaacttttaaaggtcttgtatctttctctttctaataaacaggtgagctcagtttatgagctgaaaaccattcaaatactatcaataaattttattatttatgtccttctcccttccaccacaaatatcagatcatgtagcttggaatttgttttaaagaacaagttttattatttttcattggctttggatgccagtttcagttagatgttgaacccaatttaaataatacacacctacatgtcagtcttccatatctgactat

SEQ ID NO: 832911 - DNA, 433 bp, Homo sapiens
gacctgcaagtaaatgggtttccttcttccttctcactgcagcaaaaccatgtttcctgttcctccctctgtttttggttaagggartgtaattccacaccttctcccgttcctggtgacagaaatctcccctccacagcatgttatcagaggcttccacagtcagccctcacatgttgttcccttctgatccagcacagatttcaaggcctatcagaataagcatttgtttgcacatacccgccattcctttgcaccacctctgttgagtttggccaaaaagatatcaaccctcactacatctacacgtctacctactctgcgtctacagttgaggagccaatgtggctggtggatgccatttaaatttacaccctcagacctgaactgggttgttagctggcttcttacatttttctgattgcttcctgct

SEQ ID NO: 832912 - DNA, 634 bp, Homo sapiens
ggcgtgagctaccatgcctggccccaatttttgtagccacattgaaaaaaaccgaaaagggtgaaattatttgtagtaatatattttcacttcaatatatccaaaatattatcatttcaacatgtaatcaatataaaagttattgagatagttcactttttcacattaagtcttcaaaatttaaggattatttgatactcattgcacatctccagttctcagtcacactagccacatttcaagtgctcagtagccacacatggctcctggctaccatatgggaccacacaagtatacaatgtttgttctttgcttcatttgacaaatacttattgaatgactattatatattaagaactattctactaagaatgggaggttaaaatacgcatttgtatttccttgaatttgcaaaaagaagtactggaagtttagataagggcttactgctttcttttagtacacagggaggaaaaatgttaacagacatagaaatgagagaaatatacatcaacgtatyttttggttttgatctttgaaaaatgtgaacatattatctattttaaacttgtaggaggagcctacaacaaacacataacaagtatcctcctcccagccagatttttgtcagatt

SEQ ID NO: 832913 - DNA, 630 bp, Homo sapiens
ttgaattaaattttacatgaagtataaatgagttgattaaacaatcttatttgtacactacttagttttaaaggtacaaaagttacaaaatattggtagaaattaaataattctgactaagaatatgctgtgctattacacccaaaaagaaacgtttttctccgctatctaataaaacatagactggagattaatgggcagagggagacaggtggagaagtttctcctgtctaatatatactgcttttcaggatttttttcttatccttctgcctgctcttatttgaaatatttttcctccgttcctttacaaaatttatatcttatagaaaagtctgataaaaaaaagtgagaaatttcatttaatccttgatcctatagataaccactgtagtggttgggtatatattttccggggttagggatgcatatgtgactatgtgaaagttagtgtattttctctagacttgttcttatatatattttctaagatttagatcatgatagaaaggctatttgaaataatatttttctttgtaacaatgcatcttgactctscatgtagagactcagagggattttgcaactttatcctccactgaaaatataatataacatttagattattat

SEQ ID NO: 832914 - DNA, 609 bp, Homo sapiens
attataggaggtaagcacataagttttgcttatagttggatgtttgtttcaaaatgggagttattttgaatcattgacatcctctcctaggaagatattagttgcagtgatggttgggaatcgtagttgccgtcagagctctattatctcacctcaagtttgttttatttaacttattgatgagggagccagcagggtgaaaaagcaggttgaaagaaaaaagtatctgagaaatacgctttccatagtctgtgggagaaacaaacaaaactacggaaatacatagcaggttaatgtctacaggacagtaaaacaaacaaacatacacagtgaaccaaccatgactctttggtaaaatcataacatctaataagttttacagaacataaattttctgagccctatgctattgtgttccattcttctgaagctatagatgaatcttcggtatgggcttacaagaaaatggcctagtacgcaatggaaaggacttatcattatccttctgcttttccccctgtgttttggatatataccatttactatgattaatgtttaatttgtttttgtgatttatgatgtctacaytttttggtaacatttgagaac

SEQ ID NO: 832915 - DNA, 610 bp, Homo sapiens
ctccagagtggtgacaaactttccaagaattttacatccccaaggagggaatacaattcacacctcctctcagccagaaggaagcagcacaaacagttggggattcctcttgttatggtttctaccaacsctgggattcattatctcacagaaaggatgcttcaggctctaatagtgtgtgtcagaaaggtcgaatctggctatcactgggaaaagagaaaatatatccactattgctctggtacaaagatcacttttctctatttcattgatttgctcttctcttttttgtttgtttgtgtggggttttttgtgtttttgtttttgtttttgagacggagtctggctctgtcgaccaggctggagtgcggtggcgccatctctgctcaccgcaagctccgccccccgggttcccgccattctcccgcctcagcctcccgagtagctgggactacaggcgcccgccaccacgcccggctgatttttatatttttttagtagagacggggtttcaccgtgttagccaggatggtctcgatctcctgagctcgtgatccgcccgcctcggcctcccaaagtgctgggatgacaggcgtgagccaccgcgccc

SEQ ID NO: 832916 - DNA, 542 bp, Homo sapiens; identical to SEQ ID NO: 827962

SEQ ID NO: 832917 - DNA, 573 bp, Homo sapiens
caatagaatattcagtcttttgcaaatagtaaaattttgtacaagagccgttctccaagataagttaattcctatttctaaacacacctaatttttacaaatgtaatctataaatctattatttrtaactatccgaagtaggtatagtaaatatactcatgtcaccgctccctacaaccatagcagacatcaataatcaattttgaatcttcccaacacaaagagatgatacatgtttgagtggatgaatatgctaattactgattgatcactacatataatgtgtatcaaaatatcactatgtaccccaaaatatgtacaagtattatgtgtcaattataaaaataaataaaataataatcaatcataatactcagtcttaacaaacctggtctccagcctctttctagcttggtgctttaaaaagctaatattcttctgactttttaaaacatacaacttatatactatccttgatatgacatattttcaagaaattattcctgaaaatttactgtatataaagtggtattctcagatagaaacatttaaattaattaatagtaacaaaat

SEQ ID NO: 832918 - DNA, 591 bp, Homo sapiens
gagttagtcagcttaatgttgtaataacagaacatccgaggctgggtaattcataaagaaaagagataatttctgtcatgattctggggagtgggaagtctaagaagtaacacaccagcatctgcttgcctgttggcgggggcctcatgctgcattacaatgtcatggagaagcggaagatgaagcaggaatgtgtaaagagagcaaatacgagggccagccttaatttgctctgcagaaatgaattcagtcctgtagaagtgaggactcactcactcctgtgagactgttaatcccttcatgagagtagatccctcatgactcaaacgtcttttaaagcaccacctcccaacactgtcacattagggagcaaactttaacttgagttttgatggagacaaaccatatccaaaccgttgcattctgccccttgccctccactgtgaggaaattcacattctcctcayagtgcaaaatacagttattccatctgaatagtccccaaagtcttaacatggtctagcatcaacccaaagggtccaaagtccaggtgtgggcctgtgaaatgaaaaataagttatctaattccaa

SEQ ID NO: 832919 - DNA, 686 bp, Homo sapiens
gagatgaggaacttgttgggaattggatcaaaggtgacccttgctatgctttagcaaagagactgggagcattttgcccctgtcctagagatctgtgaaattttgcacttgagagagatgacttagagtatccggaagaagaaatttataagcagcaaagcattcaagacgtgacttgggtgcgcttcaaagcatttggttctatgcattcaagagatggtttggaattggaacttatgtttaaaagggaagtagagcataaaagtttgaaaaatttgcagcctgattacaaggaaagagaaacccattttctgaggagaaattcaaggcagctgcagaaatttgcataagtaactagaagccaaatgtaaatcaccaagacaatgtggaaaatgtttccagggcgtgtcagaggtcttcacagcaacttctcccatcactggcccagaggcctaagaggaaaaatggttttctgggctaggccccgggcctcgctgctttgcacagtctcaggacttggtgccctgcatcccagctgtgactaaaagggtccaatgtacaactcacactgctgcttcagagggtgcaagccccaagccttggcagcttccacatgrtgttgggcctgcgggtgcatggtagtcaagaactgaggtttgggatcctccatctagatttcagaggat

SEQ ID NO: 832920 - DNA, 593 bp, Homo sapiens
tatatacgaatctcactttaaaatgartttttagaagatacaactttctattctcggtcatctttttaaaccaacacatacttgactgacataagccaaaccaaagatattatttgaaggatacttggaagatgtcaacattgaagaaaatattcacttgaaaccttaaaataacaaagtttaactttctaaagtcattctacaaaaaaagtcacaaagcacaaaagctatagcagtggtttatcaaaacttgagcatgcttcagaatccccaggaaggcttgttaaaacagaagtagctgggcccaaccccacagtttctgattaattaggtctggggcggggtctgagagtttttatttctagcaagttcccaaatggcactgatgctgctggtgctcggaccactttgaaaatgcctgctacatctaaacaggagcacaacatcttgggattcaacccattaagcagcacatttttaaagtccatctttagctatttctcctaaaagaaattgctttgcgtgatatcactatttagcagttttactcaatccctttaataaattacttacggtaaaaaaattcattcccc

SEQ ID NO: 832921 - DNA, 636 bp, Homo sapiens
gtggcatccacctcctttaaaggcacatcttggagatcaggtcggccagtttccatagtcactaacagttcctggcagtcatggataggtggggtaaggtctgaatcagggaacaaggtasctggatttaaacaccttgtgggagagaaagttaaacgaggctgatctaacagtaaattgtgatactgcaggatgcgagcgttcaacatccatttgccagaagcacttcttaacaatgtctctatggcatgaggagccataagggttaaattttgacctagagtcagtttatcagcctcttgaaccaggcttgctgtggctgctatggctcacagacaacttggccacccagaggccacagggtccagtctcttagacaaataggccactgggtatcaccatggccccaaagtttgagtgagtacccctttagtgactccctggctttcatgaacaaaaaggtaaaatggcttttagatatttggagggctagagcaggggcctcagttaatgctttcttaaggttttgaaacgcctcctcctctgtgtcagtccaaactagtgggccatttcctccactagtggagtataggggcttgccaatttccatgaaacctgatatccgtagacaacact

SEQ ID NO: 832922 - DNA, 575 bp, Homo sapiens
gttagaatggcaatcattaaaaagcctggaaacracagatgctagcaaggatgcagataaacaggaatgcttttacactgttgatgggagtgtaaattagttcaaccattgcagaagacagtgtggcgattcctcaagaatctagaaccagaaataccatttgacccagcaataccattactgggtatgtacgcgaaggattataaatcattctactataaagagacatacacatgtatgtttattgcagcaatatttacaatagcaaagacttggaatcaacccaaatccaaatgtccatcaatgatagaatggataaagagaatgtggcacacagacaccatggaatcctatgcagctataaaaaagaatgagttcgtgtcctttacaggcacatggatgaagctggaaaccatcatcctcagcaaattaacacaggaacagaaaaccaaacattgcatgttctcactcacaagtgggagtcgaacaatgagaacacatggacacagggaggggaccatcacaaaccagggcctgtcgggggggtggggggcaagggaagggagagcattagg

SEQ ID NO: 832923 - DNA, 652 bp, Homo sapiens
ggttctctattctgtaccatcatctatttgtctctctatttttatttctatagttctataatatgttttggagtcaggaagtttgataactctaactttgttcttctctgaagctattttggctactcataatcccttgatattccatatgaattatagaaattaatatttttgcaaaaaaagtcagcattcctgccaggcaggccttgaaattttatatgagttttaggacttaaaataatatgtgtgcaaaaaatataacatttggatcttaataggaaatactttgaattcgtgcttcactgtgagtagtattgacatcttaacaatattaaaatttctgagccttgaacatgaggtcaagagtaggatgctttaagtttcatacattttttgatttaccagtttccttctgcttgtgatttgtagttgaggggttattatattgcccaggctggtctccaacttttggcctcaagctattctccctcctcagtctcctgatgtgtttggattacatggatgagccactgcacctggcctccttattgtttttctgtcatttttatgaattgaaggtaatttttggaaatgtttataaatatgtatctctttagaaggtttytcatttttaaggtagtcaaaaacacat

SEQ ID NO: 832924 - DNA, 669 bp, Homo sapiens
agatttgcaaaagagcagttacgtgtgtgtgtgtgtgtgtgtgtgtgtgcacgtgcacatgctaggcatttcaattctcagctttataatctctaaattataccttgtcactgttatctcattaggcrtacataattaatcttttcaaggaataattccagaagacagagttataatatttcacatcactctaactattgctttatactctctcataacatgaggacttattcctattgaacttttaataagttatatcttctgtatttgtagatataagtgaaaaatctacagcactcatagagagggatacattatgtaagggctatcagaagtaaggacatctactactaattaataccaagggtattcatgtctatatctttctaaaaagtgaagtttcttaaaattataaatgtaattaaaatgcaatgtataaaatagatttaacaagtcaagtcaattatttaagcatttccatggccaataagaaaataatattgataacgtagcacgtaacactgatgtctcttaaaaaatgtaggaaatattttcacttgaaaaatgtaggaaggttacatgaatacaagagttaaaagatctgatatttcatagtcagatcctaatatttgaagtcattattacttttctctttttttgtttcacatg

SEQ ID NO: 832925 - DNA, 607 bp, Homo sapiens
tccctttcatctcaaatgcagctctgataacagtaccgcttgaagggtactcaggaagtaaataaaagtgaacatcctgctatgagctggaaagcacaggcagaatcctscaccaccctgccagcctaactgtactgcccaaagacaaaggaatctttcctgttacaggtacgtgcaacccacaccaggtaaaatgcattcactaaggctgtttggtctttccttgacacatcactgccattacagactgattcttccaaacagacatttcatgaaggcccttagtaaatataggcttgacatagtagctggcaaagttatgaacaaaatgtattttattctgagacagaacctattttaaatagctcattgacctctataatcatagtgtttggtcaaaaaccatcaaaaccaccacatagagccaaataagatgcttccatttatatgaagtaatttcttctcacagtgcagaaaagagtggtgatgttcacacctatgcacaattctactaaataatcaagttcctaatcattgtgaagactgcacctcagaatcataatcagttgatttggagtttaatttacttttaaagtattagagatga

SEQ ID NO: 832926 - DNA, 603 bp, Homo sapiens
cagtttcacgatattgcttctttctatccatgagcatggaatattcttccattttatggtgtcctcttttatttagttgagcagtggtttgtagttctccttgaagaggtcyttcatatcccttgtaagttggattcctaggtattttattctctttgtagcagttgtgaatgggagttcactcatcatttggctctctgtctgttaatggtgtacaggaatgcttgtgatttttgcacattgatgttgtatcctgagacattgctgaagttgcttatcagcttaaggacattttggtctgagatgatggggttttctaaacatccactcatgtcatctgcaaaagggacaatttgactttctcttttcctgattgaataccctttatttctttctcctgcctgattgccctggccagaacttccaacactatgttgaataggagtggtgagagagagcatccttgtcttgtgccagttttcaaagggaatgcttacagtttttgcccattcagtatgataccggctgtgggtttgtcataaatagctgttgttattttgagatatgttccatcaatacctagtttattgagagtttttagcc

SEQ ID NO: 832927 - DNA, 496 bp, Homo sapiens
ccagggataaatcccacttggtcatagtgaatgagcattctgatgtactgttaaattcagtttgccagtwttttgttgaggatgtttgcatcaatattcaccagagatattggcctgtagttttctttttttcatttgtctttgtctggttttggtatcagggtaatactggcctcacaggatgagtttggcagtattctttcctcctctatttttctgaatagtttgagtaggactggtattagttcttgtttggtaaaattcaggattgaagccctgatgtcctgggcttttctttactatgagactttttattaatattatggctttgacctcattacttgttatcggtctgttctggttttggatttcttcttgactcaattttggtaggctgtatgtggctaggaatttgtgcatttcttctagattttccaatttattggcatatagttgctcaccgtagctactaatgatcctttgaatttctgcagta

SEQ ID NO: 832928 - DNA, 496 bp, Homo sapiens
ccagggataaatcccacttggtcatagtgaatgagcattctgatgtactgttaaattcagtttgccagtattttgttgaggatgtttgcatcaatattcaccagagatattggcctgtagttttctttttttcatttgtctttgtctggttttggtatcagggtaatactggcctcacaggatgagtttggcagtattctttcctcctctatttttctgaatagtttgagtaggactggtattagttcttgtttggtaaaattcaggattgaagccctgatgtcctgggcttttctttactatgagactttttattaatattatggctttgacctcattacttgttatcggtctgttctggttttggatttcttcttgactcaattttggtaggctgtatgtggctaggaatttgtgcatttcttctagattttccaatttattggcatatagttgctcacmgtagctactaatgatcctttgaatttctgcagta

SEQ ID NO: 832929 - DNA, 631 bp, Homo sapiens
catcatatattattaggttactgcaaattaaaacaacaatgagatactaccacatatctaacagaatggccaaaatccaacacactgacaatgctaaatactcatgagcatgtggaacaacaagaactctcattcaccgcttgtagtaatacaaaaggtacagccactttggaagacaatctgtcagtgtctttcaaaactaaacacactctcaaatataacatggatgaacctgaaggacattttgctaagtgaaataaaccagatacagaaagacaaatactgcattaactcattcatatttgaaatctaaaaaggttgaactcatagaagtagagagtccaatgatgattactagaggctaggaggctgaggagggaggaaatgggagatggtgatcaaagagtacaaagtttcagacagacaggagcaataaggtttgagatctattgcacggcagggtgactacagccaataataatgtacagtatatttctaaataactaaaagtaaatttcaaatgcttcaacataaaaaatggtaggtaagtgacatgatsgctatgctgattagcttgatgtaaccattttacactgtataaatctatcaaaacatcacattggaatccaca

SEQ ID NO: 832930 - DNA, 603 bp, Homo sapiens
aacatattcaaaactataataattaaaatagaatgttttgcctaaggatagacaaatatataaatggaatacaatcaaaactgtctcacacatatatgaccacttaatttaactgtaatctaaatataaaagtaataccacaaatttctaggagataggaaaatattgttatgacttgagtagacaaagattttttaagcaggacagtagtcactaaccataatgagaaggactgatgaattggactacagttgacctttgactaacaagggttcaaactatgcaggcctatttatatgcagagtttctcaataaatgtactggaaaattttttggagatttgccacaatttgaaaaaactcacagatggaccatgtagtgtagtccaaaaatatatttaaaaaaaagaaacagttatgtatgtcatgaatgcacaaaatatatgtagatactaatgttttatcatttaataccataaaatatatacaaatctattataaaaagttaaaatttaacaaaactttggyatacaaacacaagaccttacatggcaatattcacagttgagagaaacgtaaacaaacataaagatacagtattaaa

SEQ ID NO: 832931 - DNA, 575 bp, Homo sapiens
aagctttaaactgcaggaggaagtgtcttagggaactagggaacagccattgcagctagagataagaagcattaaaaataaaactctactcccttcccagaattacagctgtgggaaacmctggaacacggaggcagccacctttctgaaacctaaggacataattcgcctaaaaccaaggcttaattagaacagcaatgctcctcttaccaccacgctcccgggctgaaaagcctccagtgacatctaacagtgattaagagctttgagagttacaaaagtgtgtgggtagagactccgagattgatatagtttggatgttttgtcatctccaaatctcatgctgaaatataacctttagtgttggaagtgggcctagtgggaatagtttgggtcctgagggcagatccctcatgaatggcttgtgctgtccttgtggtaatgagtaagttctcactcaatgagtttatgcaagatttggttgtttaaaacgagcctgataccttccccctgtcattcttgctccctcttttgccatgtgatgctcctgctcccattttgccttcccctatgag

SEQ ID NO: 832932 - DNA, 518 bp, Homo sapiens
cctgcctcagcttctcaaagagctgggatcacaggcttcaaccaccatacccagcccacattttaaaaaacatatatctctggtgtgtcatcaatgagayaactgatttttaggacaccagagtaggtgtgtctttagaaagaaaaaatattttgtaatctgcacgtaaagtccaatggcataaacttgacctcccaaatgtaaaatgatatttgagcacatcccatttttggcttattggttgcaaacagatttttaaaagacatgagtttgaaaaagtattgatcatattacaagatgttattcagagtttttagagtaaaagaaacataaacacagttacatattttagaagtgtcaggcccaatctgcttgtcgattcccagaacatactagtttttcagaggatgtacgcatataaataaactaaatgcatatagaaaagcacatatatcttttctttccaaattgctttccttcactctacctgacataaactccctgatgtcctggccaga

SEQ ID NO: 832933 - DNA, 655 bp, Homo sapiens
atttaagggaagtcttaatctgctttatatttaactcttatctccacactgtgaattaaaaatagaatgctggactgtagcctcacctcctggactctctgagggctcaggttactccagcataaggctgggytgcgagctgctccaggtctctggcttggtgcccctcccggactttccaaacagctgcctctttctaaatttttatccaagagccacacattaacctgtctaaagtgagcagtccttattctgtgattcttaaataacatttagcattttcctcaggtaattttcatttttcgtgaaacttagtgagttctgaatccttccagaagctagtttcaaaaactgagtcctgtagtcgagttctcctaagtccatgcgtgaggtggagtgaaagctaaagagcctttcctctttttttctcttcatctggtaaaaatttgctctggagtacgtcccctgatttcccttctcctctctcccactcttctcccttccttttcccatttccgcaccttttcctaatcctctttcccattccctgtgtgtatctcttccttccccaagcctgtgtctgagacagctggaaaggacaggaagagtttgggtgtggggaggagccggagccagggccgctccttctcaccca

SEQ ID NO: 832934 - DNA, 344 bp, Homo sapiens
cctgaatttatgtagccttggacacaggtagtcgaattataagtagtaggctaatacagctgttaagcaactttaagcaaattgctcaractctctgagctttggtttccttatctgtaaaattagaaataattatagcacccacctcatggggctattgtgaagaaaggatgaaaagagatcaagtataaaaggaatcgagtgctgggcacaaagtgctccatatattgtagctattagtaaggctgatgaggcaattcatggaaacctctttcctggaaacaggatagaacctacatgtgtttggcattagattagtaaagggtaaaagaatatcactgcaa

SEQ ID NO: 832935 - DNA, 564 bp, Homo sapiens
agccaacaaggtgccacaagaaagagtgtcataaaggaaagttaaaaaatttaaaaaataaaacaaacaaaaacaaaatccaaaaaggaaagtagaagacactaaagaccaayggtggaggttaatggtgggtgtgggcagtgggagcagatcatgctggaacaggcaataagaggtgcactgcctatgagaatttaaaaacaacaaaacccactaaaaatctgctgtggtgacccttaacaatgtcagtgataaaacactccttcccaaaagggtggaccactcctgccaagccccaccttggtacacgctggtccaactctaggttatgggtctcgggattacacctgctctccataccagagagaactgcagaagcatctgaattctgttgtttttgcttttataaagactctaaccagcactgaggtaatggactactttgagtagatcaaaatgaggtggggaaatgtgatccccagctagaacactgtagtgatttcctcttggtactgtaataaatcatcacaaacttagtggcttaaaacaacgcaatgtattctc

SEQ ID NO: 832936 - DNA, 641 bp, Homo sapiens
ctggagcatccctttctacctctatgccttggctcaggccatcccctatacctggctgttctccctccatgtctttacccattgatcccttatgtttcaaagtcctgctcactcattcattcattcattcattcattcaacaagtatctccagagagtgcactatgttccttgcacgtcgatgggtaccagggatatggagggaaatcagttacagcctatgtcctcaagctgctcacagccatggggggaccgatggtgacaataaggacatgtatggaagatgtgagtctgggggtgttgtaaggccagagaaggatcctaatccagccttaggggtggggggtattcagggaagacttcctggaagagaatacctctgagtcctgaagaatgaggtgaaaagagagagagaggtgtatataaatacatgagaacacatataatcttaggcatcgatgtgacctatgattatatgtgttcacatgtacttatatgctaatgtaataactagtgtttattggatgctactakgagcagcactggactagcacatttgacatattagccttataagggtgaggcctcacaaccttataggggagaggactattatcattcccatttcacagatgacgaacc

SEQ ID NO: 832937 - DNA, 668 bp, Homo sapiens; identical to SEQ ID NO: 829734

SEQ ID NO: 832938 - DNA, 530 bp, Homo sapiens
tactcacctcagagtggctgtgtgcatgcgggagccagtgtggcacctgacacaaaacagatgctgagcaaatgacggtaaggatgggcaaaattgagcccctgccatgcgccaggcaccacaaaacagcactgtacaaacatggtctcctttaatcctcacagtatcctcgtcagggagatgcagtgttatccctgataaggttctattgtcatccccatttcacaaatgaggaaaccaaggatcaaggagtaatgtgattttgctgagagtgatgcagctgattcatcacagagacttggagcccaaatctgcccaatgttcttagccagcgccacactgattagtcagcaagcgcaccctgtgactctccttaccctcagccgctccaccaccactctcaggatcctcctcccctcctgcccctcgaggaacagagggcagcactgcctcctctgcaccccagctctgtcacttaacaggtgtgtggccctgggcaagcsacatgcccattctgaccttcagtttct

SEQ ID NO: 832939 - DNA, 621 bp, Homo sapiens
cacaacctatgcatgtaataacatgagccacatgtaccatcacaatgtatcccataaatatatacgattattatttgttaagtaaaacataaatcttaaaaaagtaaaaataaacccttccttgcctgtttacctgtgtctggtgcatatttcccttcgactatatccacctttattttgttgtaataccttaaaccagtgaatgtagagggagagaggacacatcaatggtacacaggacagtgtctggaacaaacaaatgcactgtgtcaggtcacaatttcttccctggggcattgatggaacagctttaggcaaatatgacaagcaaaccctgtacagccctcccacccctcttatggtagttggctcctctctagcctgctcacaatccttatctggtcatggtccttttatttctttcttagttccatattctccctccctctcagactttttttctttatcctaatcggaatttagatttttcacatgaaggagaaaattatcaatcgtaactaggccaaaagaccatagagggtttggaatctcagttttgctytgaatcctgactctaccattttaataaggatgaccttaatgaacttattggatctttct

SEQ ID NO: 832940 - DNA, 645 bp, Homo sapiens
acttagacatccaaatacaagaagcacaacgaacacctggggaattcatcrcaataacataatcatctaggcacattatcatcaggttatgtaaattaagatgaaggaaagaagaactgtgagacaaaagcaccaggtaacctataaaggaaaatctatcagattaatggtagatttctcagcagaaaccctacaggctagaagggacaggggcctatctttagcctcttcaaacaaaacaattatcagctaaggattttgtatccagtgaaagtaagcttcacatatgaaagaaagcttcacatagtctttttaagacaagcaaattctgagagaactcaccactaccaagccaccactacaagaattgccaaaagttagagacctaaattttgaaacaaatcttggaaacacatcaaaacagaacctctttaaaacataaatctcacaggacctatgaaacaaaaatacaatttaaaaaacaaaaacaaaacaagaatacaggcaacaaattacatgattaatggaatggtacctcacatttcaatactgagattgaatgcaaatggcctaaatgctccacttaaaagatatagaactgcagaatggataagaattcaccaaccagctatctactgccttcaa

SEQ ID NO: 832941 - DNA, 619 bp, Homo sapiens
atctattatacgaaaggcactatttgttgaatttggggatrcagcaacaataaaagatacacataaaaacattttctgttgtcttttaccttacattctagtaaggaaaaataggcaataaatgatagcatagtaagcaagcaaaaatgtgttgtattatggaataaaggtgggtttatttaaggtaacgtttgagaaagactttaagtaggtaaagaattaaagcatggaaatatctgcaggaaagaagtctaagcaaagcaaatagcttggaacagtgaagaggccagtgcagctgcctgagtgaccaaggggtaaaattgtgtgagctgaggccagaaagattggattaggccaggtcatgtaaggacgttgactttatataatgagaaaaggggagttcttggagggttttgagctgagaagcagcataatgttaacttacattttatgtaatcgctctgactggtgtgcagcacatggacttagaataatggcctccagctccatccaagttgctgaaaagacattattttgttctttttaatgaccaagtagtattccatggtgtatatataccacattttatttatccactcatttgtcagtgggcacctaa

SEQ ID NO: 832942 - DNA, 594 bp, Homo sapiens
atcttatatatagaaaatactaaagactccattaaaagtctgttagaaatactaaacaaattcagtaaagttgtagaatacaaactcaatatacatttaaaaatcagggttttctttacacttacaatgagctatccaaaaatgaaatttttggccagatacatggcatatgcctctaatcccagcactttgaattttagattttttttttctaatcagtgaagaatgatggtggtattttgatggaaattgtgttgaaattgtagattttttttggcagtatggtcattttcgcaatattaattctacccatccatgagcatgggatgtgtttctatttttttatgtcatgtattatttctttcagcaatgttttgtagttttcctggtagaggtctttcctctctttggtaaggtatattcccaagtattttatttttttgcagctattgaaaaaggrgttgagttcttgatttgattctcagcttggtcactgttggtgtatagaaaagctactaattcttgtacattaattttgtatccagaaactttgctgaattcttttgtcagttctaggagctttctgtagtagtc

SEQ ID NO: 832943 - DNA, 585 bp, Homo sapiens
ttagagcatttcatcccctgaagagagtaayatgttgttcagattagattacctgctgacgcatagctcccgcttgaggtagcaaggttttaaggaaatggtttctgcttgttaataatgacaccaactgggatgagagctaacatgttttgaaaggtttctatgcacccagctctctgctaagcactaggcatacatacttcacttaattattacaaatctgagggcaggaatttctatccctttatgtaagtaggagaggttagataattttcttgagacaacaagtggaaagcaaagccagaactgaaacccaggcagaaaagaagagatggggactagaaaaatgcccagcagaggcccatgagagccacagggagccaggaagaaaagccatgcctacatccaatgaaatattaacagaaacttcacctaacttcacaatcagaaaattgacaatggtacccccattttaaacaaattcagtcatcaaacgataaaaatccatgctgaaatcctaaagctgtgtatttaaacgagactaatttctatccatgaggccagcagtcttgaacattaacctga

SEQ ID NO: 832944 - DNA, 626 bp, Homo sapiens
gtttgtctgtctgctgaataaatgaatcataggatgaatgaatggagaaatgaatgaaaagtaagaggatatagaacaccaattatgcccataattaagtcctagattctctattccatttaggactcaagatacctagtcttatagttctttttcctgtagatggggataaggagaatggcaagatctctaatgattttcaagtcatctcattaacattttccttatattctccttagaagcctccactgcatgagatttaggtacagtctacaaatagaacatctccttatacaataaaacttggcccctgttaaagacttgattctttagagctattgaagatttttaagaaagatctagaatgtactactatcttacaaacatctgcttatggtccttaatgaaaacctctaaactaattccatttaaactgtacaaattctatgttgtcatactcccataacgtgttctaaaacacagcattgttaatgagcataaagtatttatcagtccacataattgtttcacacawctattatattcctcagaaaattcatatgtagaaaaccaaatgaactgaaacttcattgtcctcacacctgacatcaaagtaataaaattcc

SEQ ID NO: 832945 - DNA, 556 bp, Homo sapiens
agccagattttgaaaatgtaattatataaatacatccaaaatgtgtgtgtgtgtgcgtgctgtgtgtatgtgtgtgtgtgatggttcatttttaaagaattttatattttgttattcttgaactttttcacatacagattgatttcccataagctcttgttaaaatggcctcagtttaattttttgtgctctgctcaaaacagtattaatgaaatgaatcaatgtccaaagtatgctacctggtaagttggtgaggatcccagaaatgaaattaggagacctacatttcagtcttagtcaatattttgtgttgtttctcattaaaaggaatgtatttcaaagaaggaaattctagaccagttgttcttaaagggtagtccagctccctgtgagagtccccaagacacttgcagaagggccaggagctcaagattatttttatgattgtactaagttgttctttgccttsttcactctcactgtctcatgagtgtatagtggaaggtgcatgtacagaaagagaacatatagaggctgcataacttgtgatgacatc

SEQ ID NO: 832946 - DNA, 414 bp, Homo sapiens
cctcattttggaaggacagttttaccggatatagtattcttgattggcagctccttctttcagcactttgagtagatcatctctctcccttctagcatgcagttcctgctgaaaaatctgttgataatcttacagatgcacacttgtttgtgatgggttgcttttctcttgctgctttcaggattttcttttggtctctgacttttgacactttgattataatgtgtctcagtgtagatctctttggattcatcctagctgcagttcttgagcttctaaaatttgtgaatccatttccttgctcagactcrggaagttttcagccattttttcttcagataggctctctgccattttctctctttattgtctgcaaattacataacacttatattgttgcacttgatgatgtcc

SEQ ID NO: 832947 - DNA, 641 bp, Homo sapiens
gtaatcacttctaagtattttaaaacacatctaagtctatttttcatttccatgcaatctcccagtctcagatggtttgacctaaagacttcttgtttcagcatcatggatggaatatctttatacacgaagaattatctaaaatgttctcatttattgtaataactacattacaggatggcagttgttctgaatagttgttctgaatattcggctgggatgcaaggtgagttctttacgtttaattgaaagagaatgcatgaataatatatttatatgtgcagcaatatatttcaggttaacagagaggatattttaaggtaatccaatactaaaaggtggggtattatggtacaaattggctagctgttctccaactttttttccttcctcatgggcacatagctagactatattccccagccttattcaagtcaggatgacccttacgactaaattctggccaatagtctttagacacaattggtttgcagtcttcccagacttgacccatggagccttstttgtagtatcccagttctctcctccccttgactctcggctgcctgccaacaaccagagtattcctgggagtcatgcattaaaaacagcaaatccatgagcatgggatgtgtttccat

SEQ ID NO: 832948 - DNA, 504 bp, Homo sapiens
gccatgttctctgtacaagcctgactcatccaggccttcatcctcgggatccttctccttcctccagggtctgaccctttctgaaagtctgagacttccttctccacactgccaccctgtcctggaackaacattgcaacactttcactcctgagctagtggagtctggaaggacaaggaattgacatgactccagctgtgtccagctgacatggattgcaccagtcaccctttaactgctttgggttctggcaactatacacagctcatgtgacttcttactgatctttatcacaaatatctgttcttggttcctgagtctatacttgccaaagctgagaaaaaaatcataatttttgataggacttatagttctcaaattacatgactactagagtctggaaaaaagtaataatgaagttcacatgtatgtgtgtacgtatatgtatgtatgtatgtacatatacacaaacatatgtatgaaattgctttatcttaaggtag

SEQ ID NO: 832949 - DNA, 636 bp, Homo sapiens
caacttgctgttcttatactttaaaaaatatggcattgccttgagttttgttcttttcttccagcttctgaggaagaagttgtgcctaagtggccrttgacgctcttctctctccttccttcagttccgatttgtccctctatcttggctccttccaagcagcctgtaatgtgttcaagctacctccatcttatgctatcaactctcctttaacttagaatattcttttatttctcaccttttctgcttttcttcacagccagattcctcaagcaggtaatctttgatgacattttgtactgagtgcctatttttcacttttcaatccaatgtaatgaggcctgtgcctctaaccctgcaatgagatgtcactggtgaatcctgccaataacctcttgggtactaatcccctggatctatccgaattttctgatcatttcttctaaacttccatttccaaccttacattcctccccttcaatgcctgcattctccacgggtttatctttggccttcatttctttttactttttttgttcgtttgttttggtggggtaatctctttcatgtccatgacttgaactactacctttagactcataattcctataccagtacctctggttagggtcatag

SEQ ID NO: 832950 - DNA, 631 bp, Homo sapiens
ttatatctttcaaaatagctagaagaaaggacttgacatgtacacaacacactggtaggataaatacttcagtgatgtataccctgaatatcctgacttgatcattacacgttctatgcatagaacaaatatgcatatattatgtttgtaagtatttgtggggtacattctatgcatatttgttttatatatacataatataccaattttttttgttgaagaaaacaatacgagcttaactttttcaatatattatcgccatccacaaggagggcacttaaatatttccttaaaatcctaccattaactaataattacaagagctttgattatgaattgctttctatatgtgcctgggaccatgtttagcacctcacatgaattatctcatttaattctcataacttccctatctggcttatgatttttttatgtcactggagggagcagtctactaatcccaaagaagtccaacaggtactagcctacctggctgaaagggagccaagcaggtctacttcacaaatgytttgaagctaatcatggcttccttttgtatggactccacagtccctgagattattcagcaatcacctggtgagatgtgatgtgtgattttgatacaaatgtg

SEQ ID NO: 832951 - DNA, 632 bp, Homo sapiens
tctaagtattttaaaacacatctaagtctatttttcatttccatgcaatctcccagtctcagatggtttgacctaaagacttcttgtttcagcatcatggatggaatatctttatacacgaagaattatctaaaatgttctcatttattgtaataactacattacaggatggcagttgttctgaatagttgttctgaatattcggctgggatgcaaggtgagttctttacgtttaattgaaagagaatgcatgaataatatatttatatgtgcagcaatatatttcaggttaacagagaggatattttaaggtaatccaatactaaaaggtggggtattatggtacaaattggctagctgttctccaactttttttccttcctcatgggcacatagctagactatattccccagccttattcaagtcaggatgacccttacgactaaattctggccaatagtctttagacacaattggtttgcagtcttcccagacttgacccatggagccttstttgtagtatcccagttctctcctccccttgactctcggctgcctgccaacaaccagagtattcctgggagtcatgcattaaaaacagcaaatccatgagcatgggatgtgtttccat

SEQ ID NO: 832952 - DNA, 515 bp, Homo sapiens
gccatgttctctgtacaagcctgactcatccaggccttcatcctcgggatccttctccttcctccagggtctgaccctttctgaaagtctgagacttccttctccacactgccaccctgtcctggaackaacattgcaacactttcactcctgagctagtggagtctggaaggacaaggaattgacatgactccagctgtgtccagctgacatggattgcaccagtcaccctttaactgctttgggttctggcaactatacacagctcatgtgacttcttactgatctttatcacaaatatctgttcttggttcctgagtctatacttgccaaagctgagaaaaaaatcataatttttgataggacttatagttctcaaattacatgactactagagtctggaaaaaagtaataatgaagttcacatgtatgtgtgtacgtatatgtatgtatgtatgtacatatacacaaacatatgtatgaaattgctttatcttaaggtagctataaatcaa

SEQ ID NO: 832953 - DNA, 614 bp, Homo sapiens
gagtcagagacttttattttgttcatttgctcatctcagtgtctggcatttagtaggagactcagaaatgyctttcaaaatgagctttgcagagagactgaaagagactcaaagtcaggtatcactaagaccatcctccaggtgaaccaatctaataagaggtcctaccccgtttaataaagtaaccttgtccaggcatggtggctcatgcatgtaatcccaacactttgggaggccgaggcagacagattacttgaggtcaggaattccagaccagcctgacaaacctggcgaaaccccgtctctactaaaaatacaaaaattagccaggtgtaatggtgggcacccataattccagctactcgggaggctgacacgagaatcacttgaacccgggaggcagaggctgcagtgagctgaaattgcaccactgcactccagtctgggtgacagagcaagactccgtctcaaaataagtaaatgaataaatgaatgaattaatgaataaataaataataaagtaacctcttgtccacacgggcatatcttttgctctttggcaggctcctgctttccgacccctcatcaatatggccctatcgttgggaacatgt

SEQ ID NO: 832954 - DNA, 618 bp, Homo sapiens
gtgagaaatccatgtcaacagataatttgtacaacataaaataaaatgcaaatacagcctagggaaagtaaaacyttgttttgcctgggcaagttagggaagacttcacagaagaagcaatatttgaatcaagtcttaaaagaagataatcattgtcttgaagttctcttttaaaatttaagcaatatcttacagtttaggggtaaagaaatgaagatgtggagaggtaacaatactatctggggatcaattagtgtattagaaccttaacacattgaaagaatacaagtataaaaagatggggaaagtttcacaggataccaaaaaaaatcctaaaatactgtatgcccacatgattcccaggatgaggatgttgaagggaataaaaggcaccagagatgagcttgatctactccataattaggtataaatctagccccatgtaaagtaacctcagtattgtcagccacagagctatcctctctagcattagtcaattcttgaaagctagttattttcacagttgagatcaactgcctaaaatattctatattactttcttgcctctagaacttgattaactataggcagaaaccaaaggaattcgaactcatttgt

SEQ ID NO: 832955 - DNA, 540 bp, Homo sapiens
ttgtgatctctactcttgtctccagccaatgtctctgtgacccttggctctgaccaggtagaggagatactgagcaacagtgggtggggatcrgggggagactgtatatgttcctgcccaggagtgatcattcatgaaggatgtgactcaccaaccagctttgatcgtgattttgtgcatcaggtccccagaaatcctgactcattcactgagccataaggagattgttttaaagcagttgaagtctcacagcaagtttatacaaacagaagtgggttaggcgtgggactcgctgatgtaaattggacttactcattgattcacatagtcttctctcataatggatcctatatgtaattttacccagaagtgtttgttgttcctgctgaggttaataaaccttcgttgaaaacttactgtgtgtagctgatcctgttaggcgattgggttggataactatacagagatgctctaagttattgaggaattcgcaatccagtggggcaaagtcaactcagttcagccaggatttattagaaa

SEQ ID NO: 832956 - DNA, 555 bp, Homo sapiens
catttgattattggcaggattcagtttcttgtggcctgttggactagagacctcatttacttcctgggtattgaccagcggctgccctcatttcctgycctaacacggcagcctgcgtcaccaaaacgtgcaagttgtgaaggcaatagagagtctgttagcaagatgggtattgacagtttatgcaacacaactatggaagtgacatcacgtaatctttgctgcattccattggttagaagtaagtcacaggcctgcccatgctcagggtaggggataagacaggggtgagaacactaggagggagagtaattgggggccattttagagtttgtccaccagtaataatttggtctcacatagctgtgggtggatggggttgagaggctgtgctttaccttaaagtctgcaggatttgatctgtgccgtgtatttgtcatcctgctcagagtatgcaggttagtggggaatgtgcttctcacagtattggcagaggcacaagacagcaagctgaactacatgcgtgtgtttctgatatctacttgcatcacattc

SEQ ID NO: 832957 - DNA, 658 bp, Homo sapiens
  misc_feature 1, 2, 3, 4, 5, 6, 7, 8, 9, 10, 11, 12, 13, 14, 15, 16, 17,18, 19, 20, 21, 22, 23, 24, 25, 26, 27, 28, 29, 30, 31,32: n = A,T,C or G
nnnnnnnnnnnnnnnnnnnnnnnnnnnnnnnntcttgctatttagaagccacttttgtcattcaaagagctctcaagctccatcagttcayacatatcatatgcttagggctgttcacgattctgccaacactgcaacctctgtacctacctttctatcttttcttatgattcctattctccctttattctctatcacatttatcatagagcataaagaaaatagaattttcacaactttttggttaggtcctagataaatcagctgggctttttccccccatggatgattgacaattctgatgtaatacagaataaagggagctctgaagaccaaagtctatggtcttcactgcatctcaattcccaacgattcttatcatatgctaacttctacatttttagttttaggaattttagtgttctgggacaggatgttttaattctaaatatattccctgagccataaaacccagcaagaacagcataagtactcaagctaaaatgtgtgaataataacctaaccaaatcaataatttaaggccagtgcagatgtgtgaagttacatgtgttcctgacaactttgttactctgtgtttctactggttttgcttttctgcttccaagtctagtgaaatgcgtttgcaatatagagacat

SEQ ID NO: 832958 - DNA, 658 bp, Homo sapiens
  misc_feature 1, 2, 3, 4, 5, 6, 7, 8, 9, 10, 11, 12, 13, 14, 15, 16, 17,18, 19, 20, 21, 22, 23, 24, 25, 26, 27, 28, 29, 30, 31,32: n = A,T,C or G
nnnnnnnnnnnnnnnnnnnnnnnnnnnnnnnntcttgctatttagaagccacttttgtcattcaaagagctctcaagctccatcagttcacacatatcatatgcttagggctgktcacgattctgccaacactgcaacctctgtacctacctttctatcttttcttatgattcctattctccctttattctctatcacatttatcatagagcataaagaaaatagaattttcacaactttttggttaggtcctagataaatcagctgggctttttccccccatggatgattgacaattctgatgtaatacagaataaagggagctctgaagaccaaagtctatggtcttcactgcatctcaattcccaacgattcttatcatatgctaacttctacatttttagttttaggaattttagtgttctgggacaggatgttttaattctaaatatattccctgagccataaaacccagcaagaacagcataagtactcaagctaaaatgtgtgaataataacctaaccaaatcaataatttaaggccagtgcagatgtgtgaagttacatgtgttcctgacaactttgttactctgtgtttctactggttttgcttttctgcttccaagtctagtgaaatgcgtttgcaatatagagacat

SEQ ID NO: 832959 - DNA, 518 bp, Homo sapiens
aatttttgagcaaaataaatgattattgtttctataagccaaagtttgggggtagtttatcagatagcaacagatgactggaaccaagctaacattagaattaagttttcaaaatggcataaattaactactaccagagcacagaaaaagaaaaaaataaatttttcctggagagaaaagaaagggcaattacagaggaaggggctttagagcttggtctcagaagatgaatagagtccagaagatggacaacagaaggttaaaaaagtggacacacgtggtggttttggaaaatgtggagtatatggtggatatctgtgagctttgcctcctttggtagaccttactgttgatcaccaagatttctgattctcctttccatccagacacacaccttcttgaagttaggtatggccatgygacttgttttggccagtcaatcatcataggaagtgtcatgagtctcttttggtgaaatatttaggagcctgtacacaatttccccattctgtgacttc

SEQ ID NO: 832960 - DNA, 497 bp, Homo sapiens
atgttcagactattgaagaatctcaacctttccctgagggtaggagtagtgtctggtatagcttagcatcatctctgataggcaataataagagtaaggccatctttgctggttgctgattctttctgttctgtaatttctgtttgataagatcaaatgggctcaacgtactgtgtaggccagacagagagagagtccaaatctggtagattttaggataagacagtgggccttgcttatatcactgagttctctgggctttgatagaatttgatagaatttattggccttcaccgtgttcctaggtcaggtggttttctgtcctcttgttccaggtataatggcggggcactaagttactccagcacttagtgacttgtgctcatggattctgtgggtcaggagatcagatagggtakacccatttggggacagcttgtctgtgctctgggtggttggggatcctcatttgggaagactcaaaagttggtggtaac

SEQ ID NO: 832961 - DNA, 498 bp, Homo sapiens
aatgttcagactattgaagaatctcaacctttccctgagggtaggagtagtgtctggtatagcttagcatcatctctgataggcaataataagagtaaggccatctttgctggttgctgattctttctgttctgtaatttctgtttgataagatcaaatgggctcaacgtactgtgtaggccagacagagagagagtccaaatctggtagattttaggataagacagtgggccttgcttatatcactgagttctctgggctttgatagaatttgatagaatttattggccttcaccgtgttcctaggtcaggtggttttctgtcctcttgttccaggtataatggcggggcactaagttactccagcacttagtgacttgtgctcatggattctgtgggtcaggagatcagatagggtakacccatttggggacagcttgtctgtgctctgggtggttggggatcctcatttgggaagactcaaaagttggtgtaaca

SEQ ID NO: 832962 - DNA, 515 bp, Homo sapiens
ttttgagcaaaataaatgattattgtttctataagccaaagtttgggggtagtttatyagatagcaacagatgactggaaccaagctaacattagaattaagttttcaaaatggcataaattaactactaccagagcacagaaaaagaaaaaaataaatttttcctggagagaaaagaaagggcaattacagaggaaggggctttagagcttggtctcagaagatgaatagagtccagaagatggacaacagaaggttaaaaaagtggacacacgtggtggttttggaaaatgtggagtatatggtggatatctgtgagctttgcctcctttggtagacctcactgttgatcaccaagatttctgattctcctttccatccagacacacaccttcttgaagttaggtatggccatgtgacttgttttggccagtcaatcatcataggaagtgtcatgagtctcttttggtgaaatatttaggagcctgtacacaatttccccattctgttgactt

SEQ ID NO: 832963 - DNA, 515 bp, Homo sapiens
ttttgagcaaaataaatgattattgtttctataagccaaagtttgggggtagtttattagatagcaacagatgactggaaccaagctaacattagaattaagttttcaaaatggcataaattaactactaccagagcacagaaaaagaaaaaaataaatttttcctggagagaaaagaaagggcaattacagaggaaggggctttagagcttggtctcagaagatgaatagagtccagaagatggacaacagaaggttaaaaaagtggacacacgtggtggttttggaaaatgtggagtatatggtggatatctgtgagctttgcctcctttggtagacctcactgttgatcaccaagatttctgattctcctttccatccagacacacaccttcttgaagttaggtatggccatgygacttgttttggccagtcaatcatcataggaagtgtcatgagtctcttttggtgaaatatttaggagcctgtacacaatttccccattctgttgactt

SEQ ID NO: 832964 - DNA, 554 bp, Homo sapiens
ttcaactactatttataaagcaactccaaagttaatatactctaacgtatatgttggtaagttttctttatgctcttgctctttcattaaaacattccttttaactcaccctgatccacagcccagagtgggaacctcagacccctacacatcactggaggcttgaagatagcttcaagaacacgagagctccttctctttgctcctggtttgcactaccaagtctcatttacaagtgaacttttcacctttctaagcagtttgagttcatcaaaggaaaatccctactttgtagttccagcacacatctgagcagcagccagaaggttcttcccactccctccagctctctcctataatacacactagggttttccctctggagctgaaataaaacagctctctctttactccagctcttctttatccaaatcaggaagtagtgttgctgcatcttattattttcattgcagctagcccttattccagtcccagtatcttctccatttcccttcctcaaaaggtggttaaaytggaacataatactgaagtga

SEQ ID NO: 832965 - DNA, 563 bp, Homo sapiens
catttgattattggcaggattcagtttcttgtggcctgttggactagagacctcatttacttcctgggtattgaccagcggctgccctcatttcctgycctaacacggcagcctgcgtcaccaaaacgtgcaagttgtgaaggcaatagagagtctgttagcaagatgggtattgacagtttatgcaacacaactatggaagtgacatcacgtaatctttgctgcattccattggttagaagtaagtcacaggcctgcccatgctcagggtaggggataagacaggggtgagaacactaggagggagagtaattgggggccattttagagtttgtccaccagtaataatttggtctcacatagctgtgggtggatggggttgagaggctgtgctttaccttaaagtctgcaggatttgatctgtgccgtgtatttgtcatcctgctcagagtacgcaggttagtggggaatgtgcttctcacagtattggcagaggcacaagacagcaagctgaactacatgcgtgtgtttctgatatctacttgcatcacattcactaatat

SEQ ID NO: 832966 - DNA, 607 bp, Homo sapiens
ctttctctatccatgcaccaaactagagtttcaattataaaggctttataacatattttaataactgacagagcaagcccctctgtgccagatttgttgatttttaaagatttttctgaataatttatttcttccaataaaatttattaaccattatcttcagaaagaaaatctagcaacttggtggtccatttattgggtttctgttgtatttaaaaataaactcacctagaacagaagccttgctgaagttgaatcttcctatctgtatcttcgtttgctcaagtctacttttgcttctctcaatagtgtttaaagtttttctcacataggttttgaatgtttcttgcaaagttagccaagatgttttattcatttttgctattataagtatggtgttatttttcatgaatcattttactggtatttcatctatatataaaagctattttttgctacgttgtggctgttttactgttttccaactttctattatgaaaaatttcaaacattgagcaatgttaaaagaactttagagtgaacccactaactaaattctaacattaccattttactatatttattttwtaaggctattcatttttaa

SEQ ID NO: 832967 - DNA, 614 bp, Homo sapiens
ttttttaatttaagaaatatggcatgaaagctttctacagagactattccaagtgcaggagataattcactgaaaaaaatgacaaaaacaaaatgttaaaattcttattttataaagtttacattctagtgggtggagggagaaaaatatattattaaaacaaactacaccagaatgtgttaaaaataagaagaaaaataaagcagaaataccagttatgaagtgtcagtaggatataggaaggagaaataagtatggccctgaggtcaaaacattcctagaagttcaaatcaagagctatagagttgggacaaatagagcaagggaaaaatagttagaggtgacttacagaggggatcagagtcaaatcctagaaccttgcagtccactgtaaggacttagcttctgccataagaaagaataagatataaaaggacccagatgaatgaagcctttatggccacagaaaccaggtgggaggagatgccactgtctaggataggtaagattcttggcagaatcacattttggtagatgagtgtcaggggtttgattttggacatgcaacatttgaagtttccttyaaacctttagatagttggttgtctctatct

SEQ ID NO: 832968 - DNA, 537 bp, Homo sapiens
tgggcagagaaagaggctctttcttctgaggtaatgtgttagctggsctgggattaaagcaatcatggagcaagcctgttgcctaggttgctctccccacccttaccatggtccggtccatctgctttgagagatcagaacagagtcaactatttttagcaacatgttttcttgtccttgctggctttgttttagtttgaagtacacaaatttggggtaccatttctatttagataattgaacttgaatacttatgctggttgctaagtctaccagacattctcaccaaaagaggaaagggagtaattcaaaccatttaggaatttggggctgtaatgatgcaagtgtggctatcagttttctttctttaaaataaaattggcagcttaaataatagagtcaaattgaccagatgttttgcacttggttaaatgcattccaattaaccaatcagtacgaataactgattagatcttttgctaaagaattcccattaagcaaataacaacaatggcaacaacaacaacaacaaagcag

SEQ ID NO: 832969 - DNA, 537 bp, Homo sapiens
tgggcagagaaagaggctctttcttctgaggtaatgtgttagctgggctgggattaaagcaatcatgragcaagcctgttgcctaggttgctctccccacccttaccatggtccggtccatctgctttgagagatcagaacagagtcaactatttttagcaacatgttttcttgtccttgctggctttgttttagtttgaagtacacaaatttggggtaccatttctatttagataattgaacttgaatacttatgctggttgctaagtctaccagacattctcaccaaaagaggaaagggagtaattcaaaccatttaggaatttggggctgtaatgatgcaagtgtggctatcagttttctttctttaaaataaaattggcagcttaaataatagagtcaaattgaccagatgttttgcacttggttaaatgcattccaattaaccaatcagtacgaataactgattagatcttttgctaaagaattcccattaagcaaataacaacaatggcaacaacaacaacaacaaagcag

SEQ ID NO: 832970 - DNA, 575 bp, Homo sapiens
aactgccatagcatttcaacatggtggtctaagctcattgtactatatctcaccacaaccaaattagccatttaattagcctgaaatggtccttgtaggggaataatggatacttagtcaataacataatcattatgtttcttagtcacatattaattcactttctgaagtgctttcaaaagaaaagaggattactgactcagttacctcagagttgaataataactgagaaattcaagaaaagaatctctcagtctgttatattgctgtgtttaagttataattcagaaccaagtaatattgtatatccatctatatcgtaattttataatctctaaaagaaatctctaaagtattattcatcatagaaaatagaacatgttcagaggagttaagtggcttttcataaccagtcaatatggcagaaaaaaatctaaaactcaaacctgtatggtagacccaaaatcctaagcctyttctcccatgaatttcctacctagttttaaatttaaaactttgctctccagaattttaatcatccaaagaatgttcacgttgaataaataaatgtgttc

SEQ ID NO: 832971 - DNA, 575 bp, Homo sapiens
aactgccatagcatttcaacatggtggtctaagctcattgtactatatctcaccacaaccaaattagccatttaattagcctgaaatggtccttgtaggggaataatggatacttagtcaataacataatcattatgtttcttagtcacatattaattcactttctgaagtgctttcaaaagaaaagaggattactgactcagttacctcagagttgaataataactgagaaattcaagaaaagaatctctcagtctgttatattgctgtgtttaagttataattcagaaccaagtaatattgtatatccatctatatcgtaattttataatctctaaaagaaatctctaaagtattattcatcatagaaaatagaacatgttcagaggagttaagtggcttttcataaccagtcaatatggcagaaaaaaatctaaaactcaaacctgtatggtagacccaaaatcctaagcctcttytcccatgaatttcctacctagttttaaatttaaaactttgctctccagaattttaatcatccaaagaatgttcacgttgaataaataaatgtgttc

SEQ ID NO: 832972 - DNA, 654 bp, Homo sapiens
tttagctaaaatgatctctgggatccattttcactcataaattctatgattctgggacaccaaataaatgttttattcgtctatatttgcccacratatgcattttttagacccacagggaattttttctgaatcgtggactcagaaccagttaagtgcatgactgacacaacacatgaactttgaacaattacattcaaacatcaggacagtctttgttaacatcgccaactctcttccttattaccagtaagtttttttttttattcgctgtgtaagggcgattaattcacatttcttataaagttgtacaatacaaattgcataagaaaataaatgactcttttctattacttggtggaaaaagttgatttatagtccctgagagaaagaactaaggaagagagttaaaattccatttactatatgagatttttaaagatctagcactcatgcatgttgtgaaaatactaagtatctcaaataatgtgtgagattctccttagaggtaaggttttatattgtgaagacattttttcttttattttttctattgagttactgtctttatgctttacttgtacctcatactataaattaaaagattagtgttcggtgtcattgcattaatgaagattattatttacaacaata

SEQ ID NO: 832973 - DNA, 522 bp, Homo sapiens
gggacctttcaacccattcaatctgccagatcactgcacttacatgtacaatctcakgccaggctagcaggagggctgcccagatgatcctagcctaaataactaaatcacagaattgtgagcaaataaatgttttaaaacactaagattgggaggtgaggttgttatgcaatagatgactgatacagttgttcaactgtcttatgcttccataagttcattttgttcataaatccccctcaaattatctgatttcatgtctaccacctggaccctggctgatacctccaccatgacagtctgataattaatcgaagacttatttgaaaaaggattaccataggatccatctccccatgctcctgaatccatagacgtgtttctctaggaaatcttaattaatagttatatataatagttacttggtgtctggtgtgttgcttacattatcactgcaaaactggaattaagtattattatcatcctattttacttacaaaaaagcagaaatttggagataaa

SEQ ID NO: 832974 - DNA, 619 bp, Homo sapiens
atataaaaaaggtaagttcttatggcatatttctgatcacaaacatatcaccaaacatcaaaatgaatayccaaaacacttctaacattaaacattgaaataaatgtgagctacacatatatttaagaaagattaaaggccaggcatgatggcctatgcctgtaatcccagcactttgggaggccaaggcaggaggatcacttgaggccaggagttcgaaatcagcctggacaacctaatagtccacttctctgcaaaaataaaaataaaaaacaaattacccaggcatggtggtgtgcacctatagtcccagctactcaggaatccaaggcagaagaattgcttaagcccaggaggtcaagacagcagtgagctatgatcatgccactgcactctagcctgggcaacagagcaagactctgtctcagttaataattaattaatcagtaaggtcattatttacccacttattcataacagttcatggtctcgggtggtcatagcctatcacagcagctcagggaaccagatgggaaccaaccctgaacaggaccctggacagcatgccatcccattggagggtacactcacacacacccgcactcactcagactgggac

SEQ ID NO: 832975 - DNA, 638 bp, Homo sapiens
ttcttggagaggttaagtaacttgcccaaggtcatacagctggtacatggtagagcagggatctattccaagtctaacacagtatccattctcttaatccctatactataatgtcacttgaatatggtaacaaaagtagttagaattgccagtgtaatcaactagaaacaaaattcaagcctacttgatagtttagctcataaaatctgtctggtatcaccaaaggtgataggtgatttgggctggggagaatctataaattattttcaacaattcaaatagcctaatgcatgggttcttaatctgtttctgtgctacagtctcctatgactgtctggtgcagcctgtggactaccttctcacaataatgtttctaaatgcatgctggctgggcatggcggctcatgccgataatcctaggactttgggaggccaaggcaagaggatcacttgagctcaggagtttgaaaccaggctgaacagcatggcaagaccccatctctacaagaaaatacaaaaattagtcaggtgtggtatcatgtgcctatggtcccagatacctggkatgctgaggtgggaggatttgttgagcctgggagttcaaggctaaagtgagccatgatggtgctatagcactt

SEQ ID NO: 832976 - DNA, 638 bp, Homo sapiens
ttcttggagaggttaagtaacttgcccaaggtcatacagctggtacatggtagagcagggatctattccaagtctaacacagtatccattctcttaatccctatactataatgtcacttgaatatggtaacaaaagtagttagaattgccagtgtaatcaactagaaacaaaattcaagcctacttgatagtttagctcataaaatctgtctggtatcaccaaaggtgataggtgatttgggctggggagaatctataaattattttcaacaattcaaatagcctaatgcatgggttcttaatctgtttctgtgctacagtctcctatgactgtctggtgcagcctgtggactaccttctcacaataatgtttctaaatgcatgctggctgggcatggcggctcatgccgataatcctaggactttgggaggccaaggcaagaggatcacttgagctcaggagtttgaaaccaggctgaacagcatggcaagaccccatctctacaagaaaatacaaaaattagtcaggtgtggtatcatgtgcctatggtcccagatacctgggatgctgaggtrggaggatttgttgagcctgggagttcaaggctaaagtgagccatgatggtgctatagcactt

SEQ ID NO: 832977 - DNA, 569 bp, Homo sapiens
aaatgagtgaatttaaagaaaatattaactacacaatggtccaggacagaacaaaaatgtttgaaagtgatgctcaaatgccacctagtgcttatagtcttagagttaattttacaaaagagtggaaagtcactcccctcctcctctcaccaggtttcccaagagacctggaccaggctagggtaaagtgcagcccagggctataacagaacaaagtgaaattgtagtttcaaggatcaaatttgctgcctttttggcaaccagctgaattaactgactctaaaaagcagaagcagtataattagaatcattaggagtccagagaaaaagacttaaaattacccacttttccctgggtggtatgacaaactctcactgtctttgattttatgaagctcagctttcctacagccctgtcactctacaggttggaagcgtgatttcataccacgtacttcaaggccaacttttccttgtccggtcctcatagtctcacrtgaagtttatgttatttgttcattcccattatgctagacagacaatggatgcacacatagttttcatcttgg

SEQ ID NO: 832978 - DNA, 616 bp, Homo sapiens
ccacctgtgggggaaaaaccggaataaagtaatatataaagttatatagaaaacacagatttttatataggcataaaacatttctgagagaactcatactttccattgaatatmtttttccaatgtttccatttattttaagaaattcatttatatttcattaaaaattaatgaaagtataaaaagtatttactaaaaataaaaaaagtaaatttaataattttggctgtacactattttattaatgtaaatgttcttacatagtgtttaaggaagaaataccactatcttctagtgttgttttagaaggtaatgaaaaaagacacccaataaatctttttaaataaatttttactgaaccagtaaccagcaaggtctttattcaataatttgcaattttggaatataagttctctctgcataccgaatgtaaaaggttttgggtttcaaagtgtatttctgtgtatttctgttgggcacactacatgcattcaacaaaaacttgtttggttaaatctgatcactaattagatgaatgtcaaccctatccatttgggaaatagaatttaaatacgaaacattatcgaggctccctttttttaaaaggtgaatttgt

SEQ ID NO: 832979 - DNA, 600 bp, Homo sapiens
aagcaatcgtgataaaatacacttaacataaaattaccaytttaaccattttaaagcgtatgattcggtagcatttagtatattcacactatcttgttgcagaatattttcaccaccccaaaggaaacccatatacatcagtaatcacttcccactccccctctccccatcagcccctggcaaccattaatctgctttctgtctctatagacttgcctattctggatatatcctagagggttttaagtagggtagtgacatgcttatgtttgcattgtagaaaaatgacttaatgtctaaggagaaggctaatttggaagggagtcatactggtacaaggagactaccaaatcaggtgagaggatgtgggctcatgggagggatggggagaaggggaaggagaagagggtagtaagatggaaccaataaaatcagtgattaatccgatataaaggttaagtgagactttctctacccatccccaacaaatcctccccatttcaggcttctgacatgggcagatttgcaaaggtggtgctactcaccaggaaagagaaaagagccacatgggagctgcaagtttggcaggcagaatatgta

SEQ ID NO: 832980 - DNA, 583 bp, Homo sapiens
tggataattctttcaaaaatatgccagaaccttcatatttaraaaccttttcttaacctagtttctcactccagtaatggcacctgcaaaacttcttagaagggattgtctatactccctacccttacttccttactgcttgttctctatttattaatttatttatatttacattgtattagaaatatagatccattgtgcaaaatcagaaaatacaaataagctaagagaaaatctaaagtacccatgtggcaaaactgttaaacccatggctaatggcacttcccaacttccctcaccactggggtgaacacttgcattccactggtgagtgagacacattatttctacccactcataacatataagtgatagtgatgtgtcctactttctggcatggtcaataaaatcccccgtggacactcctctacactctttcttcttcctgcaaaactgaatagccaagacgacagcaaccttggaaaccatgtttttacaatggcgtagtcaatatgagtcttgatctataaatgacctctggaaatggacttgagtttaccctaagccaatgaagaaacatcta

SEQ ID NO: 832981 - DNA, 518 bp, Homo sapiens
cttgcagagatttaaaaggcactttgattaatggatttgatcagtgtccgctcttgtttaaccatggtgctctcctctgcgtttcacacccacatcacaccatccccttttattacaggaactgaagaatgggatggcctgccagacagcagagtaatttatgaaaaatatatttttaaagggagagtgtattaaagcttgaaaagaactcagagcctgttgctattttaattttaaataggctatgcaaataattaaacgttaggtcatattgacaccatcaaatttgggagagtatagatggtatacaaccccagagtcctagagaacagtaaatcagatctatcagggcactgcatcatatcctgcttttgacatgaaacaacagtatcgactgggttaaaaatgagccaattttcaaaaacctctacctgctacaaacgttttcacatataccacagctctttaaaaagagatraagagaaattgagatgaattcataaatatatttaagcact

SEQ ID NO: 832982 - DNA, 652 bp, Homo sapiens
tcatgggggacaagggcagcgagtgctcagtttggttagatcctcctaagaagtgtatagcatgctgtccggaattgcccctgaaggacaagaatgaagattttatgcagtgaaacaaattctcatgtaaagaagactgaaatcattcattgttccttgttctgcactgattggggctcctgggctatttttgctgcaggctagtcttcagaacggcctttgggtaggaagatgacacaaggatgctaaggcaagtctgagcttttagagaatctctactgctgctgtggttgaactcagaggagggcccaggagactgaggcagtgcaccagaggcatatgctcaggcctattatgtgtgtgccttttggagcaacacttctcaaagtcctttggaaaatagttgagggaaataaatatacatacacacactaggtcatcactttcaggtatactctgcaagcttttccttatttggggagtactagattgagtatgaagccacaattttatatatatatatatatatatayacacacacacacacacacaaagtgaagaaatcaactgagaaagaaattattacagaagtgaagtacatgtcgggtgcaatgtctagacacaggtactgccagtagttgtattagaacgg

SEQ ID NO: 832983 - DNA, 520 bp, Homo sapiens
cattgcagatttgagtattgtgagactacacattgctggtactagatgtacgtattcaaatcattctattctacaaaacagcaggatattttttaactttttcaactgaggaaagaatatrgcttttttaaaaaacatcacaacctctgttcctttagaaatgactaaaccataaagcagcaaattacttttatttacaactgcagatttctaggaatgtatctctatttttcattttcttttcttttcttttttttaaaaaaagaattattggtcttagtaaaagccacaaacttactttgagagattaaattatcttgattcttagcaaaacataacacaagtggaaagccttcttcatctatttgatctccatggtgtctttggtgtatatgcgttttggtatatgtacaaagagaaaacagttgtatttagccttcagtagtacattataatgtatgttactttaaaaaaattcataccatgtatctttaaacgtaagcaccatatggaagttcct

SEQ ID NO: 832984 - DNA, 561 bp, Homo sapiens
acatggagcactgggtctctgctagccaattaagaatgaatggcacacctgtagagactgctacccaccccctattaccatcaagggttgggaatgttggccctgttccaatcctgtgtgtgtgtgtgtgtgtgtgtgtgtgtgtgtgtgtgtgtgtgtgtgtgttagacagtttccccagctggagtgcaatggcatgatcccagctcactgcaacctctgcctccagggttcaagtgattttcctgcctcaggctcccaagtagctgggattacaagcacatgccaccatgcccagctaacttgtagttttagtaaagacaggtttcatcatgttggccaggctggtcttgaactcctgacctcaggtgattcacccgcctcagcctcccaaggtgctggaattaaaggcgtgagcaactgtacctggccccaatccagtgttyttttatgtcattttccctcttcctttcagggctgttatggcacctacctttttttaacgatattggggatgttattgcaaactgccaagatattactagatagaatgagcctttg

SEQ ID NO: 832985 - DNA, 603 bp, Homo sapiens
aggaccagggactttctgtcttgcagaatgctttgtaggttggaagagaaagatttcactgataactatgtaaagatgaattgttatgtagaggaacataaagatactgaatataataaaattctacaagattagcattcaaatgggcattatgctgtagaaatcagattgttatgcaggaaatattcactctttccctctcttttgcatagaagcaatattttcccctgctctgttggtgttcagttcagccacacaacccctaacttaggaatctgagaagctactaagagataaaattaaacaacaatactataatagtaatccttatttaagagcttcttgcctataattcccagttactgtccggagtttaatatcttagcaggacacacatcaagtgtaattgacacaccatggaacaaaatttctcgacgtttgaaatttactagtatgttgctcaaggtttctcttcttcgggctaagaatcccyaataaattaattacatagtaattatttgaggatgtactatgttccagatcctaaggtaataatttaacatagtacttgcccttatgaagcttatggtcttctattctaat

SEQ ID NO: 832986 - DNA, 515 bp, Homo sapiens
agatgtcagatttcatgtaaatctcactgtccttgaaccactctcagtctgccttccttcatggcactaagctggtgaactagtgagtaagtcttctcttcgagagggagcattcttctctttaccatgctcctttcccagctttcataatccatttatgaacctatctggcccttttagacatttgagttttgacccttgttatatatgatgcaatgtacctagaagacaatattttatggagtcattgttttttacaccatattaccttatgctcatttatatgaacacctcatttcagctgtcatgaactatgagcatttaatgtaagaaagttgaacatttacataacaagaaaaataaaattataatgataaggaattcatcttgtaaaaatatgtatttctttttacattggggtcagaaacatggcaactactyatggaatagatacattcacatttataattgatcaaatctgtcaagaaaacattacttgtttaccatgttctatg

SEQ ID NO: 832987 - DNA, 603 bp, Homo sapiens
aatgcaacaaaaacagaaataaataagtgggacctaattaaactaaaaagcttttgtacagcaaaagaaataatcatcagagtaaacagacaacccactgaatgagrgaaaatatttgcaaactatgcatctgacgaaggactaatatccagaatctgcaatgaactcagatatattagcaacagaaaaacaaatattcccatcaaacagtaggcaaatgacatgaacagatacttctcaaaataagatataaaaatggccaaaaacatacgagacaatgctcaatatcacaagctgtcaggctgatgagcacaatgagataccaccttgcccctacaagaacggacattattaaaaagtcaaaaaataatatatgttggcttggatgtggtgaaaagggaatgcttatacacggctggtgagaatgtaaattagtacaacctcagtggaaagcagtatggagacttcttaaagaactaaaagtagatctaccacttgctccagcaatcccactactgggtatctacccaaaggaaaataaatcattatatcaaaaagacccctgcatgcgtatgcttattgcaacacaagtcacaattgcaa

SEQ ID NO: 832988 - DNA, 542 bp, Homo sapiens; identical to SEQ ID NO: 827962

SEQ ID NO: 832989 - DNA, 616 bp, Homo sapiens
cccagtctgagtgagtgcgggtgtgtgtgagtgtaccctccaatgggatggcatgctgtccagggtcctgttcagggttggttcccatctggttccctgagctgctgtgataggctatgaccacccgagaccatgaactgttatgaataagtgggtaaataatgaccttactgattaattaattattaactgagacagagtcttgctctgttgcccaggctagagtgcagtggcatgatcatagctcactgctgtcttgacctcctgggcttaagcaattcttctgccttggattcctgagtagctgggactataggtgcacaccaccatgcctgggtaatttgttttttatttttatttttgcagagaagtggactattaggttgtccaggctgatttcgaactcctggcctcaagtgatcctcctgccttggcctcccaaagtgctgggattacaggcataggccatcatgcctggcctttaatctttcttaaatatatgtgtagctcacatttatttcaatgtttaatgttagaagtgttttggrtattcattttgatgtttggtgatatgtttgtgatcagaaatatgccataagaacttaccttttttata

SEQ ID NO: 832990 - DNA, 615 bp, Homo sapiens
aagtgctgccatgtgagcatacgtgtaattgtctacagagctctagaaaacagatgaactagcaggaagggtcactgcaggccgggacaacacccagggaaaggcctcactatggctgggaagagcgcggtgtgtgcgtctagcaggagtccaggtgtggggcaggagaggccgcttgggtaaagggagcgaccacacactgggtcctgcctcatgtgcacctggccatgtgtcggcacttggtgtcgttatcctgcccgctccttacgagaaccctgtgaaacagaaactcctcctgattttacagctgaggccaaggaagctcacacatcacagattaaataatcgattcaaagttactgaaagaataggagagtccaaatctatttgcttaatccccagaccagggctttctgcacgtgcctcagagcctttggtgcagctccaaagggaggcatcgagaaacaccaccggctggaaatgtggctctgctcccgatctttgtctgcgttggcgagacacccgccgctctgggccggaatctctcatctacgaaaaagtgggtagatggagaccaccctcatggtcccwtccagctatagaaacagtaacttc

SEQ ID NO: 832991 - DNA, 615 bp, Homo sapiens
ccttatcagattttgtgaaacacattgattaaactgtgtattgctaataatagtaacagttcaatccagaagaaaatttgcttcttaggaccctaatgatacagtctgatcartaaaaaactttgaaggatagagcatattcaattatgatagaatcctgtggtagaagtgaaataaaaatattttcagggagaaaaataatcaatgcaaaattttcaactggtcaaaggcttaagtatttttgaaatgaatgatggggtggatattaagtcactataatatttataactcactgcatacatttaaaaattttctgtaatcactttattttcaaaacatcattcataactcatcagaacttcgtaactacttaaatttataattaaaagcctttttaaatttatcattaaaagcccccctctccccacctttttttttctttgagatggactctttctcttttgcccaggctggattgcagtgacgcgatcatggctcatagcagctttgaactcctgggctcaagcaatcctcccaactcagcctcctgagtagctggggctacaggcatgcacaatcacacccagctaattaaaaaaatatatttgtagagat

SEQ ID NO: 832992 - DNA, 377 bp, Homo sapiens
aaatcacactggaaatagctcaaagttcctggtgggttgtraagatgggctatttgggaaggttattcaggtggttcaaactgcctagggccttaagtgaacttgaataataataggccagtgatttctatcccaaaataggctgctgctctggtactttgttaaaatttgaaattacttttctgaaaatgccatctattaccataactctgcacagaaacactgacttgtaagtagatcaacagaggtcaaatgtgtggcactcaggcatagagcagtacattgaaaatcccccctaatgtgttaattgccgtgctccagaaagcatgcttcaataaaccctagtcacatatgacatatgaaaccccgaaggtttg

SEQ ID NO: 832993 - DNA, 645 bp, Homo sapiens; identical to SEQ ID NO: 823359

SEQ ID NO: 832994 - DNA, 575 bp, Homo sapiens
taattgctatattagtgggcttttctgctaattctagcatcagtgtctgttttgagtcagttttgattaatcaatttttctctttatgtgggtaatattttcttgcttcttttcatttctgaaaactgttcactggatgccagacactgtacgttctaccttgctagatatttttgtattcctctaaatctttttgagctttgtcatgagatgcagtgaaattgcatggaaactatctgatccttagcggcttgtttttaagcttgttaggtgggtcccaagcagtttagagctaattgtttccactgctagggcaagactttgagaatgctttaaccaacactttatgaatcgtgaggttttccattctggctggtgacaataagcacttttccctctacttttgagggccaggcactgagttctctctgatttcttttggatagtcagcccaaaagatccccagcctctggyagttttctcacgctcacgagctgggcagtactcagctgaatactcagaggcagtgtgcagagtcctcgagctctgtgcagtgtatcctctcccaggcttgt

SEQ ID NO: 832995 - DNA, 575 bp, Homo sapiens
taattgctatattagtgggcttttctgctaattctagcatcagtgtctgttttgagtcagttttgattaatcaatttttctctttatgtgggtaatattttcttgcttcttttcatttctgaaaactgttcactggatgccagacactgtacgttctaccttgctagatatttttgtattcctctaaatctttttgagctttgtcatgagatgcagtgaaattgcatggaaactatctgatccttagcggcttgtttttaagcttgttaggtgggtcccaagcagtttagagctaattgtttccactgctagggcaagactttgagaatgctttaaccaacactttatgaatcgtgaggttttccattctggctggtgacaataagcacttttccctctacttttgagggccaggcactgagttctctctgatttcttttggatagtcagcccaaaagatccccagcctctggtagttttctcacgctcacgagctgggcagtactcagctsaatactcagaggcagtgtgcagagtcctcgagctctgtgcagtgtatcctctcccaggcttgt

SEQ ID NO: 832996 - DNA, 593 bp, Homo sapiens
ctccttaactgactgcccatccctgtctgctggtaccagtcgaggcccagttaagcacagaatgggagatattgmcacacctaccctcccagaatcctcatctcaggacccacagcagtatttttgcaagcatctttcttcattttttcttctctttcaccatctctccacttcagtttctcttccattcttccaaattccacactattgtcactcagaattcactggtggtgatggaaagtctaggaaacctgaaaagagcaaaataagtttccaccctggttatacctttttttattattattattctggattcagactgcctgggttcaacttatgactctaccacttcctagctatgtgactgtaaacaaattatttcatctcttgttgacttaatttccttgtccataaaatagggataatagtacctaccctagacagttgttgagaggattaaatgagctaataatattaatattattatgtgagctaatattaaatgagcaaatattattattagctaacagaaagtgcttggcatatagtgagtgcttcgcaaacataagctgctatcatttttatatgtgtct

SEQ ID NO: 832997 - DNA, 637 bp, Homo sapiens
caaacttctctgagctaaagaagcatgttctaatgcattgcaaggaagctaaaaaccttgaaaaaaggtaagatgaatggctaacaagaataaacagtgtagagaagaccttaaataacctgatggagctgaaaaccacagcaggagaacttcatgatcaaatcatgagtgaactcccattcacaagcttcaatagctgattcgatcaagtgaaagaaagggtatcagcgattgaagatcaaattaatgaaataaagtgagaagacaagattagagaagaaagagtgaaaagaaatgaacaaagcctccaagaaatatgggactatgtgtaaaggcaaaatctacgtttgattggtatacccgaaagtgatggagagaatggaaccaagctggaaaacactctgcaggatattatccaggagaacttccccaacctagcaaggtggccaacattcaaattcaggaaatatagagaacaccacaaagatactcctcaagaagagcaacttcaagacacataattgtcagattcaccaaggttgaaatgaaggaaaaaatgttaagggyggccagagacaaaggtcgggtaacccacaaagggaagcccatcagatgagcagtggatctctcagcagaa

SEQ ID NO: 832998 - DNA, 535 bp, Homo sapiens
caatgcacagactcatgaaaaagcataaagccttycaaaatcagcaagtatttaggttcacctagagttgtaagtgaatgagaatatatgagtctagaaaaacagccagttaaaacccagccttaaaaatatctttgaacctaatttgaaaagcatggcttgtctcaaactggtatatcagaaaacccatcctggccaccatatgaggcataaattagaggtatcagtttggagagaagacattcatttaggtcactgaggaattgtaatcaataaatactaagatatgtagatcatgggaatgaaaagttgggcagctgtgcttcatattaaggaagtggaatttttgaattttgttagtggcttcataggaggtattgagagttagaggaaaaaaataggatgagtgtcaaatttctggtttcataacccaagttgccacttgttgggcgtggtttgatgaggatgagcatgtttgatggggaaaattgctatttctggcttgtggtatggtgaatataggaggcctgtggga

SEQ ID NO: 832999 - DNA, 535 bp, Homo sapiens
caatgcacagactcatgaaaaagcataaagcctttcaaaatcagcaagtatttaggttcacctagagttgtaagtgaatgagaatatatgagtctagaaaaacagccagttaaaacccagccttaaaaatatctttgaacctaatttgaaaagcatggcttgtctcaaactggtatatcagaaaacccatcctggccaccatatgaggcataaattagaggtatcagtttggagagaagacattcatttaggtcactgaggaattgtaatcaataaatactaagatatgtagatcatgggaatgaaaagttgggcagctgtgcttcatattaaggaagtggaatttttgaattttgttagtggcttcataggaggtattgagagttagaggaaaaaaataggatgagtgtcaaatttctggtttcataacccaagttgccacttgttgggmgtggtttgatgaggatgagcatgtttgatggggaaaattgctatttctggcttgtggtatggtgaatataggaggcctgtggga

SEQ ID NO: 833000 - DNA, 599 bp, Homo sapiens
ggcattttttgctaaagcagtagcattcagagaaaaagatagatttgaggtttaccagagtcatgcacacctggcagtactccaagacatctgtaaatcatkaggactgaacctctgccttcagagtccaaggcttaggcccagtaaggggaagtgggggccaggcgtggtggctcacacctgtaatcctagcactttgggaggctgaggcaggtggatcacctgaggtaaagagttcaagaccagcctggccaacatggtgaaaccctgtctctaccaaaatacaaaaattagccaggcatgatggcgggtgcctgtaatcccagctactcgggaggctgagatgggagaatcacttgaacccgggagatggtggttgtggtgagccgagatcacgccactgcactccagcctgggtggctgagtgaggctccatctcaaaaaaaaaaaaaaaaaaaaaaaatcagtaaggggaagtggggggtccaggcttgtttctgaatggcagtccaggagctggttaggggtaaagtgggctggcatttttaaccaaggatttagacagcgttatgcagcagattggggaacaaagccagtga

SEQ ID NO: 833001 - DNA, 599 bp, Homo sapiens
ggcattttttgctaaagcagtagcattcagagaaaaagatagatttgaggtttaccagagtcatgcacacctggcagtactccaagacatctgtaaatcatgaggactgaacctctgccttcagagtccaaggcttaggcccagtaaggggaagtgggggccaggcgtggtggctcacacctgtaatcctagcactttgggaggctgaggcaggtggatcacctgaggtaaagagttcaagaccagcctggccaacatggtgaaaccctgtctctaccaaaatacaaaaattagccaggcatgatggcgggtgcctgtaatcccagctactcgggaggctgagatgggagaatcacttgaacccgggagatggtggttgtggtgagccgagatcacgccactgcactccagcctgggtggctgagtgaggctccatctcaaaaaaaaaaaaaaaaaaaaaaaatcaktaaggggaagtggggggtccaggcttgtttctgaatggcagtccaggagctggttaggggtaaagtgggctggcatttttaaccaaggatttagacagcgttatgcagcagattggggaacaaagccagtga

SEQ ID NO: 833002 - DNA, 605 bp, Homo sapiens
agactattttagttagcatgtttgataagacttgcagagttattcatccacaaacttctgggctcacagagctggctttcataactcctgttcctcatgcagcctctaacctatactggacctccccaccctccaggtgctagtcctgaagcctggagtttttggaagtctcttccctctccagaaggaaggatttgatgtcatcacttatacgtggtggaactcatcagcacccgtgagccaactccctcaggtgtttctaagccttttatctctaattatggaacaaatggctttgtctactgttgaaggctgtgagggctccggggagagtaaaagcctggggtttctgacctgcaaggggccttggcaacaatccctactcagcgcttcattttccacatgaacaatctgagtctggggagattagggcttgtcaaggccgccatgtctagccttgagggcaaaccactaggctgttgtgtgatggtcaakgtgggtaagaagacctggagactgcaaaacaggaccccaagccaccacctggagcgctgtcatcttctcctctctcgtttttgtcatcgtcctcatatagtaaaaggata

SEQ ID NO: 833003 - DNA, 605 bp, Homo sapiens
agactattttagttagcatgtttgataagacttgcagagttattcatccacaaacttctgggctcacagagctggctttcataactcctgttcctcatgcagcctctaacctatactggacctccccaccctccaggtgctagtcctgaagcctggagtttttggaagtctcttccctctccagaaggaaggatttgatgtcatcacttatacgtggtggaactcatcagcacccgtgagccaactccctcaggtgtttctaagccttttatctctaattatggaacaaatggctttgtctactgttgaaggctgtgagggctccggggagagtaaaagcctggggtttctgacctgcaaggggccttggcaacaatccctactcagcgcttcattttccacatgaacaatctgagtctggggagattagggcttgtcaaggccgccatgtctagccttgagggcaaaccactaggctgttgtgtgatggtcaatgtgggtaagmagacctggagactgcaaaacaggaccccaagccaccacctggagcgctgtcatcttctcctctctcgtttttgtcatcgtcctcatatagtaaaaggata

SEQ ID NO: 833004 - DNA, 569 bp, Homo sapiens
actggtgtcagagaggagaatcagtgggtcctgggattctggcaggggatctggccccctttgcaggcgatgtgggatgacacagggaccaaggttctgagcacttaagacgcttcagtcagattagccaatagcacgattcgctccatgctcattgttgcattgcttacgcatgcatggctatggtacagcccactggatgggctctaaagccttaggtgtggcagaatccaaaaagactgattctatatgtccctactgggaggttagatggaccagggtagagatgcatgccagcccatcgacctggagcctgcacagctatggaactcccactgcccctgcagtgccattgcctagcagaagtaagggggatgcaaccactttgttacttccacataaagcctctaacttgacttcttgaagtttgcaagaagcagcatccacttaaagtccaactctgattgtgacagcttcctcacctggtctaaggatgcctcagtcacacaaaaccaaaactcacaccgkcagtgtatttaaacgtacatctaagcactcctcagaccggt

SEQ ID NO: 833005 - DNA, 648 bp, Homo sapiens
gaagggcaggaaatgttaaggaagggctggttgcctagccagacaagtcaaaggaggtagctggagatcagcgcaacctaaaggcatcacaacctgctgtgagggcacaaaggaagggacaatgaatatktttttctgagtagctgaacaagaggattatgaaatgttcccatgcaggaacaggactctgaaacccagaattttgtttcagttgtgaaaactctggggtcaaggggaacacaaataaatcagtgcttttatgtcacttgagagaggctgataaaaagctgaactaccgagacagggacacagagcagggaagaggggtggcacagaggtaatcttgtgcagagagagtctgaagtggaagaagttcatttaaatgcagtttgaaattgtaatttaaaacttctaaacatatattcatataatcaataaacctttaaatttgcttatcactaggttctaccacttgttatttaggaacctgcatgcagtctttagaacagtggagagaatcagggaagcttgcgctttaattttttatctaattcactaaactaataaatacttacagagtacctactgtatgcaaagcattataagactgccataagatatcacttaatatccatttttcctttaatt

SEQ ID NO: 833006 - DNA, 539 bp, Homo sapiens
aaacgttctctcctgctctgaagcctgcctcagtatctccttctgccttatgccccttggttgaattatttcttctgaagaggcaagaattgaggttgctgcagacccatactttggtgccgcctgacttggatacgttccctaactgctaacaccaggacatgttaacccttttcttgcatgtaatttattgcacaataactttttaaaaattttgagtgctgtaaaaggaaaataaaatctcaggcccagaaactcactaagctgaagggctcagtgggaactgggtcacacaaaggatgaagggcaagctgggaactgggtcacacacaccaacttcccattttcttcctgaatagatagctacttacctccctcaccttttgctcaggaggaaactccttgtaggccccgagacttttaccctaaagcagttctgttgaatttcaccctgacaatgcaaattaaccacttacttttacrggtaagggaccatgaagagacctaaaagtcatcccttcactcacctgagacaaatg

SEQ ID NO: 833007 - DNA, 525 bp, Homo sapiens
ggtcacttcctttagttacttagggacacactttgcaaataattcactctggagaattcattaagaagctgtattgcccaaagccagatagtctacaggagcattaccaagatttttaataaaaaatacctctgcttaataactagtaacaagtagtacctgctttgaaacttttctaggccaaactaattccaatccctatggtgtagaatgttgaaaactttgatcggccgtccctttacatgctggaatatatccagagtatttaggaaatgcaacttgacctaaccttcaggtctctctttggctcgtgtatcttttagggtcccattagaaaacagatcgcacatgcaaagggggtaattgaggaaagtttaatgaagggactatttacagaggaggtatagggttaaraaaccaacagggatgatgtggcaccaggatctagcaacccatgaagctgttaccacccctgggtgtgaaggggtaaggggaggaggctgttactagaacttcatgggagct

SEQ ID NO: 833008 - DNA, 566 bp, Homo sapiens
tgacattttgagtgcaggccccactcggagaggcattgtrgaactttctggttaacaaagttaaaaccaaaacaaagtaaatgacgaatccaccacctcagtctgcattgtattttttgtttttaaagaaaatggtaaaacttttgctgctgcttttagtgactgagattttcaagagtggattgaagaaattattatcagtctgtttggcagctaagaaacctgctttgagatgggtagttgcttattaataatactgctttccacttcagcctcatctgtaaggcactgaactagctgctactgggtcttcaacctaccttcagacttctactgcatgaagtctttccacatctactgtgagatggatcacttcttctccgttcccagcactttttgggtatctctcctatgtcataggagagacattacatctatgtaatagatgtaatgatgttgtacaaggctgagcaacctcagccttgctctaaaattatttacatcatagtttaccattctttgagggtggcactttgcatttcatagaataattgaacatttagaga

SEQ ID NO: 833009 - DNA, 546 bp, Homo sapiens
agaatcttgttatctgctcattcaaccccttcatgtcacaaatgggacagggggagaaatggcatatctgaaatttacaaagaaaaaaatggcacatctgaamtttacataagaaatggcatatctgaaatttacaaacttacatttacatgagtggtgccacaaccaagatacattgactcacagcatcttttatgaatgaaggagaaaagagtgtctgctgtattctgtcacttccacccccagagtatcccagttttgtgtcaacctcataccttgaaactcagaagttcaggtggacattttggctgtgaacttagctttggccacaaggtccagaagccacttcgaggagccgttaaacacacaacatttgcaagcacaaagatctagatgtgacctgcagctcttcaatttgccaggtctgcaaacttcgccaagttactgatcctctctggacctctggttcctcatttgagaaagatagctcaccgtagttctacatttaaacgatagtttaatgaggtaaagtgcataaagtgcctg

SEQ ID NO: 833010 - DNA, 582 bp, Homo sapiens
atcctccctcagtgtcttagtctattcaggctrctataacaaaatgccatacactgggtggcctatacaccatagaaatatatttctcacagttctggtggctggcaagtccaaggtcaaggcgttggcagatttgatgtctggtgaggtctttctggttcatagatggcaccttcccactctgtcctcataagatggaagaagggtgatgggtgtctctcaggcctcttttaaaagggcactaacaccacttattagaggtcagccctcatgacctaatcacctgtcaaagacctcgcctcctaatatagtcaccttggaggtttcaatatatgaatttgcaggggaccatgacacccaggaagtcctccctgaccacctccttctgaataacattttcctctgcaagtcttacaccacttgcctctctgctacttacatgtaacacttttaagcacagagagaagcacagggatttggagaatatataatagtaaagtactaacaacaacaaccaaaacacaacaataggtgatatataaatctggctcttactatgggctacactctatgacaagccct

SEQ ID NO: 833011 - DNA, 505 bp, Homo sapiens
taaatactcaccttacacagtggctataagaacggaatgcttaatagatgttgtcactacaccagtcccygacacaggatgagagctcaatctatggggataaccacaattgtttttaattttcctcacagctcttacagtctactcaggaatgccagaattttaattaacaagaagaagtgtttatggtttaagagaaaatcacaaggcagcatttgaatcatttgtaaagttgtcctcatatttcttgcccttggcatgttatgtttgtaatataataatttactcatgtacagtagagacccctcagcccaagcagggctagggtaaatgtggcgaaggaaagttacagctggaacttgttgaatctgagcagtaggtgcctatttagggtccttcttccactttgaggtatgatttgaggctgggctctgaggaaactcatcattaaaagggagggtgctggtctcatttggattcttgatctgcatgagcagatgtattc

SEQ ID NO: 833012 - DNA, 576 bp, Homo sapiens
aacaaaaagaggaaaactacrggacaataaccctcatgaacattgatgcaaaaatcttcaacaaaatactagcataacaaattcagcagcacatcaaaatgatgatttacaatgataaagtaggcttcatccctggaatgcaagtttcaacatacacaaatcaataaatgtgattcaccctaaaaacaattaaaaacaaaaaccataatatcatctcgatggacacagaaaaagctttcaatgaagtccaacattccttcatgttaaaaatctttaagaaactaagcatccgaggaacatatctcaaaataccaagagccatccatgacaaacccaaagccaatatcatattgaatgggtaaatctgaaatcattccctctgagaactggaacaagacaaggatgcccactctcaccaccattattcaacctagtactggaagtactagccagaacaatcaggacagagaaagaaattaaaggcatccaaacaggaaaagaactcaaactcttcctttgtgaatgatataattctatagctcaaaaaccataaagactccatcagcaggctcatgg

SEQ ID NO: 833013 - DNA, 569 bp, Homo sapiens
ttatacttcttggtcattttaatcattatcactatttttcttaactacctgattaacagtgaatatatattcaataaaaaatgactgctatgatgatttaattccttgattgagtagggtctttcagtctttatttgctgtaactctctttttctgagtggtagacttgagtgaagctctgaataaatacatggcatgtagatgagataagtttcacttttgactatttgggaacagaactgttatctgccctaccagtcctctcttcccctcaatccacatgacaaaatagtgaggtcattagaggtttctgtttattatttaagggttaagagtagaagtcaggttggaggacatatacatttcttaacacaaatttttgaaataattttttttctgataattgcctcagattcagaagagcaatgaagttacagtgttgtatggccrttagatgtcttacaattcatgaagatttagagattaaagtagcaggagacactctgaagtagaaaaccagatatttgaggacagacataatatagcaaaggaatacatggcccagaaga

SEQ ID NO: 833014 - DNA, 606 bp, Homo sapiens
aggcttatttatattcataatttagggctatcattcatctcaaattatataacttctatgatgtgaagtatatgttaaattattttattttttcatacagwtatgctcaatcctcatttattgaaataatcatccattttttgagtgattagcagttataactttgttaaatgttaagtgaccataatgtgtgggcctaggcttttacttcccattcttttccatttccctaattttgcgtttttaactggtattatattacgcaaatcatttttttaaatttttttaatagaaagccttgtactatcacagtgttagtcctccaagtttttactttaagatagtatgggcattctaaatagtttgacattccatatacattttgaataagctagtgaatttacacctatagataccaattacctaagaagacttattgcattgaatatatagattaattttaagaaaattgatattttaacaatactgaatatttcaaagtataaacatgtattgctctttattttttaattgatcttttcatttttccagcaatatttagtaatttttagtgtagtggtttttcacattcttcactcggatttt

SEQ ID NO: 833015 - DNA, 590 bp, Homo sapiens
actttatcactttggtaatatcattgctagggatttttaggaacattcaggaaaacaggtaaagggtattcaggaattcaytgaggctcttttacttttcagcaattgtaaaattacttaagaaaaagtttaaaataaaagcatattgatttaaaaaggaaagaatattctttgatcttgtaaaatcttttatattctcagattaatgaggagtcaaactgacacgggtatgtttttactttcatatctttcaaacgctgttcttcatttttctggaaacttgaacttattaaattggatttgagataaaagttgcccacctataacatttgattttcaactgttttcctttctctggtattattatacagttctccttaattctccaaaagttacatgaaaacaaccttttttatttatcattcatgaagttaacaattgagattatttcaatgtcattcactggacacagaaatagaagaaacatagcccatgaccctaacaagtcatgtacataaagaattataagatttataatataattatggttggtcataaagaggaaacacaggggttttacttagtgaaca

SEQ ID NO: 833016 - DNA, 616 bp, Homo sapiens
tttgacccagaaatctcatagctgggtatgtagccaaaggaatagaaatcattctactataaagatacgtgcacacatatgttcactgcagcactattcacaatagcaaagacatagaatcagcccaaatgcccatcaataatagactggataaagaaaatgtggtacatatacaccacggactattatgcagccatagagaggaatgagataatgtcctctgcagggacatagatggagctggaagccattatcctcagcaaactaaggcagaaacagaaaaccacacactgcatgttctcacttataagtaggagctgaacaatgagaacaaatggacacagggagggacacaacacacactgggacctgtttggtgggggcagggggagggcaagcatcaggaagaatagctaatacatgctgagcttaatgcctaggtgatgtttgatctgtgcagcaaaccaccatggcacacgtttacatatgtaacaaacctgcacatcctgcacatgcatcccagaacttaaaatagaattaaattaaattaaatkaaaaattttaaaaacccactcatattggattatgggatccaccttattccagcatgacttca

SEQ ID NO: 833017 - DNA, 413 bp, Homo sapiens
ttacacacttgctattcagataaagccctgacatttaytttgcataaaaaataaatagcttataggccaggctcacacctgtaatcccaccattttgggaggctgaggcaggaggattgcttgaggccaggagcttgagaccaccctgggcaacatagcaagaccctgtctctacaaaaataaattaaaaaaaaaaaagatagtttatccagaatagccaaaacaattttgaaaaagaaaaacaaagtaagaagactcacacctcctgatcacaaaacatgctgcaaagcaatggtaatcaaagcagtgtggcattggcataggataaacatatagaccaatggaacaaaactgagagtccagaaataaatccatgtgtctatgggcaactgaatgccaagaccattcaatgg

SEQ ID NO: 833018 - DNA, 624 bp, Homo sapiens
tgtaatccccaaagttgaagaagtggcttggtgggaggagattggatcatggggacagaactcccccttgctgttctcatgatagtgagttctcaggagatctgattrcttaaaagtgtgtagcacctcctcctttgctctcttcttcctgcttctgccatgtaagacgtaccagcttctttccttcaccttccaccatgactgtaagtttcctgaggcctccccagaagcagaagcctatataccctgtagaactgggagccaattaaacctcttttttaaaataaattaccattctcaggtagttctttatagcaatgtgagatcagactaatacagaaaattggtatcaagaagtggggaattgctataaagatgcctgaaaatgtggaggcagctttggaactgggtaatgggcagaagttggaacagtttggagagttcagaaaaaaacaggaagatgagggaaactttggaacttcctagagatttgttgaatggttgtgaccaaaatgctgacagtgatatggacaatgaattccaggctgaggtggtctcagatgcagatgaggaactcatcaagaactggagccaaggtcacttttgttatgtgtgagcaaagag

SEQ ID NO: 833019 - DNA, 624 bp, Homo sapiens
tgtaatccccaaagttgaagaagtggcttggtgggaggagattggatcatggggacagaactcccccttgctgttctcatgatagtgagttctcaggagatctgattgyttaaaagtgtgtagcacctcctcctttgctctcttcttcctgcttctgccatgtaagacgtaccagcttctttccttcaccttccaccatgactgtaagtttcctgaggcctccccagaagcagaagcctatataccctgtagaactgggagccaattaaacctcttttttaaaataaattaccattctcaggtagttctttatagcaatgtgagatcagactaatacagaaaattggtatcaagaagtggggaattgctataaagatgcctgaaaatgtggaggcagctttggaactgggtaatgggcagaagttggaacagtttggagagttcagaaaaaaacaggaagatgagggaaactttggaacttcctagagatttgttgaatggttgtgaccaaaatgctgacagtgatatggacaatgaattccaggctgaggtggtctcagatgcagatgaggaactcatcaagaactggagccaaggtcacttttgttatgtgtgagcaaagag

SEQ ID NO: 833020 - DNA, 648 bp, Homo sapiens
aaaaagaatataaaactcatatttttaattttattcagaagcagtaaataattattaatagcattttgaaattgggataattgactctatattttgaaattctactycttccagacagtagaaaaaaacataataatcagaaaggaaaattaaacttattaaacctataatatttagaatatgttgtcttctagaataataaagcaatgaacataataaataagagtttccattttcattcttggttatacaatctagtttggaaatcaagtgagaaggaaaataagtacaataatttcaaatatggtaagtcctgtacattttaagaagagagtgctgtgattgtgatttgtgctgggagaaggaaggaaatggcttcattatgtaggaaagtcatcaggttttaatgttttaattatttaaaaattgaaatataataccaaaagatctatacatgaaaggtgaaaggaaaactgttaagattggaattgttagtgtatttaatttaacacattatatttttagtctattttagttcctttgtgtttctcttatcaccatccatggactgaattccctgaggatggggatgttgtcctcttatagccataaacttgcacagcacctgcatttagaataccctagatg

SEQ ID NO: 833021 - DNA, 525 bp, Homo sapiens
tctctctttggctctctatgtttatgtttgtgacataggtactgtctctttgtggtgtggtgtgtgtgtgtggtgtggtgtgatgtgctgtgctgtggtgcatgtgtgtgagtgagagagtgtgtatgtgtgaatgtgtgtttgtgagtagagaaaaggagtggagaggaagaaagcagagctagttcttgcaggttctgttgatgaactattatgtaaactgccagctagttgactctggccaatgggagaccctaagagaagactgaagggtgcactgcagggagaagccaagacacttctttgttccccttgacttaaggaagcctctcttgaagcagcaccgccctttcctctatggcgtttgctaaaaactggataaatccaactacagcctggaaatcctaatagccaaatcagataatatagcttcttcgtctttgctcctcatccttgggatattgactccctcctgttgttgatgyctagattgcttcgtagtttcaaggttgcttaactaattag

SEQ ID NO: 833022 - DNA, 584 bp, Homo sapiens
  misc_feature 367: n = A,T,C or G
tcacctgcttggttaaatgtatttctagatatttcawattttgtggctattgtaaatgggattgcattctttgtctctcagttggcatattattgttgtataaaaatactactgatacttgtacattgattttgcattctgaaactttgttgaagtcattaatcagttctaggattctttcggcagagtctttagagatttctatgcgtacagtcatatcattagcaaagaaagataattttacttactcttttcctgtttgaatgccttttattttcattttttctgttgcctgattgctctagctaggacttccagtactatgttgaataggagtggtgagagtgggtatccttgctttgttcangttgtcaaggtattacgctgatgccagcatcacagaatgagttagagacgagtccctccttctcaattttttgacatagtttcagtaggattggtaccagctgtaatttgcacacctggtagaatacaactgtgaatctatctggtctgtgacttttttgattggtaggcttttttttttattattactgattcagttttggaactcaatattggtg

SEQ ID NO: 833023 - DNA, 517 bp, Homo sapiens
aagcttattttacataatggaatagttttatgtcatttagtaggtttttaattgttgcttcaygttttctgggcattactaattaaatgttggttaaaaatagtatttttatataaacacttgaaatttacatatttaaatatatttatatattaaaatatattgacatttacatatatctattaacatttatattttatatatgtgattatatatgcatatatgtacatcatttgaaaataataatgttaaagaaaatatttgattaaaatacttattgatattttcatagctgttattataattttacagttatttttagatacctactccatgtgagatataatgactagtatcacagaaaacacataaatacatgagtaagacataatcaatgcttttaagatcctcttctagttatctatttgtgttacaacctatacaaatacttcgtaactgtaaacaactactgtttatagttagttaagatatcagatatcaacaccctaaaaaatag

SEQ ID NO: 833024 - DNA, 519 bp, Homo sapiens
aatgtaggtacaagcaggggcacccttagttcagaagggagcttgggctccagatcacttagctctaacttggaagctggaacacctggctctgttacacagacaagacctgtgtctccatatatacaatttattcctcacacttggcaaatgtgtgccgaagctgaaagagctcaaccttagagtttgacaggttcaggtttgaatccctgctctgccttttcccaagcaggggactttgagtaaatgacttcactgctgcctttgccacagtttccccatctgtaaaataaacatagaaacacttgctttgcctgatttgttgaaaagaatagagatgatgtttgcaaagtcctggcatgagcagtagctattatggctattttatttaccctgaaaagcaactgttcatagtatcacaaggcaggcaggggtagggggcaataaaagcatttgtrgcaaggatccagttatttgcaggcttctcttctgtctggctttgtttactgtcatgcagga

SEQ ID NO: 833025 - DNA, 583 bp, Homo sapiens
ttttcacaggtggcaatttataaaatggaaatgatagaaaagtccttcattcttaattatccccaratttcttatatattaacacagttctatttcctagtgtgtggacaattttaaatttgaaattctgatttatttttaatctacaaagtatttttattttttaaaagggaaccatttcattattgaaatcttatgaatgcatcagttaatttatattaaattataagcaggctatctgaaaaacaaggatatagaaatcatatatacacatttttgaaatattagtttagtatttaacatattaacatttcaaaacaaatgcaatgatctagctacctatgacgccagctggtgtcagtggttgtagcgaagatgctgtttctgtttaccatgagcaaacagcatttcttgggtcttaagctaaacaatcacaagttatcaaagtaaagaaaatctaaagacagttcttacttttcatgtgtagaagtgtagtttgggtatccagtcatgccacagtgtgactgtggtcaacacagcccttgtcacaggtgcgtatggtcctaaatagctggcctctgtc

SEQ ID NO: 833026 - DNA, 559 bp, Homo sapiens
atggtgcctttaacctttcccatgcactgcaccaatgcactgaaggtgagggagctccttgtgctccagggggatgcctgagattcatscataccataaagttggccttcgtgtcccctttctttagttggagccatattggaagcccactgtcaggaaaacggtctcatggcctgagcagggccatagaggatgacctatcctctttataaagccctgcttgactccagggactacataagtctccttctattatgtggcctataaagtgccccatggcctacctaagggctgctgaagatgttagcgtagacacttatcatgtgtgactaaggacagtcttttgtgggtagtcaagcacgaagaccactgaatactagggaaatagcatctgttcttgaaagtaggtggtgactgaaataactaacaacatttaacaaggagttcatctgtttccatgtgcgctggactccttttgcacaaagcaatatgtagcttttctgagacatacagacaggaagagaggatagccttgggggtcaataatgctgagttcaag

SEQ ID NO: 833027 - DNA, 675 bp, Homo sapiens
actctcttaagatgattttcatcagaatagaaggaatgttctgagttccctattttatcaagattaatcactgtgagaggactataatcaatattttcttttccataaaacaattttcatattggcgctatacacaaatactagctaatggaaacttctggaatgataaatatattctttatctgtgctgtttaatttcatcaccactagatacatgtgagttttaagtgtttaaaatgttgcaattgtaactgactcaatttataactttattcagctcgcagggaagactggccacaccaccctaatcttattatgcaaatgggctttccacttggccatctccatgttatctgctgcttactgtacatatggctagcaaagagaagggaacatggagctgccattttgaatatgcttagtgccagcattcacctgtgaaagcttccagcttgcttgattatgtctgcagttcaattttacaggctgctctttgttagaaaagaaaattatctgggggctgcttttcattaaaaggaaaaccttacaaagaactcggtaccctcactatctgcctaagtaatttcttcttcactcctgtatcactggtatgctgtcaataaatctcatgtcacataataaaraaaaaagaaaggaaaaaaagatatatttttt

SEQ ID NO: 833028 - DNA, 489 bp, Homo sapiens
ccggtgtttcttcttataaggatactaaccccagagtgccctttactgataaaaccatagtcttaggctctccagagttcaggtgacatattgctaagactacattatttaggcgcttagagaagtattgttgcagtgctatcactcttatggggttttcatctctaagaaaatacttagtctccactgactgtttatacatcaatttctctctaattttaacagcattgaggttttaactgaattctgtagaaatagaagaaattagatgcttgtcaaatattcatgagaaacaaactactgacctaaacaaaaaataaaaaaattaaattatcatgttttatacaaagaaaaaaattataaataattctgaataaatcggcaacggcatacttgaatctgtttctactgggcratgaatttaacaatatcttctcacagagctggctggcaataaaaatgtttactatgagaaagtgttaaaaatat

SEQ ID NO: 833029 - DNA, 613 bp, Homo sapiens
gacacaaaaatgatgtaagtgactattttctcaattgtcccaaatagctagaaccattctggatgcaaaggagagaagttgattcatcgcaacaacagatgctgtcggcccttcgggctgaattcccgggacccacatctcatcctgcttgtcaaacctcttgattcagtgaatccctggttcattcagaaaacaaaactcatcactttcaaagccaaagaatcatcatgaggaagcttcatgtaaatttccaaaatgtaaaagaaaatattccaagagcactggtcttcgaaacagaccacggagggttaaaagccaaggcctcctcccacaaataaaagaaacccaaaatgttctacctgttttatctaaacaacgacgcaataaacagcttgaaaacttatcaggtattgagaaatacgtggtttatcaaggaaacccaagataagaggaaggcagagaaacaaccgcggtcaacaagcrggggctgtggcgccctgggggctccgcagtgggttcctcgggctgagcactgaacgtcagcactgcctgggggaagctcgttgactacagcatcttaggccccaccgaagagaggttggagatgcagcca

SEQ ID NO: 833030 - DNA, 634 bp, Homo sapiens
ttgtatccatacagattgatatatttggcactccctcttctgagcaaaatggaaggacagggaccagattgatcctccagcyggaagcaaacaagtatctctattcttcagagatttccagagacacagaaccaatatgatgcatatatcaatatatacttatgtagaaagagatttattataaggaattggctcacgggattatggaggccaagtcctaagatcagcagaatgtgtcaacaaggacccaggggagccaatgtgttggttcacattttttaaagggaccaaataaaagtggccaagacatgtttggacatcaggcaatgaagatcagtgacccccctgagagatgggaaacaaaagaagcaagccccaagatcgccccatctgaccacctcccattgcctaatgtggcacagacggagcacagaggatggcctcagctaaggaggcttagctgagtcttgggagaccaaggcagcaagagtttgcaagactggggaccacggaagagagctacatagagacagagagggctctggagatttgcaggtggcccccttgagtattcagctgagaagtgactggcacatgcttgggagaagatgactcaagtctatagaaagactca

SEQ ID NO: 833031 - DNA, 577 bp, Homo sapiens
aggtcaaggccctactgttaggttgtcccgggtagagcctgagaggggcagccaccagctctggccagacgcccggtcattggccacccaggcataaggagaactgcaagtgagtgattaaaatcccacacccgggcttctccatcccagcgtgtgaatggctgtgctccagctgagacgagcacttgggtggcaggaattgtgccttgtcaaaggccactggaaatgagctttgaagtcccctcggggttctagggctggacagggatgaaagagccctcatatgtggttctaagcacccagaagatgggcataactgaatgattccgggcctccggaggctgaggtcggtgagtacaaagggaaagggattggcaaagcagccttggcccggggccagggaggactccgtgaagggctggccaggcgtggaggtcatcggccagggtggtggcatcttatggtcccaggagcacgagcgtggaaaggtccagacagtggagagaggcagcccccgttccagtcttggatccmccagtgatctgctctgggtggtcagtcacctgcccggcctcac

SEQ ID NO: 833032 - DNA, 448 bp, Homo sapiens
gggtgttgggatccaacagcctctgaccctgagtagctaggtgactttggacaagagttttcacccctctaaatggtgcatcatcacatacagtgtgggtatagaactggcagtcacaggggccctttgggaggactgggctagggcaggagaggtgttgtctgcacagagctggcccagtgcccacatctatgttagatattattattgttattattagatctgcaacatttattatttcagtactaacgacgggcaggcacctcgccaagttctgtgcatgcaaagacaaacacgctgtctctgcctgtggggagacaagtgaatagacaattaygattcagggtgatgttagcttttgcagctgtcttgcttcaaatgggattaaggcggtccattttatcttgacataccttccgctgtgtcaagggcttggactgtgatgagc

SEQ ID NO: 833033 - DNA, 632 bp, Homo sapiens
ttatgggagatacatttcagtgtgcttgtgaacaaatggacaatatatttacagctcaataatgggaatgaggggagagagacggtaacatattaacaattagggaacttagagacatatgggaaaatgtgtgcagttcttaaaattattctgaatctttgaaattatttcaaaataaattataaaaacaagttaatacaataacctactgctttattaaaaataacttctgtggtatttcattacttttgtattttttgggataaagtattcataagacagattggataaaccaggcaattttttataacaaaatgataaaataaatcagcaaatattgctttccatggggcagatttctaggcagtaaaataaagataaatgtgtatatgtatgaactatcttgttttagcttctgggctttgtgattaaaaactatattttgaaatagttgttactagaatcaaagagttaacatttaaaatgtagaagtcatagcttgaagtttaccctagacaactggaaatgaaaacatgtttcaatgatttagcactggaataaggttttgccttcttatgcamaattttacttgcaaatggattggccaattcaatccaactaaagaaacagtt

SEQ ID NO: 833034 - DNA, 559 bp, Homo sapiens
ttccttctttttttattattatacttgaagttttagggyacatgtgcacaatgttcaggtttgttacatatgtatacatgtgccatgtgggtgtgctgcacccattaactcatcatttaacattaggtatatctcctaatgctatccctctcccctccccccaccccacaacaggccccggtgtgtgatgttccccttcctgtgtccatgagttctcattgttcaattcccacctatgagtgagaacatgcggtgtttggttttttgtccttgtgatagtctgctgagaatgatggtttccagcttcatccatgtccctacaaaggacatgagctcatcatttttatggctgcatagtattccatggtgtatatgtgccacattttcttaatccagtctatcattgttggatatttgggttgattccaagtctttgctattgtgaatagtgccacaataaacatacgtgtgcatgtgtctttatagcagcacgttttataatcctttgggtatacacccagtaatgggatggctgggtcaaatggtatttctagttcta

SEQ ID NO: 833035 - DNA, 626 bp, Homo sapiens
tttgtttgtttatcacatggtattcctaagcagacttccatgcaagtactaactaggcctgaccctgcatmgatcagatgagatcagatgccttcagggtgatatggctgtagacttcccacccccacccagtagtctaagtttctggtttctttttcttgtcttactgtgctggccaggacctccaataaaattatgtgtacaaatgatgctagttggcacccttttctcattcctgattttaaaaggaatattttcaacatctctccagttaaaatgatgtttattactataggggtgtgtgtgtgtgtgtgtgtgtgttcgttttgagacagtctctctctgttgtccaggctagaaggcagtggcacaatcttggctcactgcaacctccgcctcctgggttcaagcaattctcctgcttcaacctcccaagtagctgggattaccagcatgtgccaccatgcccagctaatatttgtgttttggtatgaggttttgccatgttagcagagatgatcttgaactcctagcctcaaatgatccacctgccttggcctcccaaagtgctgggattataggcgtgagccaccatgcccagcgtactatacatttttataggtact

SEQ ID NO: 833036 - DNA, 619 bp, Homo sapiens
ttctgacccagtcagatgtaagaagccaagtaattagctggatccaagccagctaattactggatcaagtccaatcctggacccastcaagtttctcttgtgacttccaaacctagtttggatcagaaatttgctcaaagaaacttggacagctcaaaacacaaatccttggagctctgaaatctgagagagagcttacccacatcccagtcactctgagagatcaatggacataagtgggtccttgcaggtaccttgcttgttcactcagcgctcctggggttgttaaagctctacttcagatcccacttctgacaccatctgtagaaagaaaaacaagctgaattaagtttaaaggagtttaattgaacaattaatgattcatgaattaggaagcccccagaatcacagcaaattcagaaagactccaaggatgcctcatggtcagaggcatttgacaatttttagacaaaaaaaggaagtgacgtacagaaatcagaagtgaggtacaaaaacaactggattggttacagctcggcatttgccttatttgaacacggtttgaacactcagcagtgtatgagtagttgaattatggctgctgggattggccaattct

SEQ ID NO: 833037 - DNA, 619 bp, Homo sapiens
gaaaaagccaaactctataaaatatttgaagagatttgttctgagccagatgtggagaccatgaccaatgacacagccccaggaggtcctgagaacctgtgcccggggtggttgtggtacagcttggttttatatgtttcaaggagacataagacctcaatcactacatgtaaggtatacattggttcagttcagaaaggtgggtcaactccagtgggggcttacaggtcacatgtggattcaaaagttttctgactgccaattagttgaaagagttaagttattatctaaagacgtgtaataaacagaaatgagtgtctgggttaagacaaggggttgtggagaccaagattattatgtagatgaagtctcataagtggctgcccttagaggcaatagatggcaaatgtttcctacttagacctttgaaaggtgctagactcccagctaatctcttcaggatcagaagaagacctggaaaaggaagaggagtctctacaggatgtaaawttcccccacaagagacagctttgcagggccgtttcaaaatatgtcaaagaaatatatttgggaacttgttgcagtgactcacacctgtaatcccagcactttgggaggc

SEQ ID NO: 833038 - DNA, 586 bp, Homo sapiens
cacttagaagtggaagctaactatggttatgcaggggcctatagagaggtataagggacactgaagactcagaagggggaaaataggaaggaggtaaggaatgaaaaattacctattgggtacaatgtacactacttgaaagacgggtatgctaaaaactcagatttcaccactatacagttcatccatgtaactaaaaaccacttgtacccctaaatctattgaaatttaaaaagaaaattggccaggcagagtggcttatgcctgtaatcccagcactttgggaggctgaggtggacagattgcatgagctcaggaatttgagaccagccttggcaacatggtgagaccccgtgtctacaaaaagatacaaaaattagctggatgtagtggtgtgcacctgtagtcccagctacttgggaggctgaggtgggaggactgcttgagcctagcaggttgaggctgcagtaagttgaaactgtgccactgcattccagcctgggcaccagagcaagacccctgtctcaaacataaaataaaataawataaaataaaataaaataaaataaataaaataaaatagaaa

SEQ ID NO: 833039 - DNA, 639 bp, Homo sapiens
tattcatcaatagaaaaaataataarcattgtcaatgaaaacatatacaactactgatacatggaataaaataggtgaatttaaatatcattatgctgaataaaagaaatttgatgcaacaattgcaacatattgtggatttctaaaacagtgtaatcaaatctgtagtgatataaatcagaagaatgattgccgctgtgttcaaggtggagataatctggaaagaagcatgagggaattttaggatagtgaaaatgttctattttttatagtggtatttcttaaacaaatgtatatggctttcaaaactcatcaatctctacacttaaggtctgtgcctttcactatgtatatatcctatctcaatttttaaaagtggaacatgaagaaattaccctgtcagaaatatgtctctgccaagatttttaaaattaatttattacatgcctatttgtacattgtctgtcacaatgcagacatttgtgaaatgttgttctttctgtgttccttggtattttgcagaattcttgacttgtaggctcaatggttcagtgctgcagtggaaaggatttgaagacaggcatatttgtgtgtttagctgagttctgtcactgctgatagtgttaatttaggcaaatt

SEQ ID NO: 833040 - DNA, 452 bp, Homo sapiens
gcatgcaggtaaccgggtgcaagagccagggcaagtgcctttgggcgccaacaggaatgaaacccatactggcccatggcagcatctaaaggttgcccatgacctctggagccccagagggtgtgtgttacaaacagtgctcttttagctttgctgttcacggatggcttaagtgttaaacagctcagtgaagaatcagtgtcacagcctttttggattcccacacccagtgcacccataattcttgtccagcgtccaggaagaaccaggtcccacgaacagattgaagggtggtgtatgcagaggattttatggagcaatggragtggctctcagtgtgatgggggtctggaaagaggatggagggagaagagttcggagaggaggacaaactcctctccaaccgtccccagccaaactcctcttcatccatccccagccgaacttctctc

SEQ ID NO: 833041 - DNA, 452 bp, Homo sapiens
gcatgcaggtaaccgggtgcaagagccagggcaagtgcctttgggcgccaacaggaatgaaacccatactggcccatggcagcatctaaaggttgcccatgacctctggagccccagagggtgtgtgttacaaacagtgctcttttagctttgctgttcacggatggcttaagtgttaaacagctcagtgaagaatcagtgtcacagcctttttggattcccacacccagtgcacccataattcttgtccagcgtccaggaagaaccaggtcccacgaacagattgaagggtggtgtatgcagaggattttatggagcaatggaagtggctctcagtgtgatgggggtctggaaagaggatggagggagaagagttcggagaggaggrcaaactcctctccaaccgtccccagccaaactcctcttcatccatccccagccgaacttctctc

SEQ ID NO: 833042 - DNA, 644 bp, Homo sapiens
gagaggtgacagcgtgctggcagccctcgcagcccttgctcactctcggtgcctccttggccttggcgtccactctggccacgcttgaggagcccttcagcctgctgctgccctgtgggagcccctctctgggctggccgagactggagccggctccctctgcttgcagggaggtgtggagggagaggcgcaggtgggaacccaggctgcgcatggcgctcacgggccagcatgaattccaggtgggtgtgggctcagcgggccacacactcagagtggccagccagctggtgccgccggccccaggcagtgaggggcttagcacctgggccagcagcggcagagggtgccccggtcccccagcagtgccagcccgctggcgctgcacttgaattctcgctgggccacagctgccccaccatggggcagggctcgggacctgcagcccaccatgccccagcctccgccccgccgtgggctcctgaacagccggaggctccccaacgagtgcygccccctgcttcatggtgcccaggcctgtcgaccacccaagggctgaggagtgcaggctcacggcgcgggactggtgggcagctccacctgcagccccggagcgggatccactaggtgaagccagctgagct

SEQ ID NO: 833043 - DNA, 692 bp, Homo sapiens
ttttaagggccaattggacactactccactatgaagaaaaggaacagtatgcctggtatataaaaaatcttttagaatgtcttttagtatttccatgccctgtgattaaggtcaatggaaaattacagtgacctagtccaggcaggactactaatggtccagacccttcaggaataaggttttaggttattctactaggtaaagaaccatgagaagctgaggtgctgcctgaaggcaaaggcaaaacagggtgcttagaggtaaaaggtaataataaataccagctatgatcatgtgaccagttacaaaattgagaattgtaattgtcatagtttgttatgaatacatttgtgtgtgtatatttgatttgtttcctttcttattaccctatcatgtcacataagaatattaactttatatcataacatataaatattgatacttttgtatcatattatttaaattacagaaaatgggcaaagagaaaacaacactcaaggactttacctcttttgaggaggggtttgtgtatttttgattgtacacaggacagttctatcaagtcagamaaatttataatcttattgcctttatttagaaaataagtatagtgtaagaaaatgcatatgggtgccaagtcaaagatttgacttgtgatagttatatacattaacttgactggatcccaggat

SEQ ID NO: 833044 - DNA, 619 bp, Homo sapiens
ctcacacctgtaatcccagcactttgggaggctgaggtgggcggattacgagatcaggaaatcgaggccatcctggccaacttggtgaaacccygtctctactaaaaatacaagtattagccaggcgtggtggcgtgggcctgtaatcctagctactggggacgctgaggcaggagaatcgcttaaacccaggaggcggaggttgcagtgagccaagattgcaccactgcactccagcctggtgacagagcaagattccatctcaaaaaatacatataaataaataaataatgagaatcccagcaggagggtgggactggggagttggtcagttctctggctaccaggaagagctctgggcaggggtgttgccaggtatcactcatcctgagcaggcggtgccctcagtccacttgccagacagcgtatggcagggagagcctggcaaggccaccgggcctcttctgctgacctgccgtgggcagatggggctgccagtgtgggtcccggccctgagcaccacacggggctgtgggtccttgggggccactccaggccctgggcctcagtttcctcatatgtaaaatgcaatcataataatacccgttcatgttggtca

SEQ ID NO: 833045 - DNA, 649 bp, Homo sapiens
gttctacatatttcttttgatctatatgctgaggaaagatgctaaagtttaaaacagcaaaatccgtctgcataactgtttctgttgcactaaatcttagcaaaaaataaatatgtctttagactgttgcattacataacaaagaagcagtaaggttccttagtgcactaagattgctctaaggaaccttaactgctattgtggaatggcacaaattcttttattagctgtgtaggcttcctaccagagtagctttccccgaagttacccatcattaaggtgttctgtatctttaaacaaaatcaaggattttcagtatggccagagtgctttatgggaatggtcagctgagtttgtcatgtgaaatgtagtagagcagtttcaggttaaaacatcatttcattttgaaacgagtcaaccttatctttcacccttgcataatgttttgagtctctgtagatatagactaataagaggttacaggtcttttgctgttattttgttttttaacactgaacmtttgctatgtgcctggcattgtgctgtatactcacttttgcatagtggaaattaattgtcttcaaaggattctatagtatgtagttacacatattttggaaaaatcaagcagtgggaaaaagaaaaataa

SEQ ID NO: 833046 - DNA, 540 bp, Homo sapiens
catggatgtcatttaacccgcctaagtgccagtctccttatctataaaatggggatgtgttgtgaggaatagaggagataatgttccttacatctgtgcttagcacaaaagaagcactcaactagaaaaggcagctgctcttgttattcttattactgggatctcaggacaatgtgtgtcattataccagaacagtatttaagcaagcaaccaaaaggttgggatagaaaacccaacatacaaaaaaagcatctactgcaaaatactatctatctcagccagcagcagtgggtggggggtagaagaggctgatttcaagttatatggagcacaagaccgaacaaacagaagtcttgaacatttacttgcatttatttccttttctgttattaaaggcataaaagaaaggtcttcatttcaacgtcatggggcaatgctgggactaacaagtttgtgcttgaatgtgaratgtgttccagtaaaactgatagagtctatacctccttatttaaagaggtagtgaagaggtgagaaagattc

SEQ ID NO: 833047 - DNA, 643 bp, Homo sapiens
cttccccatttgtgtgcaagatacaaattctgcttcacacacaaaagctgtgggctcatatacaaayggtttttgttcaagcaaaaaggccctttttagagctttgaaacttactcagttctgtctactttgtaaggatttacatttacctgtgcccaacagaaaataggattaaagaggcaataaagaatctgcccctgtttggccaatatcaaaatattcctaagcattctattacctgtctggtgctgagtcagttgtgtggggattcaaaagcgaagctgacaggctctctctgtgatagtggaagacagagacaggtaaaggagcctctgcatgtaatgcaaatagtgccctgattggggagctataggatgcttaatctcaaactaggaacgaggctggcatcagaacaggcttctcaggggaaggtcggtttcagctgaggtcggccacggtctaggcggaaaagcaatgtaatatttacagcatgaggccttactcattccgtttttcattccactaatattaattcacaaactctgtgtcgcacctgcaaagaatgagaatacatagaagacacctaggccacatttgaaattttagtgtttgtggaattgtggaatcaaagatgttccaagcc

SEQ ID NO: 833048 - DNA, 550 bp, Homo sapiens
gttctctgtgagtgcaaaaagtaacctaatatctgatttctcaagaaaacctgataatctaatttttatgtgcaagctcttgctttataaacacmgacaactaattattgtttttagtgtccttgtgcaggacaaacaaaacctgacagcagtccaaactggctgggacccccagttggagccctcccaggtcccaaacagggctggagagtggagagctggtgacactgtgtgcttagtccacagcagccccctccagccccagggctactaaaagcacagaactttcacagactgccatacatactaactagcatttagagtatcctcacattatggaaatggccaaatgaaggcatcagattatagaagaaaaaagagtacatccacctgacttttaaaatatatatatttatttattttctcatttgaatcacccttcctgctttattgacacacttggttttgttccataaccaccatgctacaaaggcagaggtaaaacaattaatagcgatattccccaagtgaatgcagtgagcatccacac

SEQ ID NO: 833049 - DNA, 587 bp, Homo sapiens
tagaggaacacagcccaaacgtagcagcaagccacagaaaaatgcctcccaaccatcaaaatatacatcacaatgttcatgccttgaaagtgccaggagcttcctcaaggaaaaggcctcaggccatcagctctctcagggtctatggcttctccatttacgtaaattccaacaagttctgtattccagctcccaaggacaaagcaaataaaaagggagggggatgccacttactgccttgcagacaaactggcagcaagaaataaaagctgacagccagagaaggggacagaaacgctctaaaaagcaacctcaagaattccaaaagctaaaaatttgatcacacggtggtagagagtggaaaaatagataacagagactgggaagggtgagcagggggaagggaggaagataaagagatgaagagaagtgggttaaaggatacaaacatasagtgagataaaaggaaaccagagtagggtgaatacacttaacaaaaatgtactgcacttgagtaatggacagctgaataccctgacttgatcacatcatgcattatgtgtatgtaacaaaatttctcctgtacc

SEQ ID NO: 833050 - DNA, 615 bp, Homo sapiens
caacccacagctccaaccttcacatccgcctttgaggtccgatgctaggctcagagcctcaacctcatgtgctatgtccagttactmcctgggttggttaagaactgagaaagcagtggtagcagctcctctcccagcctgcagggtgctgacggagcccaagctaggacccatgtcagccctcgccgaagccccgagcagaagaggcagctgttctcttttctccatcctctagtcccccaacaaagtaaacagcatcctctcctcttccctgggtcatacaaaagtgagaagcaacaaagcacaaagatctacttccgaagtgggaaaccgggggaatacagggcaacgcagggctgaggagcaggctgttgcaatagcaaggacactgtctttcttaaacagtattgctccttccactgtattgttatcttctctctagctgtaaggtttgaccccctcacctgttttctagtttgtcctgcccctttatgctacctcaaacctgcttttaacaatttggtattgtggcaacccggtcaggagattaaatcctgaagtttctctggtaatttttctgtcaatccatcaccaaaaaaggaacatccttcctct

SEQ ID NO: 833051 - DNA, 615 bp, Homo sapiens
caacccacagctccaaccttcacatccgcctttgaggtccgatgctaggctcagagcctcaacctcatgtgctatgtccagttactccctgggttggttaagaactgmgaaagcagtggtagcagctcctctcccagcctgcagggtgctgacggagcccaagctaggacccatgtcagccctcgccgaagccccgagcagaagaggcagctgttctcttttctccatcctctagtcccccaacaaagtaaacagcatcctctcctcttccctgggtcatacaaaagtgagaagcaacaaagcacaaagatctacttccgaagtgggaaaccgggggaatacagggcaacgcagggctgaggagcaggctgttgcaatagcaaggacactgtctttcttaaacagtattgctccttccactgtattgttatcttctctctagctgtaaggtttgaccccctcacctgttttctagtttgtcctgcccctttatgctacctcaaacctgcttttaacaatttggtattgtggcaacccggtcaggagattaaatcctgaagtttctctggtaatttttctgtcaatccatcaccaaaaaaggaacatccttcctct

SEQ ID NO: 833052 - DNA, 615 bp, Homo sapiens
caacccacagctccaaccttcacatccgcctttgaggtccgatgctaggctcagagcctcaacctcatgtgctatgtccagttactccctgggttggttaagaactgagaaagmagtggtagcagctcctctcccagcctgcagggtgctgacggagcccaagctaggacccatgtcagccctcgccgaagccccgagcagaagaggcagctgttctcttttctccatcctctagtcccccaacaaagtaaacagcatcctctcctcttccctgggtcatacaaaagtgagaagcaacaaagcacaaagatctacttccgaagtgggaaaccgggggaatacagggcaacgcagggctgaggagcaggctgttgcaatagcaaggacactgtctttcttaaacagtattgctccttccactgtattgttatcttctctctagctgtaaggtttgaccccctcacctgttttctagtttgtcctgcccctttatgctacctcaaacctgcttttaacaatttggtattgtggcaacccggtcaggagattaaatcctgaagtttctctggtaatttttctgtcaatccatcaccaaaaaaggaacatccttcctct

SEQ ID NO: 833053 - DNA, 607 bp, Homo sapiens
tgcctgtaatcccagctactcaggaggctgaggcagaattgtttgaacccaagaggtggaggtttcagtgagcagagattgcaccactgaactccagcctggaagacagggcaagactctgtctcaaaaaargagaatggactctacagggcctgaagaagctggacttaattttgctcaataccaaagctgcctcttgcaggcacgttcccaaatgttcccagaggacagccccactgagtcaggctaggcatgccggccagggatgagaaaacctctagccagcacctgttccctcaggagtccttgtgggcccaggcaacttttaaaagatgaattttcacttaattcttttgaaagctctaacatggatgaataaataaattggcacccataacttatatattatttataggttagacttttaaaatagctctttttgtttgtgaggcaaatatgtatggatggaaaccattctaagactgacatttctgtgacacgagaaagaaactataaaagacttctcaactaagtaaggtagggcttccctgtctggaagagttctgcatgtgaagctgctgcttttatcaattttttgggtgaggaa

SEQ ID NO: 833054 - DNA, 567 bp, Homo sapiens
aaattgtcagagaaataaaggggatccagattggaaaacagaaagtcaaactgtttccctgtgcccatgccctgatytcatatacagaaacccataaccccccccccaaaagagcctgttagaattaaagaattcagcaaaggtccaggccccaaaatcagcaaacaaaaataatgccaatagcatgtgtaacatttttatcccctaataatcaactagcataaaaagacatcaagaaggccgtcccactattctagctacaaaataataaaatggctcagaataaagttaaccagagagattttgtaaagagctttacaaaaaaaaaaaaaaaaaaaaaaaaaaaactacaaaacaccgacaaaagaaattgtagaggacacaaacatggaagatattgcatgctcacggactggaagaatattggttaaatgaccttattactgaaagcagtctacagactgaacgcaagctctattaaataccaattttgatgtttttaggggaagacaagatggtcaccacatgcagccaggagatgcctctctgcgagagagaaaccaaaat

SEQ ID NO: 833055 - DNA, 611 bp, Homo sapiens
gctttttcatgtggtctgtcattcctactcaaccctaccattgaagtatgaaaacagtcataaaaaggcaagcaaatatacatgactgagctccggtaaaactttatttacaaaactataaggcagactggatttgctccatggcctgtagtttgctgacccctcatatggagagcagctggaagataaccacataaagagacagggaaacaaaagaaacatttgcatttatcagagctatagtttccttgtgctgtcctcagactagtgtcggtctgttgtgaggttttcacccatccatggtgaaatcagtaaggttaaggagctcagttactcatttaaaaatgtcggtctttttcttggcatgatgcctttttcatttattttacttaaactttttttttcatttaagaaataacattaatagttgttttttccctataaaagccaattcttaagagcccatgtttaactaggaaatataaacataaaataaatgtgtcacagtggaaatataaagcagatgsagaaaagaggtacagttaatatgatttagtgattgttgaatgtaaaaagataggggatagggagaaatctcagatgattctcag

SEQ ID NO: 833056 - DNA, 584 bp, Homo sapiens
acaaggaactcaaacatctcaacagcaaacaatccagtttaaaaatgggcaaattatctgaacagacatttctcaaaagaagacatataaatggccaagaaatatatgaaaaaatgctcarcatcactaagcatcagggaaatgcaagtcaaaaccacaatgaggtatcatctcaccccagttaggatgaagagacaaaaaaataacaaatgctgatgaggatgcagagaaaagggaactcttctatcctggcaggaatgtaaactagtagagctaccatggagaacagtatggaggtttctcaaaaaactagaaatagaactaccatatgatccagcaacctcactactgggcatttatccaaaagaaagtatatcgaagagacatctgcatccccgtatttattgcagcactattcacaatagccaaaatatggaatcaacccacaagtccaacaacaggtgaatgaataaagaaaacgtaatgtatatatatatatacacaatggaatactattcagccataaaaaagaatgatatcctgtcatttgcagcaacatggatggaagtagaggacattatgtt

SEQ ID NO: 833057 - DNA, 346 bp, Homo sapiens
cgggaggaagggagaaaaaaggaaagaaagcaagaacgtgagaaagaaagaaagaatacgagaaaagaaggaagaaaagggagggagaaaggaagggagggaggagggaaggaagaataagaggraagaaggaaagaaggaaggaaggagaaaaaagaaaaagaaagaaaggaaaagaaaaaagaaaaaaggaagaggaaaagaagaaaggaaggaagaaggcaagggaagggaagagaagacaaaggaagatggaaagaaggaaggaaaaccgcaaatattagaaattctgtgtttgttagagaatatgccatactgttttttttttttttcacttgaaaggaaa

SEQ ID NO: 833058 - DNA, 603 bp, Homo sapiens
tttctgagctttatttattgtgagaaatgtgaataaaaattgtattgtaactatttttgcaaagttattatgatacttaaatgagattatgtstacaaatgacttaataaaccactttgtatttattctttcaacaaatatttattgagtttctactaccattcaggcattaagccatagtaagcgctcataaatactagccactatgatgttcctcataattggcagcattctcttataatgccaggaaggaaatattccaaatcaataattcatattgcaatttcgggagtcccttcgctggtagaggaggcgtggttaactaaaaggtcatttttcatccagtgaaaaggcatgcttagaaaatctatattgcttacttttcgagatctctttgtcataattaccggaatttgttctgattttgaaagcaaaaactgaggtttcctgttctgtaattagtatttattcattcagtagattactttttaaaggacccttagtccactagaaagacaaatgaacacaggttgccataaaaaaaggatatttcaaatctagtaaaggggacaagatagttgaataagaatcaaaatacatgat

SEQ ID NO: 833059 - DNA, 569 bp, Homo sapiens
caaaatgaaaggatggaggaagatctaccaagcaaatggaaaacaaaaaaagkcaggggttgcaatcctagtctctgataaaacagactttaaaccaacaaagatcaaaagagacaaagaaggccacctacataatcggtaaagggatcaactcaacaagaagagctaactgtcctcaatatacatgcacccaatacaggagcacccagattcataaagcaagtcctgacgtgacctacaaagagttgatttttgtatatggtaaaaggaaggggcccaacttcaattctctgtatatggatagccagttattcctatatcatttattaaatagagagttcttttcccattgtttcttattgtcaattttgttgaagatcagatggttgtaggtgtgcagcattgtttctgcactctctattctgtactattagtctagatgtctgttttttatgccagtacaatgctgttttggttactgtaccctatagtttgaagctgaatagtgtgctgcctccagctttgtgcattttgcttataattgctttggctgtttgggatcttttttg

SEQ ID NO: 833060 - DNA, 389 bp, Homo sapiens
atggaccttatggacaatttcccagccactactgctcccttcatctctttacttcataggccacaaacaaaggagtgcacaccctctgcaatgtacatacccttagcattccatgaactattgsttttaatgaggctgacatgccaacaacacttcttattttcttcttctttaataacgctaaagtagttagtaatgctagttaattggtcagctaaacattgtatgtgggaattttgaagaaattgcaaatcataccctctagaaaatatactggtcatcgaaatatttttacataatttgctctgtaatatttagtaattgcaatctcagaatactaagcatattgcacctctaataggatttactttctttcagctcagttaatt

SEQ ID NO: 833061 - DNA, 615 bp, Homo sapiens
atgtgatctgagttgagtggttgtaactgaattgatctcctctattgacaaaatataaaaaatattccatctatttgcagaacaattcttgtgargtaacaaagaaaagaaagtaccattatatgagcacttagcctaccttcacccctcctgtggggtaaaaatcaaagtgtgcctgcttttcttttagccacagaggctgatgatccacgatcctctctggtttagtggctccaagagactaagaagttctagagttgacatgggcttctgttcttttctttggtggctccctgactaagaattggctccagagcttgctccagaacactcagggggaactgaatttcaactcccattaggcaatcccctgactactaaggacctactactctcctttatctctctcttctccattctgagcctgctcagaaacagagattttccctggacaaagctgcctggtagtaaatgtaacaaagaagggtcctttcagcatccaccatctcccctccgggccctggtttttttgttccctataccctccaggttccttgtttcatgtcaagacccattttcaggttccatttgggaaaaagtagtacactttcattg

SEQ ID NO: 833062 - DNA, 537 bp, Homo sapiens
accaccatcattcctcacagaattagaaaaaacaattctaaaattaatatggaaccaaaaaagagcctgcatagataggcaaagcaagactaagcaaaaagatcaaatctggaggcatcaaactacctaatttcaaactatactataaggccatagtaaccaaaacagtgtggtattggtataaaaatagtcatgtagaccaatggaacagaatagagaacccagaaataaacccaaatacttacagccaacaggtctttgacaaagcaaacaaaaacataaagtggggagaagacaccattttcaacaaatggtgctgggataattggcaacaaatggtgctggaatataggagaacaaaactggttcctcatctcttaccttttacaaaaatcaactcaagatggattaacgacttaaacctaagacctgaaactgtaaaaattctaraagataacattggaaaaacccttctagacattggcttatgcaaagatttcatgagcaagaacccaaaagcagatgcaataaaaacaa

SEQ ID NO: 833063 - DNA, 623 bp, Homo sapiens
gcaaattgaaagttcttttgctttgttttgttggcataagaatatccaattgtttagtaccatttgttgaaaagaccatcctttctccactgaattgcttttacatctttgtcaaaaacctgttttccgtgtatctgcaggtctctggactctactattttccactgatacttttgtctgtctttatatcaataccacagtgtcttgactcctgtaccttttattagtcttgaaatcaggtaatgttttctctcagctttgttcctttttttaagttgttttggctattctagatttttttttttttttgcatttccagtgaattttagaattagcttgtcaatttctgcaagaaagcctgctgaaattttgattgtgattacattaattttataaattaatttagggacagttgacatcttacaaatattaactctcccagcccatgatagggtatatctatttcagtcttgtttaatgtttctcaacaatatcttatagttttcagtgtatagtttttaacatcttttgttacatttgtcatrcttttgaaactattgtaaatggtactgctatttaatttccatatccatttgttcattgctagtatataaaaatacaat

SEQ ID NO: 833064 - DNA, 651 bp, Homo sapiens
gtggctgttcccaagcccaagggcagggaaaaagcttttctgagttttcagtcctcaggagaaatctccatccctgtcactcaggaggggattttcctttgtcacatccaggaaaaccccacaagctctgagccctcagttgatttgcaccctagtcccagatggagaaaacaaccccaagcacccgtctgatcgcatttgtgacagtaattatccaggcattggacaccaagtcattaccagtgaatgaattattactagaaacagttagtgtccaataatgaagttaatgggagataatatgacagtcattagactgacatggctctcttcattgttgaagaaagaggaacagtcatcaaaagctggcaacaggcaggcaggattaatctatgtcaggcagtgtttacgatacgtctcctggactctcttcttgtggcagggccatgattagagggttagtgtttcctgttggaagtcagcatcagctgttcagaagagagcccactgtgctgcrataaaactgtcagtcttgcagctccctgaccataggatgcccttgcacatggttatgttttcgcacgctctgttccctctgtctgaaatgtcccttttctttcacctgtaaaattcctacacttccttccatcc

SEQ ID NO: 833065 - DNA, 709 bp, Homo sapiens
gggggcaagtatcaccacccataggatccgcatacmcagagggccccccagggaaggggaagagttctactacaatcgtattgctgtaatgtgtaatttaagtaacaaaggtgctgtgtttcactgggggcactgttattgatttggaatatgtgctgacaactgtctggtgggagaaaccccagagtgtcattggggaagccatttaaggcccccaaacaaagggggggcataaggagtccagctaccagtatgacaggttccccgtatacgctgttccaggcatatcaggtaggatacaaaagcttttgactcattgcaagggtggatttcgccttttgttgaatttgggcaagaatagactgtttagtttggttaaaagaagttcaggttgtactacaggtgctattctcccaaccccattggtagcgacatagccacttggaaatattagcagagataatattctaaggtaatccattccctgcagcctctggcaactcgacacataccagcactgactgcggttgagctcttttgcagcagtggctaccaggtaataaattcattctaggcctcagacacaaagacacaagacacatcagtagataggtcattccctgtaatagcaaaagtggaggggaacatgatattgttttttcatatttaggaaattgtactatgccttcattttctgctcccatagcta

SEQ ID NO: 833066 - DNA, 582 bp, Homo sapiens
tagctccctcggatcccttctgttcctgagaagtagrgagtgcgccgatgtaattctgtgcaggactccggcagccggcaggggttctggtggcatctatgtcccacgttttaaagcagaggccccttacagagatggtgcaggagggtgaatggaggcagggaatgagaagttttcctgaccctccctcccttaactccacccccaggtctctgcctgcacgcccctcccctcctccagcttggcactggctgctcctgcgtgctgggaggtgcccccctctcccgtgcccgcccgaagaaccaggcgccccagtgccctctccgggagaaagcgtgcccctgtcggcgagcctgttgccaacgtatggttccgagttcccaagagcagaggccagctggaaggggttttcagtttgactttggcctttctcacggtctcctcgctcttcgcctgcttagcaggggcctctgctgcggtgacagccaaggccacagccacccacgcaggacccgttcactttcccctccgagcttacttgtctttctaccctaaggggctgctgcggccagagcagcctat

SEQ ID NO: 833067 - DNA, 478 bp, Homo sapiens
catcttgatccacctttttttttttttttaagtggkgaggtaaacgccaccctatggtcttttgaggaaacaaatgcattggtgccaggtgagaggggctgcaccaagtcactgctgcacgaggaaaccaccttgtgggagaccagccccaggagacagcagctgcccacgcatgtacctgtgtgtaccctccctggtctcccttcactaggtgcctttcccagccttagccctgctgcattgacagcatcggctgcagggcatcgtccattccgctgacccctggctccttgccctggggatccagcttttccctttgtgagatcagaatcctatgggatttttgtgaaacaaacaagtaaacaaacaaacaaaacaaaccattataagaaaccaggagaaaataaagggaagatatgcaaaccacaaaagtaataaaacaggtgagctgtaggtgcacagatttctgaattttcag

SEQ ID NO: 833068 - DNA, 551 bp, Homo sapiens
agtcccaggtgggggaccctgggaggcacatcagtgcaggctgcatgttgggccaccgaaaccagaggatgggtcttcattcccaagaggaccaagatggacatttctgggctcctaataccaagtcagcctctgagtaaagccttagggaagggtcatgggacccaagattcagtttacataaaacacgtcaggaacaacttggggtgataaagttgcaggacttttccttagttcagccaagaaaattcaggctcacagacaatttgaatggtgagtgagacagggttttattgggtgaaaaggaagaaaagggggaaacagggagtctcgctgggccagagaccctgctagagcgcttcctgcccacagcttgagtcccaggttccacataggaaagggggggcgaggctcctccctgctgcaaacgtcatgaacttcccaaggctccacctcactgtgcaggccggttggagtttctgcagtgaccccctcccacctggctgtcycattcccgcctctaaagaagtccatctaactgcccttagatt

SEQ ID NO: 833069 - DNA, 661 bp, Homo sapiens
tggggacaaaggcccggggactggaactgggagtggttgggaaccagacctgctatgggcatgggggctgcagacagagggagayaggtgagcaggcgaggcctcgggagagcgtggggcgttgaggcaggccaacctgggcccgagtcccggctccccttttcctcctcaatgactgaccttgaacaagttcttagtccttgtttgtaaaaagagcgacacatagattcccattctcccaggagataaagctgtcaggagatgtgggtaccagggtgtctgtgggagggtctttagccctctgtgttcaaggaggggacccaggtgtctctgaagttacttcaagaatggtcagtcctgtgctaggtggagttgctggcctaggttctgaacaataaagacctcggagcctggggcagggtcatgcccatcctgttggggtgcagctctccagagacccacaagacacagtgagcagggagcctgtgacccaggaaggtgaacagatgctgggcgagacagtgtggcttagcctctgcaaggccatttgaagctaagaaacttccagttcttggacctctcccagaggctaaagaccaggggtctagaaaggagggggtgctccagggtgggggtcttctgacagttcaaaggatccaca

SEQ ID NO: 833070 - DNA, 615 bp, Homo sapiens
ttccatatttttaatgatttagcacattgacctgccaaaaatcccaaggcttaaaaaccctaataaggccttataataatagagtttctcctcagaacaaacttctcctcaagagcacctgagtcagctggttcaaaatgtaacaagtttcctaacaagccctcctactccacatctcagcaaaaccagaaaggagaatagtgttcccaggcacaaaccagcaatcagagaattccaagtacaattcaagccaatgcaaagaattagcaaggagacacctccaaactcagaaacaatatggactttaaaaatatatatattgacattacagttttggaaacataaattgcatctttttttcagatgtggggctcacaatttttctggctaagataacatgctatcattataaatacacataaaggtctattttttttaatatgaagggtgggacatttccatctcaatgcacattaacaaacttttttggtctcttgacattagaggtctttctctacctctyttccaggtgaaaaccacctggcaaggtgacaccttgtacatatgaaatccgaatttaaaattgccttctaatgtcaagggttactaaaaaat

SEQ ID NO: 833071 - DNA, 533 bp, Homo sapiens
cctctgcagtacttcttgaagtcctgagaagggaacagtttctgtttctcaagtgatgttgagcttgtttgccaggtgttggcttgctgcctctctatcggtcactgttggccaccttgggaccccttttccaagctgctccacctggtccaccttctcacaaaggtagactgaggcctccctctgacttcaggtacttgtcagacaaggccagcaggggtactagaccaggccaaggctcgaagcaaacataaaagagttatagctaaaaaccagaaacctcaacatcagacatcacatgtgtcttggttgaagccagcttttttagatcattcatcagtcacaatacctggttagaaaaacctgaattcgtttacctgtttcagacctcccttcagaagtagaagcctcatgtctgatgatcygatggacttatcagctttacgccttccgctaaacaaatggggatttttttttttttttttttttttgagacagagtttcgctctgtcacccaggctggagtgcagtgg

SEQ ID NO: 833072 - DNA, 533 bp, Homo sapiens
cctctgcagtacttcttgaagtcctgagaagggaacagtttctgtttctcaagtgatgttgagcttgtttgccaggtgttggcttgctgcctctctatcggtcactgttggccaccttgggaccccttttccaagctgctccacctggtccaccttctcacaaaggtagactgaggcctccctctgacttcaggtacttgtcagacaaggccagcaggggtactagaccaggccaaggctcgaagcaaacataaaagagttatagctaaaaaccagaaacctcaacatcagacatcacatgtgtcttggttgaagccagcttttttagatcattcatcagtcacaatacctggttagaaaaacctgaattcgtttacctgtttcagacctcccttcagaagtagaagcctcatgtctgatgatctgatggacttaycagctttacgccttccgctaaacaaatggggatttttttttttttttttttttttgagacagagtttcgctctgtcacccaggctggagtgcagtgg

SEQ ID NO: 833073 - DNA, 580 bp, Homo sapiens
ttcttgcattccgtttggggatggatcccagaagcccccttaagatggaaacgctgatatggtgaatgtagggtggagttcaggttgaycccaaaggtcctaatctgggcaactaggaggatgatggtggctttaactgaactgagaaataaataagaagggaaatacacaaactcacattcatggcttgggatctcccaatccatcactttgaaaatcaagattctgagaaggcattcctatttaggaggaagaggagtgacattcattgtgtggctagaataattgttattttcataacaataccaagtctgagtgcttattacaggttaggtagtgtgcttaagatgttgacactcattagctcattcacaaccctataaaataggtattgctataatctctctttttattgattagaaaactgatcttagtgaagttaagtacttgccccaggtcacagagcttctgattccttagccgtaatatgtatggattccactctacaggcgtaatttttatataattgtcaaagtagtccatgaatagacttattatcttcattgtcttcatgtatctc

SEQ ID NO: 833074 - DNA, 598 bp, Homo sapiens
gtttgaagtatggggaagttttggaaaagataatagaattaggtcaaatgaggagtttttttaagtcatggggaagttctattcttataaagagtgggggagaggggagagrgagagaaacaccaccaccataggattgataggaactaaagtggaagaacaaaccaacaagaaagggtacattttatgaatgctgtatgtgtaatttaagagagttaaacatgaaatcctatttagctttatcaccttggtgagttttaggcatggatctacgtcattctggataaattgctacaaaatccgaatcagtcaaattacttcccaagctgcttacaccatttcaagtttaatttcttggtgactaggcaggatgctcatttttctctgatgattcaagctgagcattttttacaaaatctggagaagtttatgatggagatttttaagctcccagaatagacctgattaaaaaattattttaactaaaggaatgtattacaccaactcgcagtcgaaacgtggcttgaatcccactcattggagtaatgaatgattcaagaagccattagtatgcctttccatgttgtatgctcacact

SEQ ID NO: 833075 - DNA, 613 bp, Homo sapiens
gcttcagaaataacaccacgtatctacaatcatctgatcttttgcaaacctgasagaaacaagcaatggagaaaggattccctctttaatgaatagtgttgggaaaactggctagccatatgtagaaagatgaaactggatcccttccttacactgtatacaaaaattaactcaagatggattaaagacttaaatgtaagacctaacaccataaaaaccctagaagaaaagcaaagcaataccattcaggacataggcatgggcaaagccttctgagtaaaacaccaaaaacaatggcaacaaaagccaaaattgacaaatgggatctacttaaactaaagagcttctgcatagcagatgaaactatcatcagagtgaacaggcaacctacagaatgggagaaaatttttgcaatctaccaatccgacaaaaggctaatatccagaatctacggagaacttaacaaatttacaagaaaaaaacaaacaaccccatcaaaaagtgggcaaagaatatgaacagacacatttcaaaggaagatatttatgcagccaacagacatacaaaaatgctcatcatcactggtcatcagataaatgcaaatcaaaaccac

SEQ ID NO: 833076 - DNA, 602 bp, Homo sapiens
acttgcggtacctatgagccagagagcagatttgaggaacagagtcctcagggcacatggctcaaaccccaaaacaattcaagaacctggttgctaaagttagagagctgaaaagcagatccaatttatgaatggaatatttagttggaaacctgagtagatagtactgaggaagagcaagtgatcaaatggaaaagcatgtaccaaggtgcagaacccacagtaacagacaagaagaaacatgaaaatgaagtcagctgggggacaggggttagattaaatccctaaaccaaacaacaaaaagctgcagcagcagttggaattgatattcttacattaaaggtaaagcctggaatgaatgcatacttgtgttttctggttcctatactcagcaaaaactgcttgttcctgtttttttctatctccatacatagcatgcttattcacccagttacccaaattaggtctcctcacttaaaattcatgaatgactccactgttactacaggatagagtctagacttcttagaatgacatwtacttttctagtatttgggtattttctcattatctttttgttgttgatttctaatgtgaccatt

SEQ ID NO: 833077 - DNA, 544 bp, Homo sapiens
atgcctgtaatcccagcattttgggaggcraaggcgggcagatcacctgaggtcaggagttcgagaccagcctggccaacatggtgaaaccccatctctacttaaaatacaaaaaattagctgagcgtgttggcaggcgcctgtaatcccagctactcaggaggctgaggcaggtgaattgctcaaacctgggaggcggaggctgcagtgagctgatctcagcattgcactccagactgggcaacaagagcgaaactccatctcgaaaaaaagaatcatttgttctaccctgacaccacagcttggatgggtccagcttgctgaggtgggaagtgtctaagccctgggagctgtgtatcatgttagcacttgcttccatctactttgcctgcctattgtctgtgggtcaagaagacaccatgcccagtggagggcctgaagctactagaatgttttatttgttttgggtttttttttgttgttgtttttgtttttaccagattctcaagtgtctttccttctccctctattcaagaaatgaagt

SEQ ID NO: 833078 - DNA, 544 bp, Homo sapiens
tcacctcagatggtctttgttctttgcctggtggggtggcctaaaccttcattctggrgtgtatgtaccaataaatggccatattgttttgctctaatatcccgttaactttccataataaacaagtgtaatagaaaatcctaggttccaggcaatttctttccttcttccattgagtatttttttcccattgtgtattttaaacttggttcttccttgataatcgggatcaatcagcctagctattatagtacctgccttacttgtctttggctaagtggcatgaggagcaagaagtgctgagttaacagtctcagctctctgttcagtggaaataatgttgtgtctcccccaaagaagcacttctcccttgaggattaagacctgtaaactgggagagcccacagctgctgcgagttttcttttggggaaggattttgataatatttagtgaatatagggctatttcgattttcttgttcttgtatcaattttgataaattgtattttttaaagtaatttggccatttcacttaagttgtca

SEQ ID NO: 833079 - DNA, 590 bp, Homo sapiens
catttgctttttctggacatttcatataaatagaaccatactgtatatggtctgttgtaactggcatctttcacttgacacaacattttaaggttaatccatgtagcatatataagtttttattcctttttctcgacatatactatttcattgcatgaacataccacattttgtttacctattcagttaatggacatttaggttgtctcaaattttttggctattatgaataatgctgttatggacaaagatgtgcaagtttttgtgcagacacatgttttcaattttcttgagttataaaaacttggagtagaactagtgggtcatatagcaaccaaattcttttaaaaacatgactgacacaaaaagacttttaaaagtttgtggaaaaatggaattaaaagaaaaaatttatttcaacctaagctctaccaagttcaattttgtaatcaatgatagcagccatttaatccatcctaaagaactgagggtcttgakaattttaccatggcaatgcagtagtttttacactattaactgaagaaaatgggtgtcctttatagattctttaagattaggaaacaaaaaga

SEQ ID NO: 833080 - DNA, 631 bp, Homo sapiens
gatgtattaaaaaatgtatattccttcctaaaggtgaatgaaattatctcttcattacaactgggtacaatctttcataaataaaaatacaggagaatttcctgaactcgggaggcgraggttgcagagagccaagatagcgccattgcgctccagcctgggcaacaagagcgaaactcccatcacaaaaaaagaaagaaagaaaaaaataacatatgtatacatgtgccatgttggtgtgctgcacccattaactcgtcatttaacattaggtatatctcctaatgctatctgtcccccatccccccgaccccacaacagtccctggtatatgatgttccccttccagtgtccatgtgttctcattgttcaattcccacctatgagtgagaacatgcggtgtttggttttttgtccttgcgatgtatacatatgtaacaaacctgcacgttgtgcacatgtaccctaaaacttaaagtataataataataaaattaaaaagaaaaaagaaaaaaataacatagtttggcacttgcttttgtgcaagatcttaaaattgcttccccccaaaaaaattattaccacactttttcaaaggttctaaaactgaactttaacatctattaacata

SEQ ID NO: 833081 - DNA, 616 bp, Homo sapiens
ggattgggccgaagcttgaggaacccggatgcagccgcgatctcgggcggtgcagcgccgttccgcccggcrgtggggcaagctgaagtgagaagccgctgggcctgagaggagctctttaattccgggaggtgtgcgactagcggatcagcgggctggctttccgtgctgtgcggagcctttgggcggcggtcgtcttggaccggaggattccaagggctcgggtcgtctaagggtcggggagccccggagacttgatcccgccctgcagctagtgtggcccctcagggtttggggagtcccactctggacgggaccctgtgatgcgtaggcaggaataagatcccccgcccgtgccggtgtgccactgcttgtgtaaatgggccccttgaaacccccagcagtcgctctccgctgaaccttcttcgaattttctctcacctcatctccttttccttaaacgtctgttttgaatatcagacccctgtagcgttgaagccagcgctcgtttaattaatgcaggtgggaacgctgtcgccacagtttgcagtctattcattcagaataacccgccggtcagccgactgctcagagctcggaaagacccagctccaaa

SEQ ID NO: 833082 - DNA, 616 bp, Homo sapiens
ggattgggccgaagcttgaggaacccggatgcagccgcgatctcgggcggtgcagcgccgttccgcccggcggtggggcaagctgaagtgagaagccgctgggcctgagaggagctctttaattccgggaggtgtgcgactagcggatcagcgggctggctttccgtgctgtgcggagcctttgggcggcggtcgtcttggaccggaggattccaagggctcgggtcgtctaagggtcggggagccccggagacttgatcccgccctgcagctagtgtggcccctcagggtttggggagtcccactctggacgggaccctgtgatgcgtaggcaggaataagatcccccgcccgtgccggtgtgccactgcttgtgtaaatgggccccttgaaacccccagcagtcgctctccgctgaaccttcttcgaattttctctcacctcatctccttttccttaaacgtctgttttgaatatcagacccctgtagcgttgaagccagcgctcgtttaattaatgcaggtgggaacgctgtcgccacagtttgcagtctattcattcagaataacccgccrgtcagccgactgctcagagctcggaaagacccagctccaaa

SEQ ID NO: 833083 - DNA, 546 bp, Homo sapiens
cagaactcagtgcaaaaagtcttttccctcagggcattggtcaaaaacaatcagtaacaattatttaacattacagttgctatggtaatgataacaactagagcaaaccagaagctgamcaaaaaacccgaaaagagaatctgggggctgggtgcggtggctcacgcctgtaatctcagcactttgggaggctgaggcaggtggatcacctgaggtcaggagttcaaagcaagcttggccaacatggtgaaactccatctctactaaaaatacaaaaattagccaggcatggtggcacatgcctgtaatcccagctactcgggaggctgaggcaggagaatcacttgaacccaggaggtggaggttgcagtgagccgagagtgcaccactgcactccagcctgggcaaaagagcgagactccaaaagctgaggtataagatatccacagggggctttggaaaactctttaacacattccttggaatctacaagtccttgagcatgtgcaaagttgtgcacttgcccagaaaatgcctgaaagtccc

SEQ ID NO: 833084 - DNA, 594 bp, Homo sapiens
ctaaaatggtatatcaattatgagttgctttacccggtagaatccaagagagaagaagttgtgcaagttttgtgcaagttctgtctcaagacctggcatatttgacttttgtacttgagagtcctgagccaccacggaagaaaccactgctagacagaccatgtaaagaagtcatatagtgggctgacacccagaatcacttaaagagatagagcaggccagccatgtcagcaacccaactgatccagccctcatcaacccagcagaagattgcagccacatgaatgaccactgacaataccagcaaaagtctcagctgagcccagcccacattgcatatctgtgagcaaataaaatgattgctgtttttaagctagctcctaaattttggagtattttttaacatatgaataaattcctgaaacatcaattaaaaatattttgatggacagttttttctttaattttaatgttgtcaaatatatcaatttatttttccctatagcttgtagtttttgtcttgtgtacaaaarcttcccaactcaaagattattaggatattccaataagtgttttaaatttttacctttcaca

SEQ ID NO: 833085 - DNA, 433 bp, Homo sapiens
ctaagtcatgcgctccagtccaaggatgagacagaattgactctgacaggagaacataaactaaaagtgatagagatgaaaatatagaaagattttggtatctgaaaacaacatatttctattactacctgcattagtctgttttcacactgctataaagatgctacctgaaactgggtaatttttttattttaaattttgaagaaacttaatttcctcatattctgctataccttactctgtatggaaaatatcttttttaaaatagtacattttcttaaaggttatgactcctatcttagagaaatttttatttttgcttattttaaaaaaaaattcctggactaataawtccaaaatctctgctatagctgagtctgatcctttttccttctgtatttcaatggttttgggggaaggagtggcgtttggt

SEQ ID NO: 833086 - DNA, 540 bp, Homo sapiens
gggaaaaccacccctatgatccaatcacctcccaccagctccstccctcaacacatgggaattacaatttgagatgagatttgggtggggacacagaggcaaatcatatcactacctgaccaattgactgctccacatctactatacatctatttctcttaatctatgtcacaaatgttcatgtctatattaaatgtcccaaccctgtccaaaaagggagacaagtgaactcttagctaatggtaaagtcaagatctctggatgatgtgtaaatcatcttagtcaattccaattttagatcctcctacttttctatgtgtggataattgatacgtgtatctattctccaaacacttaatataagattaataaaaaagaacatgattactgcaataaaattgggactagaagaaaaagtatatggattattacagggttatatgatatgtagtgttcttctaggaaggaatcacaatgaatcactgccctgggggaggactgcgttactgggtcagctagtttgggcagcccccaggtcta

SEQ ID NO: 833087 - DNA, 507 bp, Homo sapiens
cttaaaattatcgaggtatgggaataccgcagagatatcataagttcaatttcagaccactacaataaagctaatgccacaaytaagcaagtcacacaatttttaaatgtttccagtgcatataacagttatatttacactaaactgtagtatactgtgtacaatagcattatgtctaaaaaacgtacaaaccttgatttaaaattactttattgctaaaaaatcgtaatgattatttgagctatcagtgagtggtaatctttttttactggtgaaaggtcttgcctcagtgttgatggctgctaagtaatcaaggtggtggttgatcaaggttggggtggctgtagcaattttgtaaaataagacaacattgaagattactgcacaattgattctttctttcataaaagatttctctgtagcatgtgtttctgcttgatagtattttacccaccttagaatctctttaaaaattgtagtcagtcttcccccaagttctactgctac

SEQ ID NO: 833088 - DNA, 507 bp, Homo sapiens
cttaaaattatcgaggtatgggaataccgcagagatatcataagttcaatttcagaccactacaataaagctaatgccacaattaagcaagtcacacaatttttaaatgtttccagkgcatataacagttatatttacactaaactgtagtatactgtgtacaatagcattatgtctaaaaaacgtacaaaccttgatttaaaattactttattgctaaaaaatcgtaatgattatttgagctatcagtgagtggtaatctttttttactggtgaaaggtcttgcctcagtgttgatggctgctaagtaatcaaggtggtggttgatcaaggttggggtggctgtagcaattttgtaaaataagacaacattgaagattactgcacaattgattctttctttcataaaagatttctctgtagcatgtgtttctgcttgatagtattttacccaccttagaatctctttaaaaattgtagtcagtcttcccccaagttctactgctac

SEQ ID NO: 833089 - DNA, 524 bp, Homo sapiens
tagcagaggaacactgggcaagttatgtcacctttctaagccttccttttccttatccatrggaagaggagcatatatctgcttctccaaggggctgattaaatatatagagcacctgctctacacaaatgtgaattagcttctttttaaattgggcttttcctggaattttgtaactgtttcgttatttggaattttgtttgcttttctcaacatggttgtcagggattgatctcttgctgtcttaaatgtcctcacttcagacaaaagaacaccggtaagcgccacttgagtggcacccaggcaggagtgaagatgctgactggtgccgaagctgggaggattcaggggacaggctcaggagtgacagactgcaagcctgccaagaaacagcacagggagctccttccctcacgctgctaaaaatactgctgggaaagtaatttctctggtcctattttagaaatcagagacagatccaccatattcatgtttggatcctggtcagccttctggtttgagtt

SEQ ID NO: 833090 - DNA, 593 bp, Homo sapiens
gattgctgcaatgaaaataaagaaacatcagtttattatttacttgctatatttgctatgtttaagagagcaaatcataacatgttataagaaattgatttctttacagcagggagataaatattcagggaaaataaaataaaataggggataataacatacccagaaaggtttctaattcctctggagacaggatcccacagaataatttcttttttctttttttgaagttaattctgagaatacggatcatacactatacatacatgattaatgtaaacataaaaggtaaataaagtctcataaaaagttttaaattgttttacatttttttacttctctaggtctctggtaaagtccaatagtaaataattgacagcaatctactctcaatgtgcacacagagcattcaactataaactctttaaaagttgcatttattgctccgtaaaaatgggacaaaaggaagagaaaaatttcaccagtattagyacctacatgcacatccggagtcagcttaaacattcatgggtctgaaggatcttttcccagttcaggaacacatccattatttcataaactccaggaggcaa

SEQ ID NO: 833091 - DNA, 406 bp, Homo sapiens
aacccctaaaggatttgtgtctccatctgtgggtgggggtsgggagagctatttgaataaaaaaagaaagaagagctgtttttacacaaactctctttgaaacgctgggagtacaaagcagcattgttttgagaggcatacaacagaaaaacacaaaatggggagagagaggtcctctgcacctgggcacagagtgcagtgatttgaatgtcaggggctttggcactttggtgtttcctgcacatcagtggcgcaccagttccagtgacagctgccaacacagctgatttattctgtagtggcaagaggaaaagggaggggagaggaggtgaggtgaggggagaggagaagaaggtcttgccagtggcaaggagtggggctgaaaaatttggaagcagtgggaaat

SEQ ID NO: 833092 - DNA, 611 bp, Homo sapiens
ctaagaagtgggtccaaactctcctctcacccttaggataactctccaggcatataggatttcttggaccttcatattgagtttcttagggagacagagcagtgagccatctgaggctttgtgttctctgctgctcccgttgtctgagtcctgtggccgctgagccctgctgccactcttcccgtcccagactcagttactgccaccagggcttggactgaggtgaagcaagaaaggaagccatctgcctgggcaattacaggaacttgagaagaaggcttccttaaattttcaccctaggcccttcacttgcctcaccctgatgccagccttgacctcttctggcattccgcaaacgtgtcatgccctctcccacctcaggacttttgtgtttgctgcttctttttggcctggaacattccatccctgagagctgtgtggcaccctcactgccttctgtctgggctctaagatcaccttggagggaacttccctgaggtggggtggctgtgtcttctgtttatccctcacccagttttatttttcaccccagcactcaacaactcctgacaygtttgtttacttcttgccttgaccctccatgtggtatg

SEQ ID NO: 833093 - DNA, 563 bp, Homo sapiens
ggatgaataataggatatttgctcagcttctttaactgagcaaataacagtgggttgaatgtgatagaaagcttatttcactgcgcatataccccaaaagttaaaayataataatagtaataatttaaaaaaaagtttagactggcaggtggtccagggaggaagggcagctctgtaccacaaattgtctggggccctcgttcttcttttcttgttattccactgccctttagcgtgttggtttagtcatcttagcttcaattagccctcatctacctcatctgcatttcagtgagctggaagggaaagaggaaaaaggaggcaagctgcttcctcttcagggcatgacctgatgtttgatacattgcttcttctcacatcttgctagacagagttttgtcacatggttatctctcactgtaagaaaggtttagaaatggaatctctagtttcctggccatcagagcagctataacttatagctatgggactataagaaacaggaatcaagatagaatggatattggggacaatcagtaaccatgatacagagacctccatag

SEQ ID NO: 833094 - DNA, 615 bp, Homo sapiens
gaatgtactttgtgagatccaccccctgcctgcaaaacattgctcctaactccaccgcctatcccaaaacctaaaggaactagtggtaatcacrccaccctttgctgactctcttttcggactcagcccgcctgcacccaggtgaaataaacagccttgctgcacacacaaaccctgtttggtggtctcctcacacaacgcatgagacagaaatgtatcatatatcatatccattgctctggcaaccatcttaccttaggatggttgaatgaaggatgaagccacctccgcaaatggcagagaaagagaagaaaagattttgggtgcttgagaaatttagcggcttgagcactacatcaaccagccctgaagctgaaccgtgttgcaaacgtcctgttttgtgagctaatgagtctccttattgtctccgctagtctgagttagaccagctgctgaaatcgtgataactgatgtaaactctaataaaatgtaaggtaatttttgaccagcagagcataaacctcaacatctgactggtcccagcagatttaggcacccttatctccttttagctttaggaatttcatttgggattcaaatggctttatctgacag

SEQ ID NO: 833095 - DNA, 576 bp, Homo sapiens
gttacttttgagttgagatcattcatcttccaaattgctgatttaattaaattgcttgatgtccccagttgagtatagtgtagtatgttctgagtatctcaagtatggtttcatctgaggagattagagaaaataatggctcaaccatgtgaatttattttggttgcctgttatctgggtacctgatctatttatctctgggctatgctgtgacttctaatttaagcttagctccagtctataatctgtttaaaataaagaatgccctaacactatggtgttaagatgaatgaatgaacagaaactcaaaagatcggccaggcgcagtggctcacgcctgtaatcccagcactttgggaggctgaggcaggtgatcacctgaggtcaggagttcgagatcagcctggccaacatagtgaaaccccatctctactaaaaatacaaaattagcctggcatggtggcggacacctgtaatcccagctacccaggaggctgaggcaggagaatcacttgaacaacccgggaggcggaggttgcagtgaccygagattattccactgcactccagcctggg

SEQ ID NO: 833096 - DNA, 539 bp, Homo sapiens
ccctgagatgggggcagatgggggagtgtatgtgggcaggagayggtcaatgccccccccacctctccgagcccctccccgagggcaaccctcccccaggtcacaccccgctaggtgccacgacagaggagacttggttgctgtcccccaccccaccctcaagaaaaattctccagacagactaatgaggaggattgatggtgctaccacccttttcactagggaggcatctcagaagccgaggagacgagaaaaaacaacatcaacttttaatcgagattgcagattcagaaaagattcataagtgaaatgattccctaaggaaatataaaaagttacttacggcattgctaaattgggcatgcttcaatcaggggctgttgagaaatcattaagatctacaagacgatgttttagatatatgtgagctccgtcaggagggctggctattgctccagctagagagaggggatctggtcctgagctggctggcctcctgtgtcacccacctcaatccaggggaaggaggagaaagtgaa

SEQ ID NO: 833097 - DNA, 490 bp, Homo sapiens
ctcgtgatccgtctgcctgggcctcccaaagtgctgggattaaaggcgtgagccaccrtgcctagcctttttttggagatggagtttcgcccttgttgcccaggctggagcacagtggcgtgatctcagctcactgcaacctctgcctcccgggttcaagcgattctcttgtctcagcctcctgagtagctgggattacaggtgcgtgccaccacacccagctaattttttgtatttttagtatagacagggtttcaccatgttggccaggctggtctcgaactcctgacttcaggtgatccagccaccttggcctcccaaagtgctgggattatagtgtgagccactgcccttttgttttgtttttttaagagacaaggtctcaccctgttgccagggtggagtgcagtggcaggatcttggctcactgcaacctcaatctcccacgctcaagtgatcctcccacctcagccttctgagtagtggggac

SEQ ID NO: 833098 - DNA, 490 bp, Homo sapiens
ctcgtgatccgtctgcctgggcctcccaaagtgctgggattaaaggcgtgagccaccatgcctagcctttttttggagatggagtttcrcccttgttgcccaggctggagcacagtggcgtgatctcagctcactgcaacctctgcctcccgggttcaagcgattctcttgtctcagcctcctgagtagctgggattacaggtgcgtgccaccacacccagctaattttttgtatttttagtatagacagggtttcaccatgttggccaggctggtctcgaactcctgacttcaggtgatccagccaccttggcctcccaaagtgctgggattatagtgtgagccactgcccttttgttttgtttttttaagagacaaggtctcaccctgttgccagggtggagtgcagtggcaggatcttggctcactgcaacctcaatctcccacgctcaagtgatcctcccacctcagccttctgagtagtggggac

SEQ ID NO: 833099 - DNA, 524 bp, Homo sapiens
tcaaagtgactgagtgagtcagagtcttatgacgcttaagctgctccctgagagccaagtcaggcactcagaaascgggttagctcttcgaggatcagataggcccacttagaaaattatctccgtgcctggagtggtacctacattgcatcacaggggagccaagtggctgcaactttatatatatatataaaatctcaggccagattctcgggaagcataagaaaacttaagcagtttttggaagctgttgtaactttctcaagttattaaagtatcctttcatgtctgaaatggcaacatacccatggttgttctaatgtcttgaaagagttattgcaatttaaaaaggcacaggattttttttttcaggaaaggtgtttaaactcatcacacatttttaatgatcttctttgtttaagagatgatttcactctagtgcacccattttaagatgtctataattatgttaaatagggaatggtaaaaatagtttaaaaatatataattgagttttttctatt

SEQ ID NO: 833100 - DNA, 641 bp, Homo sapiens
aacatggactatgcatacccagccctggcattttcccacagaggaattctctggccaacttcttcttatccaagcagatgaaagaggtgaaaacctgtgaacagtagttatgcctaagtttttctggaaagacatgtctcatttttttacattaaactttaagtaaactctaaaataaatatttaaacataaactctaaaataatatatcgctttcataaatatacagagaaccgtcatataagtgaatttgcctacagaaaacaccataattaatagtaaactcttataaaattcccttgaaagtcaagaacaggatatactccttggttttagaagtattgtgtaacattgctttgaagatcctaacaaatgcaaaagtatatgaaaatgatatgaattagaaatattataaagagaagatagttgacttttagcaacaatcagttcagtaggtggctgcattcaggataacaggtcaatagatttccgcataggatataacttattagaaatacaataaaaacatgtagggtaaaacamaaaaacacaaaaaaattatccaggaataatatatctagcaagaaatgtaaaggcctatatacatacatacatatatattcatacatacacatgtataca

SEQ ID NO: 833101 - DNA, 568 bp, Homo sapiens
gtacagcactccacagagtagatggagaggccacagtttattcaatcagtcttccaacccatctrttgatgagctctttccagttctttgctataagaaatagtctgacatgaatagccttgtgcgtgtatcctctcacatttttttgcagcagaaggtgacacgtggtgtgcagtgtacactgctcactagtggatgtctgctagaaaaggcatcataagtacaaatgcaagtccatggccttgatttgataattagtcacatatacaaactcatattcattgtaattatcattttaaacagaaatatgcaagttcctatagaaagaggacaattttaatgatttaaattaataaaaccatgtttaaagaaaaattgacagcaattctacacatactcagaaaatagatgggggaatacttcacaagtaatgtgtgaagttataatattctgaggccaaaaccaggtacagacataacaaaaaaaaaatctatgtactaatatctctcataaatatagacacaaaaattcttaatggtagcaaatagaattcaaatatatatgtacg

SEQ ID NO: 833102 - DNA, 602 bp, Homo sapiens
aggctgtttacagtgatttttttttaatgtaagtataaggagcatagtctaaaacagtgatggatagtatagcatagtaaatatataaagcaatgtcwtagtcacttattattatcaagtgttacctgctgtgtacagttgcactgctccgctttcacatggctggcagcacagtaggtttatttacaccagcatcaccaggaacacatgcgcaatgcattgtgctatgatcaatggctactatgtcattaggtgataggaggtttttaactacattataatcttatgggaccattgtatacatgatccatcattgattgaaatgtccttacgtggtacaggattttgtgtgtgtgtgtgtatatatatatatatatatgaaattatatgccataagcaaatgaagtgttttccttgtaggaatgaaagactgttcaatatttcaaaatcaatgtcatttattaaattaacaggataaagaagaaaaatcacatgtttatatcagtcgatgcacaaaaagcatttgacaaattcaacacccctattagtttcctaaggaaactaaccaccacaaatgtactgtttgaaaacaatacaaattc

SEQ ID NO: 833103 - DNA, 602 bp, Homo sapiens
aggctgtttacagtgatttttttttaatgtaagtataaggagcatagtctaaaacagtgatggatagtatagcatagtaaatatataaagcaatgtcatagtcacttattattatcaagtgttacytgctgtgtacagttgcactgctccgctttcacatggctggcagcacagtaggtttatttacaccagcatcaccaggaacacatgcgcaatgcattgtgctatgatcaatggctactatgtcattaggtgataggaggtttttaactacattataatcttatgggaccattgtatacatgatccatcattgattgaaatgtccttacgtggtacaggattttgtgtgtgtgtgtgtatatatatatatatatatgaaattatatgccataagcaaatgaagtgttttccttgtaggaatgaaagactgttcaatatttcaaaatcaatgtcatttattaaattaacaggataaagaagaaaaatcacatgtttatatcagtcgatgcacaaaaagcatttgacaaattcaacacccctattagtttcctaaggaaactaaccaccacaaatgtactgtttgaaaacaatacaaattc

SEQ ID NO: 833104 - DNA, 602 bp, Homo sapiens
aggctgtttacagtgatttttttttaatgtaagtataaggagcatagtctaaaacagtgatggatagtatagcatagtaaatatataaagcaatgtcatagtcacttattattatcaagtgttacctgctgtgtacagttgcactgctccgctttcacatggctggcagcacagtaggtttatttacaccagcatcaccaggaacacatgcgcaatgcattgtgctatgatcaatggctactatgtcattaggtgataggaggtttttaactacattataatcttatgggaccattgtatacatgatccatcattgattgaaatgtccttacgtggtacaggattttgtgtgtgtgtgtgtatatatatatatatatatgaaattatatgccataagcaaatgaagtgttttccttgtaggaatgaaagactgttcaatatttcaaaatcaatgtcatttattaaattaacaggataaagaagaaaaatcacatgtttatatcagtcgatgcacaaaaagcatttgacaaattcaacacccctattagtttcctaaggaaactaaccaccacaaatgtastgtttgaaaacaatacaaattc

SEQ ID NO: 833105 - DNA, 632 bp, Homo sapiens
atacaaattcagtctctcaaagctctggaggccacargtccaaaatcaaggtgtcagcaaagccatgctccctgccagatctcccggggagagaaaccattcccagccttttacagcttacagtgtctcctatgctcctcagctaacagtggcaccgctggaactcctacctctgtcttcatatcacatgtttctcttggtgtctgttttctcctctatgtgtttcatacaaaggcattcgtattttggatgtggggacaccaacataatccaggatgatctaatctcaggatgtttaactacattccatctgcaaagacccattttccaaataaaatcacagtcaccacgtctggggacaagggagtggacatgtcgttatcgggggccaccatcaagcctgctgtaacgtctgttcatgacaacgtctcagcaaggcaggaggaaatgggtcgtcctcagtttgtgataaagagcacttacaaaacaacaaaacaaaacaaaaaaacacttagaattaaccttactgatgaaagactggatgttaccccctaagagtaagaacccaccaaggatatccactcttcccattcagtatagtgctggaagctcaagtccattcaaaattgcaa

SEQ ID NO: 833106 - DNA, 644 bp, Homo sapiens
acgattattatccacaattaggtaaacaggtacttcyagcaactcacaggaagtcacacagataattgatgttgctgagattccatctaaaacaggatctattccaagagtctatatttctactcactttgctatcctgcttccagactgtggtctagaagtagcaggaaaataaagcaattaatttatgcaaaactgtattgatgaagattatttcttttaatgaatctagatatgcagatttttttcttgacatgttggctatttggtatttgattagaacgttgtaggtgacgaaagtaatctgaattatttctccactttttttttcctatttatttgcttctcaatcctgttgataaaaggggttacgaatctatagcaattggccagacgtgggattttccaggtttcagaatttcctagttagctgagggttacttgaatatcctcctcctgacaggcaaacacaaatacatagagtttttattaaaaatcagtctatatgcttatttaaaaatacaaatatgtgtgtatttttattacttgaaaaacagaaattctagaatagtaaatttttattcctattttgttcatctggcttcatctggtgatcagcaccttcatccttcattttcaattat

SEQ ID NO: 833107 - DNA, 656 bp, Homo sapiens
gttacgaatctatagcaattggccagacgtgggattttccaggtttcagaatttcctagttagctgagggttacttgaatatcctcctcctgacaggcaaacacaaatacatagagtttttattaaaaatcagtctatatgcttatttaaaaatacaaatatgtgtgtatttttattacttgaaaaacagaaattctagaatagtaaatttttattcctattttgttcatctggcttcatctggtgatcagcaccttcatccttcattttcaattattcattttggaaacggcagtggagttagttttatttttgaagtttacagtgaacctgaactcaagaatcaaccaggagcatctggttggtgcagattgtaagcctgatagtatccttctgtgaggatgaccacttaggtgctcagaaatgtgttacttgataaggcaaaaagttcagttcctgctgagttaagaattagagaacagcgcagcttgcgtcattgagaagcctcgacctccatgaggttcmtagctggcgtttcagccttaaacaatggcaacagacacagcagagcattaactatttgtatgcctcgagtataatgtaagtgaaaggaacactatagcaagatgatttttcaggactaaatttctactaat

SEQ ID NO: 833108 - DNA, 518 bp, Homo sapiens
gtctctgccaaaaaaatacaaaacttagccgggcatggtggcaggcgcctgtggtcccaactacttgggaggctgaggcaggagaatggcatgaacccgggaggcggasgttgcagtgagccgagattgcgccactgcactccagcctgggcaacagagcgagacaccatctcaaaaaaaaaaaaaaaaaatggggcgggcgggccaggcgcggtgtctcacacctgtaatcccagcactttgggaggctgaggtgggcggatcacttgaggtcaggagttcaagaccagcctggccaacaccaggaaaccctgtctctgttaaaaatacaaaaattagccaggtgtggtggcacgcgcctgtagtcccagcaggagaataacttcaacctgggagacagaggttgcagtcagctgagatcgcaccactgcattccagcctgggtgacagaccgagactctgtctcaaaaaaaaaaaaaaagaagaatacccatatgcattcattaatatatagggct

SEQ ID NO: 833109 - DNA, 518 bp, Homo sapiens
gtctctgccaaaaaaatacaaaacttagccgggcatggtggcaggcgcctgtggtcccaactacttgggaggctgaggcaggagaatggcatgaacccgggaggcggacsttgcagtgagccgagattgcgccactgcactccagcctgggcaacagagcgagacaccatctcaaaaaaaaaaaaaaaaaatggggcgggcgggccaggcgcggtgtctcacacctgtaatcccagcactttgggaggctgaggtgggcggatcacttgaggtcaggagttcaagaccagcctggccaacaccaggaaaccctgtctctgttaaaaatacaaaaattagccaggtgtggtggcacgcgcctgtagtcccagcaggagaataacttcaacctgggagacagaggttgcagtcagctgagatcgcaccactgcattccagcctgggtgacagaccgagactctgtctcaaaaaaaaaaaaaaagaagaatacccatatgcattcattaatatatagggct

SEQ ID NO: 833110 - DNA, 652 bp, Homo sapiens
aaaaatttctcagtggaggagagcagacgaggtcatggtggcagaaactaattttccaaagctctacatttggcttgaaagcttgaattttatcactgccaacaaatacattgagttgttttccttgatgtgacaggcttactttgttcattttcttttatcctttttttttttttttttttttgagacggagtcttgccctgtcacccaggctggagtacagtggcactatcttggctcactgcaagctctgctcccgggttcacaccattctcctacctcagcctcctgagtagctgggactacaggtgcccgccaccacacccggctaactttttgtatttttagtagagacagggtttcaccatgttagccaggatggtcttgatcttctgacctcatgatccgtccgcctcggcctcccaaagtgctgggattacaggcgtgagtcactgtgcccggccactttgttcattttcaagaaagtgtctgccaaatacttaagtttggcaaataccatcatttgtccrtcatcatttcaagtaaaaatgagattctatgaaaaagcagctagtttagattgcatctcaaacaatcacacaagggcttttcttctaatcataagattttgatatatagcagaagtgcttta

SEQ ID NO: 833111 - DNA, 562 bp, Homo sapiens
tgtgttcactagagtggcactttaaattttcttcaaaaatttttctttgcattcacgatttggctagctgtttagayatggtgaagaggcctaacttttcgcctatctcaattctcaacatgccttcctcactaagcttaatcatttctagtttttgatttaaagtaagagatatgcaactcttcatttcaacacttaggggccattgcatggttattaattggcctaattttattattgttgtatctcagggagtatggcggcccaaggagagggagagaggttggggaatgaccagtcagaaaacacacaatatttatcaattaaaattgccatcttatatgggtacaggttgtgatgccccaaaacaattacaggattaatcaaatatcactgatcacagatctccataacagatatcataataatgaaaaaatttgaaatatttcaagaattaccaaaatgtgacccagagacatgaagatagcatatgctgttggaaaaatggcactgatagacttgctcaactcagagttgccacaacccttcaatttgtaaaaag

SEQ ID NO: 833112 - DNA, 590 bp, Homo sapiens
tcggtgataataaacctgtatgtagtgacataaacttgccttccattgattgcaaagtcctgtctctaaggccttgatcaatcccttttgayccttttataattaagaaattgtcctggtatgtaccttactgagtcatagtgttggttaaatgaggaaacggatgcaccaaacattctacttagatcaaaataacaatttacagatattagctaacagctatattgcagtctgttttatgtgacttcataatcaaatggttattatttataagtttagctttcctataatattttgtttatcattggtacccaacacatattaatagtagatataaatgttttaaaagcacgattgacctgagaaaagttcagctgatttatagtcataatttcaaaatgggcataaggtcaagtcacaaatttcagctggcatttgacattattggatcaatagtatctctaaagttacttttacattaattataaccatttaaatcagtttcccattataaatcaattatttatttgacttattgaattttagatttaataaacataatagaaaaacaatgttgccaaagcaaattc

SEQ ID NO: 833113 - DNA, 667 bp, Homo sapiens
aacaccaagtaaagtttacaaattcaatggcarcaccaaattttgaaatacaattaaactatattctctagataagacacattttacctacatttacacaaaaaaattagaaaatgaagtaccttatttttatagagagaaaagctgagatatagtgaaattgttgacaaatacatgacagatcactgcagataaaaaataagtataccctctataatctacctcaagtgtgttttaccatttagtgtaatttgtgttgttattgaactttctttccaagctgcttgacaggctttgcacacacttgtaaaaatttggcttaaaccatttctactagattttggctgagaagtgttacattatacaatattggcatgtgatattcctctatcaatatagctttataatgatgacctcctaaagattatcaaaacagttgtgagaaagaattattagggttaaataataagtacatgtaaagtcaatttgggtttgttgtgtgaaatataaaagtgattgtccatttttttgacagatggcaagattttaaatattattttcaatacaaaatgaaggacatattttgataccaacatgacatcagaactatcacaggaaccacagagttcagtgagaagaaaatgattctagttacttccagtaatat

SEQ ID NO: 833114 - DNA, 542 bp, Homo sapiens
aggacaaaatggatagtgatttgcagcaattgaaataatatctcagatgattatataggaaaacttgaaattccctaaaatcttatagtttgtatgtgacagaatcctgacagttttctcaagtttgacaataatctacattttaacaataatgtccttgccagtaatggtttgtaagtctcaaaaaaaaaattctggactataaaaaatttaaaacaaaaacaaattgtgatcaactaccagatgatatgtcaattctattccatctttagaataagatgataccaaaacagtgtctcaggacaagtcaaatgaatttgcaataaaaagcattatataaaatattaatttaaaagtatattttttatatttagtttttgtaaggtctgtgacatttgtcagtcctttacaattattacttgttatttattttcaatttcttaataaataattactttctatctctttttctttktataattttgtactcatttcttaaaaagcacatcccaaattgtatgagcctcaggtacatgaaacct

SEQ ID NO: 833115 - DNA, 618 bp, Homo sapiens
agagtttcctgcagatgtgtgaagaaccatcctggaacacatcaagggaactgtggtataagacttactccagacataagagtaatccttacacttaggattagcaagtggaatttaaggagtctcaatttggctcaaaataagcaggagctttttgctaatttggccagtctgacaatagtacaaatagcacaaagtcgtaatagagttgtactgaaagcaaataaccaaacaatgcataattgtgaattggagaaattatacaacacagcctttataaatagaaagctgaactaaataaaggctaaagtcatctacatctgaagaacctctccatgcatagtacctaatatggtttagatatatcgccacccaaatctcttgtggaattgtaggtcccataatccccatgtgtcatgggagggacctagtgggaggtaactgagtcgggggctgggtttttcccaggctgttatcatgatagtgaatacgtatcatgagatatgatagttttataaagcatagttcccctgcacacactstcttgcctgcctccacgtaagatgtgacttttctcctccttcgccttctgccataattgtgagtccacatggaact

SEQ ID NO: 833116 - DNA, 561 bp, Homo sapiens
ctgccttaacctatgcttccacaagtcagaattatcaacatttggcaggtatatgagaggctctaaagggaccatgtcagttgccagaaaattttctttagttttmaaacaaaatggctcactcatgtagctactatatttctgttattgttacattacattgggtgtattagtatgctgattaaaaaaaaactctttcgatgaaattaggcctcacaacttatagctagtcctactgactgaccttgaaatttggagcttccagattccttcatcaactttcctggaacacctccctttactctcagtggctttggggacatgacattacatgaattatgttagaggcttgaattttttattttccctaagcagaaatctataatgggtcctacaaagtattaggctaaatttttaatgttagagaattgtagaaactttaaaaagatcccttaacttaaaaaagtaagtagagaaaagtcatatatcatatggttaaataaaagatgttgtcacaatataaggcaataatagaaatgcaagtaggaaattatgtcacgg

SEQ ID NO: 833117 - DNA, 535 bp, Homo sapiens
caactttgtgggggcttagggactcctcagamtgggccaccatatgacaagaggaccaccataagacaagggaccagaatgcaaacagaagccaaagaaccaacaggtttcatcaatacaaggactttacagatgcagaatctgaggcttggagaggttaaaatgactcgttcaaatcaggaaactagtaagtttgaagtcagtaccccaacctcttcaatctggctcccaagccagcaacttaatcaccacaagacaataccaccctcattgtatcaaaactgcctaatacagtgcatggtacatgttaggtacctaatcaatggcagatatgattactttgctattaataactgtaagaatcacttgggctgggggcagttcaccacactcaaccaagaacatcacagattagatgaggataacagttttgacttggcttcccctatttgatcacacaggccagcatggaaggtgtagcacagcatggcaatgctgttgaaccataatgcccttaccccagggggagttggag

SEQ ID NO: 833118 - DNA, 600 bp, Homo sapiens
agctctctgagtttcattccccatttgcaraatggacatatgagcttttgcttcacagaggtttttttttgtgtgtgtgtgtgaacttccaaatgaactgatatgagaggaaatgctctagaaactataaagttctctgcagctccaaaaggaagcatcattgctgtcattcagtgatgactccctttcttgggactctagggttcttctaattccctagctggtcctttgttatctccccagagaatgctagaaatgtctccctgggaaaagacatcattcataaagcctaaaattccttccaaaataccaaaggcgttatgaggacatggttttacccccgtgacttctgccttaagagggcgctcagcctccccagtaacccaagtgggtgtgtcttcgaaatgtcaagcagggtttctgggaagcagaattggagatgtagctgagaggtgcctattgaagtcagtcccaggtccaaacacttattaatgtggtcacttgagcaaattactcagccttgcctctgtctcactttcctcatcaggaaagttggaataataatgcctatgtcataggttataatgaaaattaaatggg

SEQ ID NO: 833119 - DNA, 588 bp, Homo sapiens
tctgatggaacaaggaaaggtgactaggtgcagtggctcatgcctgtaatctgagcactttggaaggctgaggcggatggattacttgaggtcaggagaccagcctggccagcatggtgaaaccccatctctactaaaaatacaaaaattatctaggcatggtggtgggtccttgtaatctcagctgctagggaggctgaggcaggagagttgcttgagcccaggaggctgaggctgcagtgagctgagattgtgccattgcactccagcctgggtgacagagcaagactccatctccaaaaaaaaaaaaaaaaaaaaagaaaagccttcacagaaaagggattttcagggctggcggtggggggtaggtaggaggaactggggaaggacagccagcaaaagggaacaagatgagcaaagacacacatgtttagaaacccaatgtgtgattgaaaagaccaagaaaccttgaggaggagtgacaggaggtgagaatrtaccagtgtaaggcacataacatggattctgatcaaatcctggttgggccacttatcacctctgatgccttctgttaagtttctgaacctc

SEQ ID NO: 833120 - DNA, 588 bp, Homo sapiens
tctgatggaacaaggaaaggtgactaggtgcagtggctcatgcctgtaatctgagcactttggaaggctgaggcggatggattacttgaggtcaggagaccagcctggccagcatggtgaaaccccatctctactaaaaatacaaaaattatctaggcatggtggtgggtccttgtaatctcagctgctagggaggctgaggcaggagagttgcttgagcccaggaggctgaggctgcagtgagctgagattgtgccattgcactccagcctgggtgacagagcaagactccatctccaaaaaaaaaaaaaaaaaaaaagaaaagccttcacagaaaagggattttcagggctggcggtggggggtaggtaggaggaactggggaaggacagccagcaaaagggaacaagatgagcaaagacacacatgtttagaaacccaatgtgtgattgaaaagaccaagaaaccttgaggaggagtgacaggaggtgagaatgtaccagtgtaaggcacataacrtggattctgatcaaatcctggttgggccacttatcacctctgatgccttctgttaagtttctgaacctc

SEQ ID NO: 833121 - DNA, 729 bp, Homo sapiens
atatagctagttagtggctgggctmggatccaaactgttgtctaactcctggaacactattaaccactccactatttagcctagtacatagtaggtgcccaataaatgttccattgacttgagactcagaacatggccagaacagtgttagatttgccatagaatgtggccactctgtctgtatctttggggtggccagtaaataaattattttgcattgaggaaccagttgtgtttggttctctgacagcctaagtttgaacccttttataactcttggttacttgttggggggtggagtttggttcatagcagggaagtatacttacagtattcataattactgttcactatgggtcagccatgctattaaatgctttatagccatgatttctgttctcccagccaccctctgaggcaggtatcatttagtagtaccattttgcagatggggcagctgaggactggctgtgtaactcattcaaggtcacacacagaccataagttgtgtagctggagttgggtgcccacctgtctcttgttctccagatgttcttgttattggagaatggctcaaatcttctgaatgactgtagcacaggcagagaggcaggcctgtccttacccagaggattcagcaggcacaagtgggtcctgggcttcagaaagtgttggcagttcatctctaggccctctgaagagcctgtgttgccctggcagatccagcgt

SEQ ID NO: 833122 - DNA, 588 bp, Homo sapiens
tctgatggaacaaggaaaggtgactaggtgcagtggctcatgcctgtaatctgagcactttggaaggctgaggcggatggattacttgaggtcaggagaccagcctggccagcatggtgaaaccccatctctactaaaaatacaaaaattatctaggcatggtggtgggtccttgtaatctcagctgctagggaggctgaggcaggagagttgcttgagcccaggaggctgaggctgcagtgagctgagattgtgccattgcactccagcctgggtgacagagcaagactccatctccaaaaaaaaaaaaaaaaaaaaagaaaagccttcacagaaaagggattttcagggctggcggtggggggtaggtaggaggaactggggaaggacagccagcaaaagggaacaagatgagcaaagacacacatgtttagaaacccaatgtgtgattgaaaagaccaagaaaccttgaggaggagtgacaggaggtgagaatgtaccagtgtaaggcacataacatggattctgatcaaatcctggttgggccacttaycacctctgatgccttctgttaagtttctgaacctc

SEQ ID NO: 833123 - DNA, 604 bp, Homo sapiens
tcacttggagagaatttcaattatacacagtgttgtagttattattaaaataaaatcwgaggactgattcatcatggctttctggtgagcatactattttgtaggtgatttaattaattgcatacatatatgattaacagtatctagagtgaatataactatgggtgaatatattgatgttgtaataatgatgtactttcttaatattagttatttattaatatgagaataatagtaaacgacaaaaagactaaagtgaatcctgaattaacttttgtctggtaattgattttaggtggaaaaagcttaatatttcaaatcaaacagctaaacaaatagattttgtcattagatggggctgttaataattgagtgccttccaaataaggtcccaaataagaaggaaatccatgaattttgttactacatgactttttgtgactcagtaatttatgatttttatgaaggccatgctcttaccctccacttaggtcaacgcagtaggataagcaatgtgcatcaaatatactgattatattcacaaaatgaatctacatatctttggaatcaagcattgatttagagagatcaccaataaataatg

SEQ ID NO: 833124 - DNA, 528 bp, Homo sapiens
ataaaaatcataaggaaatatacatactaggtttctaacatcgcttcagagggctaagttatgcaagcagaacataaaaaaaaaaaaggaaggcgcctagaaaaaaaagagtaaaagaaaaaagcacatacaattgtatttatttgtcaagtaaaatcattgatgtagggatacatatgaggagaagttaaattttaaaggaaaaaagacaaagaatgccttctatacttacatgggcatttgaagaaccagatgaatgaacatctgatgatctcgtctacaagtatcaaaaataaaagtcaataatttaaaatgtcttatactaacaaaacatgtctctcgtgttatacaaacttaagagtttcctaacttctggcaatttctcctcagctaataaaactgagcaaaggcagtctctgacttatgaaaagattgtgatacaaagtaaatgtgtaagtcatttctttaaaattcagcctgcatatttccaaaaatataatraacactagtgggatatatatgaggcaa

SEQ ID NO: 833125 - DNA, 219 bp, Homo sapiens
ttgagttatccttgccaagacagtaagcccttcctttacctctggattcaacagcataaaaaactratgtgactgaaagacaggtgaacaactcagcttccttttcaattgagcctttgttgtttccattggtgaaaacattctgatgtcaagcagagtctgaggtggctggtaaagaggacaggctggcatacgtagtatagattatcttatctactt

SEQ ID NO: 833126 - DNA, 591 bp, Homo sapiens
ctctgtgcaaatgtacatattaggatcctaaggataaaaaagattaacaagatccccaggtgattaatgtggacattaacatttgagaagcactgttcttctataaacttgccctgttttgatgtttgagacatcatgcccactatttcttcttcctgagatattcttctttgtctcacacctcaaaatcttttctggctaatactttcaagtgtctgctttgaaatcattttctagagaaaatctcctgtaatgccttatgaaggagttaagtgacctctcaaacgtacttcccttgtatcttccacactgttccatagtcaagtttgcataataggtttcttaagaggcatcttatctactatcaaatccctagtgtctaaaactaaaactaagataccttgaatccaagagctaaaaccataaaaattttagaagaaaatctaagaaaaactcttctggacattrgcctaggcaaaaaaattatttctaaggccccaaaagcaaatgcaacaaaagcaaaataaataaattgggcctaattaaactaaaaagcttctgcatagcaacagaaataatcaacagaataaa

SEQ ID NO: 833127 - DNA, 563 bp, Homo sapiens
cccatctctaattaattgtagtatttatgtttaaatagatcaatagctgagtttgacctcaatgtacaatgtgagctttacaatatcattgcaatatgaaggaagctgtgatgtgtgggccaggcagaccacttatatcgaactcagcaatatggacgagaagcttttgttctaatgaacattgtatttcaatgttaaaaatgggaaagccacacttgggttccatccacagctgagctctgaacctgatttttttttggaggattctgggggaaagaattatagcctccttttagcagtaagacaaacccagctggctggaaaccacagccatggctccaagtcagtttgtcttcttgaagaggaaaaatagagaaaaatgaacaattctctcataacttacacacattattcttttgcattcaacaattattttgagaattattcttaaatgaatcatacttgggggaaagtggaactctgacaaraggggttggggccaaatttgattgagaagatatgttagcatcttttcaagaatgttcatttagtgaatatttgcc

SEQ ID NO: 833128 - DNA, 658 bp, Homo sapiens
aataagaatgaaacatattatggtgacatttcaaaacactaggaccaagagaagattccgtaagtttccagagagaaagggagaggaagaggaggagacggaggaggaggaagaggacaaagaggacagtgaggatgaggaaaagaatgtggtgaccatacaaagaatctgatatgagaataacattggacatctcaatagctatactgaagctggaagacaatggaaaaatgacttcaaatgatatccaacttaaaattctatacccaaccaaataccaagcaagaggatgaaggtggaatacaggcatttttaggcattcaagatctcaaaacatatatatatatatatcccattaactcaacattaagtgaaactgatgaatgtgttctaccaaaacaaggaagtaaatcaagaaagaggaaaacaggatatttaggaaaataggagatccaacacaaaagggaagcaaatggaatacccaggaaaaagtgaaggatgatcccaagattacagtcatacagtaagtrtagagtccaatcagaacagtgttattcaattgactgtcatattaagaagtatcatgagcaagattctgcttcctttttgctattattttaatctgaggactgaatgcccaaataaagcctggcccaga

SEQ ID NO: 833129 - DNA, 636 bp, Homo sapiens
gtttaaaattattctacagttttgatttctgagaatgctatgccatcaatatccataaaactcaactcatccactgattcttaatgttaaataaacmcctacacttatccttggcccccatctgagttcaccagaagctacagtagactacttaaatgctgaaatctcccatctcaggtgcctctctgcttccctatctgaaggattctctgacatcaggagagctgtacctgaaggaccagtattgctgaatctgagcgcaaacctaaaccaatgttccagcttcccaagagatgttaatcccatgttaatatcccaagagattaatctaaagcatatgtcacctggtttctggcattcacctgaacatccatgcactttgtaatggctttcccccttccttccctttcgttcgacccttccaccttccacaccaccactcctccccaacgcacactctctcacatgttcttcctggaattaccttctgaataaacaacttgctcccaatgtccttgactctggtatgctttggagtgacccaaaactagggtttgtttgtttgtttatttgttgtggattaaggggaacttagcacattttgcaaaagtttagcctcttatgtttttgtttcta

SEQ ID NO: 833130 - DNA, 507 bp, Homo sapiens
ggacagaagagggtggagagcaaaaagggagatgtcgagtacaaaaattcagttttgaaaggagaaacaggctgggcacagtggctcacgcctgtaatcycagcctttgggaggctgaggcgggtggatcacgaggtcaagagatcgagaccatcctggccaacatggtgaaaccccatctctactaaaagtacaaaaaatagctgggtgtggtggcgcatatctgtaatcccagctactcgggaggctgaggcagaagaatcccttgaacccaggagacagaggttgcagtgagctgagatcgcaccactgcactccagcctggcaacagagtaagactctgtctcaacaaaaaagaaaaaaaaaaagaatggagaaataagctttagtgatctattgcacagaatggtgactataataaataataatgcagccaggcacggtggctcacacctgtaatcccagcactttgggacgccaaggcaggcggatcacaaggtcaggaga

SEQ ID NO: 833131 - DNA, 396 bp, Homo sapiens
tcactgcaacctccgcctcccgggttcaagccattcttttgcctcagtctcctgagtagctgggattacaggcacccgccaccacgcctggctaatttttgtatttttagtagagacggggtttcgccatgttggccaggctggtctcaaactcctgacctcgtgatccacccgcctcggcctcccaaagtgctgggattacaggcgtgagccaccacacccagccaggagacaggagcttttcaaatggatccactcaaaggaacgagaagggctgcgtgttggatctttcgcagatgcgctgggctsttcagtgaagcacttgtttatacagtgaagactgattggggattggcgggtgagggatggcagcagggagaaccaggccaactcatg

SEQ ID NO: 833132 - DNA, 396 bp, Homo sapiens
tcactgcaacctccgcctcccgggttcaagccattcttttgcctcagtctcctgagtagctgggattacaggcacccgccaccacgcctggctaatttttgtatttttagtagagacggggtttcgccatgttggccaggctggtctcaaactcctgacctcgtgatccacccgcctcggcctcccaaagtgctgggattacaggcgtgagccaccacacccagccaggagacaggagcttttcaaatggatccactcaaaggaacgagaagggctgcgtgttggatctttcgcagatgcgctgggctgttcagtgaagcacttgtttatacagtgaagactgattggggattggcgggtgagggayggcagcagggagaaccaggccaactcatg

SEQ ID NO: 833133 - DNA, 642 bp, Homo sapiens
gcataagcacattaataaatgtgtatgtttggcctggtgtggtggctcacgcctgtaatcccagcactttgggaggccgaggtgggcagataacctgaggtcaggagttcaagtccagcctgaccaacatggagcaaccccatttctactaaaaatacaaaattagccgggtgtggtggcgcatgcctataatcccagctactcgagaggctgaggcaggagaattgcttgaacccgagaggtggaggtttcgttgagccgagattgagccactgcactccagcctgggcaacaagagcaaaactccgtctcaaaaaaaaaaagtgtatgtttcttctcctgttaatttgtctattgtcagttcattttagcagtgaacactcagagggtggaggggaagcccctacaagagctttaaaagctactgatgcttgggtctcactcagagattctgatatattcagcccaggtgtaagattttaaaagctgcccaggtgatcctaatgccaaggctgaggcccctggaggaaccctgcagagctgcactcactactcagcaatyccaatccacacgtgaagggttaagcaggagtacatttgggtgcagggggcagggcattgttttgggactcaggggcctct

SEQ ID NO: 833134 - DNA, 599 bp, Homo sapiens
ctgtaccatacctactataaatatacagaaaccaagttaggaacctgcacatacaaccaggccacctattcagtctgtgacccaggaaataagcagctatatgtatgttataacccttttaccctatgaattctcgtttgaggtacccatcaaatcagagaaaaaaaaaaaggagaggttatagcttgaaccaaagaagcccctccctcctataaaaggcctatttccttgtactttgatgcctgccacgccacgtatgttcataatcataaaaaaccagaagcagtctgcaatggtttaacacaagagaggcttagcagcaacagtcctaaacttatctgtacggaaaaccacaaatcggatgcccaaactgtaacattcagtggtctgtgctaacacagctccaacatttatattcaggaaggactgctctactaagtagtatgtcaaccaaaccaaattttaagataaggacacgcaatcctttaaattttactaccttaaagccagagctacctttttggtctacaggacagacakcactattacgagttgatagacaagaagcaggccttgaagttccactactgattgtcaaa

SEQ ID NO: 833135 - DNA, 563 bp, Homo sapiens
tgtataatgtggataacagccatattgagctacggaaagtaacatgacaaaagaatctctgagtgtatatcactcacggtcctttaggaaatcgatagtacctttttttwaaaaaaaaaaaaaggaggctgcaaagagtttcaattcttgaaagtgtaggcagggttaagggaaacagcatggggtggtgggcaacctcaggtgctggcatctggctctaggaagccattaccctccctggcaagaggcaatggagaaaacacttacagaaccaagtgaacactgtcactttgggagaggccacctgacaggggctgtggaaaagcgtgagccactgtcagacagagacctggcagggtgggagccaggagaacaaatgctgcaggctcttcctcctcctggccctccatctgctgggccctcccactggccacattcaatgggaaatcagagggcaaaggagccagactgatgctgtcaatagaggcctgtctcctgggatgctgaacaaagatgggttgctcttgctctgcatccacgggatagatccggaagggcaacgg

SEQ ID NO: 833136 - DNA, 659 bp, Homo sapiens
tctccaagtccccactagactcaggagcccagctggcttcacccagtgtatcttgcaccagggctgcaggtggagctgcctgccagtcccgcgccgtgcacccgcactcctcagccctcgggctgttgrtgggaccaggcactgtggagtgggggtggcactcgtcagggagactcaggccgcacaggatcccacagcggtggcggggggcgggaggctcaggcatggcaggctgcaggtcccgagccctgccctgcagggaggcagctaaggcccggcgagaaatctggcccggcgagaaatctagcgcggcgccggtgggccagcactgctgggggacccggtgcaccctccgcagctgctggcctgggtgctaagcccctcactgcccggggctggcagggccggccggtcgctccgaatgcggggcctgccaagcccactcccaccgggaactccagctggcccacaagcaccatgcgcagcccgggttcccgcccatgcctctccctccacacctccctgcaagctgagggagccagctccggccttggccagcccagagaatggctcccacagtgcagcggcaggctgaagggctcctcaagcgcggtcagaatgggcgccgaggccgaggaggcaccgagagcgagtgaggg

SEQ ID NO: 833137 - DNA, 641 bp, Homo sapiens
gtagggtgattatagttaacaacaatgtaggctatatatatatattttgtttgtttgtttgtttttgtttttgttttttgagacagagaaaagtatatcaaaaacraagatggtctataaaatctaccatttttattccctaaattatcaatatcatttttacacatgccttattacatatgtgctgtgaatacatccaccataactcatgttttgatgtgtaaatacatgagtgtaaacaggcaattcccctaaataaaacctaatatacagaaatctaaattaacaaataaaaaagattatttatggccaggcattgtggcttatgcctgtgacccagcattttgggaggccgaggtgggagggttgcacaagcccaggagttggagatcagtctgggcaacacagggagatcccatctctacaaaaaatgacgaaattagttgggcctgatggcatgcaagccgatagtctcaggtacttgagaggctaagaggatcacttgagtctgagagatcaaggctgaaagtgatacctaattgatggtgccactgcacttcagtctgggcaacagaacaagactctgtctcaaaaaaaagaaaaagaaaggaaaagattatttaaatttgagttgatatttt

SEQ ID NO: 833138 - DNA, 510 bp, Homo sapiens
tctcacatcatacttgcttggatagatcacacccctagttaactgcaactccccacctgctccgtgcctgcagccatgcagttaaaagacataaaactgtgctagctgstctcctattaaatttgggaccatgaattttcatgcagtctttcatgctgcccagcagtcatacagtgtttccctaatcccttctctctcacattctcccctagattattttatactttctcctctcccttatttaacacttcctccctacagctttgctgagatagttgaagcaatcagaagaaatcatccccacctccctcccctataactgcccatctgcacctgtgcccacactccaaccttcccttcttcttaggaatcacctgtctctgctgctggtgaagtcccaccacctgtgcacttagagtcacccctgactcatgctcaaggacaggttctgccattctcatctctctcttctgcatcctcagtctccccctcctgatgataattcccata

SEQ ID NO: 833139 - DNA, 510 bp, Homo sapiens
caatgatttttgattttcctctatgaaaggatttaataactctctaaattagatactattattacctgtacttaatagttgaaaacagaagctgagagaggtcaagtmacttcttcaagattgcacagctaataggtggcagaactatgtttccaggttagatttgtctaatggtggatgctgtaatcccaaattactatgctatgtttttattttcatgaagtagagcatcagtattatctgttactggagtcaaaacatatctatctctggacctaactatctatctctccatgtatttaatttccagccagaaatacatatatgcacacacaaatatacactacatatatatatgcacacacaatacatatatatacatatatacacatatattgttaatggatctatatgtatatatgtgtgagcatacatacatacacacacacacacacacacacacacacactaaacgatgcttactccttttgtcattgctctcataataag

SEQ ID NO: 833140 - DNA, 637 bp, Homo sapiens
catgctttgggtcatttaacacaattaattcacataaatataattcgtataaaaatttttatctgtaatatcaggtgaagtacctctgaaattattttgtgctgagttgacttttcttttctttttttttttgagatggagcttcactctgtcacccaggctggagtgcagtggcgcaatctcagctcactgcagcctccgcctccggggttcaagagattctcttgcttcagcctcccaagtagctgggattacaagtgtccactaccatgcctggctaatttttgtatttttagcagagacggggttttgccatgttggccaggctggtcttgaactcctgacctcaggtgatctgcccacctcggcctcccaaagtgctgggattataggtgtgagccactgtgcccagctgagttgacttttgttagtttgagttgctaagaaatacttagtatatacattcttactacatttttcctgatttgaaaaggaaaaaaaagtctgttttctctctccctagcaaactatacatyccaagctccctagaacatattttacacatagaaatacctttttactgttatagacatgtttatgaaagtttctcgagcactgaaattttctaaataaaatt

SEQ ID NO: 833141 - DNA, 668 bp, Homo sapiens
cttgctctgtcacccaggctggagtgcaatggcgcgatctcggctcactgcaacctccgcctcccaggttcaagcgattctcctgcctcagcctcccgagtagctgggattacaggcacccaccaccatgtctggctaatattgttatttttagtagagatggggtttcaccatattggccaggctggtctcgaactcctgacctcaggtgatacacctgcctcggcttcccaaagtgctgggattacaggcgtaagcactgcacccagccaaggtgttttttgtttgtttgtttgtttgtttttaaataacggaacatttactgtatgacttggccataaatacgaggtgtttatccaagtaaaatgatagcttatctctatacaaagatacgtacataaattttcctagcatctttatttgtaatagccccaagctggaaacaaagcaaatgtttgtcaatagggtaatggataaacaagctgtagtaaatctttatgtattagtttgttagggctgccataacaaaataccccttagtggcttcaacaacagaaaygtattttctcagttttggaggctaaaagtccaagatcaagatgtcagtaggtttgatttctcctaaggcctctcttctgtggttgccttctccttgtgttcttattatg

SEQ ID NO: 833142 - DNA, 607 bp, Homo sapiens
ccagataaaaggactccgatttctaatgtggcttaaaatttgcttgagtctttatgacagagtcaatacctccaagtagacatttggagccacattttcagttcattgccagccacatccaaatggctccatgttatttatagcactccagtattctatgaccacaacctgtcactttgaaaacagcatttgcagccgggcgcggtggctcgtgcctgtaatcccagcactttgggaggccgaggtgggaggatcacgagatcaggagatcgagaccatcctggctaacacagtgaaatcccgtctctactaaaaataaaaaaattagccaggcgtcgtggcgggcgcctgtagtcccagctactcaggaggctgaggcaggagaatggcgtgaacccgggaggcagaggttgcagtgagtggagatcgtgccactgcactccagcctgggcgacagaacgagactctgtcttaaaaaaaaaaaaagaaagaaagaaagaaagaaaatagcatttgccagtgtcttataggaatttgrtctattaaggaacccaaaatattttgtcctctcaatttccaattctgccttcctcaatgtgggtttttt

SEQ ID NO: 833143 - DNA, 631 bp, Homo sapiens
tcacaccaaatagaattcagattcatatgcatatttggttttcttttgaaaatagtgagctgctttctttgagaacaggtcatgttttcaggggaaagcaatagaaacaatttcaaagctgtttccttttgagtattttgcctttattacttggcatttgttagtccaaagatttctagtgatcaaattttgtgtccataaactaatactgtatgattacagagcaataaaattcattgcaggaaataatgcaaaatttctgaatattatctcttgcatatacctgacaagtgtttttcaaaaacatcaggctacaggaatcctatttgacctgcacatctactgttggcccttctaacatttctgacgtcttccttctaatcattgccgtcccttcattgtcctaacatcagtaggctgatctatatccacacatctaaagtaaaatttaaccagggagcaatatctggtaattctctatcagaaaacttgagaccagcttaattttcagaaacactgtttgccttagttatccaaagaaccacwtgtagtttccacttagcttcccctatgaaattccagccacaacagcactgacatcttcttgtagcacgagtattctagtatgttc

SEQ ID NO: 833144 - DNA, 607 bp, Homo sapiens
ccagataaaaggactccgatttctaatgtggcttaaaatttgcttgagtctttatgacagagtcaatacctccaagtagacatttggagccacattttcagttcattgccagccacatccaaatggctccatgttatttatagcactccagtattctatgaccacaacctgtcactttgaaaacagcatttgcagccgggcgcggtggctcgtgcctgtaatcccagcactttgggaggccgaggtgggaggatcacgagatcaggagatcgagaccatcctggctaacacagtgaaatcccgtctctactaaaaataaaaaaattagccaggcgtcgtggcgggcgcctgtagtcccagctactcaggaggctgaggcaggagaatggcgtgaacccgggaggcagaggttgcagtgagtggagatcgtgccactgcactccagcctgggcgacagaacgagactctgtcttaaaaaaaaaraaagaaagaaagaaagaaagaaaatagcatttgccagtgtcttataggaatttgatctattaaggaacccaaaatattttgtcctctcaatttccaattctgccttcctcaatgtgggtttttt

SEQ ID NO: 833145 - DNA, 495 bp, Homo sapiens
taatcttactggatcagaaagactagaaacctgccccaggacagaagttgcagagccagaactaatcacaggatttctgtggtttctacatgattcagcatcccaaagatagcaaggaatcctaaaagactgaacagagaagcagtcagcggatgggctctagtctaacactgtggaaacagaattggaagtcaaatacgtgccaaaatgtaatgctgatagcatgtacattcaaagaacatatatagcaaccacacttcagtgctgattgggcagggtttccatagcaatatgatttatttccagtagaatttttcaactgaaaagagtaagcttcccctcattaaaagaaataaataaaaagttcatcaatatttrtttttccattatacacagatcataatgcctggttatggcaaaaagaccgcaattcccaccagagagcaaaaaggaagtaaagctaccattgttgatctgaaactaaatggattcttg

SEQ ID NO: 833146 - DNA, 529 bp, Homo sapiens
tgttagagctgtaaacacaagacttattatgagagcaatgacaaaaggagtaagcatcgtttagtgtgtgtgtgtgtgtgtgtgtgtgtgtgtatgtatgtatgctcacacatatatacatatagatccattaacaatatatgtgtatatatgtatatatatgtattgtgtgtgcatatatatatgtagtgtatatttgtgtgtgcatatatgtatttctggctggaaattaaatacatggagagatagatagttaggtccagagatagatatgttttgactccagtaacagataatactgatgctctacttcatgaaaataaaaacatagcatagtaatttgggattacagcatccaccattagacaaatctaacctggaaacatagttctgccacctattagctgtgcaatcttgaagaagtkacttgacctctctcagcttctgttttcaactattaagtacaggtaataatagtatctaatttagagagttattaaatcctttcatagaggaaaatcaaaaatca

SEQ ID NO: 833147 - DNA, 520 bp, Homo sapiens
acaccctatgcaaatgtctgattggttgcggaaggtgacctatcagaggctgaagtgaagttacaacgttatactcctatgcaactgaagacttggcctgtgaccagcccgtttggttgcagaaggggaccaatcaaaggtacttttaatttttcgtctgccatccagaaaaaagcagggggcttgcaaagggagtagcctctggtcttttgttacttgggcatggaaagttggggttttccttttgactgagttataggaagtcagtgtgaattgaccttaggttccctccctccagaccctattctcctgcctcaataataattcactaagccagactttcgtttagtgacggttttctgttatctgtattttattgtagatttctaaagatttttttaagttttttttaaaagatgtattttaaaaaccgtgtttyagtcgtaagcttctctgacattctgatcaaagtccttaccagaaaactgtatcaacatctgattatttcttgtggtgttga

SEQ ID NO: 833148 - DNA, 601 bp, Homo sapiens
aggaacagatcccagacatgtataagtcaggagcaaacccaggagtgcataaacaacttcatgtggttgctttccaaaaaactctctccctgcagtatcctccrtatttttctgttcctggatgtatagaaaaaaattaatgcagcaggcctgaaacagatcctttagaaagacctgttttcaagaatggcccttggttggtttttgtgaaattggatttcaagaggcttcccaccatgccaagataatagttgttcactgtgcttaaattgtttgtaaaaacaatatggtttattttgaaagcaggcttttcttctgagtgtctggaagtttttcatttttgtttcatgccacacagagtgcctgtgtgaccagcccccaaccaaaacctaggacactgagtctctagtgagctcttcaggtagacaatatttcacacattgccataacttgctgctgggcttaagtaagtgccttctgtgaaaccctattgagagaggactcctgaaaacttatatctggattccttcccacttggtcccatgcatttttgcttttgctggtttcgctttgaatcccttctctgtaacaaaccacagcc

SEQ ID NO: 833149 - DNA, 601 bp, Homo sapiens
aggaacagatcccagacatgtataagtcaggagcaaacccaggagtgcataaacaacttcatgtggttgctttccaaaaaactctctccctgcagtatcctccatatttttctgttcctggrtgtatagaaaaaaattaatgcagcaggcctgaaacagatcctttagaaagacctgttttcaagaatggcccttggttggtttttgtgaaattggatttcaagaggcttcccaccatgccaagataatagttgttcactgtgcttaaattgtttgtaaaaacaatatggtttattttgaaagcaggcttttcttctgagtgtctggaagtttttcatttttgtttcatgccacacagagtgcctgtgtgaccagcccccaaccaaaacctaggacactgagtctctagtgagctcttcaggtagacaatatttcacacattgccataacttgctgctgggcttaagtaagtgccttctgtgaaaccctattgagagaggactcctgaaaacttatatctggattccttcccacttggtcccatgcatttttgcttttgctggtttcgctttgaatcccttctctgtaacaaaccacagcc

SEQ ID NO: 833150 - DNA, 601 bp, Homo sapiens
aggaacagatcccagacatgtataagtcaggagcaaacccaggagtgcataaacaacttcatgtggttgctttccaaaaaactctctccctgcagtatcctccatatttttctgttcctggatgtatagaaaaaaattaatgcagcaggcctgaaacagatcctttagaaagacctgttttcaagaatggcccttggttggtttttgtgaaattggatttcaagaggcttcccaccatgccaagataatagttgttcactgtgcttaaattgtttgtaaaaacaatatggtttattttgaaagcaggcttttcttctgagtgtctggaagtttttcatttttgtttcatgccacacagagtgcctgtgtgaccagcccccaaccaaaacctaggacactgagtctctagtgagctcttcaggtagacaatatttcacacattgccataacttgctgctgggcttaagtaagtgccttctgtgaaaccctattgagagaggactcctgaaaacttatatctggattccttcccacttggtcccatgcatttttgcttttgctrgtttcgctttgaatcccttctctgtaacaaaccacagcc

SEQ ID NO: 833151 - DNA, 586 bp, Homo sapiens
tacttcttaactgaattatcatagtcctctctcaggttctagattgcctcatatccagtatattctccacctgactgatgattgattgtattgaaatatagatatgaacatgtacttcttgcctacaaattatttgacagcttctcaatgtcagcaaataaattccgtgctccttagttgagcacaatctttcctaatctacctcctgtctagctcactagtctcatcccttcactcctctagaaatacgcttagttccagttttattgaagtagttatttttaaaaactagcagattatttccctcacctgggccttcattcatgctattttcttgtacagggttaacaactcatttcacgtgattttagcttaaatattagcttttcagaaaggccttcttgacaactcttcctaaagtagccctgagttaatcctcttatatattggctcccctgtatcatgtcatcctgtcactgcctttttctttgttttcttgtgtaatgtgagtctctcccattggaatattgmaccctgaagcagggaaattgtctgttttggtcactgttttatcctttgagtttaa

SEQ ID NO: 833152 - DNA, 598 bp, Homo sapiens
taatccatctttcttttaaaagactgacaatgactttacctaaaagctaatgtttcattcaattattaaaatatagaggtactcccctgggcagcyttgaagttatacacagcctcccctgaagttcagtaactccatagcagtaggaactacatcttgctcaatttttgtctattatagctctattgtctagtagagtaatgggcacaaaattaattggaataaagatcaattaactgtttccctctcatcttttgataatggaaatcaagcgttttaggtgagtatgtgaacacccttctgccgatatttttactgttgttgtataattgcatcatgtgtgcccatgagactaaatctgtatcagtactaggtaagtgtaagtaactatgtgtacaacttatgggcattgtagactccttacttctctctgctagctggataatggtaatgacttacagtataatcaaaaacctctcaaccagtcttggattgctcacttctaaactattatagtagagacaaaaatgcttttcttatttaaaaaaaaaaactatttttttttcagggggtggatggatatttatcttggatctca

SEQ ID NO: 833153 - DNA, 435 bp, Homo sapiens
cctttcctgcactctcatgtgttacttggatatattgtcataytgtattttaatttgcctactgtgattttgactgtgtctctgtgtaaacatttttattgatttatcctgggattacaaaatctgtaggtatgtatcattgactaaattttgcaagtttttagccattatttattaaaaaatattttcagcaccatgctgtttctttttaacttctggtatttcaatgatacaaatatcagactttttgttgatatttcacaagtccctgggactttgctaatgttttcattgagatataatttatagataataaaattcacctatgtaattaccttcatcagtgctgtttatttcttcatgtggaatcaagttattatcaagtgtattttcatttcagccagaaaaacttcctttaacatttcttttcaggga

SEQ ID NO: 833154 - DNA, 546 bp, Homo sapiens
attcatgaggaatccgtgcccaggacccaaacacttattagaccccacctccaacattggaatcaaatttcaacacgggatttggaggaaacaaacatccaaaatakaacacctactaataccttctgttcttatagtcaagattctcactctgaatagataataaagaaagaagagaaaacccataccacctacctaagcagtttaacccaattttttgtttaaaaatatacaaataagtaaacataaatcaattagcagaaatttaatcaaagctagcaacacaaaagacaatgaaaaaggggaaaaaagaaaagaaaaagacaactggctctggataaatcagtaaaattcatggaagaaaatataactttaaatgcattttgtttaaatgcttacagcaattcaaagatttttctttcattaaacaaacaaatatgctccttttagaaaagagaaaccttcaaaaaggaagagttaatgtcaatttaaaatattggccaaatttttagaagttaacagtagaactggagaaaagatcaagta

SEQ ID NO: 833155 - DNA, 546 bp, Homo sapiens
attcatgaggaatccgtgcccaggacccaaacacttattagaccccacctccaacattggaatcaaatttcaacacgggatttggaggaaacaaacatccaaaatataacacctactaataccttctgttcttatagtcaagattctcactctgaatagataataaagaaagaagagaaaacccataccacctacctaagcagtttaacccaattttttgtttaaaaatatacaaataagtaaacataaatcaattagcagaaatttaatcaaagctagcaacacaaaagacaatgaaaaaggggaaaaaagaaaagaaaaagacaactggctctggataaatcagtaaaattcatggaagaaaatataactttaaatgcattttgtttaaatgcttacagcaattcaaagatttttctttcattaaacaaacaaatatgctccttttagaaaagagaamccttcaaaaaggaagagttaatgtcaatttaaaatattggccaaatttttagaagttaacagtagaactggagaaaagatcaagta

SEQ ID NO: 833156 - DNA, 620 bp, Homo sapiens
cctgttactcctacctatgctccctaattcacccagctgctggtcatccacagcccctaactcagtcattcagagtttcaccaaaccagaagtctctttcctcagagcaggtggggctgamtttccattgctctaatgctaaaggaggtttggggtaataccctatctccatgactgggctatagattctagaattgttccatgtaaagaatgaggattggctgggcgtggtggctcatgcctgtaatcccagcactttgggaggccgatgcaggcggatcacttgaggtcaggagttcaagaccagtctggccaacatggtgaaaccccatctccactaaaaatacaaaaattagccaggcatggtggcgcatgcctgtaatcccagctactcgggaggctgaggcaggagaatcccttgaacctgggaagtggaggttgcagtgagcagagatcgcaccattgcactctgcagtccagcctgggtgactgagtgagactccgtctcaaaaaaaaaaaaaaagaatgaggatctctgaaaatagtcctttgtcatctttttaagcccaaatagaggaaggtttccagtgagttgggccatgaagatggagcagagggta

SEQ ID NO: 833157 - DNA, 564 bp, Homo sapiens
  misc_feature 351: n = A,T,C or G
ttcaaagccattttaatgagaacattaaaagggaatttttayttttcgaaaacaagagcagtagattacttattcaccaaattttatataatcatagaacatctattaggcagtacaattgagtgcaaaggaaaaagaaccgtagctctacttctgcgggagaaaacaataaagaaacaagaaagcatgttcattttcttctcctatacgtatattagtaaaataagactaatatctacaggtcctgggaattgattttgaagctatgtcttaataataatagctaatatttattgagaatctaccatgtggcagtcaatttacatgtgttaccttacttcatcttcacanaaacctgatcaagtcagctgtggtagactcaattaatggtggtccacaattaataacaccttccagtattatacccttctccacattgaccatgggcctggccatctgatttgccttgtcctatgggacattagcaggcatgatccaagtagaggctgaataagggcttgaccatttgatttgtcttctcaagatctatgtgccatgtaaaag

SEQ ID NO: 833158 - DNA, 597 bp, Homo sapiens
ttagcttgctcattcttgactcagtttaccttagttgttaaatcttttatcttagaatatttctcagttttatatctcttcaattccctgaagagattaagattttaaaaagatttcatttttttatctcatttcttctgggccttgtaaattattcttctaaataattaatttattccatcttaatctctaaatcctaatcatagatttgagaatttagatctcaaggattaattttacttccctccattgcttctacccttttatatctattgatttaaatatttcagatttatctcatatttattttaatttctaattttcaatcatctctaacatttttaagcgcccattatttctgtatttttcacgttatctcacattttccccattttcttattttttaatgtgtttcatttttattcttggcaagaaatgagccttataaattgtgaacaaagggttcatgttagaaccaaaagataatagtgattttaytttttaaccataagttgctttaataccctcttcttaccttcccccaaaaaagtcatggacaggaagctgtggcaagttgagattgtctcttctttgaat

SEQ ID NO: 833159 - DNA, 658 bp, Homo sapiens
aggggctggagatgcagctagtgctgggatgtggagttatgacactggccttcagcatcatctaataaatagagtttcctggattagctmctctcagtacatttttggctgcttctttggattgccttctcacatgtcaataatttggcaatgtcattgtttatagagagaattaaatagtaaatcaatcaatcttctagtgtggttgatccaaatttgctttttgtcatcaatagttttggaaattgtttttcagttgtacactttatttccataaatgtcacatttgggacaatagagttgttgtcacatttgggaaactgttaaacataaaattagacaatttagttctttatgtaatttctacattctttgaggcatatttttctatcttgtcatctttaatatttctgggacttttagtcaagtcaaattgatacacccttaggagtatcaatttgatactggccaaagcatctttaaaatgcttaaaatagaaaaaatataaaaagataatgaacagaatcagaaatcttgaaaattaaatatatttcaatagctgactgtgattttaatttatgcattattttgtctcataattcctgtcacttttacttataattcttctcataaggatcctagacatatttaaagtcat

SEQ ID NO: 833160 - DNA, 422 bp, Homo sapiens
agtgagaataatagttcttgccttaaagagttattgtgagaatcaaatgggacaatgcaggtaaagacatttagcctagagccttgtaccgaatatgcacattttaaatagtagctttstattattttgtgattcttcccgcccctgctgcattccccaatgcctcatctaccagcaatttgtgtgcacactcagggtcagcaattcttggcttgggattgcaaagaagggaagtacagcccttttctgctggctttgcctgggttgacctcccagctttgctccttggcctgattcagggttggcaggcatagatggaaaagagccattggttgttagaatcgtccagcaggagatgaagggagatctcaccctgcattttgtgtctaaaacaattgcttaaatttgtcatcttagggaca

SEQ ID NO: 833161 - DNA, 614 bp, Homo sapiens
atattggatccatcttttcagttgtttcaagcaagagggtaaattcaattcatgttgttccctcttggctagcaggtgaagttttgtaaaatcacaaatttaasgatccctttcaaccccccttacttggaagaagtttctgaaccagttggacccaattgacaatttcaaagaagatccaggtgccagaaacaagtagcatacctcataggtagtgccaaaacaaggcctaatcctatctggggattccacggttaagttctcagtggcaatttttctccaaaaaaaatagtacatagctaaaagtaaagaacttttggagacatatccagaacagagctttgagcacccaaatctatgagattcctttgtatgatctgagaacttgaagactcatttccttcactacaatgaacatttacatactaattagttttttcaaatcactctttcaaacatgtatataagaggctatcatacctgtgatacatctattttccaataaactggaatccaggaaaaaaaatgatattctatatatagggcctatacaatgaaagaaaatcttccttcattcctttactaattcttttactttcttctttttatcttta

SEQ ID NO: 833162 - DNA, 592 bp, Homo sapiens
atttcaagtgaaagccaatgctcatttacaattccaaaaactcttaggacccttaagaatgatgctaaatctactctgcctgtggtctataaatggaacaacaaaacctggatgacagggcatctgttaacagcatggtttaatgaatattttaagcccactgttgagaactactgctcgggagaaaaaaaaaaaaaagattcctttcaaaatattattgctttcacaatgcacctggtcaccagagagctctgatggagatgtacaagatttaggttgttttcatgcttgcttacacaacatacattctgcagcctatggatcaaggaataattttgactttcgagtcttattattaaagaaatacatttcataaagctatagctgccattgagagtgattcctctaatagatctggacaaagcaaattaaaaaccttcaagaaaggattcttcattctaaatgccattaagaacattcrtgggaggaggtcaaaatatcaacatgaacaggagtttggaagaagttgatttcaacacgcatgaatcactttgaggggttcaggacttcagtggagtaagtaactgcagat

SEQ ID NO: 833163 - DNA, 559 bp, Homo sapiens
ttcttttttaattaagctaatttgagttgagtatttgtcacttgaaactaagtatcttagctaatagaagaagtaaatacagtttaattgagtctgggatgccatataagaaaagtccaagtgttttgcatactctgcttgcaaagaaaacaacctcccaggttggtggcctgagggtttgtgcaacaccaaagaacaccaagctcagccagcccaattgccctcccatcccttttctttttttttcatttctttccagctgcacggtcttttatggagcccatctttctaagacattcaaaatgacatgctattggaagacatttctgtccatgctaatacctgtgtttaaatttttttgttgttgtttaaaaaaaaagatcatgatatgatagcaaatgaatgttggcaaattgccaactgacaggygtaaaattttatgaacatgcacattccaaaggaatgtggaaataagccatccactgtagtccagtttggcagaaatattacaaaaatataagtttggcatatattgtaattcatttaaagatgcttaaaa

SEQ ID NO: 833164 - DNA, 561 bp, Homo sapiens
cagctgggtcttcctggagagctaagattttggcacttggggctaggatagccaaagagcactgcaagagaaagtgcagcagcagcaatgatatggaatctacaatgctcaggactggttcacaaactgctgcgcattggaatcagctggagggctttacaaaggttggctcccaggcccagacactgtgatttaattgacccagagtatgatctgggcatcaggacttttaaaagcttcccaggtgattctaatgtgcagtgaagtttgggaacccttgatctgggtgagtctgaggacagcagtgcacagttagctcggcctgtgtgaggggtcttggagccctaagttaccctaaacattgtccttccatagtgaccagtatcctttctttgagaaaaccagtcaattaggtgaattccccagaaggggctagrctggccttcttcttcagtgtggccctcagatacaggcctcagcatcacctggatggagggcgtcattagtatcagggctccagaaaaaaagaattgattaatttcttgggatccaggagcccat

SEQ ID NO: 833165 - DNA, 591 bp, Homo sapiens
cttctcctacctcctggcaggggctggcaatgtttgccattccttgacttgtaggagygttgcctcgatctctgccttcatctccctgtggtggtctttctatgtgtttgtctatgtcccaatttcccctttttacagacaccagtcatattggattagggtcccaccccacttcagtatgacctcatcttaactaattacatctgcagcaatcatattccaagtaaggtcacattcggatccaccttctcttttcgctcagttcatatagttgaattcaggaaagttaaatgtgtaagtactgcggctcctgagaatattatggagtagaatgcaaaatctgtgggaatttgaaaggaaaaccatgggaaagagacatggcagtgtctctcttgactttacggtaggcccatcccagcttgagaccactgcattctctgtgtgcaaacatcagacacagatgtgcagtaggtgggcccaagtcatgggtcatatttctttttttcaatatgacatcagtgcatgattggcagaggctggcattggcccagaacggtctgagttatggtctcagtcttgaagctctctagt

SEQ ID NO: 833166 - DNA, 551 bp, Homo sapiens
attttcaatttaagataggtttatcaggacataccccatggtaaatcaaggagcatctatatattctttgcaagtgcccagagaacaaataccaagatagatcatatgttagaccataaaacaaacctcaacaattacaaaagaattgaaataatacagaatatgttctccgaccacaatgaaatcaaactagaaatcaataacagaaagataacagaaaaattccaaaacactttaaactaaacaacacatttctatacaattcatgggatacagagcaggtctcaataaaaattttaaaaactacattgaccagagtgaaaattaaaaatccaacttaaaatctgtgagatgcagccaaagcagagttaagagggaatttatagcactaaattagaaaagaagaaaaatatcatcaataatctaarctcccacaacaaaacctaaacatggaagtataaaataaaccaaaagcaagcaggaaaaaatgtaatcataaagataagagcagaaatcaatgaaattaaaaggagaaaaacaataaagaaaat

SEQ ID NO: 833167 - DNA, 625 bp, Homo sapiens
cagatttcacattagattccaatttcatgctgagtgtggacaccattcaaataagagattttgaggcccaatctagtgagtytgaccccatttcccaaacccatggaatgggggtatttttttttctatttgttgtgaaggaaatatcaaagaaacatatgctgaagtgagttttgtccacaattacagctcggaagtcttctggccagcctggtcgactgccacccccaactctggccccaccacagccgccccttcctgaaaccatagagcggccggtgggcactggggccatggtggctcgctccagcgacctgccctatctgattgtcggggtcgtcctgggctccatcgttctcatcatcgtcaccttcatccccttctgcttgtggagggcctggtctaagcaaagtgagtgagtgacgctttcagtgggaggatcctgggtgggaaatgggggctccactaaggaggcctctgcctaggtctgtgtccatggaaagctcaagcccaagtcccccaaaggtctcggaggtcagagaacacccaacgactgggcccctcccccagctcacagacctcggcttggggaggaggaaggagggaaagttgggctgtcttctct

SEQ ID NO: 833168 - DNA, 586 bp, Homo sapiens
ttgtactaatttacattcccaccaacaatgtataagcattcccttttctcttcatccttgccaacatctcttatattttttactttttaataatarccattctgactggtttgagataatatctcactgtggttttaatttgcatttctctgatgattagtgatgtttagcatttttctcatatatttgttggccgcatatgtgtcttcttttgaagtgtctgttcatgtcttttgcccactttttaatgggattgttttttacttgttgatttgtgttagtttcttatcgattctgggtattagtcttttgtcagatgcatagtttgcaaatatatctcccactttgtaggttgtctgtttactctgttgattgtttctttactgtgcagaaactctttagtttaattaagtcccatttatctagttttgttgcatttgctcttgaggtgttagtcataaattctttacctaggccaatgtccagaaggttttcctaggttttcttataacattcttatagtttcaggtcttatatttaagtcttgaatccatcttggttaatttttctatatgatgagagatag

SEQ ID NO: 833169 - DNA, 607 bp, Homo sapiens
ggagtttttggactgagatgatggggttttccaaatatgaaatcatgtcatctgcaaacagaaacaacttgacttcctctcttcctatttgaatacctttatttctttctcttgcctgattgccctggccagaacttccaatactatgttaaatagaagtggtgagagagggcatctttgtcttgtaccagttttcaaagggaaagcttccagcttttgcccattctatatgatattggctgtgggtttgtcatagatagctcttattattttgagatatgttccatcaatacctagtttattgagagtttttaacacgaagggatattgaattttatcaaaggccttttctgcatctattgagataatgatgtggtttttgtctttggttctgcttatatgatggattacatttattgattggcatatattgaaccagccttgcatcccagggatgaagccgacttgattatggtggataagttttttgatgtgctgctagatttggtttatcagtactttattgaggatatttgcaytgatgttcaactgggatactgcaaacttttaaacatcttttgttcattaagagtcacatgaaattaaa

SEQ ID NO: 833170 - DNA, 401 bp, Homo sapiens
ccaccagtaattttgaaagcaaaagaactgagataggctccactgaaagcccaaatgtgctcgtgaaatagagggtgatctaaaacattatccaaggagcacctgacagatagcacgtcttcgcacaaatagtaggtgaaaaaaatacccttggcgtggccaccaaggccaagatggccttgagactctgcctttctaggaatgcccagaccaaggagccaagccacccgtgccctgcaccttctggggcctcctgtggttttgtggacctactcctgcacccccctrtcatcatggttcaccaggccccaccccacagccacccagtgctcctgcaaaaggatagggacattcacacctgcccagccaccccaggaccccctgggcccaagcttggagtg

SEQ ID NO: 833171 - DNA, 603 bp, Homo sapiens
tcaaacaccaccagaaatgatcttggctcacattttgacaccagcacttaccaatgatgtttttggtctacttccttaacttctctgaatctcagttttctcatctgtaaattgggaataagcctagagttgatatgagggtgaagaagaatattttaagtataatgactgaatacattggtggttttaaaagatagaatggaacgcttgattcagttgacaatacaacctttcttttttctttttctcgtttttatttttatttcgtatttttatatcttgttttgtgccaagtctatgctagcacttttcatgcaggccattatcaaatcagcacaactacctcctgaggtaggaattactattttctgcatttttatatatgcaaaaaaacttaaaactctcaggtgccacccagctggtaaataatagaatttagttttaagctcagatctgattgacttcaaaactcatacttttcacagctatgcttggatcacctatatcaaaatttcctggggggttgccaaaggcagatmtctgttctttgctccagactcagtatgatggtgacggctagacttccagcagcacccattctcc

SEQ ID NO: 833172 - DNA, 601 bp, Homo sapiens
ttgattccacgaatacagaacccatggaaatgggggctgactgtggattcaaaagttgaggtttagtaaaattaatttttactacttcatcaagaacattctggtttttttttgtgttttttttttttgagatggagtcttgctctgtcacccaggtcggagagcagtggcacaatcttggctcactgcaacctccgcctcccgggttcaagcaattctcctgcctcagcctcccgagtagctgggattacaggcgcacgccaccacgcctggctaatttttgtatttttagtagagacggggtttcaccatgttggccaggctggtctcgaactcctgacctcaggtgatccacccacctcgggctcccaaagtgctgggattacaggcgtgagccactgcacccagcccatcaagaacattaagtgaaatttgtctttggttttctttttctttttctttttcttttttttttttttgagagagagtctcactctgttgcccaggttggagtagtgcartggcgcgatctcagctcactgcaacctccgcctccgggttcaaatgattctcctgcctccgctactgagtagctgggatt

SEQ ID NO: 833173 - DNA, 591 bp, Homo sapiens
aacacagggaccaggtgcagcaactggactccagacaggaagcactctgtcctgagagctgcccacacccagattagggtttggatcccccaagaaacccccatccaatctcttccccgcctcctttggcccccagcagacctgcttctcactcacgttccctttctgcccctgcttcagctttttcctagaccgcctgcctccagcagaacgaatcaagaagattacagggcaggcgggtgtgagagcagctcctggggcgaaactagacgaaaatcccctggccctgtttccccaaacttccctttgatttttaatttttttcaaaagtttcttcatcacaaaatttccggatgtgacatccctggcagctcacacagcaagttttggcaaaaaccaatgtcttacttctcgctgggctgcaagaaattagagtaatcgcccccaacacacaaaggcatgaactcccgatgcaattaaggagaggtgaggggatsaaaggaatcatggctgtggatgaactctccttctctcgttttcccttaaaagtcacgagaggcaacttgcagtctagttagcttgggggcaccc

SEQ ID NO: 833174 - DNA, 608 bp, Homo sapiens
cacctattaaaaggaaagaggaagggatgtagcactttggaccttggatggcgcgtgtagaatttcctacttgtctctgcttcagagatgaatccacgtggccctgggaaatgaaccttcttaccaagatcgccctccgctggtgacagagccaagtctccgggctcctagttcacagctcttcctacaacaccaggctggctctccgcgtctgatccagagccaggcccgcccatgaccgcaggctggtgttcactctaggcagcttttaagacggggagggatagcaggaacagttatgacttttttttggatacataatatgtgcacatactgatggggtacctgtggtagtttgcgacatgcacggaatgtgtaatgatcacgtcagggttttaggctgcacatccccttgagcacttatcatttctagtgctgtgagtgttaaaagtcctctcttctaggtatcctgaaatatacaatacattgctgccaactatggttaccctattgtactatcaaacatgagaamttattccttctaactgttgggtaattgtacccataccaattcctaatgagtactgtacccattagtaatggatact

SEQ ID NO: 833175 - DNA, 590 bp, Homo sapiens
aggatgacactctttgcatctgtgctttcaggaagtttttcagggctgatatttattttaaatcagaayggcttacaaagcaaaccccctttataaaacgtgtcacatgtagcaatcctggagatgacctctacaattctaggctggacagagagattactcttaagagaaaaaactagatccctttaatcagctttaaaaaaaacattgtgaacagtcacttctcttatttaaaagtttaactttactttcatcaatttataatcagagttcctctggtatgtttgattcctgacaaacaaggataaaagttgtgtgcccccattgctaatgagatgataaaacagcagggatcaagtttttaattactacaggcgatgcactggagaggtaccgatgatattttctattgcatgtctaagttgtaacttcaggcttatgacagtcctgctgagttcgactgcctttgatgatcactcatttttgtctcctgagaacatacaaaaatttctgagctagaatcctggggggctggcaattattggcataacctggcacaggttcccctcttcaaccatcattgctcagtg

SEQ ID NO: 833176 - DNA, 496 bp, Homo sapiens
caacctccgcctcccgggttcaagtgattctactgcctcagcctcccgagtagctgggactacagatgcgtgccaccacgcccagctaatgtttgcatttttaacagagacgagggtttcaccatattggtcaggctggtctcgaactcctgacctcaggtgatccacctgtctcagcctcccaaaatgctgggattacaggtgtgagccaccgtgcctggccggaagatattatttctgtcattttgctttgtttttgaagtggcttataagcgtttttatctctaatttcctgcattgctgtcttcttttgtgtttatttatctattttttttgagagggagttttgctcttgttgctcaagctggaatgcaatggcacratctcgactcactgcaacctctgcctcccgggttcaagcaactctcctgcctcagcctcctgagtagctgggattacaggcgcacaccaccatgcccggctaattttttgtatt

SEQ ID NO: 833177 - DNA, 540 bp, Homo sapiens
ttctccaaaactgaccctttttctgtcttttgtttctctagtactatctgcatccaaattacccaagcctaaaacgacaactggaaattccttttttcactgctgtactgctaatttgaggatatctaatgcaagctatttagacacatcactaggccatgaattccttgatagttattacacttttgcacactctctagtctctgtagcacttaatagaaagtcttgagaaagatttgacaagattaaaatttctgtaaatattaagagtgtatgtgaaggaataaataaatatcaattaatcaaagagtaatgaattaatcttttcaaggtgattaaatagaacagcaaaatatgtacttttaattttttttttctttctcaggttgaattcaggcaatagaaatgtatgtccatttgaagaaagaaaggaaagaaaaaacaaaaagaaatgaaattcagagaccagacagaactaacaaygggaacaaaaaagacacctgtgagaaagaaaagaaagtataaggtgagaactggtcg

SEQ ID NO: 833178 - DNA, 643 bp, Homo sapiens
ggtgctgttatctgctgtagcsaattattaccctgaagaaattctggctgaattatattaaaataggctggtattaaggaaaatatacattgtttattaacataaaggaatactgtaaaatcttaagaatttttacaaccaatgccaaaaatccatattgttcatgtgtataatcctttattttgaataaaattgtaaattatctcaggacagataatttatgtttttctccttttctccagttatacaacaaaacacaagagctaggctcttcattatataattactcagaattctgaaaactctcactgttactacttagacacattgcctaacctccacagtgagactcattttattccttgatgagggagtttgggggcatgcgtgctggtcatgcaaatatctgtccgtcatttcaggggtcagtgacattcagagatgtggccatagacttctcccaggaggagtggaaatggcttcagcctgctcaaagagatttgtacagatgtgtaatgttggagaactatggccatctggtctcactgggtaagtattcttcttcatctccctcaaggcaaaatttgaccgttagggtggctgttataattatctggctgaatattcccaagagaggtatggg

SEQ ID NO: 833179 - DNA, 678 bp, Homo sapiens
aaagagtcctcagcagagcttcccttctaacacaaagcagcccaggaaaacatttcttgtctaacaaagagcagcctgaaaaatcaagctgcaaacatagataagcaagctggaagcttgcaygggggaatgccggcagctgtgccaatagaaaagggctacgtgggggccaggtgtgtccaacatggaggctccatcttccctttttttgttaccaggtgtacagtaaaggaatgggcaacatggcacagctgaggcaggggacccacctgcatagtaagagattagggtgggggctgccagagattcgagccctgtgcaaatggcacttctggtctaaccagtttttcacactctatgcaaatggcacatttggtccaaccagtttttcatgccctatgtaaaccagacactgcctcctcaccagctgatctataaaaccccctgtgtttcaccatggatccggcaacccacttctccaggacccctctctgcagcagagagctgttctttcttttgccaattaaacttccacttttaacttcactcttcatatctccatgtccttgttctccacggccatgagaccacaaactctgggtgatactctaacattcaggtcgtttcaatatacccactttgcctcttttaaaagagaaaaatcagtagcccccgaaa

SEQ ID NO: 833180 - DNA, 540 bp, Homo sapiens
gcttgtgctttcttatttcttatttattttctcatttaaacaaatgggracaaaaaaagagaggaacagtatggctaccaccatcctcaattaatcctgccttaaacactgatatgatgacaggagctgtggcagccatcctgtgagcacgaggaaaggatgaagggatgcataggcataaggcccttggacacagctgagccactggagcgatgcctcaggacttctgctttgtgagaaaaataactctttacttgtatcaactattagcaactagtgtgtttctaattaatacacatctcatctccatattgcagagaaggaaactgagacataggggggttacgtggctttcccaagctggtgagtagctaagccagtgcccagtccaggtgcatcaggatctggagtttgtacaattaatatcctactctatggaaagagatgagtggaaagacaaaattatgagcatttgtccagtcctatttagagcagactcatgtcacattggatgcctcaattaggtcactagaaaccatt

SEQ ID NO: 833181 - DNA, 581 bp, Homo sapiens
ttggctggacttcatgtctgagaattttccatgttgcctctagttggaggtagttcggtttcacggctgccttgtataaattcaccgccacttacttacctgcgcacctcctgacgggcatttgtgttgtgtccagcctggggcctgtgttagtctgctcaggctaccataacaaagtgccacagactgggcggcttaaagcacggacacgtattatctcatggctctggaggctgcaaatctgagatcatagcaacagcagggctggttccctctgaggctgtgtggggagggaggacgtgttccaggcctcactctgtggcttgtaggtgggcgtttctttctgtgtcttcacatcgccttccctttgtgggtttctttgtgtccaagttctcccttctgatgaggactagggtctaccctactgacctcacttcagctttgttacttctggaaagaccctccatccaaataaggccaattccaaggtcctggggtcaggacttaccgcagctttttgggtgggggacaaaattcaaccccrtaacaggctggtaccaatcatacagcggtggatccct

SEQ ID NO: 833182 - DNA, 597 bp, Homo sapiens
ccggccggtatttacatgttccctatttacagaccaaacctccctcttcccacgctcctccctgctccggcagtgggcaaaggaaagaaggggcctctcctgtgccccacccccacctctccaatccyctagcccgggtgctctccgcccttccctccctcccttccccgccgcctgctggcccctttgggggcacagcttaggtcgctgtattccaaagcccgggtggctctttgaggtcaagtggcgtggtgggggtggggaggggaccgccctgaccggggcgggcggccttgaggtctttcagtgatcaacagattgggggcccttctcccgagacctcccgggggccagcttcgttctggcctcaagaactcagtggggaggcaaggcaggttttcaccctccagcgcctgcggtgctaagcggtcctccagtcctccctgtacccccagcccagactgcatacccatcctactcgaagacactggctgggagtcaccggggcacgtgaacttgaaggactagaatctcaactcttggcctgcaaaatggatgggaaagtgagaagactgggaagggccagccacttagttt

SEQ ID NO: 833183 - DNA, 591 bp, Homo sapiens
agggctaccgaggttagtcctgcacactctctgccccaggcccggggcttctccacctggcacctaagaattcctcctgaacaatgtttacctctcatcgacaggtggaaatgagctgggacagtttcaaccgaggtgatgtcttcttgctggaccttgggaaagtcatcatccaatggaatggcccagagagcaacagtggggagcgcctgaaggtatggcttcctagccttagcactttctcaagttcctctttcttcttccctccatgctggctcttccccaagaatcaaggtggagccctgcctttgagtagaatctgtcttggagacaggccaagtgtgtgagtttgtgactcaccctggactcctcagcatccaagtaactcctgtgtctgggatctaggctgttctccccaaagacatcaggcagaaaggggtcccagaggagctgagggcttccttgggcttctttgacaggctatgcttctggcaaaggatattcgagacagggagcgagggggccgtgctraaataggagtgatcgagggagacaaggaggcagccagcccagagctgatgaaggtccttc

SEQ ID NO: 833184 - DNA, 612 bp, Homo sapiens
cccagctgcacactgccatgtgaaaggggccctattatttaagtagtttgtaattgtcccacattactgatatcgttaaagcatctcagaatatttccatggccaggctgaakaagaaaaagtagttaccaggccacgcaggcacaaaaggccttttgccaaactacttagatattttaattccccgttgcctcagtagctaaataagcatggagaacaagcaggcggggaatactaattagagctaattagaccctgccctcttctgcctcaatcccctttataaaaagctcccccaactcaaggatgatggagttaaaatgtaaatccataggataaacagcagtctacagaccaaacccactgtttgtatttcattgtcctgtcagctctaaacctgtgcctggttacctacagagagctgcagacccagccaaattccaacaaccccatcacagaccacaggaaatgtggtagggggttgggggtagaggaagggtgctgccaacatgagtccactaaataaaacaaagggctttcttaggatgtgcagagcattcactagaagaacattcgattgcttttttaaaaagaaatgaatgtgatagcaca

SEQ ID NO: 833185 - DNA, 521 bp, Homo sapiens
caaagctttctttaaatttcatcacatgtgctggtggctactcacatacataatccctacatgtaactagtggtgtaggaaagggaggccacaggctttgtattttatgaggtaagcagaaaaaatacatatgccatctagaaaactgcttctagcattcattatagaattggcacaacttgtttgcagaaaataaacatgcacacagaataataacaataggtagaaataaaaggggagactttgagagctctgaagctgatagtaagaagcgaaaaggcttggtctaggtgggaaaagggcccaaagaaaaaaaaagcgtgtgtgtgtgtgtctgtgtgtgtgtgtgtgcatgtgtgtacgtgtgcatgtctgtgtgtgcgcacgcatgtgtgtgtattaaaaacggagaaggcagatgaagaaatacaaaggagargaaggagttgcagaaagagacgacaggaaagaatgtaaaacttctatggcaggagcgccaagagagatacaccttaggagag

SEQ ID NO: 833186 - DNA, 670 bp, Homo sapiens
ctgatgctgctacatgatagagcagtggtaaaatagattctgaggaggcaaccctggtgttcaatatggaagaaaatacygagatagaaatttaaatcatttccttgagctagaatatagtattaactctaacctttgccaagatgttgctattctttctctggcatattttttcctcaaattgggtgaatcgaaaagaatattatcactagctaaggaagaaaaattatgatgttcccattctcctgcaacatagaagctgtgagtcatttaatttcattacagctatcagaaagtggcagaactggtgaatattaaatgcaattacatttacttatagggcacatacatgatcaaagtctacttgtcttacaacccagagtgcaggtgacaatgttatgaattttgcaaaagtcagcatgaagggcatagaaaagagttgagctaaatgtggaccacatatgtacacagaatgtgatgctgagttaagggaaatgatggcaaaattcaggctggtgtgattggatgacaaaccgtatagaggtgagtcatttgaatagcaatgttccagaaacaatcagtgaatttcaaatcagtaccttcgctttctgacaataaaggaacaatgagaagtctctgagtgttttaggtgggaggtttaacttccttg

SEQ ID NO: 833187 - DNA, 638 bp, Homo sapiens
tttttattactgttttaaatatttgtaacattataggaaaacaagccataaagaatattcattttgaaaccaaaggtagaatttagaccagactccgctrtaatgatctaaatatttaatcttgttaagggtgtggagaaatgtctctagacatggacatatgaactaatatgacctttcaggagtgccatctaggaatgcatttcaacattttaaatgtgcagctgttttgatctattaattcaacatagagaaattaatcctaaaggaagagggaaaatattcaagcacgaacatattgtatagtgttgtttatattgatgaaaaattaaactatgtgttcatatggaattgataaaactaatgctactacaaataataatactaatcatatgtcacctttattgagtttttacgatgtgtcagcaaaatagtaagcactttacatgtgttatgtcacttaattttctccacatcctaataatataggtactataattgtccccatttttcagacaatgaagctagctaagcggtagagatgttaaataccatctcaaggtcttatagccagtgagtggcagaattgaacacatattataaattcataatatggagtcattaagaaagagataagc

SEQ ID NO: 833188 - DNA, 613 bp, Homo sapiens
gaacttccagtttgaacctaactaggttaattgcctgctgaaacagccacaacaatagcagaaaagccaacattctccagygtattgtcataggactcagagtctcatactatcaaaatgtccaggatgtaatcccaaaatactcaccttacaaagaaccaggacaccctgagaaactctcaagtgaaaaaccatcatcagatcaacagatggaatccctgagataaaccagatgtcagtcagagaataactatgtaatagttcagtcattttgagtttattgagacttgttcacagcccagcatatgatctatgggtgactgttccaagtgtactgaagaaaattgttttttgttattgttggtttagggttctaagttcccactgactgccatttttctggattatagatcccactttcttctttctttgcatgtctagtaatattttaatactgaacattgcaaataatatattgtagcaactctggattctcttgtgttcttctgggtatttttctttttaatagttggttaattttttaaattcaaactgtatcctcactctttcctgtggaatgcagcagctggtaactgcttattgctcacagcat

SEQ ID NO: 833189 - DNA, 576 bp, Homo sapiens
taccttctacccttttcctgttgctggacaattagggcctttccagttgttgattattgcaaatgagatgcgccttttagcaatgcgtgtgcccttaaagagcagcactgctcattcaacagggaggtttcatctgcaaatgggcagcacaagtctgtagagactcaagaccataaccattcatttggcctaattaggagccaggctgaaccttttattgtttgggaaagggagagttggagagtggaagatttatcttggagccttccttctgcttcaaggtgtatctgtgtgaggagagacaatttattagccttcattttaaaaatattcctggctgcttcttcctctggtgcttgaggggatctgtggttggcagaaaggacaaagggaagtgtttggttgcaacccaagaaggcacagtaagagaagaaggggcttgtgcagaagccgagctgggcttatttgaaagccaagaactattggcttgtcatttagacatgaatcagaaggcraaatgtttggcctgactagaaagaagaagtgctgaaagttgagagagcaggcatgggaggg

SEQ ID NO: 833190 - DNA, 587 bp, Homo sapiens
gcaagttactcagctcctctgagctttagaaagtactgttttggggattaaatgaaatatcctatgtgaagaggccatacatgtaaasatatactgtgtaaagagacagataactagtaacttcctctcccattcagctgatctcctgcctctaagctgtttcctctccaatgtatctggactgatcaaagcacatcgactcaacaaatgttgactgactactcagtctgtgaagatttgggttaggtattaaccttctcaaacactgccttgatccttcactcaaaagttcttcagtggaaaaagacccctcaatattcaaattctagtcttcctttcacatctaatcttcaattataagccttcccaatcctcctaattcacttttcatggaataaacaacattgtttcttactttgggacttttgtttagaccagtgattcttaaactctagtgtgcttcagaatccccgggaaggctggttaatgcagactgctgggcccctcccctcaggcttctgaagcagtacagctgggttgggccttagcacctacatttaaacaagttcccaggtgatgctgatgct

SEQ ID NO: 833191 - DNA, 629 bp, Homo sapiens
ttgatgactttctttgggaggctttaggtagatagagaagccctcccaacctgtaccraccactgatttcttccttatacccacgttgggtggcccaatctatttcttccttagtgtactggaaagggggcagttcactggtgggagaggggagcgaggcctccatgaaggtattttttgagacggctgcctctttagctttttggtcagctaaccgttttcctcatgcagtttcatcagaacccttctggtgtcctctacagtgcactactgccacttcccagggcaaatgaacagcctctaggagctctaagatttgaggcccatacttaataggagtatcccaagctgttaggtacccccctttcctttcagatagccacatggacatgagacaccagaaaggcgtatttaaaatctgtatacatggttattctttttctttccctagttttagggctctggttagtgcaatgagtttggctacttgcactgaggtccccggggacagagctttagcctccagaactagatgaagggacactatagtgtaccctgcatatctagttccattccagacaaaactactttaatctgaaaaccatatttcgtccggattatctaggggc

SEQ ID NO: 833192 - DNA, 629 bp, Homo sapiens
ttgatgactttctttgggaggctttaggtagatagagaagccctcccaacctgtaccaaccactgatttyttccttatacccacgttgggtggcccaatctatttcttccttagtgtactggaaagggggcagttcactggtgggagaggggagcgaggcctccatgaaggtattttttgagacggctgcctctttagctttttggtcagctaaccgttttcctcatgcagtttcatcagaacccttctggtgtcctctacagtgcactactgccacttcccagggcaaatgaacagcctctaggagctctaagatttgaggcccatacttaataggagtatcccaagctgttaggtacccccctttcctttcagatagccacatggacatgagacaccagaaaggcgtatttaaaatctgtatacatggttattctttttctttccctagttttagggctctggttagtgcaatgagtttggctacttgcactgaggtccccggggacagagctttagcctccagaactagatgaagggacactatagtgtaccctgcatatctagttccattccagacaaaactactttaatctgaaaaccatatttcgtccggattatctaggggc

SEQ ID NO: 833193 - DNA, 503 bp, Homo sapiens
gggctggagtgcagtggtgagatcatggcttagtgcagcttctacctcctgggctcaagcgatcctcccacctcagcctcctgagtagttgtagtcctgaatagctgggactatagacrggtgccaccatgcccagctagttttcctgtatttttgtagaaacagggttttaccatgttgcctaggctggtcttgaactcctgaggtcaagggatccacccaccttggcctcccaaagtgctgggattacaagtgtgagccatgatgaccggccatagggtgtcttctgttagagtgaaggcattgattgggaagtaatgggctcttcaaaatcagagtggggacatatgaaaagatcctaaggaaggtggggtcattacatccctaaatattgttgagtcttctttgccagcagaagcagcccttttactgctgtctgacccactaaatcctaaggtggggtgtgcacaatagcactccatcatcaaatggaaatggtaaat

SEQ ID NO: 833194 - DNA, 503 bp, Homo sapiens
gggctggagtgcagtggtgagatcatggcttagtgcagcttctacctcctgggctcaagcgatcctcccacctcagcctcctgagtagttgtagtcctgaatagctgggactatagacgggtgccaccatgcccagctagttttcctgtatttttgtagaaacagggttttaccatgttgcctaggctggtcttgaactcctgaggtcaagggatccacccaccttggcctcccaaagtgctgggattacaagtgtgagccatgatgaccggccatagggtgtcttctgttagagtgaaggcattgattgggaagtaatgggctcttcaaaatcagagtggggacatatgaaaagatcctaaggaaggtggggtcattacatccctaaatattgttgagtcttctttgccagcrgaagcagcccttttactgctgtctgacccactaaatcctaaggtggggtgtgcacaatagcactccatcatcaaatggaaatggtaaat

SEQ ID NO: 833195 - DNA, 559 bp, Homo sapiens
ccccagtactacaagatattgccatctggctgccaccataattgagtcttcacaggccattccactattctatcaagcctgctgcttcaggatgatggggaatatggttagtccagtaaattgaataggcataagcccactgccacacttcatttggtgtgaagtgagttccttactcagaagtaatgttatgtgggaataccatgatggtggaaaaagtattcttcaagtccacagatggtattattactattttattttttattttttgcagaagcattgcattcagaaaaagcaaatcctttttggtggggggaatgggaggaaagcaaatctgtgtccagagtaagtgtctattccagtaagaacaaaacactgcctcttccatgatggaaacagtcccgtgtagtcagcttaccactaaataagctggctgatcactctggggaattgtccctatcagagactcagtgttgatctttgctkctggccaactgaatgctcagcagaggctgcagccaggtcagccttggtgagtgtaagtccatgttgctgagcc

SEQ ID NO: 833196 - DNA, 629 bp, Homo sapiens
aactcaaggctttaaaaaaaacacactatgtggaagcttgtagtacgtgtgtatgtgtatggttttttaaatgaacttttataatagtttttgatttgcgtaaaagttgcaaagaagttttctgaataccccatactcagttaccctattattaacatcttacattagtagggcattttttattgttaatgaattattatttttagatgattattatctaaagtctatgttttattaggattgtttccaatgtaatgccctcttttttgtcccagaatccccattcagaagaccacttcacatttagttatcatgtctccttaggtttagactgtggtagtttctcagacttttcttgtttttgacgaccttgacagttttgaggattagtagtagatattttgtagaagtcccttcaactgggttttgtcttatttttgttttcacgattgaggttttggattcttggtggaaagatcacagaggaaaaatgcattctcatcacatcataccaagagtatatgctctcaacgtgacttttctctgatgatgttaaattcaatcacctgcctgargtaggtttttccgctataaaattactctttctctctaccccaacacctttccat

SEQ ID NO: 833197 - DNA, 592 bp, Homo sapiens
atgtgaatgaagtttctcagtggttaatttttttaaataggaatagattagtgttaaagcctgtctcattatgatcacaagcaatattcttcctcagtcagatacaggacctagctcagagaaagaaccattcatttcattaataaataaatttccaataaaattttactttatgctaaattattattatcaaagtttaaaatgtgctagcaatcttgtggtaaaacatgtactaataatcataatgatgactcaatctggaagaaaaattaggacagaatattatggtcagaggctgtttttaaaaactaattttaacttatatgcttaataattatatactttatatatttaatatatagttaaatatataatgtttatttttataactataacatgatcattaaaactgttgatcataaaatatataaattaggattaaattctctgttgaaaatagaattaaaatattattttaatgagaaaatagaatggtattaattctccagctattgaatacattttttcatgtatccctttaactacataatattgcayatcaaatcagcatgacatttatattccatttatt

SEQ ID NO: 833198 - DNA, 610 bp, Homo sapiens
caagtaccacagggcatgctacaatgtcagaggggcccaaattctgtggtaagtcaggagttcagatatacatttctggaaatacaaaaaggaatttttaaagctacttcccaaatgttcaaataaaattaataaattattactataaacccaagaaccacttactcttcagactatatttcatttctcaccaagttttctctgttaaatatgattaccttgtccagtttaacctcaaaaactacctttctagattttagtattaatcattattacattaaaaatctttcattattgccatctctgttcgatcttcacatagttaagttcatgcctgttcagcctctgtaaacagaaaactatggtctcctatgagtatcactctagcttccagtgtacagaaaggaattcatccttgtagtaaaacttctagttcagtttgttttaatacataaacgactcattatttaatattcyctcctttgttacatacttctagtcttgactccttcatttggaccctgtgttagttctgaaaaacaacctttctgctatttgtttcttcatcttgatctgtctccaaattactaacctcttgacatcaattttg

SEQ ID NO: 833199 - DNA, 610 bp, Homo sapiens
caagtaccacagggcatgctacaatgtcagaggggcccaaattctgtggtaagtcaggagttcagatatacatttctggaaatacaaaaaggaatttttaaagctacttcccaaatgttcaaataaaattaataaattattactataaacccaagaaccacttactcttcagactatatttcatttctcaccaagttttctctgttaaatatgattaccttgtccagtttaacctcaaaaactacctttctagattttagtattaatcattattacattaaaaatctttcattattgccatctctgttcgatcttcacatagttaagttcatgcctgttcagcctctgtaaacagaaaactatggtctcctatgagtatcactctagcttccagtgtacagaaaggaattcatccttgtagtaaaacttctagttcagtttgttttaatacataaacgactcattatttaatattctctcctttgttacmtacttctagtcttgactccttcatttggaccctgtgttagttctgaaaaacaacctttctgctatttgtttcttcatcttgatctgtctccaaattactaacctcttgacatcaattttg

SEQ ID NO: 833200 - DNA, 612 bp, Homo sapiens
cctggttctcagtaaaaacctgttaacttctttattcatttattcaatacgttgaaaagttatcgaaggtcaggttctgtttcctgctcctctrctacatctactgcttaaatgtcatagccctcagtctatgtgcttttctcagtatacacatttaccttaggaggcttcatctaaacccactgctaatgattctcaaacttgcttctccaggcaagatttcattcttacttttctcaactgtgtgcagaatgtctttatgctggtgttcagaagacaccatatactgacttgtcattagttgtaaaaataaaaggtttaaaatatttattctgatctaccccttttatgtttttgaattattttatgaaaccaaattcaaataaaacagaaagttataaaacagaagtaaaagttctcctagtcggagaaaaaaaggtagcatctcatgaagagtgaggaataataaaacagaaattagaaaaatgtaaaatctttttgcaatactttcacaaaataaatgtttaactttggggaacttgcatttttaaacttgcaaaatagtggccaaatgtgcagatgagcatgtacaaatgtatacgatgtctttaa

SEQ ID NO: 833201 - DNA, 542 bp, Homo sapiens
atggatggtgttttctctataaactaacaatagagctaccatgtgatccaacaatcccacttctggctatacatccaaaggaattgaaaactgtgtgtcaaagggatatctgcattcccatgttcattacaacattattcacaatagtcaatacattaaatcatcctaagtgtccatcaacagatgaatggattttaaaatgtggtacatatacacaatggaatcatattcaaggtctaaaacaagagaattctatcatgtgtaacaacatgaatgaatctagaagacattatactaggtgaaataagccaagcacagaaagacaaatagcacatgatctcacctatgtatgagatcaaagaaagttgaacttacggagtagagagtagaattacgattatcagaggcaaggcgggaggaggggaatggggtttgggaatgagaagttattgatcaaagggtacaaagttttgatgaacaggaggaakaaattttgagatctattgcacaaggtgaatatagtcagtaatgtatatttcaca

SEQ ID NO: 833202 - DNA, 522 bp, Homo sapiens
ctaccccactgttgtgtgtgggtgcatgttttaaatgaagcagcagtcatgagaaccagacaatcagatatccaagaagcagggcacccttaccattccctttaggcatggcttcccgggtcatgctcctcgtrcccaaggtgatgcccagtgcaccactcgcctgacacatggacacatggagggcaaagccctgtttcctgttgttatgcagagtctgtggtatacaatgatcccatagcaaatgttgctgggaagacacgcacaggagactgtaaaaatccatatcctcatatccatcagctaagtgactttacctatacctacaccttgaggggccctggacctccattccctggtgcactagggaccttctagagctcacccaccttagcctgctctgggtcaggggacatgcctgtggtggacctatcactccaccttctactctctccctgcacctgcctcaaaaggccagatgttccctaggaatccttacgaggagctaggtcctacagtgga

SEQ ID NO: 833203 - DNA, 600 bp, Homo sapiens
gtttaggatgtttttaatgtcctgaattaaaaaaaaaatctgtcaatatttttctttatgttttctgctgaatatgtayaatcacttatacattctttagcatttctgtttcattttgcatttggatattcagcccatatggagtttattttagaatatttggacatatggttctagaaatcaaattccatttttattatgaattattacaaatagttgatcggctgtttcaaaggcatttattgaataatccagagagcctattacattaaatttttttcaatatttaactttaaaaatatttaagactgacatatgataattgtatatatttatgaggtataacatgtttctgtacatgtattcattgtgtaataatcaaaacagggtaattagcatacctatcatcttaaacatttattatttctttgtcacgagaacattataaaacctctcttctaggttgggcacagtggctcatgcctgtaactccagcactttgggaggtcaaggcagggtcacatgaggccaggagttcaagaccagcaggcaaggagtttgagaccagtctggtcaacaaagtaagaccttgtctctaaa

SEQ ID NO: 833204 - DNA, 528 bp, Homo sapiens
caatgatttttgattttcctctatgaaaggatttaataactctctaaattagatactattattacctgtacttaatagttgaaaacagaagctgagagaggtcaagtmacttcttcaagattgcacagctaataggtggcagaactatgtttccaggttagatttgtctaatggtggatgctgtaatcccaaattactatgctatgtttttattttcatgaagtagagcatcagtattatctgttactggagtcaaaacatatctatctctggacctaactatctatctctccatgtatttaatttccagccagaaatacatatatgcacacacaaatatacactacatatatatatgcacacacaatacatatatatacatatatacacatatattgttaatggatctatatgtatatatgtgtgagcatacatacatacacacacacacacacacacacacacacactaaacgatgcttactccttttgtcattgctctcataataagtcttgtgtttacagctct

SEQ ID NO: 833205 - DNA, 559 bp, Homo sapiens
tgaaccaatgtttaggtgggttttcagcgacaatcaaggtgtccctccagagtgtctggggtgcaagaagcaatgacaggaaagcaatctcggagaaggaaaggaaagcaaatgggagagcaggaggaacaaagagggggaagaaaaaagatacacagaagaaccatctattgatctagaatgtttggaaatgtttattttggttgacagaaggctgcccttcatctcattcacagtcaaacaagtcttaaagatgtcatttaacaccaaaactaaactgggcatcagttaatttgtttcatatcatgatcaaagtcttatgattttaacttctagttattattgtgaatctctaagaaaaactctggttctattgagtccagatagatggattttactgcattcattgtataccatggacaattgtttcagatgccatttgttgtcccgarttgtcatgtcctagcctgcctcactggttccaatctattatttcaacagaaaagagaaaacatttccatggaagaggaaacaggaaattccaacagatcagcaacag

SEQ ID NO: 833206 - DNA, 607 bp, Homo sapiens
aatttcaatcttttgcatatagatatccagtttttccaacactatttattgaagagatgatcttttccccattgtgtattcttggcacccttgtcaaagattagatgaccatatatgtttgggtttatttctagtctttctattctgtcccagtgaccctagtggccgtttttaggccagttccatactgttttaattactagagctttgtaatgtagtttgaaaccaggaagtagtttgaaaccaggaagtggttcctccagctttgtccttctttctcaagattgctttggttacttggggtcttttgcaattccatacaaatattaggattgtttttctgatatctgtgaaaaatgccattaaaattttgataggcatcgcattgaatctgtatgttgctttcagtagtatggacattttaacaatattaactattccactctttgaacagaggatacctttccatttatttctgtcttcaatttttttttttttttttttggtctcactctgtcacacaggctgcagtgcagtggcacaatcatgacttactcagcctcaaactcctggaatcacgcaatccttcygccccagccttcaattt

SEQ ID NO: 833207 - DNA, 604 bp, Homo sapiens
ttcatctgaagatgttattatatttagtctggttatgccaatccatgttttgggagatgggggggggcatatctgggaatgagcacattcatactggaatttagttttctccttaagggttctactcctataattagggttaaaatcttcaggaggtaggttgccattatatgtctttctgttacaaccagagccaatgtacaggtatctttactccccagtgggaactatgaaatggctgtagatggatatgtgggtactaaaagctatgggcaacttgccatactcaaagcagatcatggagttttgtttccatactgagcactatgttgactcaagacaggaaagatgccaatcaccttaactagtattgacgaactgacttactcctgtccattgatatctttcctctcatgggcccaacttcaataggattaggcatacctatggcactcaatcagtagtactttaaacactatcactttagttctcattagcttacctgacagtgagaatttagggagccctccaagtctcagtaaatgtcggtccctcaaatcactcacaaattggttyaaatttttggttcaaatatgcccaattt

SEQ ID NO: 833208 - DNA, 536 bp, Homo sapiens
cagctccagctggtccctccgtttggggtccctractttctgcaatatcttctcccatctgcacagtgctcctgctccaataaccaaaaagcactagaacaggatctatgccttctcactcagatttgattatcaccttgcttcttcacatttatcataatccaaattaatcccattcatgtatctacacccatccttaaccagtgactagactgccaaggcaaaaggatttggaggtggtctggacacagcatttgccatatttgccaattagcctgaagaattttagtagctgtaggcttattcagctaacatacatggattatactcaccccaatagaataaataagtaaataaaattttatgagtgcatgaactatcaccttactttattattctgaaaattctaattatctaaatcacatctgaatattttatcatccaaaaataacttctctaaagccctagaaaaacgataggctcaatgcaaatgctgtatacatatttgatgccttgaataatatcaaacagatcaa

SEQ ID NO: 833209 - DNA, 401 bp, Homo sapiens
tcccaccctggatggccacagcttctgcctctctgttccctgcattgcttcagcttcttccttttctgactcttgctctgtccgcttcagaggctcttacagccccagcaacccatctgctgttggctgtactttgtaaacctctcttgttcgcaccttcctttttcatttccaccacctctcccttggaacgagctttcctcatttctccccagggtgattgcaatagcatccctcttggtctccatctcttgcagtccagctttctaacagccgtgaatgtgaccttcctaaggcataaatgtggatcacacacayacacacagcaaaaatgtacaaacaccagttgcatctcgaagttccttcctaaggggtccttcttaggaagccttctccaatat

SEQ ID NO: 833210 - DNA, 603 bp, Homo sapiens
tttttggactgagatgatggggttttccaaatatgaaatcatgtcatctgcaaacagaaacaacttgacttcctctcttcctatttgaatacctttatttctttctcttgcctgattgccctggccagaacttccaatactatgttaaatagaagtggtgagagagggcatctttgtcttgtaccagttttcaaagggaaagcttccagcttttgcccattctatatgatattggctgtgggtttgtcatagatagctcttattattttgagatatgttccatcaatacctagtttattgagagtttttaacacgaagggatattgaattttatcaaaggccttttctgcatctattgagataatgatgtggtttttgtctttggttctgcttatatgatggattacatttattgattggcatatattgaaccagccttgcatcccagggatgaagccgacttgattatggtggataagttttttgatgtgctgctagatttggtttatcagtactttattgaggatatttgcaytgatgttcaactgggatactgcaaacttttaaacatcttttgttcattaagagtcacatgaaattaaa

SEQ ID NO: 833211 - DNA, 561 bp, Homo sapiens
ctgggaagcagagagtagccctcactagacaagcaaacctgcccatgccttaatcttggacttcccagcctccagaactgtgagaraatgaatttttgttctttataaattacccattctcaggtattttgttaaagcagcactaaatgggctaagacatccaccaatgtttacaaatggtttgaatgaattgatgaagacccaagacatggaccactcatcaaatcataaagtttctgaggaataaaagcttcagcactcatcttggccagcaaattagtggagaaacaaactagagccttctgccctggtatgccaactataattgtcttcaggagaaaacatggaagttgtagatacgtatacatttcttctaaaaccccagtcatccctattaattgtaaaaacatccacaggatcctcctaagagtcatcgtcactatagtgagtcagacatttggagaagatcccaaaagctggagcagcagccggagccccgtctctgggaccccagccactggctctagaacgagccaccaggctctgccctcagggtgggct

SEQ ID NO: 833212 - DNA, 622 bp, Homo sapiens
  misc_feature 600, 601, 602, 603, 604, 605, 606, 607, 608, 609, 610, 611,612, 613, 614, 615, 616, 617, 618, 619, 620, 621, 622: n = A,T,C or G
catggccctaaagggaggcaccctaaaagcgaggactaactaagataattccaggcatttggctgagtcctagcctctgggtaaatgttaacacatggtggttattatattattatttatttattgagacagagtctcgctctgtcacccaagctggagtgcagtggtgcgatcttggctcactgcaacctccacctcccaggttcaagcgattctcctgcctcagcctcccaagtagctgggatgacagacgtgcaccagcacgcccagctaaagcacatggtggttattattactgctataaggcgcatggtaaagaacaaagcatagctgtagtaagtgcccatagatgagcgaaacggactgtcattttaaagtcacgagcacccactctgcacagctcttctcagttgccttattgctcatgcagagaagagtagattctaaagtcaattcactctgtcccagcttccccttcagtcctgagtattggaggattcattcagggtaggaaaaattccgcagagatcctaacaggamccttggtatccgaggttgaaataaacactgctgacgtgggcctgtggcagctcttaccannnnnnnnnnnnnnnnnnnnnnn

SEQ ID NO: 833213 - DNA, 590 bp, Homo sapiens
agtgtaggaacagctttgaagttctacgttttaaattcaagaagccaatttgctaacattacccatcatttagttccatctcaatttaacagatggtaaaaccaacaagcagatattaattttttcagtaatgacaattttatgactaaaccttacattgcatgtttacctagatatgattagagatcaacttctgaagtgaacatatcacaacccctaaaaccaaatacttaagaccaaccctaaacagtgaataatgatgccatgtggtaaagccatagacactggcccacggtgttgttgaaaagaaaatgctcatttattcttgtgaacgccatttgttgtaggctatcaagcgtttaccaggtgacttgtgctggcaccagtggcccagtgaatcagtcaataatgtccaaatcatgtgttgatttttagagattgtttatattcgacacagcttcaaaagttaaataacatkaccgttggtgcctccatctgccacagggagcacagaaaccccttacaccatccccatcacactgagacagggcaagcgacctgcagtttcaacaaacatttatcttgatgct

SEQ ID NO: 833214 - DNA, 535 bp, Homo sapiens
gtggttatatttggcttgattatgggaggtgaagctggaaggaatagggttggctagagaccagggcttggtcacaatgggccttgggttgagtttgaacttggactttatcccaaggggactggggaggcttgggttgatatcagaggcttgagtgaaggcagcaggctttagaaagaactctcacacaggagatttctcttgtaggaaatagattctctttatgaagagaatgacccgggaaacaagtcatcagactcgggaatgatagcagaagccttcttctttctgacatctggtcttgctgtctccttttccaggaccattttatggctggttgaaaatctagtgatgctggtgggagggaagctaatgattcagacagtcattaatattctccctgaagaagcttccttgaagatctaaggggaaatcagacccccaaggccaggagaatttctatagtgcgtaactgcgggcaataatagcccctatgactatgctttggccagtcaktggggatgggcttgcatgc

SEQ ID NO: 833215 - DNA, 516 bp, Homo sapiens
cctttataaagccatcggatcttgtgagacttattcactatcacgagaatggcacaggaaagrcctgtccccatgattcaattatctcccactgggtccctcccacaacacatggggattatgggagctacaattcaagatgaggtttgggtggggacacagccaaatcgtatcacttggcatgaaacacagccctcccgagctacaggggacacaggatgcttatccccaagaagacaaaggataggagtcattcattgctctgtttatccatgcactcattccaagagcagttcctcagcccctcccctgggccagtgtggacaagcatgcatccagcagctctgagaccttctagctctagccacctgcagcctgctttgcttgtctctgggtagcagctgggaattcccaaacagcaagcagcaaatgcatgataaggattaacatggccctgccctgaatttggggggtggaaggaaaggcctagagttggaatggggtagtctcagctga

SEQ ID NO: 833216 - DNA, 634 bp, Homo sapiens
tgtaacattcagagctccaaatctgctccaaaaaagtacaagttccaggaagtttcagagacttttttttttctttttttttttttagacagtgtcttgctcagtcacccaggctggagtgcrgtggcacgatcatagctctttacaacctcaacctctgggctcaaacaatcctccagcctcagccccctgagtagctgggactatagacgcatgccaccatacctggctaagttttgtatattttgtagagacaagatgtcgagcccttgttgcccaggctggtcttgaactcctgggctcaagtgatctactctcctaggtctcccaaaatgctgggattataggcatgagccactgtgcccagcccagagacacttttgagtgaaagatcctccatgggttactgggagagcggggaaagttagggtatgaacttaacctcagggctacatgcaatagggccaactattactccacgatgtgtgttttgatggcacttgtccactttatcagggaccaaaggtcatgtgccttccatcttcccaaccagtaaccttttcacccatttgtgtatccatcccagccttccagttgtttatgcaaccatcccctcatccactcatctatctat

SEQ ID NO: 833217 - DNA, 540 bp, Homo sapiens
gtctgtagtcccagccacctgtggggctgaggtgggaggatggcttgaacccgggaggtggaggttgcagtgagctgagattgtgccattgcgctctagcctgggygatagagcattcctctgcctccaaaaaaaaagtatcatgcaatgtgtattttaaaaaatttgggtgactggtctgcttcattccagataatatctgtgagattggtccatagattgtatcaatagttacccctttttattgctcagtaatattcccgttggtgaacaggccagtttgtttagccattctctattgatgggcatttgggatgtttccagtatttggatattatgaagaaatatccaaatattatccagtctttttgtttaaacttctgtgtattattctaggactatttagctttgaaaagaaatttgggcacatgctacaccaggatgaaccctgaggaacattatgttagtgaaatgagccagtcacacaaagacaaataccgtacaattctatgagatacctaaagtagccaagctcactga

SEQ ID NO: 833218 - DNA, 420 bp, Homo sapiens
agaagaaaacaaacacactctgctgagaaaataacattttaagaaatcaacacttcaccatgttgtttcccgggctgttccatcaaattgggaggaaatgatctcaattgaaacaaaatgaaaaatgttactaaagtgaaatttgtcagattatataatcattttgatgaataattattaaatctacagtcgatccctgtctccttcttcctatccccttggaatgggtagtacacaatgtggtaagaggaagggcataaataagatcggtggatttcatccctgtgttccctggtactttctraatacttctattattataacgctgattttattatctatacataatgccatgtgttgttgtatctctttccatgatcactttctggtgaagctatgaatgagaactgaaatatccaa

SEQ ID NO: 833219 - DNA, 588 bp, Homo sapiens
cagcatcaagataaatgtttgttgaaactgcaggtcgcttgccctgtctcagtgtgatggggatggtgtaaggggtttctgtgctccctgtggcagatggaggcaccaacggtmatgttatttaacttttgaagctgtgtcgaatataaacaatctctaaaaatcaacacatgatttggacattattgactgattcactgggccactggtgccagcacaagtcacctggtaaacgcttgatagcctacaacaaatggcgttcacaagaataaatgagcattttcttttcaacaacaccgtgggccagtgtctatggctttaccacatggcatcattattcactgtttagggttggtcttaagtatttggttttaggggttgtgatatgttcacttcagaagttgatctctaatcatatctaggtaaacatgcaatgtaaggtttagtcataaaattgtcattactgaaaaaattaatatctgcttgttggttttaccatctgttaaattgagatggaactaaatgatgggtaatgttagcaaattggcttcttgaatttaaaacgtagaacttcaaagctgttcctac

SEQ ID NO: 833220 - DNA, 616 bp, Homo sapiens
ctaaagggaggcaccctaaaagcgaggactaactaagataattccaggcatttggctgagtcctagcctctgggtaaatgttaacacatggtggttattatattattatttatttattgagacagagtctcgctctgtcacccaagctggagtgcagtggtgcgatcttggctcactgcaacctccacctcccaggttcaagcgattctcctgcctcagcctcccaagtagctgggatgacagacgtgcaccagcacgcccagctaaagcacatggtggttattattactgctataaggcgcatggtaaagaacagagcatagctgtaggaagggaacatagatgagcgaaacagactgtgatttttaaagtcacgagcacccactctgacagctttctcagttgccttattgctcatgagagaagagtagattctaaagtcaattcactctgtcccagcttccccttcagtcctgagaattggaggattcattcagggtaggaaaaaacccrcagagatcctaacaggacccttggtatccgaggttgaaataaacactgctgacgtgggcctgtggcagctcttaccaggaattccttggctttcacacttaca

SEQ ID NO: 833221 - DNA, 616 bp, Homo sapiens
ctaaagggaggcaccctaaaagcgaggactaactaagataattccaggcatttggctgagtcctagcctctgggtaaatgttaacacatggtggttattatattattatttatttattgagacagagtctcgctctgtcacccaagctggagtgcagtggtgcgatcttggctcactgcaacctccacctcccaggttcaagcgattctcctgcctcagcctcccaagtagctgggatgacagacgtgcaccagcacgcccagctaaagcacatggtggttattattactgctataaggcgcatggtaaagaacagagcatagctgtaggaagggaacatagatgagcgaaacagactgtgatttttaaagtcacgagcacccactctgacagctttctcagttgccttattgctcatgagagaagagtagattctaaagtcaattcactctgtcccagcttccccttcagtcctgagaattggaggattcattcagggtaggaaaaaacccgcagagatcctaacaggamccttggtatccgaggttgaaataaacactgctgacgtgggcctgtggcagctcttaccaggaattccttggctttcacacttaca

SEQ ID NO: 833222 - DNA, 602 bp, Homo sapiens
ttagctgttttagctaattcttacagaaacatctattgcctgcaaaaatttgctctgtaattactgttcaagtgcttctctaatrtatacctggtacttaaaaggaaccatcctcaacatcatctttggcagctgcattagtgcagaatattttctccgggatttgtgctggggtaggtttttccagcatatctgtacacctctgagaatgagtcaagtggtcatgggttgagactcacccaactagggcaataaagagaaaaattagtctaatgcatggtcttaacaagagggagagtgtgagcatgaataattaatctcactagtctatggcaatcagataaaatgaagtcccatttgctcaaccttattaaaagagagagagtgcgtgggagggagggagaaatggtaaaggtcgttaagggactcgtaacgtggaaagaactgcctttgagatgggtaatgtgttttctaatctctgtggtctttaactaaacgtcatggtaaaggtactcttcagatagttcggattcgtttgaattattaaacattttagaaaatactggactctggactactaacttagatgtctttatgatgaa

SEQ ID NO: 833223 - DNA, 602 bp, Homo sapiens
ctctacaaaaaatttaaaaaattagctaagcatggcggcgtgcatctgtcatcccagctacttgggaggctgaggcaaggcattgcttgagcccagtaggtcaaggctgcagcgagctatgatcgcaccactgcactccagcctgggtgacagtgagactctatctcaaaaaagaaaagtatcttgagcctccaaatcctccctgcccttgcccagtctaaaggttagaggaaggggcagataagtgaagcgtattccagttctgtctcctaactctgaactattcttgtgggggcctgttagggatccaaaatacagcttgatacaggatgaaaatgccagctgacgtctgctatctttccttattctcttcccggtatctctccttcttggaaaccagcaaggagaacttcaacaatgtcccggacctggagctcaaccccatccgatccaaaattgttcgtgccttcttcgacaacaggtgggcgttttcccctgaaccagsccagtggcaggcacccttgtcttgtgtaacatctcgggatacttgtttcctagaatgaccctttgagctgatgcccagaagagggggccaagctggg

SEQ ID NO: 833224 - DNA, 602 bp, Homo sapiens
ctctacaaaaaatttaaaaaattagctaagcatggcggcgtgcatctgtcatcccagctacttgggaggctgaggcaaggcattgcttgagcccagtaggtcaaggctgcagcgagctatgatcgcaccactgcactccagcctgggtgacagtgagactctatctcaaaaaagaaaagtatcttgagcctccaaatcctccctgcccttgcccagtctaaaggttagaggaaggggcagataagtgaagcgtattccagttctgtctcctaactctgaactattcttgtgggggcctgttagggatccaaaatacagcttgatacaggatgaaaatgccagctgacgtctgctatctttccttattctcttcccggtatctctccttcttggaaaccagcaaggagaacttcaacaatgtcccggacctggagctcaaccccatccgatccaaaattgttcgtgccttcttcgacaacaggtgggcgttttcccctgaaccagcccagtggcaggcacccttgtcttgtgtaacatctcgggatactygtttcctagaatgaccctttgagctgatgcccagaagagggggccaagctggg

SEQ ID NO: 833225 - DNA, 573 bp, Homo sapiens
gtgatgatcttttggtgatgaacttcccaggtgttcttcgagcttcttgtatttagacgtctagatctctagcaaggccagggaagttttcttcaattattccctcaaataagtttttcaaactttcagatttctcttcttcttcaggaataccaattactcttatgtttggtcatttaacataatatcaaacttcctggaggctttgttcatttttaaaatgctcttttctttgtctttgtcaggttggattaattcaaaagccttgtctttgagctctgaagttctttcttctacctgtttgattctattgttgaaactttccagtgtgttttgcatttctctaagtgcgtcattagtttccagaagttgtgattgctttttaattatgagatctatttatttggagatttttttcatccacatcctgtattattttttaagtttctttaagytgattttcacctttctctgatacctccttgagtagcttaataattgaccttctgaattctctttctgacaattcagagatttcttcttggtttggatccatgtttgctggtgagctag

SEQ ID NO: 833226 - DNA, 614 bp, Homo sapiens
ccaatcaactgcagcacttcagcactccctctgccatggcagacattaccaatcaactgcagcacttcagcactccctctgccatggaggacattgaacccaccccttcaggcagcccctatcacygctgtggggggttggcacataagactaaacttatttgctactcctgatatagagataatattttggatgggaagttagaggaaaaggagggcagatggtctggtggtcagcaaagccttggagtctggctgggaaaggcatttcaggccgggcagtggcatacccagcattagctaacattcattgagacttagaatggttcagcccatgtggtaagtccattacatgaattaactgattaaactctgtcaacagacaactgaaagaggcaagtgctattattattcccttttttctttgaggcacagagaagtcaagtagtgtgtccagggtcacacaggtagggagtggttggtgtgaacccctgtgatctgaccatagagcttgtgcccttcatcccccacagctcactgcctctaacagacaaggaggggcccagtcaggccagagctaagggttaatttagggaagaggagattcatttaggg

SEQ ID NO: 833227 - DNA, 614 bp, Homo sapiens
ccaatcaactgcagcacttcagcactccctctgccatggcagacattaccaatcaactgcagcacttcagcactccctctgccatggaggacattgaacccaccccttcaggcagcccctatcactgctgtggggggttggcacataagactaaacttatttgctactcctgatatagagataatattttggatgggaagttagaggaaaaggagggcagatggtctggtggtcagcaaagccttggagtctggctgggaaaggcatttcaggccgggcagtggcatacccagcattagctaacattcattgagacttagaatggttcagcccatgtggtaagtccattacatgaattaactgattaaactctgtcaacagacaactgaaagaggcaagtgctattattattcccttttttctttgaggcacagagaagtcaagtagtgtgtccagggtcacacaggtagggagtggttggtgtgaacccctgtgatctgaccrtagagcttgtgcccttcatcccccacagctcactgcctctaacagacaaggaggggcccagtcaggccagagctaagggttaatttagggaagaggagattcatttaggg

SEQ ID NO: 833228 - DNA, 573 bp, Homo sapiens
tatccagtgcatcagggtgaaccgttgagtgtgtctgggttggagaggaagaggtgaaaaaaattcattatggctgacacaatgctttaaattactgtgatgaaatgattattagycacctgaaagttgatatgaccagacattttacaaatagcaggtttgacttctgtcaatgagtttaattccataaaaggtcaggttattttgagttatgaattgaatttttgtatcttagctttttaaaattaatatttattaccaaagtgatggatatgacaacagaggatctctgattatttccataaattccctttatttaatatttgctctctgtgctcacaagggcagttgaaatattgaacatccttccaccatctgttctcttgtccttggattacagacggtaaagttatgtgtgtatcttctgtgaactttgagagggttttatctggtcctcggagtggtagaaatgtcagagcctgattgttttttgtcagtgaacttttgattgcaaatagaagacacccaactcaaagtggcttaagggtaatttcctggctcgtgtaattgaag

SEQ ID NO: 833229 - DNA, 626 bp, Homo sapiens
aacaattcaattagaaagcgacatgaagttctctgtgagggaacgctggggaattaccacacaatgaaccctaagcattttggccttggggtggagaggkgtgagaaaggccccagcaggggacccccagcggttcctggatacagggcatgcctccctagtgggaagagtcaccccttccagcacccaggggagggaggagggaagaggttggcagaaatatgcaaatgcggagtgggtgtgagcaggaatgggccagggcaggcagggaagcccggggactggggcgggcgattgaggaacctgtgttttgcttctgaggtgggttggcttgggatgtgggttgcttggtagggttggagaatagatgttgaaatgtttccccacacaattaaaattcagacatgggtggtggcgggagaaagtgggaaggaggccacaggatgtggtggaaaaaaaccaggcttcgaaagcccaccccggtggctttgaatcagttttcccctcttgctttctgtgtttgagcttaagttcccttagcctcaattttcttgaccataaaacagagctcagtttgccagttagcagagcgacggtgagcactgcatcacgtagcgtaatattgg

SEQ ID NO: 833230 - DNA, 631 bp, Homo sapiens
gtaattgagactgatctcctgttttggctgcagcatgttattaaagccttcttccttggaaattgttgttgtctcagtggttggctttctgtgtggtgagtagcaggacctaaaccaaactcctggtgttttggtaacagtggcacgatgaatgggactcttaatagaccaggtcaccaggaatccagatctccataccccaggatttcccccactcaaatgtacccttaaaaattgaaataaatttgactttcaaaccctaaaactaaaaagataaaactaattttcctttacataactatgaaaatcctggccaaagaatggaagtacaaattttaatactatccttcagatggaccttttctgccaccatcaggacaaatagtcagaggtcccatatttacaaaccttcatggtcttaagggaagaccctcacctttgtaaagcttgtaaagtagatgccactgtcttaactatgcttagacacctgatccagagcccatggagaagacttggaaactctcatgcacactcccctcagcctcctcctccagaggccaaagagggagaaacagcyaccccctggctcttcctccaggctctgcccattacaagaggtaagtgaaccaac

SEQ ID NO: 833231 - DNA, 461 bp, Homo sapiens
aaaggatccgtcagagccaaaacaagaccgtcccagattagttcagaggaagcagccgggcagcctggtgcatggtctctccaggagcaggctggggcgtgggagtcacctgtagcctctgccctcatggtgygctccgctcagcctgggccggggacaccgttccgtctggtttgtgtggtcgacgtcaggagactaaacatggacttcccagtgcccccgtccttcctgtgcctccggaagcgcgtgtgcatcaaaggtggcgtgtcttgaggcggccaggccggagagcacacaggatgcagccgtcaggacctggcgtgggcttcctgctgcacacagcgcgttgctggcaggccccgtgaggcggtctttaaagggagggctgcggagtcctcaaagtatgcccgaaaagaggctcaaggacagggcgatcatttcagccaccctgtgggtgagct

SEQ ID NO: 833232 - DNA, 569 bp, Homo sapiens
acatgcttatgccctagctgtgacgtatttagtctctagagtgagaggtgaactttgccggcaggggaggagtggggtaatgtagccaatagacaactaaatgtctgaagcatggggcaagaatcttaatatctctgtcctcagttttctttacccataaattggtgtttcagaattatgttcttaacagaatgcctgatacacaagacaaagtcaatcaaagcatgttctttcatttccagcatccatagttcaagaatttcaggaagctgttgctccaatagtcatgtgttctttggttatgaaggccaaacagaacaaatgataggagcaagtgatcttgacttagatagggtcagccccttcctactagatctcatggcaacatgaaggtgaagcagtgatggggaacagagagtggggaacaataaaacatacaaggaaraaaaagaccagtttttgaatgctttctattaatatgtgcaaaacactacaaaagcatgtgtatttccaaaatccaaatcatgatcccacttaggaagttaatgcccctatctcagttgccctta

SEQ ID NO: 833233 - DNA, 628 bp, Homo sapiens
atttccacctaaaggaatgatttttttcagttccatagctgctccctacctccttataaaggtctttaaggagaacatggaggtctagagataaaagcactaactgtctttggtcccctaaggactggggagtgcgtgcgtgagaagacagtgtataagcaaggaagtggtaagaactgaggggttgggggggcaccaactgtgttgttcacagactcactagcttggaacaatttgggcatagtcttacccaatggtatcagggagttcaatgaatttgtgcatcagctacctgcaggatttatttttccctataacccctgtttataaactgatcacggctaggacttgttttttccttccaaattaaaacacaaagctcattaataagaatcattataaaagcaacacatacaatcattgagaaaacactataatacaaggcatgagctcagaaccatagaaacatggaagagaaatttattatcatgatgagcgatttgacagatggaaaggggcagaaaccttcatcgtctgctgtttcccttktctctggtctcatccacagcactggaacatccccatgagatagataagatgtgaatatcattctcgttttatcagaaag

SEQ ID NO: 833234 - DNA, 599 bp, Homo sapiens
gacaggaaacagctagccctgtctttctgtccagctggaatacactcattaaataatagatgacaacagaagtaatgttagcaatatttcagtataaaccttaaagtaaaatagtaatttaaaaatctgtagtggataatgcaatatgtatattacagaatagtgtgttgggagcatatttgtttctacaacaaaaatgccaatgaaaacatgggttttatcatttgcagcattctaaagttagtccattagctgagttatgacactgaaggttagactagctcggaagggaattggccatttatttgtgtcccgaccacaggcaatctgcccttcctagatgatgggagaggaagaagctgtggcctgtggcctcaaggggtctcatttcagtgcctggtgtggctgcagcttttcagcctgctgggagggatggtgtttcatacccaggggcaggtcagcctgaggaacgctgtgtgccctcaccacatacactatcccattgcagsaaacccttgtaatgtttactttatagttttgttgatatgatctcaacaccatttccatgttttattctgacagggccttgccctgggttc

SEQ ID NO: 833235 - DNA, 608 bp, Homo sapiens
aaccacagcctccctttttgggagaaaacaggggtcatctgtaaatctctcagctgatactttcagagcttcacctgaaaaatacaaccccatataagttatactttaagtttcaactatgcctatttcaggatttatcagctaacctaattccaagtaaattccaagactaagcataatataaaaatattgtcagttgacaattttctctctcaataaacaatgcagtttcaaattaacatttgtttttcacaaatattttggaattaagaagcataatatcattttcctgcaagaaagttgtgctcaactgactaggaacatctagtaaaattgctgccaacttctgcatttgctgaatctcatttcttgtaaaaggttttattactaaagcttcaatcataaacaatcctgcttataaaaacaaggtaaatctttattgagttactttccaaatcaatggatgttaggactgcagctctctgataaaagtttaacataggcaaatttattctaaactatcaatataatgaataaactatatcctaaatttagtcacagaaatagtacttcatagtacmtaattgttagagaatattgtgtccact

SEQ ID NO: 833236 - DNA, 577 bp, Homo sapiens
taaataccagccctattcacagtttctccattcagtcgagggcatgcaaataatcatagcccrcagtctacagccacaatggacacacacaggtaagatgagagccattcctgatggggcttcaggctttgtggagggagagaaagagaagggaattaaagtgtattcatcctctactaaaggggtcctcaacccctgggctgtggactagtgccagtccacgtggcctgtcaggaactgagccacacagcaggaggtgagcagtgggcagacgagcagtactgcctgatccacctcctctcagatcagcagcagcattagattctcataggagcacaaaccctattgggaactgcgcgtgcaagggatctgggttacatgctctttatgagaatcgaactaacgcctgatgatccgaggtggaacagtttcatctcgaaaccatcctcctctccccctcacctgtccatggaaaaatcatcttccctaaaactggtacctggtgccaaaaagtttggggacagctgctctactacatagcaatgtgttaagtggtttaggacattatatttcaccc

SEQ ID NO: 833237 - DNA, 577 bp, Homo sapiens
taaataccagccctattcacagtttctccattcagtcgagggcatgcaaataatcatagcccacagtctacagccacaatggacacacacaggtaagatgagagycattcctgatggggcttcaggctttgtggagggagagaaagagaagggaattaaagtgtattcatcctctactaaaggggtcctcaacccctgggctgtggactagtgccagtccacgtggcctgtcaggaactgagccacacagcaggaggtgagcagtgggcagacgagcagtactgcctgatccacctcctctcagatcagcagcagcattagattctcataggagcacaaaccctattgggaactgcgcgtgcaagggatctgggttacatgctctttatgagaatcgaactaacgcctgatgatccgaggtggaacagtttcatctcgaaaccatcctcctctccccctcacctgtccatggaaaaatcatcttccctaaaactggtacctggtgccaaaaagtttggggacagctgctctactacatagcaatgtgttaagtggtttaggacattatatttcaccc

SEQ ID NO: 833238 - DNA, 590 bp, Homo sapiens
aaaaaacatatataggctgcaaaaaaagtacacataaaaaagtggtatggctacactgatattggacaaagtaagcttcraggcagagactatgatcagaggtttaaacatggtgtttcatgatgataatcaggaagacatacgaatcataaatatgtgtgcacttaaatacaaagtttgaaaacagatgacacaaaaactagacagaggtaaaagaaaaaattgataaatccacaattgtggttaaagaataaacatgcctgtggataaagaataaacatgcctctctcagaactcacagaaactcttaataaaacaaaatccagtacagatactgtagatgtggacacactactgaataaattaatctaattgatatttttagaacactatatccaaaaattgcacaatgcacattttcaagtacacaagatgtattcatgaacatagaccatatgccataatgataattaaaataagtcctaataaatatctaaattaaattctttttaagtttttttaattgacaaccattttacatattcatggagcacatagtgatgcttcaaaacatgtaatgtatatagtga

SEQ ID NO: 833239 - DNA, 605 bp, Homo sapiens
tgggcaacagagagagaccctatctctaaacacacacacacgcgcrcacacacacacacacacacacacacacacaatagggaaggaaacttgattaaggaaggccggtctagcataaagctttgggtgaaggatttacttgtgtgtgcatatagccacatacctagctgtgtaagtcattacaaatgtcacctggctaatgttcattaatgattagctaattataaagctgccgttctgtccttggactgatagctggtttgttttacagaaggcagtatctttggtagagttgctttatcatatcaaaaagggtagtgttgttttttttttcttagcaatagcttcaagaacgaagaagattaaacaaacactatcgaatgaaagaaccaagcccagtacctggcacataataagtgcgtagaaagcattacttgaaattagatttactgcttttttgattaaaaaatactcttccaatttaatgtcttaagggttctctataaagagtacaaattataagttaaataaacactatattggaccaaaatcagaagtagaaacttgcataccttctcttgatttgttaattactgagaagttat

SEQ ID NO: 833240 - DNA, 553 bp, Homo sapiens
ctgagataggtcacacgaaggagccacaccaactggagaagagaactggagaaaccaagagtgttgtagctttggggtgaaacgtctcagtttcacaggggaaaggtttcagagtgacccctgagcagtgacttctttgtaccagtcccctctgatcacggaaaagctaaactaccctgactctgtcattctagggagggaagagttcgcacctttagatgtggcagtctgacttaaaaaggtaacgtctgcaaaaatgcaaaagctggttaaaataacaaaaagctgagcctgtgctggtgctcaacactctaagcaaggcgtgtgtgatggagagtgttatattactagggcaaaaaactgtcccagtttgccaggacaggggaggttcctgggaggcaaaggcttcccgctttaacaccagggtcatcctagttactgtgatgaaacaagctgtggaagcgggtgcttcattagggctggaaaagayctgaggcacacaggctgggcttcacaggtcatttctggtgagaaagtggagctccgatttgat

SEQ ID NO: 833241 - DNA, 554 bp, Homo sapiens
ctgtttctactgcgtgggagacacaagggagatggttattggatttgcatgttagttgaggagcccaagatggataggccctttcttctgttgccatctgactgctcagggctggagtgttctgtggtcttctaactctcctgcttgcttcaagtgttatatgtggtttgccaggatgatatgaacttggatatgcaagaaaaaaattaaacaataatagagctgagtcaaaagagagaaaacatccagtagttattgagagagagaatgaaatcacacatgggcgtagagaaaacaatcaccggagccaccatttaggaatgaagcagagttgtcaacccctgacatcccccgccatgtttagcctctgaggaggagtgaaaagtcacagggtgagtattcaggagaattggactctagtctggaaatatcacttcctctctaggtctcggtcccwactgtttagactagacctttcatttcctttaagctgtaagaatttgttactcttaattatatcaatatataaggaattatttgggattttgaaaata

SEQ ID NO: 833242 - DNA, 623 bp, Homo sapiens
gcagtttgtactagcgcctagaaccctgacaccgggaattagtctcttggaagagctagcgattggaggctcaggagttaggctgtttccttgttaaccaacaaaatcaggtgaaaccaacgaagtcaggaagcctaaagacatatatgtacagatatctaaccctttacgctaattatttagatttttaataaatctatcttaatgtttaggtatgaagacgggaggaactgtggaattttagtcaagttacagggaagaaacgctttctaaaaaaagaaaaacattgctcacatgtgacctcacagtcttatttaacccatggaaccaaaatatatcagagtttgtatcaaactaatcttataaattttcagcaaccccatccattcactcactccccctccaggatgaggaagctcgtacaatgggatgtaatcctcagagaaatttaggaaataacttgtatatggttggaaggctggataaaaatactttgggcaggcrtggtagctcacgtctgtaatcgcaacactgcaaggccgaggcaggcagatcgctttagctctgtagttcgaaaccagcttgggcaacagtaagaccctgtctctacaaaaaaaaaaaaa

SEQ ID NO: 833243 - DNA, 552 bp, Homo sapiens
caaaagaaatgcctaatgattctgtcagatccaagacaacttaataagtatttatgttctaacaacttagtagccatttgaaaaaataatacaattaaactgaaagaaawatttgtacttttttattcttattaaatacatttactttctttctttctttttttttttttggagacagaatctcgctctgtcaccaaggctggagtgcaatggcatgatctcagctcactgcaacctctgcctcccaggttcaagcaattctcctgtctcagcctcccgagtagctgggattactggctcatgctgccatgcccagctaattttttgtattttagtagagacggggtttcaccgtgttgaccaggctggtcttgaactcctgagctcaggtaatccacccgcctcggcctcccaaagtgctaggattacagacatgagccaccacacccggcctaatacatttactttctaatggtatatgtgcatctgctgggaggagtggatgaataattgaaaggatagcaaatcaaacaaactattgggtatttcttt

SEQ ID NO: 833244 - DNA, 607 bp, Homo sapiens
gttttgaaggatttacaagaaactaataaaggtatttagtgttaagaggaagaactaggaaagagagggtggctttcaactttcacttttcattttgtaagttttggtagcaagaatttactgaactcacaagatgtttcttttagttttacaaactgttcaatgagggataccaagaatgggagaacgtggtatatttttttgcttgcttctttgtggttttctatataaaagcaaatacgctattttaaaatatgagccaatagacaatatggatactatagatccatgttcactgacacagaaaaccataaggacatattaatttaagaaaaccaactgtgatgcaatatgcatagtctgatcccatttatgtaaaaattttgcacatgtgagtatcgaccatttagagatatctggaaagatgttatcaaaatatgatggagttacacattctgcttcgtaacctttctcaattgctttaactttctcaaatraggattcttcaaacatagggaatgaaacaaaatttttacaaaggccttgatatcacagcaaatttgaagatgggaaggaagcagggagaaagtataagaaaatgatttaa

SEQ ID NO: 833245 - DNA, 624 bp, Homo sapiens
atcctgccgtgtcccctgcttgacaccaggacctactgagggcctgctggcctgcaatactgggtcgggtgggctgctcgcttgtgtgacaaggagcctgggggtgcctccatcsctctcacacctttcccaggaggcctgaaccagggggattcatgtcaaccctagtgtctcctcaggatgaactagtgatgctccctgttgtcctcaaggggctgggaagacagagctaggtccccccaaatgagatgttggtgagctgaagagttactgcagacaacacagtgcaaagcccttggagtcctgcacatgggggtgcgaccagcacctcagtgtctccctcactaagcagcctgtggagggctcagccccagcaggctcaggggctgctatggagtgggtgtctgtttcctggagcatgttctcagggcatccttcacttgccttcagaggtctctaaaatatattaaaaatgtcccaacatttcaggacattccaccggcttttcttgctgggcttcctggttttcttcttgggctttctggttttcctgatgggacaacaagaaagtgagcgtagccaagaagaacatgggcacgtgcccacttccctcatcattctgcc

SEQ ID NO: 833246 - DNA, 496 bp, Homo sapiens
tcccctcgaggtcatttcctcccaggatccacctgtcctgctgctgtgttttttgtccctcccagaacttgctttttttttttttttttgagatggagtttctcttttcttgcccaggctggagtataatggtgccatctcgacccaccacaacctgtgccacctgggttcaagggattctccagtgtcagcctcctgagtagctaggattacaggcatgcatctccatgcttggctaattctgtatttttaggagaaacgggttttctccatgttggtcagtctggtctcgaactctcaacctcaggtaatctgcgcgccttggcctcccaaagtgctggggttacaggcgtcagtcaccatgtcacaacttttgtactagataaaaagcaacccttcctcaaagaggagacttaattctaactaaaatatcctaygtattcactaaccttttgttttaaagaagactaagccaagatttgaaaatactcaatta

SEQ ID NO: 833247 - DNA, 601 bp, Homo sapiens
ccatctgaggactgcggatattaaacttatcttcaggtacagctgtggtggaggatgaatgggttgatttatgcaaactgtgcagtggtgatggaatttttcttgaacattgatcctcatgttgtgctttgcagatgggagtgtgttttctggggaaatgcacacacactcccaaagacatccacaatcattccatacagactgtctcctctgtccctcccatccctgatgtaccaccccaccttagatgacactgctgcttccagggatgacagtagcatggttagagtggtttactggatcttagcattcttttaaaccaaacttcccaaatctcatttctggcagacagctcaaaccagagtggctcttgaacaaaggcaggcaaaacagtgccatctttgcaactctaatattttgaacctaaacaaagagatgatcccagaatacgtacattcggccagtgtgtctgggtccccctccatctagagaaaaacaaaacactatgaggwtcagaccaggctgtgtcctgtgtgcacaggtcttctcttcacttgtttatgttaaaaaaacagatggtaaatagtacttgagacaatgg

SEQ ID NO: 833248 - DNA, 561 bp, Homo sapiens
ccaggatccacatgtcctgctgctgtgtattttgtccctcctagatttattattattattatttttgagatggagttactctcttcttgccccagctggagtataattgtgcaatctcaacccaccaccacctctgcctcccaggttcaagtgattctccagcctcagcctcctgagtagctgggattataggcatgcatcaccatgcccagttaattctgtatttttaggagagatgggttttctccatgttggtcagcctggtttcgaacgcctgacctcaggtgatccacccgtcttggccccccaaactgctggaattacaggtgtgagccaccacgcctgaccagaatattctgtactagaaacaaagcaacctttcttcaatgaggagattaattctattaaaatattctatgtattcactaacyttttgttttaaagaagactaaaccaagatttgaaaatactcaattatcctaccatttaaagatgactgctacttggcccgtgatgtttgtccttctgcccttccttttaacacagtgtgtgtgtgccacg

SEQ ID NO: 833249 - DNA, 403 bp, Homo sapiens
atcaggagttcaagaccagcctggcaagcttgggcaaatggcaaaatcctgtctctactagaaatacaaaaattagccagttgtagtgtaatcccagctacttgggaggctgaggtgggagaactgccaggaagcagaggttgtagtgagcccagattataccactgcactccagcctagacaacaaagtgagactccatctcaaaataataataacctaataaacacatataacaacatgattttttaagacacaggtttttgctgtgtctctcaggccgaastgcagtggtacaatcacagctcactgcaatctcaaactcttgggctcaagagatcctcccgcctcagcctcctgagttactgagattacaggcatgaggcattgtgccaggcataagat

SEQ ID NO: 833250 - DNA, 533 bp, Homo sapiens
aattggctagtaatagtaagagggtctaattcattgagtataaatatcctaaagaggctgggcacggtggctaatgcctgtaatcccagcactttaggaggctgagatgggtggcttacttgaggtcaggagttygaggccagcctggccaacatggcaaaaccccatctctactaaaaatacaaaaattagccaggtgtggtggcacacacctgtaatcccaggtaaccggcaggctgaggcaggagaatcacttgagcttgggaggtggaggttgcagtgagctgagattgtgccattgcactccagcctgggcaacacagcgagacactgtctcaaaaaaatatataattaaattaaattaaatatcataaaaatcgatgagatgatgcaaactaagtgcttagcttgatatttggcctcaagagtccagtaaatattagcaattatgaccattattatcctacttgggaacagatgaagtgtgtacaaactctaactttgaagtcaccccagatttggtagttaataat

SEQ ID NO: 833251 - DNA, 572 bp, Homo sapiens
atggctgatttcctgagaatcaagttaaaacctctagacaaagtaaccaaatctccagccagtgagtatatacattattcattcccctcccccacaaaagagaaaagtatatttcaggccaggcccacagwggatcacgcctgtaatcccagcactatgagaggccaaggtgggtggatcacctgaggtcaggagttcgagaccagcctggtcaacatggtgaaaccccgtatctaccaaaaatataaaaattagctgggcacggtggcacacacctgaaatcccagctactcgagaggctgaggcaggagaattgcttgaacccgggaggtgggggttgcagtgagctgagattgggccactgcactccagcctgggtgacagggtaagactttgtctcaaaaaaaaaaaaaaaaaaaaaggccatttcagagaagtctgggagccataaggggcgcaacaaaatgctttctagagatcagatctagagatcagatttcagcatgggatgacagcaggcaggaccagcctcacgggcctgcaggcagttgcctggggcctcatgcctgacc

SEQ ID NO: 833252 - DNA, 598 bp, Homo sapiens
acagaaattcccctcaaactatacatacaaaaaatactcccaattttgcaaataattccagggagttcacctgaactctgcttgtgtgctccagactaaaaattatcgtattrgatgaccttttaaatgggccttccagcccccagttctaggaccccctgccattcttatataacaaaatatccacagcttacactgcatagtcattactgtaaacatgttagtttattatgaaaccaatatccttcttttcttctgacctttatatcaaggactcaaaacatctggtatttcacatgaaggagtcttaactatcaaaccttataccacaattataaggctgccttttcttttttataaattctgaaattcaacacttatagtttcatgttctatcaaatgctcaaatctaatttcattaacatagaaatacttgttcagacaaaagtattaaaatagacaccttgaaaaatcaggtcccattggctcccattcatttaaaataatcaacaagggtgtgtatgtgtatatagggagtgccttcctctaggaaaggaaagcagcactgagcctttatactttaataaaaacatatcaa

SEQ ID NO: 833253 - DNA, 340 bp, Homo sapiens
ctcttcttcccttcccactccccttatttctgtgtktgttttttttttttttttttttttttttttttttttaaactctggatttatagggaagctcagggtgggcatggggcagacgcatgggttctgccaggtgctgtttctcagggaacacgggaggctgttgtctatggggacgggtggggctggagcaggctctgtgacagtcagaggctctccccaaccccggccagcgacctcccttgggtaccttgaaatcagccacggcgggagtatttacgccgcggagatggcagcacgacacagccctgctttgcgggtgggagtgaagagagccgct

SEQ ID NO: 833254 - DNA, 340 bp, Homo sapiens
ctcttcttcccttcccactccccttatttctgtgtgtkttttttttttttttttttttttttttttttttttaaactctggatttatagggaagctcagggtgggcatggggcagacgcatgggttctgccaggtgctgtttctcagggaacacgggaggctgttgtctatggggacgggtggggctggagcaggctctgtgacagtcagaggctctccccaaccccggccagcgacctcccttgggtaccttgaaatcagccacggcgggagtatttacgccgcggagatggcagcacgacacagccctgctttgcgggtgggagtgaagagagccgct

SEQ ID NO: 833255 - DNA, 603 bp, Homo sapiens
gaaacccaagaggaatcttggaatctggtgatttttttaaattgctgctagcgtcttggtaggcctattaagctttcttcgttaggaaggggagcattaacaatagtttccagtttctttccttttctttgccttattttcctgaacttcttttggaaggtaaatgcttaacacatcacgctgtcatgtagcaaatgtcgtaagatctacaaagcaagtctctaaagtaagtaaaacaccagccaaatctacactgtcagcagcttatcaaaaagcttttttttgggtggagggcggtggctggtgggaagcggttggtcttgttttcctctacactgtgtttggaaggagagttttccatttgaaagagtaaatgaacgcttggataccaattggtcgtctctatcacatccctgctggatatgcaccctctcatttttcaatagggcagcaagggctccgatttctcagtcttggcagagatccccaaggattgagtatggcaaaaagctgacaaacctttgttacacagagctctggccrtcgaaggcagggccagcaatggggcagattcttcctctcttgctctttccctgatcttcc

SEQ ID NO: 833256 - DNA, 597 bp, Homo sapiens
ttactttgatgcctttatatataagktacggtattccctttaaaaaaaagattctggaaaagaaaaacaatctcacccagtcatcccggagaccaatagctgtgtacaaaaggcctccaaagtgcttttatgaccttgtaagtgcctatgtgtctggtatacatattagaaagctctaataattgctgctgtctatgtaaagcatagccataaacagatgcatttagcataaatttactcagatatattgaagtattacatgattaaatacattgtttgtataagttatattaaaatgtgattttcatttataaaaagcttatttaatacacttttatttatatatttatattaaatgtttgttattaggtgggaccaattgaaatttctggtgcttggttcgctatgtttgacctataaaaacagtcattccatgatggaatatgctagatataaaaggaaataccatttacagttgatacatactcattaaaatagaatttgggttagtttttctggtgattcttcgttttgatcatgaatcccatgaaagctatggatctctccttagaaaaattcacaatgatataaaatttg

SEQ ID NO: 833257 - DNA, 597 bp, Homo sapiens
ttactttgatgcctttatatataaggtacggtattccctttaaaaawaagattctggaaaagaaaaacaatctcacccagtcatcccggagaccaatagctgtgtacaaaaggcctccaaagtgcttttatgaccttgtaagtgcctatgtgtctggtatacatattagaaagctctaataattgctgctgtctatgtaaagcatagccataaacagatgcatttagcataaatttactcagatatattgaagtattacatgattaaatacattgtttgtataagttatattaaaatgtgattttcatttataaaaagcttatttaatacacttttatttatatatttatattaaatgtttgttattaggtgggaccaattgaaatttctggtgcttggttcgctatgtttgacctataaaaacagtcattccatgatggaatatgctagatataaaaggaaataccatttacagttgatacatactcattaaaatagaatttgggttagtttttctggtgattcttcgttttgatcatgaatcccatgaaagctatggatctctccttagaaaaattcacaatgatataaaatttg

SEQ ID NO: 833258 - DNA, 472 bp, Homo sapiens
taatcattcagattgcaattgtcaaacagacaattggaacccttctgcayaaaagctgagtaaacagggtgcagtttgggggaaatagaaaaagaatgaaaacagaggattaaagcaaataaaatagattaacccttgacacgataatttatactaggactagaagtccaacagaagagctgttgtagattacatacgtgattaatcactgctatagtttcattggtgacaaaatgattaataaagtttaagacaaaaacaaatcttttcgcatctgcacctaagtgtgcaaaatctagcaagggtttctcatccagaccttggttcccttgcaggatggacaaacttttaattcagatttttgcggccctggttaagataaaagcatcatctttacaatagatccaccctggcttacttgtgaaataaagggttaggaacaggaacccaattctgaaaaggcttactagca

SEQ ID NO: 833259 - DNA, 605 bp, Homo sapiens
cctacatttgcaaaaactcttcctttttctgttttgtcctctctcatatctaaaagattttatcagcactttcttgctgtatctgtgtctgytttcagtcccttgttggtgttctacgtggtatgtccaattttattaatagcaggaggccgggtgtggtggctcatgcctgtaatcccagcactttgggaggccgaggcaggtggatcacttgaggccaagagttcaagaccagcctggccaacatggtgaaaccctgtctctactaaaaatacaaaaaattacctgggtgtgatggcacatgcctgtagtcccagctactcggaaggtgaaggttgcagtgagctgagatcgcacaactgtgctccagtgtgggtgacagagcaagactctgtctcaaataataataataataataataataatagcagaagttaccatttattgaatgctgactgtgtcagccactgtgaccctacatacatttgttcattgataactgtttgttcattgcaaagtagatctttaaaagcctatgatccaaatgaggaaaccgaggtttagaaatatagctagaaagtactagtcaggactcagagcccgcg

SEQ ID NO: 833260 - DNA, 568 bp, Homo sapiens
tacgctattgaaaattaggacctaaaccgagcatttgacattgaattctacracatgttaaagcatgttactatgttaagttaatggtgcaagacaagtggaatgattatctgttgagcccatggaatcttcttgggagccccttcaatttctgctgtcacattccaccaagttatgaatatgaacaattccttgggtattttcttatcctgaactctccttggaagtgagatgcttttagaaactacttttgatcactcccttgtatcaaccagaaaatgaacaaaaattcttaacatgagtggtccctcatgactctcatttggttgccttgggaaaaccttccccacctaccacaggtatttcctcctttgtgttctcatctttattaacactcttactgcctcataaagtatttgtgcctcaccagatgcaccctgagtttcttcaggtaacaactgtgttatatccatctcgacagttccagcacctaagaacaggcacttggaaggcacttgagaaacgttcagtggatgaatgcatgagtgagtgaaggaatgattgaaca

SEQ ID NO: 833261 - DNA, 545 bp, Homo sapiens
tcaaccagaaaatgaacaaaaattcttaacatgagtggtccctcatgactctcatttggttgccttgggaaaaccttccccacctaccacaggtatttcctcctttgtgttctcatctttattaacactcttactgcctcataaagtatttgtgcctcaccagatgcaccctgagtttcttcaggtaacaactgtgttatatccatctcgacagttccagcacctaagaacaggcacttggaaggcacttgagaaacgttcagtggatgaatgcatgagtgagtgaaggaatgattgaacaccctgtgacccaggactctaggattccagacaggcacaagttcgaatcttccagtaagccatttcactcaagcagattaataactagaaatcacagaatatcagctctggaaggaccctgaaatatcacattcaacacttttatttctgaaatgaggaactcaagtttgaagagaagagacttgcccaaggtggsttctgcattcctctccacttacctctcaaccactcttgggtacaagtgc

SEQ ID NO: 833262 - DNA, 645 bp, Homo sapiens
attttacaaaaaaatgtgtggattattgacatatttaaatatagatttatttgtaaagagttcttaagaaatttaaygaaatagtataacctaaattagatgaaaatactatatctaactgcaatgtcattttacagcaggagaatccttttggcatttaccagtcatttcaacaacggaagcaaccattttgtttggcatagaagaaaagcctgaggcaaagatttaagggaatcagaggactacatattttaatgaaatgaggtttaacagtctggtcaaattaacaataacccctcacttgttgagagccacaaatcatttactaaatatgaacctacctaccatgcaggcaaaaattaacttgccaagcccagcagtgattcagccaaaatcactgctctcctgctaataatgcctttactaaataattttctggttctcttatgtttataaagtggaagcaaagaactgaagtcacatctcacacagcagggtagccaacatgcattagggaagatgaacgatttccataaggttttcataaactctaaactcttcattcagtatcctggtgtggaataaaataaaagtacgatggatgctataaacacggaggtaactgttaaattataaagtttatat

SEQ ID NO: 833263 - DNA, 666 bp, Homo sapiens
aattgagatgataaaagttatattattcaaacagactcataaccaggtaaggcaaatataattgaatatmgtgttatacctctatcctctaaaatatattgttatacctacaccctctaccataatttctaaaatcaaagccaaattaaaaaaaaatccattgcacttctctactcatctaataaaagtgctttacttcattgtacccataccctgggggttgtttcaatatagacaaaagaagaatagtaatttaataaaatactggttccttaataaatttatggcatcatgagaaagaatttttataatcaaatatagtcacttttagaaggtatctaaatgcaacagggaaaaatggctggaaaaaccatgaaactataaataaaggccaatttacaatatacagcattttacttatagctgcaaagactaccttctgaacattttttactcaagtggattattcccttaatatactagttgacaggctaattcttctaactggccttgactttattcagattcctcattctagctgacagctatatagccagggaatttttaacctaagaacagttcagtcatctttgctacgccttcctgtctctccaacctcgtcaagtacaggttcatgctgggaagaataactctgaaagtttctgt

SEQ ID NO: 833264 - DNA, 398 bp, Homo sapiens
catctgtcctctaaaagttcagtgtaggaaaaatgttttattaattattctagtgagytggcttctagacgattgaggttttactgtgtttggcttcttcaagaagtgaaaggcactgtaacatgctcgaggaggttccgtgcccgctcactgacagcatgctttgcatctgtaaaccattgtcctatataaagacttcaaacttcagctgaatctgtgcatcgtgggtttttaaacataatgtcacagttgctggctacagccaagaagttaaacacttccttcattttccattgcatttttgctccagatccttccaggaggatacccagagcttgcctggacatttggattacagatttcaaagtgggaaaaagatgcttctctcaatatttggg

SEQ ID NO: 833265 - DNA, 499 bp, Homo sapiens
aaaactggaaaacattttcctgctgaaagtcacaagaactaaacttgcaagtttggaaatcatgggtgctactgatgacctcctacaaactgtactctggtttgcttgagccaatctatgactagttttcgggcagttgggcagtttttaatgcttatctcagctgaaaatgatttgcaagttagcaaatttatgatcatagcaattcaaacggtgtaatcccacagcatctctcagccaatcctaaaggtaactcttatcaccccactcacacaaagaaaagctgagcaagtcttcattttgtacaggaagaaacttctaaacagggctgtcatcaaaactggacgaccatagacatagcagatatctgagtcacaaacaagtcargaaatgctgcttacactgtatccgcattacacaatagccaacacttcacacaagacattaggccagtcctgtaggcccttgggagcaggtctttgcctctgtcttgtgacat

SEQ ID NO: 833266 - DNA, 541 bp, Homo sapiens
gtcccatatttctcagaggctttgtacatttctttttacttttttcctctaatcttgtatgctcactttatttcattaatttgatcttcartcgctgatatcttttcttccacttgatcgaatcagctattgaagcttgtgcatgcatcacgaagttctcgtgccatggtttccagctccatcaggtcatttaatatcttctttacactgtttattctagttagccatttgtctaaccttttttcaaggtttttagcttccttgcaatggattagaacatgctcctttagctcagagatgtttgttattaccgaccttctgaagcctacttctgtcaactcatcaaagtcattctccatccagctttgttctattgctagcaaggagctgcgatcctgtggaggagaagaggcactctggttttagaattttcagcttttctgctctggtttctccccatctttgtggttttatctacctttggtctttgatgttggtgatctacagatggggtttttggtgtggatgtcctttttgttga

SEQ ID NO: 833267 - DNA, 601 bp, Homo sapiens
atggatctttcctcatgcatgattttgtaccatcatgcaccagtcatttggaaaacattggtttactgagtcatgctgagcttccaaatgttagcacatttatcttaaatatcaaaagatccygaccactaacgttaccataggtcttatcagaagagtgtttagttattaggaaatggccaaactcatagtagtggatatagattttctgaaattctaattttgacttgagagatcaaatttttatctttggtaacaaatgtcatttttttcccccttgaagcgacaagcttacttcatctgctttcaagaaaatgtctactaaatactcaagtctgaatcatttgccacttgtactttcaggtgaaatggttgtccataaaaaagtggtgagttcagccgaagaaattgctcgtgtttttcctcaagacagctatgaagcaaaagtgcttcatgcacagcttccattttgtcacaaaaagttgtgtatgcaagagttgagactgaataaaattaattcatacagctttgtcagggacattcttaagtgaaactagcatctgtattttttaaagcaacaagtacatggtgacactgaaga

SEQ ID NO: 833268 - DNA, 505 bp, Homo sapiens
ctgaagtgactcctgccagctcctctgactcaggtgtgccttcctggcactctcttccccttccaccacaggaatgtgtgtgaatggtggattagagacgaaaagaaggagatatgtctggacatcaataggcagtggaatgagaggagtatggaaggaagggtgtgaaggaggaaggagtagagaaagatgctcaaattcatcaccttcccaacaatgtggacgttgatgttgctaccagcatgacgatcaccgaaggagaaccgggatatcagttaatgtccaggcagaaatcctgggctgttattttgagtatgaatttctattacacaaggactttaaaaaatgtaaagctataatcacatccaatgaaataaaccatatttatgtaatattagtagcatccaataccgagtctatgttcgttttttgcccccataatgtcatttaacaatcggtttgttagaatccaartaaaggatccaacgctggtttttttgttgtt

SEQ ID NO: 833269 - DNA, 599 bp, Homo sapiens
tgtttgtctcaagatactttttgatttcacttttgatttgttcaggagtatgtcatttaatttctagatattaattttttaaaaatttcttcagttattgatttctagttttaygctattatggtcagaaaaaatactttagatgattttaatattcttaaatttgttaagacttgttctgtggcccaaaacatgatctatctggaagaatgttccctgtgtgcttgaaaagaatgtgtattccactgctattagatggcatgttgtatatatgaacagatgttaggttcatttggtctgtagcattatacaagtcttctgtttccttactgatttttctgtctggatgattccattgttgaaagtggggtactgaagttctttattattgtattgctctctgtttctctcttctgttttgttaatatttgctttctatatttaggtgctccaatgttgggtgcatgtatatttacaattgttatatcctctattaattgatccttttatcatcatatattaaccctctttgtttctcatgacagactgaaagtctatttttttcttttttctttctttctttttctttttttcatgga

SEQ ID NO: 833270 - DNA, 565 bp, Homo sapiens
cccggctattcaggaggctgaggcaggaggatcacttaaacctgggaggcagaggttgtggtgagccgagattgtgccattgcactccagcctggacaacaagagcgaaactctgtctcaaaaataaaatagaagtagatccaagaacttaaggaaaattgcacataatgaacaggaaaaaaactatatgaagaaatagtattacagagatgaaaaacaaaatactatttctttacaataagtataaataatactaatataaatataaagaaataatattacagaggtgaaaaacaaatacagatgccacttcattgtaagttgaaaatattgtaaataaaaaatgcagtaaatacacctaaccaccaaatataatagcttagcctagcctaccttaaatgtgttcagagcacttacattagcctaaaatcayctagcacaaagcctagtttataataaagtcttgaatatctcatgtaatttattgaatactgtactaaaagccaaaaaagagaagggttgcttaagcactcaaagtccggtttctactgattatataccattt

SEQ ID NO: 833271 - DNA, 387 bp, Homo sapiens
tttttagctttgctgctcatggatggcttaagtgttaacagctcagtggagggccagtgtgacagccttttgcacccatgctcatggcacccgagttctygtctggtgtccaggaggaatgaggttgcatgaaagaattgaaggtggtaaatgtaggggattttattgctggtgaacgtggctctcagcaggaaggggagctgagaagggcatggagcaggaaggtgatcttcccctggaggctggactcctctctgaagctatgccattaagctgtccctctgaagtcaagccacttgtctccaatgtccaatgatagtctctgacatccagctgcttctcttctctgctggctgagttatggcatttttataggcacaggatggg

SEQ ID NO: 833272 - DNA, 642 bp, Homo sapiens
caccaatttgtcaatggtttcttagctttgacacctaaagcataagcaaccaatgaaaaaacagacaaattggatatcattaaaacgaaatatcatcaaaacgaaatatcatcaaaacgaaatatcatcaaaacgaaatatcatcaaaacgaagtatcatcaaaacgaaatatcatcaaaacgaaatatcatcaaaacgaaagacttgtgctttgaaagatgctatcaagaaaacgaatacacaacttatagaatggagaaaacatttgtaaatcacgtatctgataagggcctagtatctggaatgtataaagaaactcttacaactcaacagcaaaagacaacctgattaaaaaatgggcaaaggacttaacagacaattctccaaagaagatgtatgagtggctaacttaatgcacgtaaaaagatgctcagcatcactaggcattagggaaatgcaaatcaaaaccatgatgaaatgccattcacactcattagaaatggctataattttaaaaaaggaggggggataacaagtgttggcaaggaggtagcaaatcagaacccttatacattgttggcaggaatgtaaaatggtttagccatygtgtaaaagagtttggaggctcctcaaaaagttaa

SEQ ID NO: 833273 - DNA, 639 bp, Homo sapiens
catggtttcttagctttgacacctaaagcataagcaccatgaaaaaacagacaattggatatcattaaaacgaaatatcatcaaacgaaatatcatcaaacgaaatatcatcaaacgaaatatcatcaaacgaagtatcatcaaacgaaatatcatcaaacgaaatatcatcaaacgaaagacttgtgctttgaaagatgctatcaagaaaacgaatacacacttatagaatggagaaaactttgtaaatcacgtatctgataagggcctagtatctggaatgtataaagaaactcttacactcacagcaaagacacctgattaaaaaatgggcaaggacttaacagacattctccaagaagatgtatgagtggctaacttaatgcacgtaaaaagatgctcagcatcactaggcattagggaaatgcaatcaaaaccatgatgaaatgccattcacactcattagaaatggtataattttaaaaaaggaggggggataacaagtgttggcaaggaggtagcaaatcagaacccttatacattgtggcaggaatgtaaaatggtttagccatygtgtaaaagagtttggaggctcctcaaaaagttaaactagaattctatgacccagcaattccactg

SEQ ID NO: 833274 - DNA, 636 bp, Homo sapiens
tagcttgtgttattaaaatgcttagtaaacccctrtcttttagacaccagtgcagccacggcctctcaaattacaaacttcctcatcagtagattgaagctttttatttaatcagcatgaacattcaaaaacacatataaaacccaccatttttacctgtaatgttttaagttagggaaaatgtatatggcatttataaaaatcaagagccgaatgtcatcatcatcaaggaacttaacacagtatcctcttttttcttcttggagacttttatatatgatatgcagactaccttgtagaacttcgtcacatctatgcttccaaattctgagtctaccatcccgtatttgcatgtctttgtgtgtgtgtgattgcaattttaaaaactagtaacaaaaggaagtaaacaccatcataaaacacccaatatgctggcagcatttccacagtgcccccctgcagccggcctggctacctctgcccccagtgcctacttagcacagtgcctggcacacagtgggtgccagcgggaggcattgtggttgctacggtgcccagggcttcggagggaaagcagaggtagctgtggtttagttcaatcacgtgggttttatttattaacatcatgtgcaaatt

SEQ ID NO: 833275 - DNA, 554 bp, Homo sapiens
aagtcttgaaccacttatgccacccctggcccatccctgccagcaacagtcacatggcatggagagagaatctgggactttgcattggaacccaatgccgccctatcacagaggaaagcaacagagagtagaactcagccagcacccaaggagggagcatttagacaagccctagcaagaggctaatcatccatcccaacagttagaacctgaattccagcaagcccctttaccacgagctaaagtgttttggagtgctaaataagattgaaaggcactctcaaccacaaggatagcagtttctgggcaagtcctggtgctgtgctgggctaaaaacacctcaccaaatgaactaaataagtcaccaaaaaccaattctgaagatacagtgatatgtgacatttcagacagagaattcaaaatagatgtttgaggaagctcaacaaaatacaagataacacagaaaagaaattcagaaytctattggataaatttaacaaaaatcattcaaataaataaaatcaaacagaaattatagagctaaaaatgtaatt

SEQ ID NO: 833276 - DNA, 622 bp, Homo sapiens
catataagaaactcaactcaatagaaaaaatgatctattaatctgaatttaaaatgggaaaaaaatctcaataggcattttyaaaattaagtcatacaagaggcaaataggtatatgaaaagattgttcaaagtcattgattatcacagaaagtcaaattaaaactgcaatgagatatgatctttctccaggtaaaatggcttttatccaaaagtaataacaaatgctggtaaggatgtgaagaaaagggaaactttgtacactgttcaggggaatgtacattagtacaatcactatggagaacatcttggaggtttctcgaacagttaaaaatagttaaaaataagatccagcaatcccgctgctaggtatatacccaaaagaaagaaaatcaggttagtgaagagacgtttgtactcccatgtttatttcagcattaacagtagccaagatttgaaagcagccaaagtgtccatcaaaagatgaatggataaagaaaatatggtacatatataaaatggagtactattaagctattaaaagaatgagattctgtcagttgcaacaacatggatgaaactggagatcatcattttaagtgaaataagcaaagcacagaaag

SEQ ID NO: 833277 - DNA, 480 bp, Homo sapiens
acaaagaaacatttatcatttatttttttctgaggtagatttcatctacgtaacaaggccacctttgctygctaagcttcttctctctcccctaaaaagttttactagggtttaagcccacattttttttttctgtaacttcaaaattttttttgtaactcattgggaagtggggttttcattctgaagattctcatttatatatgttaaaaatatattgcatggctttactcctattaatcaatctgcctcatgtcagtgatttttagggaaactttatggggccaagagcctatgtcccacacgctatcaaaatggaaaaataatgcaatagtagcagtgtatttccaaaaaatatataccaataaattgttctgagatatagcctgggattgggggttgggacagggaagagaataaacaaaactgcctgggtatttttggagagaaggaaaattatgttattttttcatgcttcac

SEQ ID NO: 833278 - DNA, 480 bp, Homo sapiens
acaaagaaacatttatcatttatttttttctgaggtagatttcatctacgtaacaaggccacctttgcttgctaagcwtcttctctctcccctaaaaagttttactagggtttaagcccacattttttttttctgtaacttcaaaattttttttgtaactcattgggaagtggggttttcattctgaagattctcatttatatatgttaaaaatatattgcatggctttactcctattaatcaatctgcctcatgtcagtgatttttagggaaactttatggggccaagagcctatgtcccacacgctatcaaaatggaaaaataatgcaatagtagcagtgtatttccaaaaaatatataccaataaattgttctgagatatagcctgggattgggggttgggacagggaagagaataaacaaaactgcctgggtatttttggagagaaggaaaattatgttattttttcatgcttcac

SEQ ID NO: 833279 - DNA, 605 bp, Homo sapiens
atattcagcttgttcttcactgcatcaaattgctcttaatgtcttcaaacttgtaygtgaacttaagggacctccttcacacccatttgttgccctttccccagatcctttgttgggctgatatggacttagactgcagaatgagaaatcaatgagagacttgacagccagagaaagcaaacaaactcagtgatgtgaaaactgctgtcaggtcagtgtaacaagcagctctttctagatttcactgcactgcagtgatcagaaactggggtgggggggagattataccttagttctatgtctatagacaactacagattcaataatcagagagattatctcctgtacataacaatattctacaataagcactggcataagttcatttcttacaagtagaagtcaacataatgtaagctcacatttaaggagcatgttctgtgttgctaagaactgctcttatgccttcctcacttaatgttcatcacattcccatcagggtggtgccataaatattccattttatagatgtaacatttgcagtatagagagcttcagccacttgctaggagtctcagagatgatcaggtgatggaggcagaatt

SEQ ID NO: 833280 - DNA, 634 bp, Homo sapiens
ggatttgaattttgcaaatatgttttctcagtctgtgacttgtcttctttttctctggtcattgtcttttgcagaacggaagtttttaatttaatgacagcaagcttatttattaattatttcatatattgggtttttagtatcatatataaaaagtcattgttatacccaagtctatctaggtgttctcctatttatcttctagttctatagttttgtgttttaatttaggtctataatttatatgttgttattttttgtggagggtttaagattttgtgtaattcaatttttgcacatttgcacagttgttttagttccatttcttgaaaagaatatctctgcttcattatattgacttctctccttttttaaagatcagtataccacattcatgttggtctatttctgggctctattctgttctattgatttgtctaatctactctttggcccaaaccacactgccttgattaatgtagttttattgtaagactaaagctgggtagtatcaaatttctgacttttytttttcttcttcattattgagtcaggtattctgagtttttttgtctcttcacataaaccttaagtataggtttgtgaatatctacaagatatcttgctggaattt

SEQ ID NO: 833281 - DNA, 630 bp, Homo sapiens
gtagtaagttaaagagtggggaaaaaaaaacccatccatgttctatgttacagtaaataatttagagtcttagttttaaatgtgtaataatacaaacatraataacacagagtatgaacattctaaaaattccccttttccctttccacgaaggctcagagacagacaagcagcatgtggaggagataaaattagagagagttacaaagcatgagtgcacaggtgcttgtttgtattatttcaatttgcacatgccatctttgtgtttgtcaactcctgtgagatttaaccaggcatgatgctgaaaacaatggctgatggtgaaaccactcatttccatggagcttccattgaaagaagcctctgtctttttctttcaaagtagtcacattagggagacagtgcatattttaaggatgcagagattatttcacacatatttgagactataaaaaataccagtttatagactacacaaataccattccttgccctgtagttccctcttgctgctgatttaaagttttttttacccagtatgtatcacccatctgatttaaggtttattttcaaaagctttgcaacactccaataaaattacacatcctccaagaattgtgacaattctag

SEQ ID NO: 833282 - DNA, 608 bp, Homo sapiens
tgcgtagacatacaaagattactcttttatagaagcttgatcctttatgaaatctggtttgtgtgatcaatgaaagtactgataatattctcaacagacacttggcctagtgcttcttagttattaagaagacagttccatgagagtctttgctatagctgttggagtagatctttcttttgctcctcagagtgttccttgggttgtaggatcagcttcttgcttatgtagggacaggaactttagtcagagggtcagggagttatatttccggacaggatgctcaggggcccagctccaactacatacagcctgcatttagttgctttttgacagcaactgaacaggatagaattttgtttgtgtgtgtgtgtgtgtgtgtgtgtgtgtgtgtgtgtgtgtgttttaacttacatacactgtggccattcagccatcattgcaagggctttttccattcctacaagttagaaaggggaatcacagttacccaaatggaaaacttctagcttgagtgaataaaggaagatgtaaccaagtggatttgattaaggatgaacccctatttttgcagctccactggcrgggatatggaataaaacctgttt

SEQ ID NO: 833283 - DNA, 634 bp, Homo sapiens
aagaaataattagcagagttaacaacccagagagtggaagaaaatcttcataatctatacatctgagaaaatactaatatctagaatctacaaagaagcattaccayctcactcctccaagaatggccataatcaaaaaatcaaaaaaatatagatgttggagaggatgtgtttaaaagggaacccttttacactgttggtgggaatgtaaactagtacaaccactatggaaaacagtgtggagattccttaaaaaactaaaagtagatttaccacttgatacagaaatcccactattaggtagctacccagaggaaaagaagtcattaataggaaaaagatacttgcacatgcatgtttatagcaacataatttctactgcaaatatatgaaaccagcacaaatgtccatcaatcaatgagtagataaggaaattgtgatatatatatatattgaaatactactcagccttaaaaaggactgaaataatggcatttatggcaacctggatggaattgtagaccattattataggtgaagtaactcgggaatggaaaaccaaatattgtatgttctcttatatgtgggagctaagctatgaggataccaaggcaaaagaatgatacactggact

SEQ ID NO: 833284 - DNA, 540 bp, Homo sapiens
tgtaaagggaatgagatagaggactatattggattttattattatgaatataaattgacagatatacactaatagatactaaagtaacagttctagaaagcaagcattggcatttggttgaaatttgctgtcagttagatcaggtcaccgaagctggcagaacacaaagcattaagtcacagtacaaagggttaggtctgcaactggcagagtttcagcaagaagctgaggtagggctgcctggtgacagaaggcagctgcgctgagatacaaagctttggtagggtgtagctagctttgtcaattaggagaacacaaacctgaagctagagagcctcacaacagtgagacagtcaaagattatgttagggtgaagccaaagaagttaaacagggtcaaactacagctttgaatttaaatgttmacgtgggcacagagccagattatgaatagaaagagtactttgtagaagagagggagagaaagaggtgaggaaaaccaaaagctaagaatgaaaacctggtgatcaggattcttcaa

SEQ ID NO: 833285 - DNA, 587 bp, Homo sapiens
cgtcggatcctgccagtgaaaagaaagtaaaacagaggatgaggcaggaggtggtttatatagaagcacaaactgcgtcctagaagtaaggaaagtaaatcacacatcaatcatttgcagacattcctgagcatctactatatcccagactccagaacagatcctgcaaatacagagaggacagaagcccctgtactcaggagctcatagccaggtcctggaaggatgtctgtaattattgcttgcttatcatctattcttctcattttcctctagttcgtcctgccccttcctcctttgagtctatatggttctaacagaacaaactctatctgacccccaccccagctcatgaccggaaaatcaagccacggaaataaaacagcatcagcaaagacagttttctaacgatatatttggagcccctagagtctgccaagtatgaagccatttctcctggacccctttgttatacaagccagtgagtttctatgttcatttaargagtttgagtagggtttctgtcacttgaacatacggctcccacataatacagagtatcataaataccatgtggacatctacct

SEQ ID NO: 833286 - DNA, 503 bp, Homo sapiens
tgatacatcccttgtgctggctgtacagaaggtgccagtgaatatttgttagataaatgaattaatgaataaatacagaggagttggtagggaaaaggcacaaaatgagcagaattggtgctaatttatgttgaatcagacaaatgttcagcttatgccccaaatttttacaaccatctcccttttaagtcactgaacaactgctaggagcctctgagccatgctaccccagaataccccagaatactcattcctattcaaatatttggttttcagtgttacaaggacaagtattcatttggaccagagaaataggctggatttgcactcatctgtcacagtgccctgaaatcagcctcaaatgattcacagccctcttgaaaacatctccaatctcctaagagataaaaagcctcactcattttcccacccctgacccaccaaccagcttccatccctaaacctagagsgaaattatgatgttctgtctcctcctcctattt

SEQ ID NO: 833287 - DNA, 636 bp, Homo sapiens
ataggttcaaaggttacccaaagagttttcaacctcaggtatccaccattctgcttctctggagccacactcagaccagaggtgtgggagtgaacattcctcagtctrtactattaaatggaatcaaatatttagatgcagatctaagtatatatacaaaatattttttaggaatattatctgttattatacatatacttaacaagaaaaggtaaatacaaattatgcaaattataaattacccatttttattaatttaagatatgtaaaatgtcactagtattttttatgttgtgtgtaatgtgtgtataaataaaaatgaataactgttttcaaaccatcattcaagatttcaatcccttagcccaatttttctccttaaaaggctcaaacctagtcaactgagaattcttctatgaaggagtgtttcagtaataccttatatgtacatatatatgatgctgatggtgtaatattcatggtaagcataaaattccataataatagacttcaaaagtatttgaataatttttatattgatagacatggaaatggaatagagttaatgctcagccctttattagggaattagaactttgctttaaaaatgttatgaatccaggtagaaaaaaggca

SEQ ID NO: 833288 - DNA, 613 bp, Homo sapiens
atattgagatgcagtggtgagatggaacataattttcttggtcctaatttggagagaattcatcagtgaayctatcaaaatctcatgctttctgttttgaaagcctttactggctgattctattcctttaatggatctaggctgattaagattgcattttccttcttgtatgagttttggcagatgtgtctttcaaggaattgatacctttcatccaatttatcaaatttataggcatagagttgttcataatatttatttatttttcttttaatgttccatggatctatagtagatgtataatgatgatttctttcatttctggtattagtaatttgtgtttttcctctttttctcttagtttgtctgactaggagcttatcaattttattgatctttttaaaaaccagcatttgctttattgattttctctcttcatccccagttttcaacttcattgatttctgttctaatgttttattatttcttatgttccactaacttttgatttaatttgcccttttaaacatgtaagtttagaatactgattttagatattttaatttttcttatatgctataaattttcctctaagcactgttttcactgcatc

SEQ ID NO: 833289 - DNA, 613 bp, Homo sapiens
atattgagatgcagtggtgagatggaacataattttcttggtcctaatttggagagaattcatcagtgaacctatcaaaatctcatgctttctgttttgaaagsctttactggctgattctattcctttaatggatctaggctgattaagattgcattttccttcttgtatgagttttggcagatgtgtctttcaaggaattgatacctttcatccaatttatcaaatttataggcatagagttgttcataatatttatttatttttcttttaatgttccatggatctatagtagatgtataatgatgatttctttcatttctggtattagtaatttgtgtttttcctctttttctcttagtttgtctgactaggagcttatcaattttattgatctttttaaaaaccagcatttgctttattgattttctctcttcatccccagttttcaacttcattgatttctgttctaatgttttattatttcttatgttccactaacttttgatttaatttgcccttttaaacatgtaagtttagaatactgattttagatattttaatttttcttatatgctataaattttcctctaagcactgttttcactgcatc

SEQ ID NO: 833290 - DNA, 612 bp, Homo sapiens
atatatgtatataaaatgaaatatactattcctaatatgtgagaaaaactgttatctcttaaattaagaacaagtagaatacatattttttccatatttagtattcaytttctgaaattctttctttcttcacgaagatacaagtttctaatttatattatccttatctcagacacactttttctaacatttcctgcaagacagctctactggtaacatttttccttaatgtttgtttgtctaaaaagttatttaacctttctcttctcttctaaaggataatttcacaagaggtaaagaattctacattggcaagtttttgttcactcagctctttaaatatttctccactctcttgttctgtttgcatggtttattaagataagttaaatgtaattctactttttgctcctgtatagttaagttgttttattcctctgatttctttgagtatgttttctttgtctttgatttttctgaaggttgaatataatatgcctaggtgtccatttttttggcatttatgtttctcggtgcttggtgttttttaccttcagcatttagaaaaaattttattgtgagaatttccatctctgcttacattattcctgt

SEQ ID NO: 833291 - DNA, 575 bp, Homo sapiens
aagagagcattcttgccttgttgctgatcttagaggaaaagatttattttttatcatttgtatgatatttgctgtgacttcttatatggctattattatattgtggcagtttctttctattcctagtttgttaagatttttcatcactatagggtgttaagttttgttaaatgctttttccatatcaattgagatgatcatgtagtttctttattctgtaaatgttatatgttacatggattaatgtttatatgatgaaccatccttgcatttcagaaataaaatcctcttgtctatggtatataattcttttagtatactactaaacttggtttagtagtattttgatgaggatttttgcatcaatgttcataaaagataacggtctgtatttttcttttcatgcaaaagtatttttatctggctttggtattagggtaatactggcctcataaaatgaattaggtgaattaaaaagtgttacctcytcttcaatgttttgaaaatttgagaaagattgatatttgttctttaagtatttgatagaattcaccaacaaagccatcaggcccttt

SEQ ID NO: 833292 - DNA, 651 bp, Homo sapiens; identical to SEQ ID NO: 821844

SEQ ID NO: 833293 - DNA, 651 bp, Homo sapiens; identical to SEQ ID NO: 821845

SEQ ID NO: 833294 - DNA, 624 bp, Homo sapiens
gactctcagtaaagccagtactgtccttggtaggtccctgcctcttaaggtctgaatgcttcccttagtgttgagactgcaggagaaaattgtctccccaatcccactcaggggcatcagyggccttcacatccccatgcctgtagggaattgacttttttgagggtttctgcaagtttactcaatgtagtgtagtatttgctccacctttatttctggttaataaagtgaaaaatgagtgttctaatttgcagaagagaataggagggagatacaatcaggttcttacttgtgaaagagggaagaaactctctgacaaacagaaaacagttggttccaggataagcctcagggtaagttataaaagttctcattccaatttgagcttgtttattgttttaatggagtaaatatagattaagcttcatgaggaaagatacatgtcactattttcagtcttttttgaaagttcattctgaatttatccctgcctcatttcaaatggatttgatacagcccacaaagatacacctacaaagattaaaaaataaaacaaaatacacaaggagatgaggtggaaagaaaagaagcagggagtatggtcagcacatgaaacattttcta

SEQ ID NO: 833295 - DNA, 543 bp, Homo sapiens
gagccaagatcacaatactgcactccagcctgggtgacagagctagacactgtcaaaaaaaaaaaaaaaaaaaaaaaaaaaaraaaaaaatcactgaaaatatgttttcagtattctttacttcagaagaggccaaatctagaaataattcagatttcagagagagagaataataactttctaacagaatgaaaagggattgctacttgtgttatatatacacaaggcactgtagatacttggcatatataatttcttttttagcaatcgcttttatttttacatttaatagagaatttcatgtggattcattatgttttaaaagaagagaaagtgagtgagagaataagagagactaagaagaattatatgatccactttaaaagctaccaagttaacgatgaaatttcattttctttagtactctaaagaattagaaccacagaaatacaaatctcaccttcttaattagagcaaattaattactaaaaataataaaaacaatttgccatagtttcattttgcctaaaattacatattagt

SEQ ID NO: 833296 - DNA, 491 bp, Homo sapiens
ctttgatgcttagaaatttcttctgccagataccccaaattatctctctyatgttcaaagttccgcagatctctagggcaggggcaaaatgcttccagtatctttgctaaagcatagcaagagtcacctttactccagttcccaaaaagttcctcatctccatctgagaccacctcagcctgaactttattatctatatcatgatcaacattttggtccaagccattcaataagtccctagataattccaaactttcccacattttcttgtgttcttctaagccctaccaaactgttccaacctctgcccattacctggttccaaagttgcttccacattctcaggtatcttatagcaataccccactaccttggtaccaatttactgtattagttcgttctcacattgttataaggaaataccaaagactgggtaatttataaagaaaaggtttaattgacttattgttcctcatggcttggaaggcctc

SEQ ID NO: 833297 - DNA, 573 bp, Homo sapiens
aacccaggagccagaataagacatatggagcagaattgcccccagtggatccaaagaagtgaaagtgagaaataaatgctagttggccatgtgcagtggctcacacctgtaatcccagcattttgggaggccaaggggggcggatcatgaggtcaggagttcaagaccagcctgaccaacatggtgaaaccccatctctactaaaaatacaaaaattagctgggcgtggtggtgggtgcctgtaatcccagctacttgggaggctgaggcaggagaatcgcttgaacccaggaggcggaggttgcagtgagccgagattgcaccaatgcactctagcctgggtgacagagtgagactccgtctcaaaaaaaaaaaaaaaagagagaaataaatgctagttgctgcatgccactgaaaatctgcagttgtctgtaaatgttacaaaatttgggtgatataataartggtacctacaagtagggtgttgatgaaacaaaacctgaactgtatggcattggttttaagacgtagtagaaggcagcaaagatgctgttataggacatatatctcgtg

SEQ ID NO: 833298 - DNA, 523 bp, Homo sapiens
tggtgcattgcctgagttgagaaaaagcttctttcwtccaactacctgcaggttaccagctggaatagcagacagaagccaaaactgaacttacgtcagatcaagagaaggaaagaaaatgttggcacccagctggttaaaagagaaggggagaataaacaccttttcatgggctctggaaagaaaaatatattcaaaactcaccatatgattgaaatggaagggtaacagtagattattttcaaagaaactacatttctgtttgtttgttacatgtattgaggcatatatgtttacaaatagaaatatactccagtcttcccaggtgtgaagggaatgcataaggcaggctttgtgcaccttcacaagacaaagttgctgtcaacatgagaatcttaatccagtgctccctgatgaacttggcacaaaatcacagctccatgagatttggcttcctgatactgagaaagggaagggctgagcctaggaaagaccagggtcactacatatgggttccacataa

SEQ ID NO: 833299 - DNA, 523 bp, Homo sapiens
tggtgcattgcctgagttgagaaaaagcttctttcatccaactacctgcaggttaccagctggaatagcagacagaagccaaaactgaacttacgtcagatcaagagaaggaaagaaaatgttggcacccagctggttaaaagagaaggggagaataaacaccttttcatgggctctggaaagaaaaatatattcaaaactcaccatatgattgaaatggaagggtaacagtagattattttcaaagaaactacatttctgtttgtttgttacatgtattgaggcatatatgtttacaaatagaaatatactccagtcttcccaggtgtgaagggaatgcataaggcaggctttgtgcaccttcacaagacaaagttgctgtcaacatgagaatcttaatccagtgctccctgatgaacttggcacaaaatcacagctccatgagatttggcttcctgatactgagaaagggaagggctragcctaggaaagaccagggtcactacatatgggttccacataa

SEQ ID NO: 833300 - DNA, 532 bp, Homo sapiens
atcaaaggctccaaaatatgcacacaagacaagtttaaaagccctcatcattgtgaaaatttcttgtgatttttattttaattgggagagaaggaggtgtggacaggagatrctcatggctattttttctacagatcaaatccatagatctacattgtattgtttttctcttttcagaactttagtataaattcattacttgtcttattattgaaaaatattattcagacatagtgaggtactttgatgtagttctagtggctatatttgttgtttcttagaagacttagctgtctgcaggggaagtaaaaataatggaattaagcagtgggatcatcccccttcaaaagtcttacatttattagcatatatttatttttttaagacagaagtccacaaactatggcataataaacaataatgctattctggaacatggaaagtcctggactggtcatcagatataggctctagccttgacttcaccagcaactgggcgtggggccatagataactcatttaactttcatga

SEQ ID NO: 833301 - DNA, 643 bp, Homo sapiens
ttcccaaatgcattttgaaaatgtgttgttcctmcctgactgtggcttattttctcagatgtactcctcggcacttcccggcccagtctgtgatgccaacgtttttgtttgtttgctttgcttgtgaccgtggcgccctctactgttcttcagagttgctaaagtgcctttctcaagaaagttccagattgaaaacttaattaaaatagaaaaaaaaaaggttttctgtagctgaaattagctattaaaaagctaagtgcaattcaaaggaaaacataccttctgtttatttaagacaatagcaattttctttttcatggaagacaaaccttctaagcttcctttatcggttttgcttggtcttaaaaaacccagtctcacccactgagtcatgttggaaaacactggatgttttttacactagatatttggaatcgatctagcagaagagtttcagggtcctctcagtagtttttgaaagctgtttcctgaatcataaactttcatagcttgaagacagttttaaaattgtcaggccaatcttttcagttttgaaaccaagattctgagaagctagaagagtttccaaaatgcacaagcagtgtcaaagccagtctgtgaatttcagatgtgaacctaattc

SEQ ID NO: 833302 - DNA, 500 bp, Homo sapiens
aggtctaatatacataatctatatggaatataaacaattcaccagacaaaaaaacacataacctcatcgatgagtgggcaaaatacatgaacagacacttctcgaaagaagacatacaaatagccagcaaacatatgtaaaaattctcaccatccctaatcatcagaaaaatgcaaatcaaaaccacagtgagatagcatctcacaccagtcagaatggctaccattaaaaagtcaaaaaacactagatactggagaggctgcagagcactgggaatgcttctatattgttgggaggaatgaaaattagttcagccacagagatttttcaaagaacttagaacagaattgccatttaatccagcaatcccactactgagtatgtgtgttcatagcagcactattcccaatagcaaagacatggaatcatcctcrgtgccaatcaatgtggactggataaagaaatgtggtacaaatgtaccatgaaatactatggatcca

SEQ ID NO: 833303 - DNA, 603 bp, Homo sapiens
tccaggttcttccatgttacaaatgacaagatttccttcatttttaaggctgaatagtattccaccgtgtacakatgccacacttttaaaatccatttatctgttgatggacacttaggttgattccttatcttggctattgtgaataatgctgtaatgaacataggagtgcaaaaaatatcccgttgacagattgaattcaattcctttggatatatgtacccagaagagagactgctggatcatatggtaattctatttttagttttggaagaatctccatactgttttacataataactgtactaacttacattactaccaacactttacaaggtgtcccttttatttgcatccttgccaataccttttatctttcatctttttgatactagccattctaaaaggtgtgacatgatatctatggaaccacaaaaggtctcaagtagccaaaataatcttggatacaaagaacaaatctggggtcatcacacattcagatttcaaaaatattataaagcaattataatcaaaacagcatgacagtagaataaaaacagacacatcaaccaatggaatgaatagaaagctgagaaatagact

SEQ ID NO: 833304 - DNA, 603 bp, Homo sapiens
tccaggttcttccatgttacaaatgacaagatttccttcatttttaaggctgaatagtattccaccgtgtacatatgccacacttttaaaatccatttatctgttgatggacacttaggttgattccttatcttggctattgtgaataatgctgtaatgaacataggagtgcaaaaaatatcccgttgacagattgaattcaattcctttggatatatgtacccagaagagagactgctggatcatatggtaattctatttttagttttggaagaatctccatactgttttacataataactgtactaacttacattactaccaacactttacaaggtgtcccttttatttgcatccttgccaataccttttatctttcatctttttgatactagccattctaaaaggtgtgacatgatatctatggaaccacaaaaggtctcaagtagccaaaataatcttggatacaaagaacaaatctggggtcatcacacattcagatttcaaaaatattataaagcaattataatcaaaacagcatgacagtagaataaaaacagrcacatcaaccaatggaatgaatagaaagctgagaaatagact

SEQ ID NO: 833305 - DNA, 612 bp, Homo sapiens
tatagaaattctacacccatattaaagctgcattttcaatacacgataaaaaggtattttgcagaaagtgcaaggcttctatgcctgctcacatagctgcagtgatggcttcatgaacatcgttttctttttaacatttgtctttacactgaattcatttatcttcaaatgcaggcaaccacagctacagatctcaatctatagtacgtaccaagcaattcaactttttcttatattttcatgacttttctctgcttcttgggagcactaccagcatgactagtggtacttcatatgggccccatggtgttattccaggtttacagtattgcactaaacataataaaaaatatatgagaactatgagagataattttttaccataatatgcaatttactggagaaaggaattgctcacacagaaaggtttagcatcactcagcattttaagctggcacaacacttgaattagcaagaggaggtggcattaaaattattacagttgtgtagtatggacagttaattttatgcagttatgatttaatastgcatctttacatttgtttacatttctctcaactgtgaatggtaccgtgtatggtctaagtgtgt

SEQ ID NO: 833306 - DNA, 614 bp, Homo sapiens
aaatttcctagaattttaaaagaatatggtcttaattagtgttataaactgacaataattagttgtggcatgaaacagctactttaacayattatgaaatatgtttattcattctatttttgttgttgttttgacggagtctccctctgttgcccaggcaggagtgcagtggtgtgatctcagctcactgcaacctctgccttctgggtttaagcaatcctcctgcctcagcctctcgagtagctggtactacaggtgcatgccaccacgcccagctaatttttgtatttttagtagagatgaggttttcccatattaaacaggctagtctcaaacttctgacctcaggtgatctgcccacctcgtcctcccaaaatgctgggattacagacgtaagccactgtgcccgaccgaaatatgttcatttattctatgagggagtttgtgcagagtcgataacatgttatgcaatatttaaatcagtattttccaatagaaatataatgcaaaccacatatatgcatttttaaattttatagtttctttactaagaatagtagaaaatatagaggtaaattagatttttataaattttatttagcacaatatgtaaa

SEQ ID NO: 833307 - DNA, 450 bp, Homo sapiens
aagactggcctcccttcgcttccccagccctgggggagccctccgatggctcactctcagggagcacagagcgcagctgacagccgtgcctgaagtttacaaggtgtagaggaaaaactggctaatattgatttctgaaacagatacaggaactaatggcagaatttgcttgactgtgggtctcctgtggctactggcagaaagggaggacagaggcaaagcatttgcgaaaatattctcctgttgtccttcccagccttagtctctggctgcagctttcttggtgaacactttggcctaacatagaggcttcctgattgcarggcgggggactcgacagagggcctgaggtacaaaggggcttctgcaaaggttctgcttcagctgttccaaactgttctttgatgcttattgtctgtatggaaaggacctgcacggaaacgtccattt

SEQ ID NO: 833308 - DNA, 599 bp, Homo sapiens
gccttaaaaaaataaagctgagagtgatacatttaggatcaggatcacttaaggttatttttagcttataagcttgaggaggaagaactcacaatattktggccagatgaagaagagaaactgaaaggaccatcttatttttccccactgactgccatcttttgtcccctaattctgagaaggccatctcctcatacttaatacagaaaagaaagctcacggatggttttgctttcccttttagacaacagaggaaacttccaagccaaaagatgactaaagaaatacaagttaaggtatctggtaagttgggtgtttatttgtaaatgaagacaactgtatcttctgccaatttatgtgttatagatgagagaagtgaagtccacctcttgagtaattcatgctcactttacagtattggcatgaaatgcatactgcaagatctacagagtaattggtcattctctgaaagcactaaatgggatgagtttgctattgaaatgtttaaaaaccttaatcttataattaaaagcttttaaaaatattaggccaggcacttagaatgaccatctgaggctagttgaatctttgaaatccaa

SEQ ID NO: 833309 - DNA, 632 bp, Homo sapiens
ataacagtgtaaacatggactaatataataataaataagagtgcttctatctattttttatgttgatgactcgttatgaacaataacctgcattgaaaggagaaaacaacaatctaggaaaggaccttgtattatttgatttagatgaaaaataattatttaaattgtcttttttttttgcaactaccatattcccatgacaattttaggactctcctgatcatggatatgtgaaatacaatctgaaggctgttaggcttacactgattcttttaggaatttcagaaaaaaagaagtaccttacttctttagtaatacctctggttaaataaagtgtatttgcaggagagaaactggaatgtaaactccatgggatgaaactggagtttgtttgtttttttttaaaaaaggggttataatagcaagtgttacaaacatgagtgtgaaaaccatacttccaacccacactttcaatattagcttgaaacaataattcattaaaatggtcctttaaattacccccctcatattatttgcccacaagaaatcagattatgataaatacagagcatatgagtaactgtctcatgtagaaggacactgttgtmttcatacctttcccgatggtttat

SEQ ID NO: 833310 - DNA, 458 bp, Homo sapiens; identical to SEQ ID NO: 825068

SEQ ID NO: 833311 - DNA, 689 bp, Homo sapiens
ttaaaattctggatccacaaaacctcacatatcaatattaatcttgaatgtaaatgatctaaatgcccccacttaaaaggcrcagagtggcaagttggattagaaaagcaagacctatccatctgctgtcttcaagagaccaatctcacacataaggacacccacagactcagtaaaaggttggaaaaagatctatcatgcaatggaaaacaaaagagcaggggtcgctatttttatatcagctaaaacagactaaaccaataacagcaaaaaaaaaaaaaggacaaagaagggcattatataatgataaagggttcaattcaacaagaagatgtaactatcctaaatatatatatgcacacaacactggggcaacaagattcataaaacaagtacttctacatctacaaaaagacttaagacagccacccagtaatagtggaagactccaacaccacactgacaacattagaaagatcatcaaggtagaaaactaacaaagaaactctaaactgacatttgacatttgaccaactggatctaatagacatctataaaatacttccacctatcaaccacagaatatacattcttattttatgttctggggtacatatgcaggatgtgcaggtttgttacctaggtaaatgtgtgccatggtggtttgctgcacctgtcaacccatcacc

SEQ ID NO: 833312 - DNA, 604 bp, Homo sapiens
ttccttttcccaagattgtcagttgttgaagaaatagggctatctcattgtttacctccctcttctcttctcagggagactgctgctttaaaagaaggaagagaaaaaatatagttytatttccctgaacctgttgcacctgacattttctcttagcagcatgaaacttatggatggctgacaatgaaaaatggatctgtctggctgctttccctctttccttgcactttaattatgttgctagagctaacagactaataaattccacctgctggctcttaagactcagtgaaagagctagcattggtaatgcaccatagaggtagagaatgtacactttctgcacggtaagtgcatctctgtatggaactatatagtgaaatatcaactaagtaaaagaaaatataatatttgaagaccattcccaaaatattttcaatagttcatattagccaacagtgtagcactcaacccaaggagggttccttatggatgctttctttttcttttttaaagttgcttgtttgttctctttagtttcaaataagaggttgacgcatcttgatgcatgatgagaagcatgggctgtttggatcctaacaac

SEQ ID NO: 833313 - DNA, 577 bp, Homo sapiens; identical to SEQ ID NO: 828206

SEQ ID NO: 833314 - DNA, 632 bp, Homo sapiens
tgcagttgaattcattttgcttcaggagtttgcatttgactttttttttaacttctgattccatatgattctatacatttctttcttttttttttttcttttttttttgagacagaatttygctcttgttgcccaggctggagtgcaatggcatgatatgggctcaccgcaacctccgcctccagggttcaagcgattctcccgcctcagcctcccgagtagccgggattacaggcatgagccaccacatcagctaattttgtatttttaatagagatggggtttctccatattggtcaggctggtcttgaactctcgacctcaggtgatccacctgcctcagccacccaaaatgttgggattacaggcgtgagccactgcgcccagctgattctgtacaatttttaaaatattttatgagacgtgtgtgtgtgtgtgtgtgtatgtgtctgtgtgtgcatgtatatttggcttggagtcagcatacctaaattctaggtctagtttagcttctaccacttaatgatggtatacaaatattgcaatctaagaattctgtgattctaatcatgttacataaccttgtctatttccttgtttatgtatgaagatacagtttacctaagagtgta

SEQ ID NO: 833315 - DNA, 567 bp, Homo sapiens
aaaaataatgctgagagtcctaaaagagggaacactcccattctgctctttaggtacttccagttccatgctccttctttcgatattagcctatatcatttttttaaaaaatgtgtatataccactatctcttagctcaacaactttggtcattggattcctattatgtttaatggggattatacctgtcctcgtggtgtgttccagaggtagtcctctcttacctacactgcaacctacttacagaatattctgtaccaagttgtccttcacagtatttcatttctcagcaccaggtcttcagttttagctgcgggttatggctcccttctttgctggagattaaagatgttagagcagtcagtaagcagctcgcaaatgaggctatgtgaggtggcctagagaggatgtagtagaggatgaagaagcagccacagggctgatccttgmtgcgccccaaccacaaaagaccgaatcagcattgaatcagataagagaggaaccctgtggatggtggcacccaagggaacagagtgttgtcaagaatggagaagtcaattttgttca

SEQ ID NO: 833316 - DNA, 628 bp, Homo sapiens
aatcattaaagggggaaagtagattgcaagaaaagagttctcagaaccaggtccttggtcactcyggaatctccagatctttcaaagtacgagaactcatgaaagaagacttaaaaagaggaaagtttctttggtacaaggaaaaccaggatattacgggagtgtgatgtcatgaagctaaaagaagaaagcatttaagaccaatgaagtggtcaactgtgatgaatcttgctgagatgttaaataaatcacttaaatcacttattttttttagtatgaaggtcacaagacaaacatatttaaagcaataatgccacaataatataatgggtaaacaatacaaaaagacataaaattgtgacactaaaaccataaaatgtgtgtgaggggatggagtaaagttgttaaatatttttacgcaatcaaagttaaggtgttatcagctaaaataacttgttataactagaagatgttttatgtaagcttcatggtaaccacaaagcaaaagcctgtagtagatacccaaaagataagaagtaaggaatcaaagcataatgctagagaaaactatctaatcacaaagaaatacagaatcagaaaaaaaaggaacaaaagatctccaaaacaa

SEQ ID NO: 833317 - DNA, 551 bp, Homo sapiens
tatgtcagtcattttttagaactaagagcagtaaaatcaaaacaaaaataaaagcaaaatcttgtccttgggggtasataccttgtattgtagacagaaacagaaactaaaataaaaagtaaattacataatatatcagaaggagataattgctatggagaaaatcaagtgagaaagttggatgagaatgactgaatactgtgtttcgattttaacgagcaaggaaagtcttactgggaaggtaataaagaatccaggtatgtgggtatctgatgaggagccttctaggcataaagtggagcagatgcaaagaccatgggcattattgtcactgacatattgagtgacagcaaggaagataagcatggccagtgaagagtgagttctgccaagaataaatatgagatgaagtcacagaggcaatggacatatgtgtcaccttgggctttgaggcaattgaaggtcttcagattttatttgaagtgaggtttccatgtaaattcttctttatcaatcagtttttttcttatataccacacgtcatttcaata

SEQ ID NO: 833318 - DNA, 572 bp, Homo sapiens
taatataatctcctcttcttttggatattatgaaaaatatcacattggtgtgtacacctgctgcaatattgggagtaacatcatcccctcctgcctggataatatgaacagtayaatagaggaatgtccaccctctgtgatattgcgagtaatatcgtcttctttctccctggatattacatataatatcacggtggggtgtacacaccctgcgatattgggagtcatatcatcccctccccttctggtattacaaaccatatcacaggggatgtattcccactgcgatgttgagagtaatatcaactcctcttctcctggatattatgaaaaatgtaacagatggtgtacaccttttgtgatattggaggtaatattccctccccctgtgtatattatgaacaatattacaggaagatgtacaccccctacgatattaagagtaatatcatctcctcctattatagattttatgaaaaatatcacaggggagtatacacccctgcgatactgggagaaatatcatcccctatttttctgatattatgaacaatatcacagggggtgtatac

SEQ ID NO: 833319 - DNA, 572 bp, Homo sapiens
taatataatctcctcttcttttggatattatgaaaaatatcacattggtgtgtacacctgctgcaatattgggagtaacatcatcccctcctgcctggataatatgaacagtacaatagaggaatgtccaccctctgtgatattgcgagtaatatcgtcttctttctccctggatattacatataatatcacggtggggtgtacacaccctgcgatattgggagtcatatcatcccctccccttctggtattacaaaccatatcacaggggatgtattcccactgcgatgttgagagtaatatcaactcctcttctcctggatattatgaaaaatgtaacagatggtgtacaccttttgtgatattggaggtaatattccctccccctgtgtatattatgaacaatattacaggaagatgtacaccccctacgatattaagagtaatatcatctcctcctattatagattttatgaaaaatatcacaggggagtatacacccctgygatactgggagaaatatcatcccctatttttctgatattatgaacaatatcacagggggtgtatac

SEQ ID NO: 833320 - DNA, 306 bp, Homo sapiens
gcagggccatccagccacggctcaggattctgcgcaacaaacaccttgaacccactgtaattagcaaaatgtaccttttaacccaatcctgagtcctgaagtgcaaatataaattccaattaacagccacatytacttggcaagctatgcttgcatgtatacatttttaaaaaattacttaagataaatgattactggaactcctcattagttttaagcagaactaaatgaatacagtattaaaaaaaattaacctgccttcttgaaaatattatactaacttcaaaataggagaggcttcgtgtt

SEQ ID NO: 833321 - DNA, 635 bp, Homo sapiens
ggggctccactgattggatcctggatcctcattcggtccccgttccccagccccagcacttaggttcccccatgttgcacacgtgggttgtctgggcatgctcaggttatatgaccttcagcctgggggtccacggcaactgaagaacaagtcacaactccattacacggatgttgaaccagattggccagatgtggctataagctgggcatggtgaatcctgcctcagccagaattatgtgcaaagttggaaatgaatgtgttgccatgggctgagcccacgtggctgccgggttctgggggacgtggacccattttgtgtacgtggctcatgcatcttgccaaaaggttcactggtgtggtttatcctcagcacatgtccagggaggccaagtgcagtcactccacagtgcttttctgagcctgcagagccattgccacacccgggaggcctggacacccgcagccctcatcaaatcagttctcacacctgggccttcattattctcagtctgtgtcccatgtgccacacaggtgggttgctrggagttcagctgcagacactcccgggtgcagtgttcaatatgagtgagggaaactgaaaaaggaaatgaagaaggggaaggagtagcttc

SEQ ID NO: 833322 - DNA, 575 bp, Homo sapiens
gcctatacacatgtatgtcttgcctctattaaaaatgtctttgaagcatattataaaaagcctaattgcatgtcatcaatgaagatatatttaattccaaaactatatatatacatatatatatatatgattatttttacctatggaaagaaaaatactgcttttcccagatatacattattacagttaaataaagcaaaggagcaaatgatttctaaagaacattgttcaagaagagtaacaacagattctctgcaagataataatcttccaaatatgtttatttcactaagtaccatgattcacacatctcttgggtagtgcacttacttataatgaagaataaatcaggttaaaattactgtaaatcaagtttctgcagatgaatttctctagctgcagaaatgctaatatgaccacctgcttcattttatcaagctggttttcattaatctacagatgttatttttccactgcatactatttgagaaatgattgtgattgggtggctgtcactttgacagtggagaagccacaccacctgtttgytgggaaaatacacaaagtaatgtttc

SEQ ID NO: 833323 - DNA, 584 bp, Homo sapiens
ctcttttacactgcggttcttttctagaaattggttctaaagaaatatttgtgaatgttgcaaagatttccctataaatctgttcaatgtgtgttgtcagtaatatgagaaaactgaaaataacctaaggcttgcatgtgagtgatcagataactatggcatttctgggactaagagggatcattttctttttctttgtacccttctatattatctacaataagcagctattgatttttatcagttaaatacatacattttattttactaaaataaattagtggtcatcctgattacagtaataaatttatcaaatgcattttatttcattccctcctgagaccccattaaaatgacagaaaagggggtgttttggcataaacctacaaaaacaaaggaaaaacaagggaagtgacaagagccacaaacttttggaagctggaaagcacctgagtcattggtaacagacctaacaggatcaagccgaatcytgaaccgacagtggggaaagccaaacagcagacacctatacagcacagagactcccaaagtctcaggaattaagtgcaccaggcacctctgaa

SEQ ID NO: 833324 - DNA, 630 bp, Homo sapiens
tgcttaatagaagaaagctggatcctcctatctacttctgcatttkttttgttatgatagcatttgtcatttagcctctggaaaattccactgcacattcatgagagaatgaatagaaaaagtcaaataacatttcagtattattacaaaagcagttttgatcttgtggactctatgaaaaggacttgtggtgggggaggtccctaagcatccccttgtccatactttcagaagtgctggttttgagagtcataaatttgtatttaaaaaaacaaaaagaaaataaaattaaactatgtttcaggtttttattctaaacgtgtatctatttttatactcctataggagtcgttctcaacttttagtgtgcttaagaatcatttaggaggcatagttaaaatgctgatttggcttctacccccaaagttgctgattccttaagtttgggctaggacctaggagggtgcactttttaacaagttctcactccagggctctatcccccggataataataatccatgccgcattatttgagaaaaaccattccaaagcaaaaaatatcatggatagtttacaaaactaaagcatttcagtaagatgaaattttaaattttgaagtaaaagtatc

SEQ ID NO: 833325 - DNA, 630 bp, Homo sapiens
tgcttaatagaagaaagctggatcctcctatctacttctgcattttktttgttatgatagcatttgtcatttagcctctggaaaattccactgcacattcatgagagaatgaatagaaaaagtcaaataacatttcagtattattacaaaagcagttttgatcttgtggactctatgaaaaggacttgtggtgggggaggtccctaagcatccccttgtccatactttcagaagtgctggttttgagagtcataaatttgtatttaaaaaaacaaaaagaaaataaaattaaactatgtttcaggtttttattctaaacgtgtatctatttttatactcctataggagtcgttctcaacttttagtgtgcttaagaatcatttaggaggcatagttaaaatgctgatttggcttctacccccaaagttgctgattccttaagtttgggctaggacctaggagggtgcactttttaacaagttctcactccagggctctatcccccggataataataatccatgccgcattatttgagaaaaaccattccaaagcaaaaaatatcatggatagtttacaaaactaaagcatttcagtaagatgaaattttaaattttgaagtaaaagtatc

SEQ ID NO: 833326 - DNA, 630 bp, Homo sapiens
aggtgatgaaataatctgcacaacaaacccgcatggcccatgtttacctatgtaacaaaccaaaaaaaaaagaaagaaaacataccctcatctgtttgttctttgagtctcagaataagctcacttgtgttaaatccctggtggatgtgaggttagtttttatctaattggtctcaacacctccactctggctgtaagatttttatcctttttccatctctaatttccgcaataccccaaatgtgtctgaacatcctctgctggattttaagcagatgcttcggatttcatgaagcacatttacatttttcgacactgttgaagtgtctgggcaatttaggcacacatgccataatttttcagcttgcaggggactgttaaatatttccccaaagagtctccaaagagcagaatgaatattctgaatattccaggacacactggtgagcatttctcccagttcttgtcccggctggggtctgcattggaagaagacaggctcctgtcagtgaaataagactgctctttatttyactaaagcattgctgactcacagtgcttctcctgctttcccaccttctattctctcatttgaatttggtccggattcagggggtgggagcaagggaa

SEQ ID NO: 833327 - DNA, 554 bp, Homo sapiens
agtattaggttagatttacagaaatctgatatattagaaattgggctataaaaaagtctagtgagggagaagactcttaattcctcagcgataagcattattaacattttggaagcagtacatttacatattcccaaggaagttctttaagagcatattctttttttgttgtttttagaggcagggtcttgctctatggcccatgctgtggctctgtgatggctcactgtcacctcaacctactgggctcaagttctcctacctcagcctctcgagtcactgggactgcaggtgcatggcaccacacccagctaattttttttttttttttttttttttttgagacagagtctcgctgtgttgcccaggctggagtccagtggcgtgatctcggctcacttcaacctccacctactgggttcaaaagattcttctgcctcagcctcccgagtagctgggactacaggtgtgtgccaccacacccggctaatttttgtwtttttagtagagacggaatgttaccatattggccaggctggtctcgaattcctgac

SEQ ID NO: 833328 - DNA, 579 bp, Homo sapiens
ttgtgtgcatctcccccattgtactttttycccccaaacctttatctttctttttcaacatttgataactttgataacattctttttttttttctttctttctttttttttttttaagacagaatctcaatttgttgccctggctggagggcagtggcgcgatctcagctcactgcaacctactcctcctgctttcaagtgattctccttcctcagcctcccgggtagctgggattacaggctcacgccgctacgcctggctaattttttgtatttcagtagagacagggtttcaccgtgttgcgcaggctggtctagaactcctgagctcaggcagtccacccacctcggcctcccaaagtgctaggattacaggtgtgagccactgcgcccggccttgataatattcttaaagattaaacatggtatgttctcagcactatggctggccacttaagtataaagtgtgatcagagttaatccatcactggagtgtatatatcagatgctatttccagtcatataaccttatattttcccttagatttgtcaccttcaaaaagcaaatgcttgtttttg

SEQ ID NO: 833329 - DNA, 639 bp, Homo sapiens
cccaatatggagaaaccccgtctctactaaaaatacagaaaattagccaagtgtggtggctcatgcctgtaatcccagcaactcaggaggctgaggcaggagaatcgcttgaacccaggaggcagaggttgcagtgagccgagatcgcaccactgcactccagcctgggcaacaagagtgaaactccgtctcaaaaaaaaaaaaaggaattaagatgatccactaagtagacaggagacaggatataaaactgaatatgatgtgagcccaaatacataaatatttaaaagtatgtgggattgaaaaaagatctgggtaaaaataatgttactatggggaggcaatacagaagacagacgtagtataagaatgccaggattcaaactccagctctaccacttagtagccgattgcacttagatgagatgcttaaccctgtgaaactttaatttcctcatttataaaatggggacagcgtctacctcacaagatggttgtgaggattaaatgaggtaatttacataaagcataagcattgattatcatttctctttatgctttttcattttccaaaatttcttcggtgaacatacttcagtaatcagcaaaaagwtccttaaaaagataatgccttagatt

SEQ ID NO: 833330 - DNA, 600 bp, Homo sapiens
ccactgaaatgcttttttgcctaatttkgctttttctggaaatttcatagaaatggcatcatgcaatatgtcgtattttgtgtctggcttctttcacttagcatgcagtcagtgaggttcactcaggttgtggcatgtgtcagaaatttgttccttattgctgaggagtatttaaccgtctggatatgatgatgatataccacatcctgtttatccattccagttggtggacatttagatcatttcatttttggctattatgagtaatacggctgtacattcgtagaaaagtctttgtgcagacatgttttcatttatttagaaggagatacacaggagtgaaactgctggttcaaatgataagcctatgtttaaacttttaagaaactgcaaactgttttccaaactgactgtacaaccttatattcccaatttatgagggttttggtttctccacaccctcatcaacacttggcaatgtcaatcttttttattatagctgttctaagtgagtagtggtatttcattgtgatttaaatttgtattttcctagtgactaatgatattgaacatcttctgatgtgtttatttgcccttctt

SEQ ID NO: 833331 - DNA, 600 bp, Homo sapiens
ccactgaaatgcttttttgcctaatttggctttttctggaaatttcatagaaayggcatcatgcaatatgtcgtattttgtgtctggcttctttcacttagcatgcagtcagtgaggttcactcaggttgtggcatgtgtcagaaatttgttccttattgctgaggagtatttaaccgtctggatatgatgatgatataccacatcctgtttatccattccagttggtggacatttagatcatttcatttttggctattatgagtaatacggctgtacattcgtagaaaagtctttgtgcagacatgttttcatttatttagaaggagatacacaggagtgaaactgctggttcaaatgataagcctatgtttaaacttttaagaaactgcaaactgttttccaaactgactgtacaaccttatattcccaatttatgagggttttggtttctccacaccctcatcaacacttggcaatgtcaatcttttttattatagctgttctaagtgagtagtggtatttcattgtgatttaaatttgtattttcctagtgactaatgatattgaacatcttctgatgtgtttatttgcccttctt

SEQ ID NO: 833332 - DNA, 493 bp, Homo sapiens
gctcaactgctaaaaacatagttaatgtgcacacaastgtatgggcttctgaaagtattcatatgctagtatttcgacttgaactacatcaccatattctccccacccaaaagttcccaggctaaaaggcaagaaactacactaaaaaccatggaattcaatgcgcgggacaaacctggaaattaatgaagaattatagtgggaaagctgaaaagcatcaatgggtcaaagaggaaaactgtacagaaccaaaacttatgattggcatgcttatctttctcctggtcttttacaatctttatttgtaaggttatcagcaacagtgcaggggaaaacaatgaaaataaggaaagaaaaatcattcaaaaatagaaacactttgcataactttagtatgtataaggcattgaaaataaacccacggggctaatttcatcagtcatataaaagacaaattgtgttaaattatactcatgtctactatatgatttag

SEQ ID NO: 833333 - DNA, 493 bp, Homo sapiens
gctcaactgctaaaaacatagttaatgtgcacacaagtgtatgggcttctgaaagtattcatatgctagtatttcgacttgaactacatcaccatattctccccacccaaaagttcccaggctaaaaggcaagaaactacactaaaaaccatggaattcaatgcgcgggacaaacctggaaattaatgaagaattatagtgggaaagctgaaaagcatcaatgggtcaaagaggaaaactgtacagaaccaaaacttatgattggcatgcttatctttctcctggtcttttacaatctttatttgtaaggttatcagcaacagtgcaggggaaaacaatgaaaataaggaaagaaaaatcattcaaaaatagaaacacttkgcataactttagtatgtataaggcattgaaaataaacccacggggctaatttcatcagtcatataaaagacaaattgtgttaaattatactcatgtctactatatgatttag

SEQ ID NO: 833334 - DNA, 548 bp, Homo sapiens
aacaaagtgcacggcaaagtggaggggggggggtctccactgtatttggtccaattttccttaggaaatctctggaaaatcagggaaggatttttaaaaatcatcagaactccaaattcatacctagggagcacttcacctgtcaggagaaattaagggaattcttaaaggctagtgaatgttccaacagataatgtcttagaaagaaaagcaaatcatgagatttaatcagagaaaaagtacagcaagtgtaataattaatggcattttcttacagaccaagctcctacatgtaaatttctcactaatttttaacactttaattatcaacaaaattaaggcatagaattgatactgtcattgaatcatgtatgtattaccacaagatttttagctatgtctatggacaagaagaaacttgcattgtatttgataaggcaatcatttctaaaacyttgctattccacctacactctgacaacaatttctatcagatataaatttgtcccaaggtagaagcatctctaaagagtgagccaaagactaac

SEQ ID NO: 833335 - DNA, 319 bp, Homo sapiens
tagtgttatgtgtggaatagttataatttgaaggcaattgtaagggtctgttactgaagagtgaagatgtatggtgtgtatggcatgaagcaatgtacaattyatggtgtgaatggagtgaagaggtaaattgtggtagatacgtgtcacaggacaccacgctgcaataagtaatggactatatgtacatacagaaatatagatatatcttaaaaacaacacagtgaagaaaataagaaaaaaagaggtacagtttcattcatgtaaattaaaaatacatatgcatacaggacaataatacacatttttcaagaactta

SEQ ID NO: 833336 - DNA, 632 bp, Homo sapiens
tgggggctctgactctgcatttcccttccacactgccctagtagaggctctcaatgagggctcagctgctggagcaaacttctgcctagacatccaggcatttccatacatcctatgaaatctaggtagaggttcccaaacctcaattcttttttttttttagttattatactttaatttctggggtacatgtgcaggtttgttacacaggtgtacatgtgccaggtaggtttgctgcacccatcaacttgtcatttacattaggtatttctcctaatgctatccatcccccagccccccagcccccaacaggccccagtgtgtgatgttcccctccctgtgtccatgtgttctcattgttcaactcccacttatgagtgacaacatgaggtgtttggttttctcttctttggttgctttgctgagaatgatgcaaagtatataaactcattctttttatggctgcatagtattccatggtgtatatgtgccacattttctttatccagtctatcactkttggacatttgggttggttccaagtctttgctactgtgaacagtgctgcaatgaaaataagtgtgcatgtgtctttatagtacaatgatttataatcctttgggtatataccc

SEQ ID NO: 833337 - DNA, 632 bp, Homo sapiens
tgggggctctgactctgcatttcccttccacactgccctagtagaggctctcaatgagggctcagctgctggagcaaacttctgcctagacatccaggcatttccatacatcctatgaaatctaggtagaggttcccaaacctcaattcttttttttttttagttattatactttaatttctggggtacatgtgcaggtttgttacacaggtgtacatgtgccaggtaggtttgctgcacccatcaacttgtcatttacattaggtatttctcctaatgctatccatcccccagccccccagcccccaacaggccccagtgtgtgatgttcccctccctgtgtccatgtgttctcattgttcaactcccacttatgagtgacaacatgaggtgtttggttttctcttctttggttgctttgctgagaatgatgcaaagtatataaactcattctttttatggctgcatagtattccatggtgtatatgtgccacattttctttatccagtctatcactgttggacatttgggttggttccaagtctttgctactgtgaacagtgctgcaatraaaataagtgtgcatgtgtctttatagtacaatgatttataatcctttgggtatataccc

SEQ ID NO: 833338 - DNA, 580 bp, Homo sapiens
aaataaaaataaataaataaaagaggaaggtgcttctatatattaaaaattgatttaaaaaaaaaagtattcttccttcagctaraaaagaaagaaaaattttttaaagaaaaagtgatcaagggaagggattaaaagtataacgataggccaggcgcggtggcgcacgcctgtaatcccagcactttgggacgccgaggggggcggattacctgaggtcaggagttcgagaacagcctggccaacatggcgtaaccccatttctactaaaaatacaaaaattagctgggcgtggtggcgggcacctgtaatcccagctactcaggaggctgaggcaggagaatcacttgaacccggcaggcagaggttgcagtgagccgagatcacgccactgcactccagcctgggcggcaagagcgaaactctgtctcaaaaaaatatatgtgtgtttgtgtgtgcgcgcgtatgcgtgcgtgtgtatactatagaaccacactgacgacctacgttcaaatcctgattccaccacttcctagctgtatggcgatgggctacttacagagcctttctcagtctaggt

SEQ ID NO: 833339 - DNA, 580 bp, Homo sapiens
aaataaaaataaataaataaaagaggaaggtgcttctatatattaaaaattgatttaaaaaaaaaagtattcttccttcagctagaaaagaaagaaaaattttttaaagaaaaagtgatcaagggaagggattaaaagtataacgataggccaggcgcggtggcgcacgcctgtaatcccagcactttgggacgccgaggggggcggattacctgaggtcaggagttcgagaacagcctggccaacatggcgtaaccccatttctactaaaaatacaaaaattagctgggcgtggtggcgggcacctgtaatcccagctactcaggaggctgaggcaggagaatcacttgaacccggcaggcagaggttgcagtgagccgagatcacgccactgcactccagcctgggcggcaagagcgaaactctgtctcaaaaaaatatatgtgtgtttstgtgtgcgcgcgtatgcgtgcgtgtgtatactatagaaccacactgacgacctacgttcaaatcctgattccaccacttcctagctgtatggcgatgggctacttacagagcctttctcagtctaggt

SEQ ID NO: 833340 - DNA, 520 bp, Homo sapiens
tagaaaattgcctgtctgttggcaggttttgtgcacctggttttttttccctatagtctcatacctgagaaacrtggagaaatgttctttttctaaattgaaaaactcagctgtagtctaaatgaaatgggataaattatctttttcacaattatccattaaagagagaatcagaattaatattaatcacagatgtttcatcaagttttattatcaaccagattgactgccaaagtgctttctggaagacattttctctctctcccccacctgctactgagaacaaactattatgggtccttagataaagattaatggttttggcaattcatttgaggaaatctgtattttaccgtacattccaagtcagttcaaggcaccactgggaagcatggtttgtcacttcactaataaaattacaccacggagacacaagatagaataattctttctaccatcagaaacaggttaatcaataagtcgcccaaagttagtatcacccaatctatatttttaaaat

SEQ ID NO: 833341 - DNA, 662 bp, Homo sapiens
gaaatatgtctaacttagaagtgtatgattacacaagacagtgtttgttttctaatgtttaaagctgtattgtaatgagaccttattgtaaccctgactctctatcatcccttttccatttcttttcttttytttttttttttgagatggagtctcgctctaccacccaggctgcagtgcaatggggtgatctcagctcactgcaacctctgcctcccgggttcaagtgattctcctacttcagcatcctgagtagcagggattacaggtgtgtgccaccacacccaactaatttgtgttatctttagcagagacacggtttcaccatgttggccaggctggtctctaactctgaccttgtgatccacccaccttggcctccgaaagtgctgggattacaggcatgagccaccatacctggcattcttttcagtttcttttcctgcatttattgttcaaaaacagaggacatcctcactgccaaccatcagcattcccagatctcctggtcagaatgaatcactactttctctgtattctcagagaactatgtatcaaaataccatcctttatttcattttaataacaaacttctcaaaggcacacttgctgtgatctcctcctgctggatcctggcccagtgcgatggagaaggccatctc

SEQ ID NO: 833342 - DNA, 697 bp, Homo sapiens; identical to SEQ ID NO: 816744

SEQ ID NO: 833343 - DNA, 529 bp, Homo sapiens
aaaataatcacaaaggaaatggagcctgacaatatcttggaacacctggatccagccatgcctgaagccattatgagccaatcatttccttttttgcttaaattattccagatagagtcctaactggcatagttgggcagaacccccctctgccctgaaggctgtgttcattgttgggctcccattgtccagaagacagctgatcacaggggtcctaaggcccaaaaccctatcatgtgagcatcagctgagagaggtaggcaggttcaatctggaagtgaacagttaccttcaaatatttggcaatggttgccccagttatctgtagctatgcaaccaattacccacaatttaggagcttaaaacaatgaccatcttattgtctttcctggattcgtgggtcyggagttggagcagtgctcacttgggcgattcttttgtttcattagctgaggtcacttggtgctgttcggctggtggatgggctggtctggagaatctaagatggcttcagtcacacatctggcac

SEQ ID NO: 833344 - DNA, 521 bp, Homo sapiens
atctgatacagacacttcagccactattagatcagctgggttattagggccaagtggtagcactgcttgctctgcagtctggaccatctgaaaagccttttaatactctgggccctactccaagttggtagccatacaggtagctcagtaaatgggtccaagcagcacatccaaatgtggtatgtctccaaaagccaaaagagatctgccaagcttgtgcctctttcacagtggaaggtgcaggaactagttttttttttttttttttttggcgggtgggggagtctcgctctgtcaccaggctggagtgcagtggtgcaatctcggtttactgcaattcttctgcctcagactcccaagtagctgggactacacgtgcgcaccaccatgcccagctaatttttgtatttttagtagagacggggtttcaccctagtctttcactttggatggggtatcccaaaatgctccaggccactggycctctatcagctttactgaggtgatgggtccttatgttc

SEQ ID NO: 833345 - DNA, 633 bp, Homo sapiens
gacccagatttgatcattgcacaatttatacatgtattgaaacataatgttctccataaatatgtataattattatgtgtaaattatttttaaaaagacatctgccttgacagaggacactgacggccatgtaatttcagcaccagtcaagtaagaaagtgcccatccccaaggacatttgcaacaataacacttttggttgttacagtgggaaataaggtgggggtggggcctgctactagcatctaggagtaaaacccaggttgctaaacatcctataatgtgtaggacaacccccgacaataaagtccaaaatgcaaaaagtgctgaggttggtaaaatctcaaatcccttcctcccctgccttgaataagcccaaggcagcaaagagagtgagggaagagataggtagaggacaagaaaagacttcacctcacttctgtagtgccatcctgcagaatttcagtgccatcccatgaagagagaggggggcagctttgaactgaatgagagacrcaaatgcaggcatacctcagtgatactgtaggttcagttccagagcgccacaataaagcaagtcacatgaattttttggttttccagtgcatataaaagttatgtttacactatact

SEQ ID NO: 833346 - DNA, 583 bp, Homo sapiens
ctttattctattcttgcaacttttctgtaactttgaarttgtttcaaattaaaaagttaactaggccaggcacggtggctcatgcctgtaatcccagcactttgggaggccaaggcgggcagatcacttgagatcaggagttcaagaccagcctggccaacttggtgaacccgtctgtactaaaaatacaaaaagtgccaggcatggtggtggtgggtgcctgcagtcccagctactcaggaggctgaggcaggagaatcacttaaacctgtgagggggaggttgcagtgtgccagatcacgccctgcactccagcctgggcaaaagagtgagactctgactcaaaataaatgaataaataaataagttaactatataaagtagtgcctcaggaagtagattctataactatcagctatgtgaccctgcacaagttattaaaaaattgagatgtctttagttccttagttgtaaaatggaaatattaataagagtacctgtcttgacaactattgtacatattaaatgagataagcatataaaacactttgcactccagaagagcataatataataccatcta

SEQ ID NO: 833347 - DNA, 541 bp, Homo sapiens
tctgagcaatggaagagccatccaaggtgttaaggctgaacttgataagaactgtattacaataaatcacactggtagcagcatggatggaatgggattgtatcagaggcagagaggctagcatagtgtagaggctctcattctgcaagtaaaaaataaatcatctaagaattaatgaggatctgagctgaaattgtgattgtggggatgaagaggaagagagcaattgaaagtatatttttggaataaattggcagggctcaggaatgtggtagaatgaagaagataagagaattcttgcactctctggaaaagctttcagcacaaggagaatggagtttagctttccctatactggatgaccctcagtaataattaaggtatttgaatgttctgtccttaacacctgagcttgataaagaacctactttcagttctttgatctgtgtgtaacccagcaatgcctctcatccctagtgttcamccgagtttatagtctttgccagagaaaagaaagcatcattagagaaacaggccacca

SEQ ID NO: 833348 - DNA, 616 bp, Homo sapiens
tagtggttctgtggttccagttgccagtattttctcttctgtgtttaagatacaggatgattgactgccctcaagaatacctgctggttagcgcttagtttaagataaaatgctgttcacggttgtaatttagatgaaagctctctatagctcatgaacttcaattaaatgcttctaaccttttgcataacacttaacatgttaggtcagctctagatttagggtgtatttgtgaacacagcactataaaaagacaggttttcgtgtgattcaagtgcttttgcttttataatataaaaccagcataggaacgaaatgtgcatagttttcaaccatcagaataaagatacaaggaggtatagtttttatccctcaacatactttaaagatgtggaaaataacaggttaagaaaaataatgacaaagtgagcaaaagtacagcgaagtggtagttattgaatgacctaattcttagtggaaacaatgctacaatasagcagaggcagactgacaagttccccaggcgagaccatgccaaatagattctcaacttacattcatttattttatttcaataatttaccttgcttttgctaatggaaaaaagatttctctc

SEQ ID NO: 833349 - DNA, 589 bp, Homo sapiens
atttcactgtaaaacccataaattttgatataatttcataattttatcataatttattatttccattgggattttttttctgtgagctattggcttttaaaagttatttcttaattactacataragggcttttctaactatctttgttattgatgtctagtttaactattactgtggccaaagaacatatttcacattattacaactcttcaaatatgttgagacttgctttatggtccaatttctagttaatttaggtaaatgttttaaatgcttttataaataatgtatatttttaagttattgaatttagtcgtctacatagctcacttaggtaaattttgttaatcagcttgttcatatcttttatacccttactgaagttttatttggtttgttcattttatacgttaataagagaagcgtttaaaatctcccatgatagctgtagatatgtatgtaactcctttaagttctatttttgttgtctacattttgaggccatgttatgaggttcatacacacatataattgtcacatcttcctggtgcattgaagtttttcatcggaaactgacccttttattat

SEQ ID NO: 833350 - DNA, 552 bp, Homo sapiens
tgtatccttgtccccagaacctggctggccccggacttgctttgatcattgggatgcggcagatgtcatatgagtctggagacttcgccatcacatgagggagcagaggggagggaggggcccaggcccagcctcagatgactgccaggcaaacacacagagcctcttgggcccagtgggctgcctgccaaactgccagccacatgcagcccctgggtggccaggtgagacctgccgaagcgccaacatcatactctcggaacaggggagaccattgccgtgtgaacctcagcagtggggctgcttgttacgtggcagctgacagtggttaacgtctctatgctgtgttttcttatctgttaaatgaggttaaaaatagatcctgggggggtggtggtttgctgtggggatgaaatgaggcagtgcaggtcagagtgagtgcagacragtgactgtcgtcctctgctttgtctctgacccatgaaagcaacactttcctcagatctgccctgacctttggtcacggatcccagcccggatgccctgggctgc

SEQ ID NO: 833351 - DNA, 552 bp, Homo sapiens
tgtatccttgtccccagaacctggctggccccggacttgctttgatcattgggatgcggcagatgtcatatgagtctggagacttcgccatcacatgagggagcagaggggagggaggggcccaggcccagcctcagatgactgccaggcaaacacacagagcctcttgggcccagtgggctgcctgccaaactgccagccacatgcagcccctgggtggccaggtgagacctgccgaagcgccaacatcatactctcggaacaggggagaccattgccgtgtgaacctcagcagtggggctgcttgttacgtggcagctgacagtggttaacgtctctatgctgtgttttcttatctgttaaatgaggttaaaaatagatcctgggggggtggtggtttgctgtggggatgaaatgaggcagtgcaggtcagagtgagtgcagacgagtgactgtcgtcctctgctttgtctctgacccatgaaagcaacactttcctcagatctgccctgacctttggtcacggatccsagcccggatgccctgggctgc

SEQ ID NO: 833352 - DNA, 650 bp, Homo sapiens
cagctattaacaagtttggatctaaattcttgacctatttactggtctctgaattcctctagttgatcgaccttgaaattcagagatcctgttaaacctcgtttgttgtcattggtgttgagaatgacacsaggtcatcggtgttgcagcagccaggctgcaacaggaaatcggatgcattttggcccatcacacgtggtagacattcagtgctagttagttactggtgagcaaggtaccttccgatagtgtaagccttatcggagtcctctgcagtctgttagctgctgcaggcttttactacgtgtagcatctgagttttccctggcctctgccatctaagtaactattcattctgcactcacatggaacctgttgccattcagcaggaaatatttttgcaaatattatccaaaggctgtctctttgcctccttaaaagccccctttccactttgctgttgcaggtatgaaggtcactgtgcacacatgcttatgactgtaggcggtggccaaggagtctattggataaaggtgtagggctttggaatcaggagatgcagatcgaatcctggcctgtcatttacttgctatatgattttggataagtcacaaaacctctcggatccccagtttttttcaggtgtaaag

SEQ ID NO: 833353 - DNA, 561 bp, Homo sapiens
cattggtgtttggggatctctcccagcccacgggtatcaattatatttgtgagattgattcatgttgttgggtgtcgcatgtatgtgtattgtcgttgtggcacagtatttcattgcacaaayacgccacaatttattcattctgttcatggacatttaggttgtttcaagtttggggctattatggatggtactgtatgaatgaacattctagtagaagtctcttggtgagcataggatgtgcatgttcagtttgagcagctcctcctgtgagttgtccagggcagttaaacaattacactctcaccagcagtgtgcggaagttcggttgttccgcgtttggccaacccttggtggtgtttcattctagccattctagtgggtgtctggatactatttcattgtggtttaagttttcatttccctgatgactaatgagaatgagcactttcatatctttcagatattctcttttgtaaagtatgttcagtgttttgccaattattctattgggttgtcttatttatttgtaattacatttttacataaattttttcatgt

SEQ ID NO: 833354 - DNA, 520 bp, Homo sapiens
taaacaattacactctcaccagcagtgtgcggaagttcggttgttccgcgtttggccaacccttggtggtgtttcattctagccattctagtgggtgtctggatactatttcattgtggtttaagttttcatttccctgatgactaatgagaatgagcactttcatatctttcagatattctcttttgtaaagtatgttcagtgttttgccaattattctattgggttgtcttatttatttgtaattacatttttacataaattttttcatgtatgtaaaaatgaatacatgctcatgattaaaaaattgaacaagttggccggtgcggtggctcatgcctgtaatcccagcacttgggaggctgaggcaggggagtcgcttgaacctaggaggcagaggttgcaatgagccaagatcacaccattccactccagcctgggcaataagggtgaaaactccatctcaaaaaaaaagcaaaagraaaaagaaatcaagtctaatctcatattttagagatta

SEQ ID NO: 833355 - DNA, 598 bp, Homo sapiens
ccgcgcttggggtccccaacattcatctcactcttcataagataaagagacgtggaaatgaaagtgctctttatggccctgaaggcrcggagcaccacgcggctatccaggcactctacaggcagcgagggtggccccagagccttactacggttggagagtggggtctgggcctgtcctcaggggagaaacctccagagagggaggggacctgcccaacgtcccaggacagcgggccttggtggcccagggaacgtttttagactcacacctgtgtctcctgaccagcctgatgggccaagcgaggtgcgtcgtcctggggccagctgcggatggcagcttccacagaggctgagggcgctgagggccacactgtcccctgtctgcagagggctgtgccctgctcagctgcggtttctccatgttggctttctcgaggccctcaatgctctctctagtcccctccctaaataacacagaccaggcccccacgcttcccaccagtctctttgaccgtgaccctgtgaatgctatggaccatggtgaagacagcacccaggcgtgagaacaaagtgctgaaaacccagtaagacggcat

SEQ ID NO: 833356 - DNA, 389 bp, Homo sapiens
taatacatgcatctgatgctatacatttccccctaagcacagcttttgttgcatcccacaaattttgataagttgtctttttattttcactgtgttcccaatatttttaaatttatctgagatacattctttgacccatgtattgttttgaactgaatgtgtaatacatttgtagaaatagaaggaatgcaacaaatatcagaatttcataatatacattagacatttacgtaaaagttattttccaaagaggtttcccctatgttcctgtctttcctatcttcctcagagggtaaataataattacggctctcctggataagctgktccattgtgttggagagtaattatatgtttatgtttcatatcataaaaactctatccttcat

SEQ ID NO: 833357 - DNA, 570 bp, Homo sapiens
ctcattctgcagaccattgcattcttgcgaggtacatttccatgttcatagacttgggcgattstaatcgttctgtctttgagagtcccttctgttgatggagtataatttatatatgcatacacatatcctgagagaaaggtgaggtacagattccagttgaaagttactcacacattttctccgaacaattaggcctacttctgtaatggtgtccaaattctgagggaagtgaaaatttcttcttctagggaagccatctgttttcccctatgaaatgactaatgatctgaagttcctggacgttctgatcatgttctcagttcaatgaagcaatctgtgaaattcacatgggaattggctcagtaacaggctttatagaattgtcttcagctccagaaaaaagggtcaatgtcatatgcagttaggaacttcgaacaaaaatatgtcatgaaaaatttaaccaattttttttttgcttttgattcaatttcttagaatgttaattacaagtaatagtgattgcagacattttagagtcaatatgcaatctcaacacaaattgaggac

SEQ ID NO: 833358 - DNA, 631 bp, Homo sapiens
gcattattaaagccaattaagtcaataagcaatatccattcttgacaaagcattatcaatttcaggaacaatactccattaggatgatttagaaactggttcaaaggttgcaacagattatttcaaggctgcacaactagtatcttgcttttaggattatgttttgtttacttactgttctgtactatttaactgagaggttgtcaattgaatccaattcaacatatatatttgagcacatcttacatgccttattgtatgccaggccatgtactataatgtgtaagaactaaatattgagtgtaatagacaaggtccttgccttcttctacctttgggcaaagagggaaattgagaagacatctactaaataagtaattacaaatgtgcattgaaatagaagatatatggtgctatagaaacatgtaaaaataatttaatctttttattttgattttttagagatgaagtcttgctctgtctcccaagctggagtgcagtgtcccagtcrtagctcactgaaggctcaaactctgggctcaagtgatcctcctgcctaagcctcccaagtaactgggactacaggcttgtgccactgcatccagctcaaaaagggatttaatcttatcta

SEQ ID NO: 833359 - DNA, 544 bp, Homo sapiens
agaattaaaaccaggtgttcaaacagaaagttgtatatgaatgttcataagaacagtagtcatagtagctgaaaagtagaaacagccaaagtctatcaatagataaatgggtaaacacaatgtggtatatccatacaatggaatattacttagccataaaaaggaatgacgtacttataatattaaaaaacattatgttaagtcaaagaagccagacacaaaaagtcacatattctacaattcaatttatagtaaacccatagagacagaaaacagattagtgctgtttcaaggctggagggaggggagaatgggaaatcactgcttaatagatatagggcttccatctagggtagtgaaaaaaattctagaactaggtagtggtgatggttgcacaacattgtgaaggcaattaatgccactaaactgtacattttracatgattaaaatggtaagttttatgttacatgtatttttccacagtaaaaatttcattctagattttgcttcctgggaccaatgtatcatccatagtattacacc

SEQ ID NO: 833360 - DNA, 544 bp, Homo sapiens
agaattaaaaccaggtgttcaaacagaaagttgtatatgaatgttcataagaacagtagtcatagtagctgaaaagtagaaacagccaaagtctatcaatagataaatgggtaaacacaatgtggtatatccatacaatggaatattacttagccataaaaaggaatgacgtacttataatattaaaaaacattatgttaagtcaaagaagccagacacaaaaagtcacatattctacaattcaatttatagtaaacccatagagacagaaaacagattagtgctgtttcaaggctggagggaggggagaatgggaaatcactgcttaatagatatagggcttccatctagggtagtgaaaaaaattctagaactaggtagtggtgatggttgcacaacattgtgaaggcaattaatgccactaaactgtacattttgacatgattaaaatggtaagttttatgttacatgtatwtttccacagtaaaaatttcattctagattttgcttcctgggaccaatgtatcatccatagtattacacc

SEQ ID NO: 833361 - DNA, 590 bp, Homo sapiens
tctgtttgagtgcagaaagacaatagaacaagccaaaatagtgttgcagacactcttaggactctgctcatcaagctctccccaasccccaggccaggtacagcttagtggacaatacccatacacacttattacttcttacctcatttgcttgcatccctctgaatgctttctctggccacaggagcatgttttgtctgtaagtcaagcaaattaccagtgttagtgagttaatgcttccaagacaaacccagaccaatgaggaatcagagttgatgcatgaatagcccagctttcaggaaactgttctgaagtgcttttatgcagtctatcagatggcagccagcaggattaaacccagttatccatcatattatactgctcattaatttaatgctcttttattgactttcctctcttccttgtcttatttttcacttcctcaccctgcttcctaggattacaaaatgaataaatacttgcatccaaatccttgtaagatatcttataaacattacacacacgaataataattataagtaatatacattatatttactaaacccatatatatacaaacatatataatg

SEQ ID NO: 833362 - DNA, 615 bp, Homo sapiens
gtgggcacctgtagtcccagctactcgggaggcctaggcaggagaatggcatgaacccgggaggtggagcttgcagtaagccgagatcatgccactgcactccagcctgggcgacggagtgagagtctgtctcaaaaaaaaaaaaaaaaaaggaatatgcgaatatattatatatatatatgaataatgaaaacgatagttattacatcatacatgctatgtgttggcatgttctaagtactttacctgtattaatgcacttaatacttgcagcaattctatgcaataggaactattattaaccttactttatggttgagtaaactgcagcataagagaagtgaaatgatttgcccagagatacacagtaaagaaaaagaccaagatctgatccaaacagcctgcctccaaaagaccacttctcagtcagtatgcttacttctgatgtgttcctaacatggaattctattcagccatgaaatatgatgtcagaaaaggatccagaagagcatattttaaagtatttattatcattctcttggcgtgtgaaattgtgagtattcttcatttctcacttatrttttctattaattgtttgacatgtatacaatattt

SEQ ID NO: 833363 - DNA, 554 bp, Homo sapiens
aacctctttctttgtaaattgcccagtctcgagtatgtctttattagcagtgtgaaaatggtctaatataccatggaaagtcagaaaaaattacaacagagttgaccaacaaaccaaggacccagtggagaattaatataatttttgttgctgtttttcaccattttttattactataaatattttcccaaaaccatataaattttttcagctttattgagacatagttcatatattatacaatttacccatttaaaattgcaatgcagtgtcttgtagtacattcacagagctgtgcaaccatcaccacaatcaactttagaacatttttgtcatccaataaagacacttcataatcattactagttatttctcattttctcccagtcactctcaccattctatccctccacttcccagccccaagtaatcacttgtatagttkgtttctatgtatttgcctattctgaacaattttttaaagactttgatcttagaaacatttctaaccaaagaatatacttgctagcatatatatactttttgagacaggg

SEQ ID NO: 833364 - DNA, 566 bp, Homo sapiens
acatacctgccttaagacatgcctgaatttcagacctaattctggtttttctctcccatcatcattcctttcttcagaatctctcttccacccccaaaagaaggggaaacacacacacacacacacacacacacacacacacacatttctttactcatcagaatttgtaatggtaccccaggcttgggatgttaaaaacctttgcataccgaacaaagggacagttagaaatatcagttctcagttgagaaagtgaatggctctactgactgcattacaaatctttaaatcttttttgttgttatgatatttagataactatgtttttcactttcaatagaattaaaggaggaccgaatgtcagctgatagatcatcaaaatacattttttatattagagcaataatccaaaaggaattcaaaaaaataagacactawtaaaacaaaacttctttcattcccttttagttatttaggtaaaaaagtttctcagcatctaaatcttgttgcaggaagtcagggaccccgaacagagggaccggctgaagccatggcagaagaacata

SEQ ID NO: 833365 - DNA, 615 bp, Homo sapiens
caagagtctgcagagaaagcaagtgataagattgagttttggagtcagaccactcyctgctgagctgacaacaaaggctccatctctggtaggtagagtgcgaatagctcctggtaccagcatatgctgcaactgttaaaaactaacactgtaggtgaattgggatgatacactggtaaaaaggaatatggtcactggtgcaatgcatcaactatttgaaagtacagaggaaatgtaaactttaagaacaatggaatttgatggctgtaggtgaatttgatggatgctctaaaaattatgagaagctgaaagcatttaataggcaattgaaaatcaaatgtgaaagccagagggcctgtgtatcttacaaagaggctctcatcttttgaagagggagatcagataaagctgtggacccgcccaggacttaattgtcagagcaactcagctccagaaaggtttaaactactaacctaggcaggtgggctatacaaaggtaagagccccctggttgagatagaatggaaccctgacatatagactggtgacatatcaggggattccctccatctccaaatcttgagcacccagattcccctgaattaacccctctac

SEQ ID NO: 833366 - DNA, 475 bp, Homo sapiens
cagactccagctaggtatgaagaaattatctggttgggatgccataatgcttgacttctctctcggtgacctgaatgacctgagcatggtcagtggatacacaatagtaaggggtgcctccagtgctggyccccaccgctgcttcaacatcagtgagaagaagaaaaccagggtgttgtctcaaattatttttacccacaactacagttctctagcagcctcagaggtccttggtaagaaagagaaaaccaagctgcacccactgtagtttttattgtaaccagagcttctgaatctatgtcgcagccctgccatgttttcctgaatcagagcttcttgtggctttattatgctggtgagtaagccaaagtggtgtgacacagtgttagggcatagcatttggagtgagacactcctagacttattcactcagcaaatattgtaggcacatgcttcactcttatgtaccttgtct

SEQ ID NO: 833367 - DNA, 475 bp, Homo sapiens
cagactccagctaggtatgaagaaattatctggttgggatgccataatgcttgacttctctctcggtgacctgaatgacctgagcatggtcagtggatacacaatagtaaggggtgcctccagtgctggtccccaccgctgcttcaacatcagtgagaagaagaaaaccagggtgttgtctcaaattatttttacccacaactacagttctctagcagcctcagaggtccttggtaagaaagagaaaaccaagctgcacccactgtagtttttattgtaaccagagcttctgaatctatgtcgcagccctgccatgttttcctgaatcagagcttcttgtggctttattatgctggtgagtaagccaaagtggtgtgacacagtgttagggcatagcrtttggagtgagacactcctagacttattcactcagcaaatattgtaggcacatgcttcactcttatgtaccttgtct

SEQ ID NO: 833368 - DNA, 540 bp, Homo sapiens
ttctgtgttgctccctacccctgccaccagtaggctgctactggctggcagacattcccacgcatgccttctacccctccctagcaggccagctcctgcactctgggcctggcttccggtggccaccgccactgtgcaggctgagctcttgggagcaattgccggctttgggtttgtgagcttacccactgctgagcctttccttctacctaccgcttgctcggccatgcagctccagcctctaatgacttttcttatctttttataagtgttaaaataaatgagtttatatacctgattgccttgtcaatctagcattaccaggcaggctaagagctccacttccaatgctgcttgcttaagacagtgtcttatagctgtagcatatcccttgcctttttcccaattcattggaggagggggttcargcaagacctctgtttcctctttgttattttggtccagtgatggggggctgagggaaaaggaggtggtaaggcaggtgacagttcctcctccttccccattttaggctctttg

SEQ ID NO: 833369 - DNA, 559 bp, Homo sapiens
atggttaggcagttttgtcactgtgtgaacatcatagagtgtacttatgcaaacctacatgggatagcctactacaaacctatttctcctaggctacaaacctgtacagcrtgttactgtactgaatagtgtagacaactgtaacacaatagtgtttgtgtatctaaatacatttacacataaaaaaggtacagtaaaaacatggtattatgattttatggcaccaccatgttatatgtggtctgtcattgatcaaaacatcgtcaggcagcacatgactgtatatatggagagagagagagtcggggtggaggagagagatttactgtaaggaattgattcatgtgataagggaggctggggaaatcgtaagatctgcagttggcaagctagaaatccaaaaagctggtggtataagttccagtctaagtccagttccgaagataatagaaaactgatgtccccactcaaagacagcagcagaaaaagagccagttctcccttactcagactttttaatgtattcatgccttcagcatattggaagatgcccacccac

SEQ ID NO: 833370 - DNA, 416 bp, Homo sapiens
tgtgtatttgaaactgtaaaatcagccgggcgcggtagctcacgcctgtaatcccagcattttgggaggccgaggcgggtggatcacgaggtcaggagatcgagaccatcctggctaacacrgtgaaaccccgtctctattaaaaatacaaaaaaattatctgggcgtagtggtgggcgcctgtagtcctagctactcgggaggctgaggcaggagaatggcttgaacctgggaggcggagtttgcagtgagccaagatcacgccactgcactccagcctgggtgacagagcgagactccgtcaaaaaaaaaaaaaaaagaaagtgtaaaatcatatttatatcactggggctcagaaattgataccctaaaatatggtgctttgacatgaagaaaaagcctcaaggtctctctga

SEQ ID NO: 833371 - DNA, 587 bp, Homo sapiens
ggttccaaattctgcatttgtcctccaggctcaatttgatatttactcactgttttcctggtaccagccccagcaagccactatccccagactgcgaacagaggaacagggagggatccgagaggcattgcaaaaaggaaacatttgttttggcaactgatgggatgtgacaggatatgattgcaacattacaattaggagaaagaagagtaagatttcattgaacaaccaagaattcttgcagcttattgaaaacctctgagaacatggtgtatacagtctgtaagaagaaaaatacttgctaggctgcatgtctttagctgtaggaggatttatgtttcaggtaatgatgtgatcgtgatggttaactatgagaggagaatgaattggcaggcgtggcaggcagagcagccacctgtcaaaaggaaaagataatagaaagagattagtaaacccagagtggggaggattagaaccrtgcaggaaaaggctcagtgtgaaggagtatactggggtttgacttgaaccataatttgagctgagtgagccttctctagtatattataaagcttttcccttccagtggg

SEQ ID NO: 833372 - DNA, 597 bp, Homo sapiens
tttagtggtgatttgtgagattttcgtgcacccatcacccaagcagtttacactacacccatttgtagtcttctatcccttgccctgctcccactcttcccscaaagtccccagagtccattgtaccattcctatgcctttgtgttttcgtagtttagctcccacatatcagtgagaacagaaaaccttttatctgaggaatgcaaatcctcttgttaggtcggggcaaaagttattgtggttttaccttttaatgtaatggcaaaaaccagaattacatttgcaccaacctaatagttgtcaaactcagagagacattaaaatgagaacacaattatgtctttcctctttgaactatgtagttatctcttgaaactgtttactattgccaccagtggctataaattaaattaatagtgctgcactgtgcactataacccatactctaaaccttaacgatgtatatatacccaattaataatcaattttttttgtaaataaataatttctgacagacaaccttgtatcagcccacttgggggtgtctctcaggtcctgcaggagcagtctgcttccttcagatggtctgtgggtcct

SEQ ID NO: 833373 - DNA, 597 bp, Homo sapiens
tttagtggtgatttgtgagattttcgtgcacccatcacccaagcagtttacactacacccatttgtagtcttctatcccttgccctgctcccactcttcccgcaaagtccccaragtccattgtaccattcctatgcctttgtgttttcgtagtttagctcccacatatcagtgagaacagaaaaccttttatctgaggaatgcaaatcctcttgttaggtcggggcaaaagttattgtggttttaccttttaatgtaatggcaaaaaccagaattacatttgcaccaacctaatagttgtcaaactcagagagacattaaaatgagaacacaattatgtctttcctctttgaactatgtagttatctcttgaaactgtttactattgccaccagtggctataaattaaattaatagtgctgcactgtgcactataacccatactctaaaccttaacgatgtatatatacccaattaataatcaattttttttgtaaataaataatttctgacagacaaccttgtatcagcccacttgggggtgtctctcaggtcctgcaggagcagtctgcttccttcagatggtctgtgggtcct

SEQ ID NO: 833374 - DNA, 549 bp, Homo sapiens
ggtaatctaagattgttgtacacaaaaactttacagattatggtagggtttagcaaactgtgtatataacgtaacattaatatcgctattttctgatgtctaacttttagaaaagattttttgtttacaaatgtctccacaaattctggcttattttataaaaatagcagaatactaaagaaatgggtggtttgccacactacatgaattcacacactactggcattcaattaaaatagcaaatattttcctcaaaatttagacagatgaaataatttcttgatttttgagtgcagtgacagacattcacaaatatttcagaaatcaaagctgtattaggttttacttagtagtaatatgtatataagatcaaggatctgttcagaatagatatttttcatcaataatttggtgctttcaaatacccagaagtcttgttttamtcagatgaagtctgaggatagtttagtaattttactttttgtatgatgtgttcacaattttctaatttaacctagtattgattgatgatgggtaaaccaacttttt

SEQ ID NO: 833375 - DNA, 653 bp, Homo sapiens
atacctgacaagcaccctctggtcttgattggatctgtgggccatgggcctaccaacagttacaaggaaaatagataggggcttgtatattcaagacaattaagccatatttctttttactcccactgcaacaaggaaaaaccttagggtatcctgtctatgatgaaattaaaagaagaaacaaaagaaatataaacataaaaaaagacatacaaataggagattgggggccaggcatggtgggtcatgcctgtaatcccagcactttgggaggctgaggcaggtggatcacgaggtcagcagattgagactatgctggctaacatggtgaaaccccgtctctactaaaaatacaaaaaggttaaccaggcatggtgatgggcacctgtggtcccagctactcgggaggctgaggcaagagaatggcgtgagcccaggaggtggagctttcagtgagccaagtggcactgcactccaacctaggtgacagagtgagactctgtctcaaaaaaaaaaaaaaaggagatttgaaggatacagattggycactgaaagaaggattcaataatgtgggccagctacctaggcacaaaatgggtcatgggggtactgcacctcaatttacatgcttaactgcatcataaggttgcagg

SEQ ID NO: 833376 - DNA, 569 bp, Homo sapiens
acctaggtgatgtgactctcctctcctgcctggttcctcttgcacatattgtgacatgtggctggtcctgataccttggtgatgtgactctcctgcatgggacttgcccacagaggtattacaacatatattttcattcatcatctaggtgatataattctcctcttctgcctggccctgccaaaaagtggcaaatcactgaacccagcacctaggtgatgtgactctcttgtttggcctgggcctctcatgttttgggtattgtaaaatatcactaggcccaccacctatgggattgcatgctcctaccttggctttgcccacagggaccttgtgacatatatctgcacccatgacctagaagatgtgacatttattttttgcctgcaccctgccctgcacaggaatgattgtgacgtatccttggaaccagacaccaggtgatgtggctcttctgcctctgtcttgcccacagggagcattgtaacatagygctgagctcagcacccaggtgatgtgactctgttgcctgtgctgtgctttcaggacagaattgtaacatatccctg

SEQ ID NO: 833377 - DNA, 637 bp, Homo sapiens
aaaaaggaaaacattgggctaatcagtgccactctgtttgataaagatgggaacctgattttgggaaatgccatgaggggccygtctcaggccccgttctaaactggggcatttccagctcaggccattccctcacccctgtacaatgtctgtcccccgccacagctggtagtgccacagtagacttatgctgcaaaacctgtgagccttctgccttgggaacccccgctaaagttcccaacagcagtctgtggacccttgccagcagggacaataggagttagctctaggaagttctagtttaagtttaaaaggggtacaaatatatacaggagtcactgattcaagactacaatggggaaattcaaattgttatatctacttctgttccctggaaagcagagccaggagagcgcatagcacagctcctgattgtgccatatgtgggaatgggaaaaagtgaaattaaacgaacaggaggatttggaagcacaaataaacaaggcaaagtagcttattgggtaaatcaaatcactagtaaacgtcctacctgtgacataactattcagggaaagaaatttaaaggtttggtagatacaggagtcaacatttcaatcttttctctacagcattggcc

SEQ ID NO: 833378 - DNA, 599 bp, Homo sapiens
tcttcaggttagatggatgatgctatcaaaattattaagtcactaggtctgaatttctctgtatgtaaatccaatgtaataagcgctattaacatacttgccaatctatctcactgacatattttagtattttggctaaaaactaaaataatactagtcctgattaaacaatttacttcaatcagtttacctcttacctattatcatttggcaataggcactatttctcaatgagctcaaaatatactacatgacagacagtttgtcctacttcttaaaaacagttgctatatcagcagatgaatgagaaatctctttaatgtaacttccctttaagaagtttagtaaggatttttgttttagtttttatgtttatataaagtatcccttcagtatttttgcaaccctctctaagaaaagagcagctcatggtagaaaagaatgttttgggctatgatggcagaaatggatggatgaccatgcctttctggaagagawtattccttgcaaccattggacctattactgcaaatagctgagaaaaaggaacaaatcagtacatttaatctatgcaaaatgggtgttagggaaagcaagtt

SEQ ID NO: 833379 - DNA, 557 bp, Homo sapiens
agacctccaggttgctatattcacaggcagatttctagtccttttctaacttgacctattagcaacacttagcatagtcgataatgctttctcatatttttctttttttwaaaaaaaaaggagtaaaataaaacgcacatatctgatgtgtatagttcaatgggttttgacagttgtagatattcacatgaagactacccaaaacaagatacaggacacttccatcacccagaaagttcctctgtgtcacattttggtcaatctccatactcttcagaggtgcactggaaccaccaaacaggttaaccttgcccactgcctagacagagccgatctatcaagacaggggaactgcaatggagaaagagtaatatacacagagccagctgcataggagactggagtgttattattactcaaatcagtctccccaagcattcaggggtcaaagtttttaaagataatttggtggctggcaaagtggagagtgttgactggtcaggttggagatggaatcacagggggtcgaagtgaggttttcttgctgtcttctgttc

SEQ ID NO: 833380 - DNA, 638 bp, Homo sapiens
ggatttgccagaaccaaaagatgggtggtgccttgatccttcttgctttcaatgtatctttatacaaatgagacaggttgctcagcccttctgaagctgtaaaccagccttaaatgtgtaagtgacatgactctagacaagcacagataccctaagaaaatgaaatgctgaaattagaaatgttcattgctttgcattgcaaacaggctcactgtgcatttttcaaacaaaataacataaagtgatgaccaacttgacctgcttggcgctttcttttagggcaaacaaaaggcaaattgacttattcttctaaagtaataactgcaatgacaacataattggtatccaagtggcatattttacttgaactgttgaaaggctccacattaaagatcaaaccactatgaaaaattccaactttaaaactcaattttatctaagatggctaagtatgaaacatttctgaagtgctgagatatcccaatacacttgatactttctccaactcttcttgaataaacaagaatcagtttataaraattacaattagccagaaagtgaagcaaacaggtagatgtcacagatcactgacttttgtcttcaactactatttgaggggtctgtgatgtgcatagtgc

SEQ ID NO: 833381 - DNA, 597 bp, Homo sapiens
attgctgatctgcatctgtctgggtggagtccccaggaatcaagcaaatgaccctcggccacaaccactactaagatctcttctgctgcctctaagctggacaagaaacataaacacttagattgccccagagccatagtaggcagcccagaagtgtaaagttgtgaactacagccgggactcaaggaggagaggaacccacactttcagagaactgagaggaaacacggctccaactatgaggaaactaggggatccacacaactgagcaagaatctaccaactgaccaaaaattctaagtgccagctgctggatcacaccccaaagcttcaacaccaaaaatacctcactaacataccccactctgaaatcagatgcaagaagtcagcttgaaataaagaccctgcagaaagcctcagcctggtgaaaacatccaaaaaagaagtatattgactgctctcggtctacactgaagttaaaagaacatccacacacagagatgagraagaaaaatgcaagaactccagtaactcaaatggccacagtgtcatctgttctccaaatgactgcactagttcttcaagaagagttcttaa

SEQ ID NO: 833382 - DNA, 597 bp, Homo sapiens
attgctgatctgcatctgtctgggtggagtccccaggaatcaagcaaatgaccctcggccacaaccactactaagatctcttctgctgcctctaagctggacaagaaacataaacacttagattgccccagagccatagtaggcagcccagaagtgtaaagttgtgaactacagccgggactcaaggaggagaggaacccacactttcagagaactgagaggaaacacggctccaactatgaggaaactaggggatccacacaactgagcaagaatctaccaactgaccaaaaattctaagtgccagctgctggatcacaccccaaagcttcaacaccaaaaatacctcactaacataccccactctgaaatcagatgcaagaagtcagcttgaaataaagaccctgcagaaagcctcagcctggtgaaaacatccaaaaaagaagtatattgactgctctcggtctacactgaagttaaaagaacatccacacacagagatgaggaagaaaaatgcaagaactccagtaactcaaatggccacagtgtcatctgttctccaaatgacygcactagttcttcaagaagagttcttaa

SEQ ID NO: 833383 - DNA, 624 bp, Homo sapiens
ttccttataaaaaatgttgtacagtttggatacaacttacayatatcccccccaatactctaaataattcttagattacttataatacctcatacagtataaatgctgtaaaaattgttatgctgtaattgtttacggaataatgacaagaaaaaaaagcctgtatgtgttcagtacagatgtgaccatctatttcttttctgaatattttcaatctcctcttagttgaatccatgaatgtgaaacacacaaatatgaagggccatctgtaatgtccttcagaagaaaattagcttgagtactcatttgccagattaccagaaatcaagtaattccctcagggctcacttttccccacttgaaaatccaagaaccccaggaatctatgtggtataaaagaaagagggctgtatctacccacttatttgagcagaacagagagaacttagaattgcatcaatctgaattgcccttgcttcctactaccaaatggagcttgtgcagatagactgtgacgcagtctaacacaggctgcttgttctcgactggtccagaatccccaagagaggaccattcaaggttaaacatcttttagagagcatcatcttattctcttggttctga

SEQ ID NO: 833384 - DNA, 604 bp, Homo sapiens
cagaaataacacaaatcatagaattaatacacaaatacattaaagcagttactaaggctgtatttctygtattaggaaaactggaagaagtaacatggaaaatataaaagagatttaaacctaaattccagaggtaagaaaaataatgtgtgacttgaaaaataccctacaaaaaattgaagctacattaaacatttctggtgacctacaggacaatttcaaagagccaaatatatgagttataaaattccaaaagagagatatccaaaataataaaaattgaaaaaataattgccaacagtatttttaaaatttgatgaaaactataaagccatagatctaagaaattaaatgaatctcaactagaagaatttttttcaaaaaccaacaccaaaacacattattgtaaaactgcttaatatcagcagttaaattgggaaaacaaacaaaacaatctacaaagatcgagaagaaaaagttaccttatatatggaaaaacaaagataagaatgacagaagcagatttcttgtcagacaacacaagttagaagacagtagagcaacatttttaaagtgctgaaaggaaaaagtaaactagcattcc

SEQ ID NO: 833385 - DNA, 587 bp, Homo sapiens
tagatgaataaacaaaaaaaaagagagaagatctaaataaacacaatcaggaaagacagagggagtgttaccaccagctccacagaaatacgaaayatcctcagagactattacaaagattactttgcacacaatctaaaaaacttagaagaaaaagataaatttttggaaatacgcaacctcttaaaattgaagcaggaagaaatttaatctggaacagaccaataacaagtttcaaaattgaataattcataaaaagcctacccaacagaaaaagcccaggaccagatggattgacagccagattctaccagatgtataaataatatctgataccattttcctactgagactattccaaaaaattgtggaggaggagctcctccccaactgattctctgagggcagtatcatcttgatatgaaaacttggtagaaacaccaaaaaaaagaaaaaatcaggccaatatccttgatgaacgtagatgcaaatatcctcaacaaaatactagcgaagtgatttcagcaatgcatcaaaaagctaatccatcataatcaagcaggctttatctctgggatgcaaagttg

SEQ ID NO: 833386 - DNA, 590 bp, Homo sapiens
  misc_feature 32: n = A,T,C or G
taaaatgttttcttaatatgggacctggtaanaatgtgtctgcaaacagctgatttggtgctattttcttctatattctataatatatgaaaggcctatgtaagtgttcacttttgtgataattaagattgaacaaagagtcttctatattctataatatatatgaaaggcctatacaagtgtacacttttgtgataattaagattgaacaaagagaaattttggggcagttaactggtttatcatcacatgtgacctaattaatctgaatcttgatagtgacccagaaacaaatggcagccaggtgaccagcaggcgctagcaaattctgttacaccattaagctaaagcaagaaacaactgttaatattctgcactgttttttaatctggtccaaaggcaacaaagtgaggcatgactgagtccctgatcggtgccaatgtacctgaagactaatcctctaactcttcctaggtgccaccaaagacttagaaccaatcaggttatggacsttcaataacaaatgtcaactgagttgcctcatgacaaagcatgaggttgtcaactgagttgcctcatgacaaaacatg

SEQ ID NO: 833387 - DNA, 575 bp, Homo sapiens
ctaggtattttatttttttaattttttggagctatcgtaaatgggattgtcttcttgatttctttctcagctggttcatcactgatgtgtagaaatgctactgacttttgtrtgttggtttgttgaacagttccaatagttttctgatggaatctttagattttttaatatataagatcatgttgtctacaaagagaaacaatttgacttcccctttttccaatttgggtggtatttattgattttttgagacagagtctcgctctgttgcccaaactggagtgcagtggtgtgatcttggctcaccgcaacctcagcctccagcttcaagcgattcgcctgtctcaacctcccaagtagctgggactacaggcacatgccaccacatccagctaactttttgtatttttattagagatggagtttgaccatgtcagccaggcttgtctagaactcctggccccaagtgatttgcctgccctggcttcccaaaatgctgggattacaagtgtgagccactgtgcctggcctggatgccttttatttctttctcttacctgattgccctggctagg

SEQ ID NO: 833388 - DNA, 637 bp, Homo sapiens
cagtaaaggagtgaaaaaggtacaaaaacaggaggctatgattaaaaatcagcttcctacacagagttaatacttgacattttcttggactggtaacttgtttgtctcatttattgatgtatctatccctcccaccctaccacattgcatggttacttccacatgatgactgtttaatcgtaatttttgaatatctgatctcatagatggtttggtcctttgtgtaggtgataactagatgagaaattttacgaaaataagaaggcttcacctgagagaattacataagaaacattaatggcagagttggatcaagtcttagaagacacaatatggtgtgtggttatcaggcctctagagtaaatttaaaacaataaatttggctatgtcactacaatacattagctgtaggagactacacaataaacttaatcattgtgagcctccattttctcatttatagaaagggcataacacttctatcgtaatatttttgcaaggacaaaattagataataatgcayatctgcttgtgtctggaatatatgactgttcattatatgtttggtattttttaatgctccccaaattactgtgatagaacctatacccctttttatgcaataacattactttac

SEQ ID NO: 833389 - DNA, 621 bp, Homo sapiens
aactacatacactacctacgctgtttctctcctttccttcatagtcaagcctttagaaaaaataacctatgttcatgatgtctacttctccaccttccattcattctccaattcctaaaatayggcttctgtctgggttacttctctgaagctgttttctctaagggcttcattgacacacttattatcaaaccaactatacctttttattccaattattctcatctttttgtagtgttcgcttctgttcaccactacatctttctgaaaattattttatcattttctatcctgcaaattcctcctgattctctttctattctttttatgagcactccttagttttcccattgatgtttccccaggtacccactcaaatcatttatttctttcttcatgcaattttcttaggcaatattttcaacttccacaatgttaactccacatatcctcaattactcatccatatctacctatcacctacaacagttcttggagctgaggaggcatttaattagtatgttctgaataatcaatggatggatggatggatggatgggtggatctacatgagaagtcacaatctagaaatgttaacgatgaatgtgaagtactggcatt

SEQ ID NO: 833390 - DNA, 554 bp, Homo sapiens
atgggtacagtgaaaagggaatgcatacacactgttggtggaaatgtcatacgctgttgttgggaatgtaaattaatacgacctctatgaaaagcagtatgaagatttgtcaaacaaccaatagaagatctactattcaatctagcaattccactactgggtatctacccaaaggaaaagaaagtcattatatagaaaagatatctgcactcacatgcacagttcacaattgcaaagatatggagtcaaccctagtgcccatcaaccaatgaatggataaacaaaatgtgatatatatatacacacacacccacatacacacaccatggaatatgacttagccataaaaaggaatgaaataatgtcttttgtagcaacttgcatgggatgggaggccattttcctaagtgaagtaactcaggaagggtaaactaaatattgcatattctcactyataagtgggagttatgctgtggttatgcaaaggcatacagaatgttataatggattttggagactcaaaaggggagagagtgaggggggtgagggatgaa

SEQ ID NO: 833391 - DNA, 554 bp, Homo sapiens
atgggtacagtgaaaagggaatgcatacacactgttggtggaaatgtcatacgctgttgttgggaatgtaaattaatacgacctctatgaaaagcagtatgaagatttgtcaaacaaccaatagaagatctactattcaatctagcaattccactactgggtatctacccaaaggaaaagaaagtcattatatagaaaagatatctgcactcacatgcacagttcacaattgcaaagatatggagtcaaccctagtgcccatcaaccaatgaatggataaacaaaatgtgatatatatatacacacacacccacatacacacaccatggaatatgacttagccataaaaaggaatgaaataatgtcttttgtagcaacttgcatgggatgggaggccattttcctaagtgaagtaactcaggaagggtaaactaaatattgcatattctcactcataagtgggagttrtgctgtggttatgcaaaggcatacagaatgttataatggattttggagactcaaaaggggagagagtgaggggggtgagggatgaa

SEQ ID NO: 833392 - DNA, 636 bp, Homo sapiens
tggtctttgtgggaggaataacccagactaggaatgccagcatctgccaagcagtaagtcagagtgaaaaaccgaaatggaaaaaattactggtattagaagataatttcattaactataaaaagaaaaaatcattctttaataccttttctttaactgattaaagttaaatttattgtctgtcacttaaacaatctgccagtttacttcctgttttaaattaccattttgcaactgaatatataacttaaacagctcatccctttatcattgggaatttagtgttacacgttatggctattattacaatgcctgttacttatttttaaaatgtatgaaattctgactttggctgaaagagaagtgacattttctgatagtagaattttaaaaattattttatgtgttgatgaaaacaaaaattagaaaaagagttaatcataaagatataaaaatgacactaggttagataaatatgaagaatttaaaaatatcttactctttgtttccaataaattattacatatgtaggcttagtgaatagtcttcttgcagcataaatataaaaatggaaattcttcaatctatgaatagaaaataygtaacattttatttctttgtttgtatatttttttc

SEQ ID NO: 833393 - DNA, 431 bp, Homo sapiens
ctttccttctctttaattaatctaattgcctttcttttcctccatttgagataacacctggcagtcttttcaccagtgatgtggtggccacttacatatgctcttttgagctaaatacyaccaaatggctatacttgaaataactgttcatatctgaagatgttttcatgagaaacaagtaaagtgcctgttgggttctcatgtggaatttgagactgaaggccaatctcactgtccattaggattttgattctacgaaatagtttatggtggttttaaagatctttcttttttctcctgaacccctgctagctaggtgacgtgatggttgacattgcaagtaacatcatgttggctgatgaacgtgtcctgtggctggcgcagagggaagctaaagcctgcagtaggattgtgcagtgtcttcagcgcat

SEQ ID NO: 833394 - DNA, 615 bp, Homo sapiens
atcttttgttaatcttcttccatggagcaaactacctttcaaatattgtggcttaaaacagcaatcacttgttatttctcatgattctgagggtcaggattttacagaggcagtgggcttatctacgctygcttcagtgcctgctgtcactggaaaggctgcaacagcttcgttagctttttggtgcctcagcaagggagatttgggcggtggagggctggctagaagagctagattcgaggaatgtctggattcttcagttctcaaggttctctctccacatgacctcttcatattttctctttacacagtttcatctagaattctcatgtgaaactttaggacttctaagagttcgtaagtagaagttttatactttgttaaagcctaggctaggattgcacagcaatatttttgctatattctattctaaagtctttgagttataagctaagcttggattcaggaggaaataactacaaaaaggcataaacactgaagcataacccatgggtcctactagtgttaactaactaccacgatgacagaggaaaaagtaacacaagaaaagaattactttttaaaaagttaggaaaatggacaaacaccccggaa

SEQ ID NO: 833395 - DNA, 508 bp, Homo sapiens
tggaaggggagtgacatgattttaagtgggttccaattgcctttgtgtgaatattaagaatgccyttataatgattgtaaagatgcttaatgatgtggtctcctacttagatctctagcttcacccctggttagactcctacacaaaccttatgccagtcatactgaatattgtctgaatccttaaaaattaccttatgctttgcacctctggaaatcctcatgttctgtttcctctttctgtgaagatctggacaaactgactcacaaccttatttatttttatgacatattttagcctttggtccagattgctggtctgtaaggacctcactgattggaccagattctaaagagttacttatttcattttctgaaagttcatagaatcatatgctttcttctttttattttagagtctctctctttctctctctctccatatatatatatatatacacacacacacatagtcttccaaaactcctcggaagaaagggaagcattct

SEQ ID NO: 833396 - DNA, 508 bp, Homo sapiens
tggaaggggagtgacatgattttaagtgggttccaattgcctttgtgtgaatattaagaatgcccttataatgattgtaaagatgcttaatgatgtggtctcctrcttagatctctagcttcacccctggttagactcctacacaaaccttatgccagtcatactgaatattgtctgaatccttaaaaattaccttatgctttgcacctctggaaatcctcatgttctgtttcctctttctgtgaagatctggacaaactgactcacaaccttatttatttttatgacatattttagcctttggtccagattgctggtctgtaaggacctcactgattggaccagattctaaagagttacttatttcattttctgaaagttcatagaatcatatgctttcttctttttattttagagtctctctctttctctctctctccatatatatatatatatacacacacacacatagtcttccaaaactcctcggaagaaagggaagcattct

SEQ ID NO: 833397 - DNA, 545 bp, Homo sapiens
  misc_feature 1, 2, 3, 4, 5, 6, 7, 8, 9, 10, 11, 12, 13, 14, 15, 16, 17,18, 19, 20, 21, 22, 23, 24: n = A,T,C or G
nnnnnnnnnnnnnnnnnnnnnnnngttgttgtgtagtgagatccaaaggcatgttttacaacagaagaagccttaagacactgtggcttcaggtgggtgtgggacagtgcctgctagcataaaatacwtgggaagccctgctgcctgagagacatgagacagaggacagaaacatgtttactttgttgaatgtgtttaattgttttagatgtatggggggtatcttggacaggttacaacctgttttttttttttttttttttgagacaggttatcattctgtcaccctggctggagtgcagtggcacaatctcagctcactgcaacctctgcaccctgggttcaagtgattctcctgcctcagcctcccaagtagctgggattaaaggtgcatgctaccacgcccagctactttttgtattttttgtagagatggggtttcgctgtgttggccaggctacaacctttttgatattactcatggctgttggatgtacaagctcactttatgtcctgttctggttccacttggctgccccgagtct

SEQ ID NO: 833398 - DNA, 565 bp, Homo sapiens
atctcctggcctttcccggcttctgaaggccaccacgttctgggcctcagtcccaggctggggcatcaccacacccactgcttttgcaccaggtctgctctsacccccgcctctcgctcacaggggcccttgtcatgccactgggttcacctgcatgatgccggggagcctcccatcgcaggaccctcggtcacactggcaatgtcccttttgccatgaaaagtagcccattcacagtcccgggattaggatgtgggccttttggggggcaccattctgcccactgtggagggtgtgcaggagtgaccagacctcagggaggctctcaaattgacctcatccccagcacaaagtccaggagggatggcatgaggtgtccaggatgctggagcttggtgggggctggacagggactctgctcaggcacccagccccagtgtgaggggcccatggctgcgggcgcaggagccacaagggagaaatgatggccccatagactttccttccccaaactcggatcccctgaaacagagaggtgaggcttaggggtgaagggcgagcaact

SEQ ID NO: 833399 - DNA, 614 bp, Homo sapiens
agccagcatgcctagtctcttttcaaaaaaaaaatttttttttttgagtcacagtttcactctttttgcccaggctggagtacaatggtgccgtcttgactcactgaaacctccgccttccaggttcaagcaattctcctgcttcagcctcctgagtagctgggattatggcgcctgccaccacatccggcttattttgcacttatttttatttttagtagagatgtggttttacgacgttggccaggcagatcttgaactcctgacctcaggtgatctgctcgcctcggcctcccaaagtgctgggattacaggcgtgagtcaccgtgcctagcctcaaaattttttaatgtaacttttcaaataaactcacacatgtgatcagtgatcaccacacatgctttatcgataattgccacacttgtttcatgcattgctgttgtctttctctttccttttcccctttggctgaagcatcttccatcctgtagcaaatgttctgaaattttgttcctatgaacttcaggttgcaaggcgccaagtaygggaaactctggaacacacttgcggctcccttagggcaatgttcaaattaacagtcattccttggcacc

SEQ ID NO: 833400 - DNA, 572 bp, Homo sapiens
tgggtcactacagtcgactgtgctacagtgtgcgctcatgagtggtgtcagaagttagaccaagcagaagctagaaatcaacgagrctgccaatgaccaacaattgtttgacctaaaatacagactgagcaaagaggtcttcttccacaagttgacaaaagtataaacgtcattatgaaggttttgtagggtgcccaaggctaagttcgactaattgccttttcacataattgtcacaggtctaaggaacctctaaccatttgtcttcaagactggattagattgaagcagaaaataatcaacatatatgcatctgtctttcgtggaacactcccttatacgatcaataaacacaagataatccaggacaaaacaaagacagttgaaataagactgcctacacacacacacacacacacacacacacacacacagcaagcagcaggagaataagcaaaggtatttactaaatcttttatccccaaaccataaggtctaatgatcttatagaaatacctagatctaattactttgattataaatcctagggtaacaaattcagcaatgaaagc

SEQ ID NO: 833401 - DNA, 572 bp, Homo sapiens
tgggtcactacagtcgactgtgctacagtgtgcgctcatgagtggtgtcagaagttagaccaagcagaagctagaaatcaacgagactgccaatgaccaacaattgtttgacctaaaatayagactgagcaaagaggtcttcttccacaagttgacaaaagtataaacgtcattatgaaggttttgtagggtgcccaaggctaagttcgactaattgccttttcacataattgtcacaggtctaaggaacctctaaccatttgtcttcaagactggattagattgaagcagaaaataatcaacatatatgcatctgtctttcgtggaacactcccttatacgatcaataaacacaagataatccaggacaaaacaaagacagttgaaataagactgcctacacacacacacacacacacacacacacacacacagcaagcagcaggagaataagcaaaggtatttactaaatcttttatccccaaaccataaggtctaatgatcttatagaaatacctagatctaattactttgattataaatcctagggtaacaaattcagcaatgaaagc

SEQ ID NO: 833402 - DNA, 481 bp, Homo sapiens
caggccaatcactcagtctggctgggactcaccagtcttcagatctgtgagaaataaatttctgttcattataaattacaggttcattactctcaggttttattatagcagcacaaaatgaactaagataattggccccctgtgttttctaattacatcagtaatgcaaactcataattgcacagcaaatgctcattctagaaaatgcagctatggaaaactaatattaaaaataattcatcacaccatcatccagagacggccctggaaacattctgagacgtatatactcacacttttaaaacatgtataatcatactttaaattatataatatatactttttaaatgcacacataatacaggtttataacctttttgtrttaaacagatcatatagaattttgatatcaataattacacttcttcaaaattgttgccaatagaacacaagtatctatcatcatttattttgccatcct

SEQ ID NO: 833403 - DNA, 598 bp, Homo sapiens; identical to SEQ ID NO: 816741

SEQ ID NO: 833404 - DNA, 598 bp, Homo sapiens; identical to SEQ ID NO: 816742

SEQ ID NO: 833405 - DNA, 614 bp, Homo sapiens
ggatgtccctttgtcatggggctactaagctatgataagcagtagcaacatctgcaccatataatrgggaaaggaaatggggactcatgttccatagggtccccaatccttcaatcctccaccaacaccgtaagggggttattactcatccactttaatagataaggaaactggggctcactgataggtgagatcactggctgaggtcacagagcaaggaggcagagccaggatgatgacctaagtctgtcagattcttttttcatctgtattcctcatccatgtgtagacacagaacagtgaagtcaaaagagcatggttttggagtccaggtatgatttgtcttataccttgcaaatgttaggtgcccgataaatacctgttgcctaaatgctttttattctaattaaaattttatgcatgctatcactcacagacctggtgattccacctgctaaatgttacatttggaaggccttatcttttcacaagcactacaatttagaattcagctttacatatgaagggtatcttaactttcattgataatgtagaaccaggaaaatagaagcaagacaaggcatgactatatctcagaaagttccatagtaggg

SEQ ID NO: 833406 - DNA, 405 bp, Homo sapiens
ttaatcactactcttggagactaatccttcattttctaccaccatggcctaaaaaaaaatttctgtatcatctactaatagtcctttgacattatggaaaatgygatgcttttgaaacctgaataatagattgcatggtcttaaaactatgaaactggcacttagtgggtttctctgattgcctccacagagggtctcaaatgtcatcaagggaataaagtagcaaagcctattgtaaactgaatttgcatagctcttgcgtatgagattcagacggattttaaataccttaaaatctggatagaaacatatacgattggagcaacagcaggaagaacagctaggatgccatccctgttgccatgaatgagggcatctccactcatgcctgtgggtgtgcaggtg

SEQ ID NO: 833407 - DNA, 405 bp, Homo sapiens
ttaatcactactcttggagactaatccttcattttctaccaccatggcctaaaaaaaaatttctgtatcatctactaatagtcctttgacattatggaaaatgtgatgcttttgaaayctgaataatagattgcatggtcttaaaactatgaaactggcacttagtgggtttctctgattgcctccacagagggtctcaaatgtcatcaagggaataaagtagcaaagcctattgtaaactgaatttgcatagctcttgcgtatgagattcagacggattttaaataccttaaaatctggatagaaacatatacgattggagcaacagcaggaagaacagctaggatgccatccctgttgccatgaatgagggcatctccactcatgcctgtgggtgtgcaggtg

SEQ ID NO: 833408 - DNA, 558 bp, Homo sapiens
gaggctgaggtgggcggatcccctgaggtcaggagttcgggatcagcctgaccaatgtggtgaaaccccgtctttttctttacactttatrcagaggaataatatttcattcccatttgtgatatttgctggtttagcccctggttcccccattgaattggaggccacgggagaccacagatctgtctcattcactgttaccaagccagactttgcttgttttcgatatctcaaaatgctttaaacactccacaaataaacagatggtttcttttgggtgtattgggtttatatttttaagcaataaaatgtatttatttggttagattccaaggttttctatcaaactaaagcagaaaaataatacttttcttttttaatatctagcactgtaaaattcttgttttgttataaagaattcttctagatttttgtccttgtcactctgaataggaagatgacaggctatgtgagacaaagtgtttgtctcaatataggatgcccattattattattttttaaattgctttctcagtgtggaagttttctctatgcatt

SEQ ID NO: 833409 - DNA, 610 bp, Homo sapiens
agccaaatatgaaaaaatgctcatcatcactggccatcagagacatgcaaatcaaaaccacaataagataccatctcataccagttagaatggcgatcattaaaaagtcaggaaacaacaggtgctggagaggatgtggagaaataggaacacttttacactgttggtgggactgtaaactagttcaaccattgtggaagacagtgtggcgattcctcagggatcttgaactagaaataccatttgaccccgcaatcccattactgggtatatacccaaaggattataaatcatgctgctataaagacacacacacacgtatatttattgcggcactattcacaatagcaaagactcggaaccaacccaaatgtccaagaatgatggactggattaagaaaatgtggcacatatgcaccatggaatactatgcagccataaaaaaatgttgagttcatgtcctttgcaggaacatggatggagctggaaaccatcattctcagcaaactatcacaaggacaaaaaatcaaacaccacatgttctcactcawaggtgggaattgaacaatgagaatacttggacacaggaaggggaagaacacacaccggg

SEQ ID NO: 833410 - DNA, 639 bp, Homo sapiens
ccccctttccctgctgtcagctagaggtcactcagctctctgacamccccttctcacccctagagccccatgtgccttgtgtcatggcctcttccatctccaaagtccacaatggagaatttctcatatgctaaacccctctagctatgaacctctctgacttcttctcctctctttgacctctggacccaatcaaatttaaagggatcacgtaattaggtcagacctacctggaaaatcttcctatcttaaagttaaccaatctgcagtcatggttacatctgcaaaaactccttcccagaaatagactgaatacttggagaaagtgtcggtacactgggagccagcaattttgggggctgtcttagaagctgacctcgccaggtgcggtgactcatgcctgtaatcccagcactttgacaggcaggtgaatcatgaggtcaggagttcgagaccagcctggccaacatggtgaaaccccgtctctactaaaaatagaaaaaattagctgggtatggtagtggcgcctgtaatcccagctacttgggaggccgaggcaggagaattgcttgaacccaggaggcggaggttgcagtaaaccgcatcacgccactgcactccagcccgggcaacagtgtg

SEQ ID NO: 833411 - DNA, 639 bp, Homo sapiens
ccccctttccctgctgtcagctagaggtcactcagctctctgacacccccttctcacccctagagccccatgtgccttgtgwcatggcctcttccatctccaaagtccacaatggagaatttctcatatgctaaacccctctagctatgaacctctctgacttcttctcctctctttgacctctggacccaatcaaatttaaagggatcacgtaattaggtcagacctacctggaaaatcttcctatcttaaagttaaccaatctgcagtcatggttacatctgcaaaaactccttcccagaaatagactgaatacttggagaaagtgtcggtacactgggagccagcaattttgggggctgtcttagaagctgacctcgccaggtgcggtgactcatgcctgtaatcccagcactttgacaggcaggtgaatcatgaggtcaggagttcgagaccagcctggccaacatggtgaaaccccgtctctactaaaaatagaaaaaattagctgggtatggtagtggcgcctgtaatcccagctacttgggaggccgaggcaggagaattgcttgaacccaggaggcggaggttgcagtaaaccgcatcacgccactgcactccagcccgggcaacagtgtg

SEQ ID NO: 833412 - DNA, 509 bp, Homo sapiens
agctttgtcaatttagcttgttcataattaacattactataatgatatataaattataggatatacttaaagtaggaaaacattaatttaatatcaaaataaattaattaaacttaaattaacagtgatattttggatgttattcttttgaaaattaattaaaatattcactaaaagatataatttgtattggagtgctttgtatattttatacattttatatatctattttctatattgtgtataattttacaaatttggagatctgtaaaggtcttgcaatgtatgttcacaaacatccaattttcaatatatctcctttaagcaaacttgatatataaatattgctggctgcctattttttaagataataaagttgcagtttcctacattaaatagtgtaccattttatttgacagtttatatrtagataaatgtgacttccagagggatacaagaagttttccgtttcctaattacattatgtatgaagaattttttctaacttt

SEQ ID NO: 833413 - DNA, 509 bp, Homo sapiens
agctttgtcaatttagcttgttcataattaacattactataatgatatataaattataggatatacttaaagtaggaaaacattaatttaatatcaaaataaattaattaaacttaaattaacagtgatattttggatgttattcttttgaaaattaattaaaatattcactaaaagatataatttgtattggagtgctttgtatattttatacattttatatatctattttctatattgtgtataattttacaaatttggagatctgtaaaggtcttgcaatgtatgttcacaaacatccaattttcaatatatctcctttaagcaaacttgatatataaatattgctggctgcctattttttaagataataaagttgcagtttcctacattaaatagtgtaccattttatttgacagtttatatatagataaatgtgacttccagagggatacaagaagttttccgyttcctaattacattatgtatgaagaattttttctaacttt

SEQ ID NO: 833414 - DNA, 505 bp, Homo sapiens
cccagtatgatggatgacaacagttgcaagcttatagtatcactgttcttatcatgccacrgtctcttgtaaatgttgttctgtttttttgaggtgacctattatatctctctttgctgcccaattattttcatataagggactgataaggtaagaacgtacctgctatttttctttccatgagtatttgttcctttttacagatacttgaaaacttgggactttcttatcctaccaatatgaaataattgccagtatgcttacctctgaaagtgagattgtaagaatctgtttacatgcaccttaaatatttgtacaagtcaactgtacacaaattacggagcctgtaaacctggctgggattgttattttgtcattttttagctgatgtcttgggcaatatacttatcatttccaagtctcactttctccctctgtaaaatattgagataagataacacatattttgagaaggtataatgcacagatacacattaaagtttct

SEQ ID NO: 833415 - DNA, 624 bp, Homo sapiens
ccacaatgacattaaaataatcattggtctgggataggaacaatctcaacctagccataaaatctcctcttttattaactaaaaatgagtattcctacattatcagctataacacagaactactratataataaaagtgaaaataattagaaaaaattaaatactattcagttatggaggttaatcaatattttatattatcacataattataatgataaaatcttaaaatgagtggtgtttgaaaagttataagtaattttatttatataaattcataataatagatacattttttctttataagtagaaaaaaatagattattcaaaaaaatatttttgaagatttcaactcctaagcctgcctaaagtttccctgatagccttaaagaaataccttttcaactggatataataaaaattaactttttgataatgcatattcattttccattgatatttaccaattagttatttttggcttcagaataatagtatttaatatctgtaatctaaaaaaaagtcaatctcttttcctctttcctattctaatgtcttgtggttttataaataatttcatagtaaatgcaattgagagattacaaagcgatgtgggagaaacaca

SEQ ID NO: 833416 - DNA, 555 bp, Homo sapiens
gcagaggtgatagaaataagagaactagaaatgcagcttgaagatgtaactgaattgctgcaaccacctgataaaacttgaatggatgaagagttgcttcttagaaacgagcaaagaaagtggattcttgagatagaatgtactcttggtgaacacagttgaaatgacaacaaagaatttagaatattccatagatttatttgataaagtagcagcagtgtgtgtgaggaccgactccaattttgaaaattctactgtgggtaaaatgttatcatgttgcatcacaggctacagagaaatctttcatgaaaggaagggtcaatggatgcagcaacattattgttgccacatgacaacaatgacaccttcatggttgtctcattttaagaaatcgccacagccatcccagctttcagcaaccaccaccctaatcagttagcagccataaacattgaggcaagcaagaccctaacagcaaaaagrttgactcaaggaaggctcagatgatcataagcattctgttttgttttttgtttttttgagtcggagacttgc

SEQ ID NO: 833417 - DNA, 677 bp, Homo sapiens
gcataaaaggcctttgataaaattcaacactccttcatgctaaaaaccatcaataaactaagtattgatggaatgtgtcttaataagagctatttatgacaaacccacagccaatatcatactgaatgggcaaaagctggaagcattccccttgaaaactggcacaagacaaggatgctttttctcaccactcctattcaacatagtattgaaagttctggccagggcaatcaggcaaaagaaagaaataaagggtattcaaataggaagagaggaagtcaaattgtctctgttgcagatgacatgattgtatatttagaaaaccccatcatctcagcccaaaatctccttaagctgataagcaacttcagcaaagtctcaggatacaaaatcaatgtgcaaaaattacaagcactcctatacaccaataatagacagagagacaaatcaagagtgaactcccattcacaattactacaaagaatataaaatacttaggaatacatcttactagggatgtgaaggacctcttcaaggagaactataaaccactgctcaaggaaataagagaggacacaaacaaatgaaaaaacaatccatgttcatggataggaagaatcaatatsatgaaaatggccatattgcccaaagtaatttatagattcaatgctatcccc

SEQ ID NO: 833418 - DNA, 495 bp, Homo sapiens
agagagcaccaggatccactaaggacttctccacacaggggatagtgggaagcctttgcagcacagcaaagacacaaacagctttgtgttttgagaagatggttctggctgcagtgtggaaagtggattgggattggggatgggaaaagagcagttagcaagctattgaagtagttggacaatggtggctgggaatagtttctagcagtgaaacgggaggaaagtggagaaagtcaggctattttaagatatacaagtgccagctcttagagaccaaatagatatggggattaaaggcgatgaaggagttcaagataacttccctggtttttaagcaaatttttgagcaactgggtgaatgatgayaccatttactaagacttggaatattggagatagagcaggttttgaggacactaagttcagtttggggataatatgattagtgagaagtatctaggaggcctctatgaagaaatgaccagtaattaggct

SEQ ID NO: 833419 - DNA, 604 bp, Homo sapiens
cagataaggcatgttatttattttaaggccctttaagaacatagccaattagagcctgttgaatgagatgcacatcactgaggtttcctagaaagggcttggtcatggggttttgaagccctgttacaaagcatggcagattgcctatttttaaaaggacatttattcttggaaaactgtgattctcttgttagcctcaaactcccttgcttgtaggtgtttcaaagaaatctgagcccttgccaggctatttctataaagtcgcctattttttccccccagaggttgcctgggagaaggaattaagtaaaaacaggcttaacaaaactgttccatgcttaattcaactgacttcaaataaatagtttatcaaagttctattaatgaattacttgattaattcatttatttggcaaatatttatttagggccgactataagctaagtatcacagttaatgcagtagattttgtctcttcttatatggcaatatccaaatatacaaacacatgtgaacatgaacacacaaatgaacagcagatacagktaagagcctggctgggtcattgcctgaattgagagggctagagatactctctttagg

SEQ ID NO: 833420 - DNA, 558 bp, Homo sapiens
gaatacttactttttcccactttctccctttttcccaacttgraagcttaacctcatttgatcatcttccattcaactttcaaacactgtccatactgttgtgtagtaaccatgcagtgttcttcttcagtaggggataaaatgcaaccactatctaggggtgaataaaaatatctaacggtattagcaaaccagtataaagtgtacagtagaaaaaatttaaacttggaattatgtcctcttttccagtttctctggtgttaatattttctggaaaacatcctcaaggcttgtcctagctaccatcttcctgacattgtcccaggtgttgcagttactaatgtgagcaagacatcctcctggccttagcgagtgtacccaggagttatataaaggatattctgggagccggaagaaggagcgaataaagcagactgcacagatggaacatggaaaggcttttaacagaaatgaatactttcagactaggtttgaaggactgagtaggagtaaactaaaagagaaaaagcaggacaaaagaagcaccactttggaagc

SEQ ID NO: 833421 - DNA, 558 bp, Homo sapiens
gaatacttactttttcccactttctccctttttcccaacttgaaagcttaacctcatttgatcatcttccattcaactttcaaacaytgtccatactgttgtgtagtaaccatgcagtgttcttcttcagtaggggataaaatgcaaccactatctaggggtgaataaaaatatctaacggtattagcaaaccagtataaagtgtacagtagaaaaaatttaaacttggaattatgtcctcttttccagtttctctggtgttaatattttctggaaaacatcctcaaggcttgtcctagctaccatcttcctgacattgtcccaggtgttgcagttactaatgtgagcaagacatcctcctggccttagcgagtgtacccaggagttatataaaggatattctgggagccggaagaaggagcgaataaagcagactgcacagatggaacatggaaaggcttttaacagaaatgaatactttcagactaggtttgaaggactgagtaggagtaaactaaaagagaaaaagcaggacaaaagaagcaccactttggaagc

SEQ ID NO: 833422 - DNA, 535 bp, Homo sapiens
gactgagtaggagtaaactaaaagagaaaaagcaggacaaaagaagcaccactttggaagctcaaagccgcactggaaacacagtctttcaggatgtctgaaaggggcaagtctgtttgtgtggggtaagaaatgcggggagacaaacggacagtggacagattgcagagagctctgtgtgctgagaggagggtgcagaccagatttttaaattgagaatgcaacagtgaaggatttcaagcttggagtgagaggggagactacgagcctgcagtgataaggcaaagctgaagatttcagagccaaggccacaccctacagttgccatggaatggggtggcacagtgggctttggaggtaaagtctgcagttgagaagttcaagggtagtaagtacttaatgccaggtcartcatcccttttaagacacagatatcatctgcagcgttttcaggaacagcgatagagaagaaaagcgggcagctactagatattcaaatcttccacaaatgtcagggagagagtcaggcagttgg

SEQ ID NO: 833423 - DNA, 529 bp, Homo sapiens
gatggtgcccactcacattggggagggacatcttctttgctcagttcaccaattcacatgctaacctcttccagaaacaccaccacagacacacccagaaataatgttctaccagatatctgggcctcccttagcccattccagttgacacataaaattaaccatctcaggtcattttcctaagaacacttctggccttttcttaaaggctttatattttatattcaggtcagtttatctcctctgtgatatcagcccaaggagtaggtatttaggacaagccttaccatctggcaaaaaagacaatcatctttgcagtggggctggaggatgtccacttcccagaaagatctctctcatccaacaattacactgcctaaaatttcaccaccagaaaacttgtagggatggtcacatgttcacagtgtattgtaaatttgccttcaaattgatttctcccatcccaattattccacagaaaagggcaccaggataacgagamgtaaagcatcatcaaatgaaagatgat

SEQ ID NO: 833424 - DNA, 529 bp, Homo sapiens
gggactacaggcatgcaccaccacgcccagctaatttttgtgtttttagtagagatggggtttcactatgttggccaggctggtctcgaactcctgacctcagttgatcctcctgcctcggcttcccaaagtgytggattacaggcgtgagccattgcgcctggccaggtttttctctttcaagctgagctgtccagtatggtagctgctagccacaggtggtccattgggtggctagtctgaatggagatgtctgccagtgtaatataaacatgggttttcaaagactcagtccaaaaaatatatatctaaattatctctttaatcatgtggtatatgaattacataattaaacaatgtagttgttgacatatggatgaaataaaatacattatttaaattaatttcacctgtttctttttactttttttaatgtggctgaaaaatatatggttcacatttgtggctcattatatattttattggacagcaccactttagagatagaaagcaagctgtatttctgcag

SEQ ID NO: 833425 - DNA, 617 bp, Homo sapiens
gcagaagacattcgtgaaaacaagtaataattattaagctcttgttttgtaccaagcaatgtgttcaatacttcacaactattttmtcctgaaatctgaagagtaacttgctatcaaaattttacacatacacatacacatacatacatatatacctgagtttaccaaagagattgaattgaataattaccccaatcacaaaactagatttcaagaacttacactttcaacctctataatatggtagtgtgtgttgcttttaacttagagttttgaacattaaaaattatttgttaaaacaaaattaactgatatgtttcgaatacattgaatgcatgttctgcataatgttaattttactttagaatgtaaatatgtaaacaataatatttatataaaaataaactgaagaaatgtaaagtttaaattgagtatgacatcaaatttaaacaattaataccagatatggcaaggtaataattgctaagaactagtcaaaaaatttaaaaataatattttgatataatcattagtgataaaacctgttaatgctctttggccctcatgagtccagtttgtctccagtaatccaacagattatcaaagatcataatgtg

SEQ ID NO: 833426 - DNA, 648 bp, Homo sapiens
atttactaagtattgtggggtaatgtacagatatgttttgcctgtcatactaacatgtcagccccaccctcaaggagcttacagtctattgttagcactgaaacaccatgatgaggtyacttccaaaacttagacattaaggaaatatattaaccactgctgtgaaatcaacacgtaatgagtcagagtagagctatgaaaatgagtcagagaccagaggcagagagtcagagacgaagactgagagagagaaatggagaaagaagaaaaatgaaagtgaaaaacagagacagagacagacagaaacaaaaacacagaaagattgagacagagagacaggggaagggagaaagaattgctctcagcctggcaggaactgagaatacttgttttgaatttaacaatataccaaaagaaagactaggtcaatgtgaaggagggtatggtcggccctgaaggccttggcaaaggaaagtcactaaggtgagggtaggcagtatccattctagcctgtccagggatgttgagttctccagtgtcaatgctaaggctgttcctttggtgaagtgagggtcatagcctaatgccatgagatgttacatattcaactcataactcctattactcagattttgtgctcaccagaaa

SEQ ID NO: 833427 - DNA, 648 bp, Homo sapiens
atttactaagtattgtggggtaatgtacagatatgttttgcctgtcatactaacatgtcagccccaccctcaaggagcttacagtctattgttagcactgaaacaccatgatgaggttacttccaaaacttagacattaaggaaatatattaaccactgctgtgaaatcaacacgtaatgagtcagagtagagctatgaaaatgagtcagagaccagaggcagagagtcagagacgaagactgagagagagaaatggagaaagaagaaaaatgaaagtgaaaaacagagacagagacagacagaaacaaaaacacagaaagattgagacagagagacaggggaagggagaaagaattgctctcagcctggcaggaactgagaatacttgttttgaatttaacaatataccaaaagaaagactaggtcaatgtgaaggagggtatggtcggccctgaaggccttggcaaaggaaagtcactaaggtgagggtaggcagtatccattctagcctgtccagggatgtygagttctccagtgtcaatgctaaggctgttcctttggtgaagtgagggtcatagcctaatgccatgagatgttacatattcaactcataactcctattactcagattttgtgctcaccagaaa

SEQ ID NO: 833428 - DNA, 620 bp, Homo sapiens
acttcagtacaactctgttatggacacagaaattaaatttcctttttttcttttcttttctttttctttttcttttytctttttttttttttttggtttttggtttttggtttttgaggcagagtctcactctgtcacccaggctggagtacagtggcaccatcttggctcactgcaacctccgcctcccgggttcaagaaattctcctgtctcagcctcccaagtagctgggaccacaggctcatgctaccacatccagctaatttttgtatttttagtagaaatggggtttttgccatgttggccaggctggtctcatactcctgaactcaggcgatctacctgcctcagcctcccaaagtgctaggattacaggtgtgagccaccacgcctggcctggccttttatctttctatcagaatatagattcaacaaagtccctataactaaacagaaacacagtcatctgtccatctgtgcagtttaggaaggcagcaaaaaactgtatttttataagccaattcagtgtcctacaaagacaatctcatcatagcaatattaaagtttttaaaaaatctatttttttaagatcagatttttttggaggaaacaaaaaact

SEQ ID NO: 833429 - DNA, 620 bp, Homo sapiens
acttcagtacaactctgttatggacacagaaattaaatttcctttttttcttttcttttctttttctttttcttttttctttttttttttttttggtttttggtttttgktttttgaggcagagtctcactctgtcacccaggctggagtacagtggcaccatcttggctcactgcaacctccgcctcccgggttcaagaaattctcctgtctcagcctcccaagtagctgggaccacaggctcatgctaccacatccagctaatttttgtatttttagtagaaatggggtttttgccatgttggccaggctggtctcatactcctgaactcaggcgatctacctgcctcagcctcccaaagtgctaggattacaggtgtgagccaccacgcctggcctggccttttatctttctatcagaatatagattcaacaaagtccctataactaaacagaaacacagtcatctgtccatctgtgcagtttaggaaggcagcaaaaaactgtatttttataagccaattcagtgtcctacaaagacaatctcatcatagcaatattaaagtttttaaaaaatctatttttttaagatcagatttttttggaggaaacaaaaaact

SEQ ID NO: 833430 - DNA, 619 bp, Homo sapiens
aacggaggcttgccatttccagcttctcgcctctaagtcaattctcaacctactgttatttgacttcctctgctgaacacattctggacagaacttattatttccctcycaaatctgctccttctcttatattccatatctcactcatgacaccaccaatgtcagccgaaccaaataatttcaagtcaatcctggctcctttctctgctgaacccttcttcatccaaatgacctctagtcttccttatctaaccatatacacatttcttaaatcagcccctcgtgacaaaccatgctatctctatttagctcatcctaccattgtacaatcacattatcctagtgtgatcacagtgatcagatctctctcatccagccatggtaaaatagcgtagtggttcaacatttgaatttcaacccaaacttcctgggttcaaagccatatactcacacctttagctctatggccacggacagatttagctctttttgcttccatttctttatctgtaagatggtaaatcagagtaggctgttaggagttacatgagctaatatttgcctagcacttagaatgacatctggcatgtcataggtgctatataatgttttctatttt

SEQ ID NO: 833431 - DNA, 386 bp, Homo sapiens
ccatatacacatttcttaaatcagcccctcgtgacaaaccatgctatctctatttagctcatcctaccattgtacaatcacattatcctagtgtgatcacagtgatcagatctctctcatccagccatggtaaaatagcgtagtggttcaacatttgaatttcaacccaaacttcctgggttcaaagccatatactcacacctttagctctatggccacggacagatttagctctttttgcttccatttctttatctgtamgatggtaaatcagagtaggctgttaggagttacatgagctaatatttgcctagcacttagaatgacatctggcatgtcataggtgctatataatgttttctattttaattaaaatagaaaataat

SEQ ID NO: 833432 - DNA, 624 bp, Homo sapiens
tttatctctagttctattgttcttgattaggtgagaaccattagaycatacccaactgaggggattggggtcttgtttgttctccagctgttcttcaccctctattgccatggacatgaaggacagactgcacggtcttaacatgttaaaacgaatgacccatgttttctcatattcacattctctagatgagagcatgagagtatagcacaagaatttcatcctttggcagttccatccacccttttgatttctctgcttcattggttctaatattcttggttaaaactgttttcaatggtgtcaactaaaatgtgttatcttgcatatgcgtatttaatatataaaacataaaatacataaatatacatctaaagatgtatgtaatatgtagtacatatgtatagatgctggcattttcagtttagtttcagagattttataatcagacactctgaccctcttggaagctcacatgagaaacaatatttttacaaacattctacattgttacagacattttagctcacagtcttcattccgaggaataaagagtcaaaatgaacataacactgaatgtctttaattgcactcactattctataggatccttggaatcatttc

SEQ ID NO: 833433 - DNA, 634 bp, Homo sapiens
gccaggagttcgagaccagtctggccaacctggtgaaatcatctctactaaaaatacaaaaattacgtgggtatggcggcacgcgcctgtagttccagctactgaggtggctgaggcgcgaaaattgattgggcccaggaggtccaggctacagtgagccaagatggcgccactgcaatccagcctggggaacagagagtgactcagggaaaaaaaacgaacaaacaaaaaaccaaggagatgtggagagagtttgccatctttggcaaaaagtgaagatcactaatttggtgatcttaatttgatctctaaatgttgttttgctttgaaaaatagctgaacacatagcaatgttcagtttaaaaatcataattaatgaaattatgtatcttttctcagaccccgatcacagaatcactgggaggagattaaatattgggatagagcagagtaaaaagaaccatgaaggaaaatcatctttaacttgaaactaaatttggtaacatytaatatcaaacgggattcttatagcatgtggaattgtttagtcactaccataatcatttcaaaaccagattttctgctttactgctatagtagttcttgcctagcaaatgaggagcaggtcttgagt

SEQ ID NO: 833434 - DNA, 555 bp, Homo sapiens
ataatcaggaggggaaaaggttccctggccaactcagggaggacataaggctggaggtttcggagtaagaggccagaggcagattcacaggggtgaggacacagtggcagtgaacatctcagactggacgggaccttgagaggtcatctagcccatcctcctgccttccggatgtatctgaataagaccaatatctgaaccctctccccccaccatgtcagaactgctccttgccttccttgcccttccactcccagcagaatgccaaaagaggtttgacttcgtgctaattattcttacttctttcctgctttcagtgttctgctaaatagaaaatagggcactaatggctggatggaaaatagggcatgatcttcccacaaagtctttgctcaaccacctgcctatagccagtgtcctcttggaaagcccagtcatccaaggaaagagaagtcaagctgagtcccagggagggggagaccttggggaagaggacctcagggaagaggaagaacaggagagcatwtctacaggaatgtgcaaggagagctgggg

SEQ ID NO: 833435 - DNA, 511 bp, Homo sapiens
ccatgatatctgcacacaactttaatccaactaccaactatctctccagggtgcaaaagatttgatatggaaaatgaggtgcttttcattcattcactggagaggcagggcgtggtggctcagcctgtaatcccaacacttgggaaggccaaggcaggtagattgcttgaggccaggagtttgagaccagcctcgccaacatggcaaacccccgtctccaccaaaaataaaaaaattaggcaggcatggtgctatgtgcctataatcccagctacttgggaggctgaggcacaagaatcacttgaacccaggaggtggaggttgcagtgagccaagatcgtgccactacacttgagcctgggcgacagagtaagactccatctcaaaaaaaaaaaagaaaagaaaagaaaagaaaaagaaaatcactagagaggctgaaagtatgrtactaggttgggcctccagaaacatctccaggaataatgcatacatgttccaataggtgacctac

SEQ ID NO: 833436 - DNA, 669 bp, Homo sapiens
aacagactaggaaaggtaaaggttttgtgaagatcacacagctagttaggtacgagcccatgcttgaacactggtccttagattgcaaatctatgtccttttgccaaaaccagatgaccagcctaaaagtcagtgactgcacattatttattctctttttatttatttatttacttttagagacggggtctcactatgttagccaggatggtcacaaactacttatttatcttaagagttctagttacttacacttgcatatagcataagttattcagggataatccaagggatacaggggatttttgtcaaagtcgcagaacccacaaggatatttttaatactatgtaacaaatactgggagtggagtatataagttgctttgcatattattggaaaacaacctccaatccaattacatgctcaaaataatgtccatttattctccaatgagtgctgtcagggttcatcccctgtgccatggaggcagagtcctgagctaccctgctgagggtctgaacagccttcattgtcaccagttttctattttgtctttgtgtragtgcttccaggaatggcccaggcctggactccttgctgggacctggcagtgcaggtgatgccttatatttgttgggctggctttttatttcctccttgtggaaaatg

SEQ ID NO: 833437 - DNA, 572 bp, Homo sapiens
aaaacctgcaatatataagacggcagacagtttgaaacatgctacagatatctgagtctgctacactcaaaatacatgacaaattattgtggttcttgatgtaacaaatactatcactgcagttagagaagagatgagtgttgctaccctattttacaaatgaagaaattgtattttaaatgatctacacctcatcctttggaaagaggcagagaacgctgttttctgacaaacacccttcctatgagttcctgttcaatagcaagcaatatagtaatagaacgaaagtcctcttttaaatcaagtggaatacatcttccttgaatgattgaatgcaaaccttgactatgtaagcattttcagaagaaggtcattgtctatggaattaattttcattcttggctcaactatgcctgctggccatcagagcttgctgaaaatcccatctgtttagttagggactggcctgattgayggagaaagattgataggattagaagataaatctctgtacctaggaataaattatttaagtgttctttagttctaggtagaaactaagtctctctaga

SEQ ID NO: 833438 - DNA, 589 bp, Homo sapiens
caggatttgaaaattttttacccattttcagtgttcaatattagtttcccagaaggtattaagtactatttaatgaccacagytttgtctctgtattgtacaacctctctttgtattatctttgattcttcaaccttaaggccagcatcgtgaaaagcgcacatgctctttaaatgttttaatgtgcatactttacattgtatggaaatttatctgcatttatttttatcatctcttgtccttcctaacatccttttacattcacgtaatatttttctgtttcaccatttcataaaagtgttttgcagtttgaatcagtgcttctaaatgactcgtttagagtagaaaaaacatttttttgagacagggtttggctctgctgtccaggctggagtgcagtggtatgatcatggctcactgcaacctccgcctcctgggctcaagtgatccttctgcctcaggttcccgagtagctaggactacaggcctacacaaacacatccagctaattttttttttttttttttttgtagagcctgggtttcaccaggttgcccaggctggtttcaaactcctgagctcaaccgat

SEQ ID NO: 833439 - DNA, 560 bp, Homo sapiens
aaaagacaaattacatagggaagaacaaatacaataaatcacaattcttatctagaaaatatgcaaaacaaaaaaaacccaatggggtgacatctttaacttgctggaagaaaaaaaaaaagaaactattarccatagtgatgtgaactgcagtaatcagaatggctagctttgttttgagttcagtggtggcactcctctgtaggccagggctgacagtagaagatattatagaagtgggatcatgaagagtaaagagcatgaaataatcctgaaataacggaagtcaggtcgtgcacttaactatcagaagcaaggtgaatacaattgttgtaacaatcaaaggtcagagtggaagccaagcatgtctgacccagagtgagctgtggagatagagtatgatgttcccaagggcaaaacagatgggtagtcaacaatggtattttacaatctatacaaccaaaagaaatcaagtattaatgattaggaagctaagagcagccactgcaatttaatgtcataatcttttgttcagttgacagacctgagccagttcttag

SEQ ID NO: 833440 - DNA, 586 bp, Homo sapiens
tcatatagagaatggcaatcagacaagtctcttcatcaaaatcagaaatagagaacaatttatgacacctactagttaagtataaggtggttttctgtctagttatgtgaaagttgattgttttggcgttacaaaattctattaaaaatgttgaacagaaaaaaagaccctaaaattgatgatattagatcattaatgacattacttttttttggattatttattttttattgatacaaatatttgtacatatttatagaatacatgtgatgattttttttcccctgagacaggatctcactctgtcacccaggctggagtgcagtggcatgatcttggctcactatagccttgaccttcttgggctcaagagatcctcctgcctcaacctcctgagtagcttggactataggcacacaccatcatgcctgctagttcttgtttctttttgtagagacaaggtcttgctctgttgcccargttggtctcaaactcctgggcttggtgatcctcccaccttgacctcccaaagtgctgggattacaggtgtgaaccaccatgcttggccataatttgttacatgcat

SEQ ID NO: 833441 - DNA, 372 bp, Homo sapiens
aggaggagaaaaatggttgcactctggatggatatattttgatggtagagcccacaaaattaactgatagattaaatgtgggttgtgaggcaagaatcaaaatgacaccatggtttatgactcaagcaattggaagaataaaatttccttttacttagattgaaaaaactgtaagaggagcagatttggggctggaagcagttgggggtgggagggcatggagaggaataccaggacctgttgatagacacaaaagtggcactgtcagtaagaggttggatatatgagtctagagttcaggggagagggctgggctggaaatataaatktgggagccgtcagcatatagagtgtatttaaaatcatggtatt

SEQ ID NO: 833442 - DNA, 576 bp, Homo sapiens
aatatttaagcaaatcagggcaataggtgttaaaaattaaaaagtgtaygtggcatattgaggtggcataagttaggtatcattaataatttcaagaataaaatgatcttgaattgagatttggaaaatatagatatttgtcaagtaggcgaggcgagaaagggcattccagcatgggcaatggtccaggtatgtacacacacatacacactcacacacacattggcaaatttgagggaactgcaagtagtttattgtgggtagagtaatataaaatagaattgaaagcaagttttttaaaatgagcctaagggaatacgatagtagcaagagagaactttgttcagaaaattattgcatacgtttctattttttttttcttgtttttgagacagggtctcactcagtcgcccaggctggagtgcagtggcaagatctcagctcactgcagccttgacctcccgagctcaagcgttcctgccacctcagcctcccaagtaagtttctgagactataggtgtgcgacacgaagcccagctaattttttttttttttttttttttttttgtagagact

SEQ ID NO: 833443 - DNA, 628 bp, Homo sapiens
aaatgactttgtaacttcacccttttcatttatgtagggcgtacaccaagtaaccagtggaaacctctagagggtatttaarccccaggaaactctgtaacttggcccttgagccacttgcttggacccacttccaccctgtggcgtgcgctttcattttcaacaaatctctgcttttgttgctttgctctttcaaaaaaaaagaatattacaaaggaaacaggtgaacagcagatggaagagatgcactgggcaaggcatgtgggaaggggtgtgcagcttccatgccttctctgggcatgctaccttctaggaacctccacatgttcaattatccagaagctcctcaaatctcatccaagaatttttatagagctttatctttggctctctccctcctttccccaccctaagtcacctcattaggataaactcaggtgtgaccaaaaggtcttgaaacaaaagacacttttattactcaggaaattctaagagttttaggaactttgtacaagaaccaaatattataacaaaagatgctcctgtcactcttatcactcaaaaaacaacaagggtttagaaggtctatatcaggaaacgaggacaaaaaccatacacatttcacatt

SEQ ID NO: 833444 - DNA, 498 bp, Homo sapiens
ttgcttccagtcttgcatcctttcaagcccttctccatgctgagtcatcctttaagtacgcctgaacccattatgggcatcccattctcttttatttatttatttatttttgagagtcttgctctgtcacccaggctggagtgcagtggcgtgatctcggttccctgcaacctccacttcctgggttcaagtgattctcctgcctcagcctcccaagtagctgggattacaggcgtccgccaccatgcctggctaattattgtatttttagtagagacggggtttcaccatgttagtcaggctggtctcgaactcctgacctcaagtgatccgcccacctcagcttcccaaagtgctgggattataggcrtgagccaccgcgcctggctgttcaaactccttagcctgttctacaaggttcttggaaacccagctccagcccacatctctagcttcctctcctataaccacttccgttttaccatgtatttcttgtat

SEQ ID NO: 833445 - DNA, 632 bp, Homo sapiens
tggttttgtgttctttgtttagatattatttgtttgctgtttgacataatctttgaagaagggagaaccttgtgtgccctgttcttctgttcttccccaaattctgtaatagtgcccaawacagagacacactcaataagtatgttgcataaatatatatgaatgcacagtgaatgttaggttaacgggggcttccaggtggttcaggaagagcaaaagctgcaaacgacagccggacttttctctcttgagctgaaaagtagggcagacccattgcttttccacccctttgtacatcaaaaaccatattattaacatcctccaggtggtaaaagaaaagaggacactagctgatctatctgtgccatatagttttttggttcagaatattaactacttggagaattacacacacactatcagatttaaagacttactataaagctacagtaatctcaggacagtattgaccagtggaacagaatcaagagcacagagacatctgtagaaatatggtcaattgatttctggcaagcttccaaagacaattaatggaagagaggatttgtctattcaacaaaggatgatgaaacaattggtcatccatatgcaaagccaagaactttgaccaa

SEQ ID NO: 833446 - DNA, 632 bp, Homo sapiens
tggttttgtgttctttgtttagatattatttgtttgctgtttgacataatctttgaagaagggagaaccttgtgtgccctgttcttctgttcttccccaaattctgtaatagtgcccaatacagagacacactcaataagtatgttgcataaatatatatgaatgcacagtgaatgttaggttaacgggggcttccaggtggttcaggaagagcaaaagctgcaaacgacagccggacttttctctcttgagctgaaaagtagggcagacccattgcttttccacccctttgtacatcaaaaaccatattattaacatcctccaggtggtaaaagaaaagaggacactagctgatctatctgtgccatatagttttttggttcagaatattaactacttggagaattacacacacactatcagatttaaagacttactataaagctacagtaatctcaggacagtattgaccagtggaacagaatcaagagcacagagacatcygtagaaatatggtcaattgatttctggcaagcttccaaagacaattaatggaagagaggatttgtctattcaacaaaggatgatgaaacaattggtcatccatatgcaaagccaagaactttgaccaa

SEQ ID NO: 833447 - DNA, 632 bp, Homo sapiens
tggttttgtgttctttgtttagatattatttgtttgctgtttgacataatctttgaagaagggagaaccttgtgtgccctgttcttctgttcttccccaaattctgtaatagtgcccaatacagagacacactcaataagtatgttgcataaatatatatgaatgcacagtgaatgttaggttaacgggggcttccaggtggttcaggaagagcaaaagctgcaaacgacagccggacttttctctcttgagctgaaaagtagggcagacccattgcttttccacccctttgtacatcaaaaaccatattattaacatcctccaggtggtaaaagaaaagaggacactagctgatctatctgtgccatatagttttttggttcagaatattaactacttggagaattacacacacactatcagatttaaagacttactataaagctacagtaatctcaggacagtattgaccagtggaacagaatcaagagcacagagacatctgtagaaatatggtcaaytgatttctggcaagcttccaaagacaattaatggaagagaggatttgtctattcaacaaaggatgatgaaacaattggtcatccatatgcaaagccaagaactttgaccaa

SEQ ID NO: 833448 - DNA, 607 bp, Homo sapiens
agagcacagagacatctgtagaaatatggtcaattgatttctggcaagcttccaaagacawttaatggaagagaggatttgtctattcaacaaaggatgatgaaacaattggtcatccatatgcaaagccaagaactttgaccaaaacttcaaactttatataaaaataattcaaaatgaatcatagagctaaatgtaaaacatgaaactataaagccgtttttggtagtttttttttttattattattattttatttttctttttgtttttgagacagggtcgcccaggctggagtgcagtggcaagtacacggctcactacagcctggggctcctgggctcaagggatccttctgcctcaacctcctgagtagctgggactacaggtgggtttcatcacgcccggctaattttttatttttatgttttgtagagccagggtttcaccatgttgcccaggttgctctcaaattgctgggctcaagtaatctgctgcctcggcctcccaagtgttgggattacaggcatgagccacgaggctcagccctataaaacctttcaaagaattgataggaccaaaatgtttttgacctgaagttaggcaga

SEQ ID NO: 833449 - DNA, 607 bp, Homo sapiens
agagcacagagacatctgtagaaatatggtcaattgatttctggcaagcttccaaagacaattaatggaagagaggatttgtctattcaacaaaggatgatgaaacaattggtcatccatatgcaaagccaagaactttgaccaaaacttcaaactttatataaaaataattcaaaatgaatcatagagctaaatgtaaaacatgaaactataaagccgtttttggtagtttttttttttattattattattttatttttctttttgtttttgagacagggtcgcccaggctggagtgcagtggcaagtacacggctcactacagcctggggctcctgggctcaagggatccttctgcctcaacctcctgagtagctgggactacaggtgggtttcatcacgcccggctaattttttatttttatgttttgtagagccagggtttcaccatgttgcccaggttgctctcaaattgctgggctcaagtaatctgctgcctcggcctcccaagtgttgggattacaggcatgagccacgaggctcrgccctataaaacctttcaaagaattgataggaccaaaatgtttttgacctgaagttaggcaga

SEQ ID NO: 833450 - DNA, 627 bp, Homo sapiens
caaggtttccaagaagccatgctctctctgaaagttctaggaaataatcattccttgcctctttccagctacttagggtttctggcartcttttgtgttccttggtttgtaactgcatcactgcactcccttcctttatcctaacatggcaattcctccctttgtgcatgtatctttctgtgtctccaaacctctctctccttataagagcaccaattattaaattgggtcccaacctaatccagtatgacctcgttttaattaaatttgcaaagaccctatttccaaaaaaggtcacattcacaggttccaggaggacaggaatttagggggacactattcaacccagtacaccaggatatctctatatccctactcctcgtatcacatcgccttggagctgtctcttgccttcatcgtgaataatccttccccttggatggcttccctttactggagtcaaaattattatcctcattgttcttgacaataggctctccctcctgtaatccatgtttcacaggagactgctgtcaggctaatctcatgaaaaaaggacagcttggatatctttactcctctactgaaaaactttttgatggtccccattatctgttggactaaggg

SEQ ID NO: 833451 - DNA, 646 bp, Homo sapiens
ttttatccactttgagttcacttttgtatgtggtgatagatagggatctagtttcattcttctccccataaatatcatttatgcccttaccatttactgaagaaggtgtcctttttccaatgtatattcctggcactttcgtagaaaatcggttggctgtaaatatgagaacttatttctgggttctctattctgttctattggtctatttgtctgttttaatacacatatcatgctgttttggttactatagacttgtaatatattttgaagtcagatatgggatgcctcaaactttgttctttttgttccgaattgttttggctactctgcctccttttttgtttccatacaaattttgggattatgtattctattattgtgaaggatgttattggtattttgagagggattgcattaaatctataggttgctttgggcagtatggtgattttaacaatattaattcttctgatcaatgagtatgggttgtcttcctgtttgtttgtgtcatttttaatttcttgaatcggtatttcatagttttctgagtacagctcagatgtagagtcccagctgaagttaacaaggcaacactatsatttcttgctgcagctctcatagtataaataattgtcttttttag

SEQ ID NO: 833452 - DNA, 580 bp, Homo sapiens
gggatcccctgagatgctctgccccatgacagcagcctcacygcctctgatatactgagcctagtgagctttgttagacatagaagtctgtatttcttccccaaggggtaaaatactagacacactggcctgaacaaatgctaaaataaataccgggggtagagatcttccatactatttctatcaagctggaattcagcagagacatcagaaagaaataggcttttggggacaagcaggctgtttttgacattacagtatatcagaggtcactacctggccaaactcaactagcaggtgtgtttagtttgttattcaaaattcttttcatgcacatattttataagtcatcattaaaaaaggagatttttttaaaatcatcattaaaacaggagattttaggttcaaatcttaattttaggcttccttgggagaaaaaaaactaataagacaacattgggcgcataatattttggccacaacttggaagaactgaaaaacggctgctgtctttaaaagatgtgtcattccccactcgctctatttctcctgaaaatcaatgctgaggatcagttgtcct

SEQ ID NO: 833453 - DNA, 515 bp, Homo sapiens
atgtttccaccgttttgaacaatttggggtcatccctgaatgcatgaaatcaagcaagtgtgctgtragagttcttacccactgggagctagcagacagttgcacagactcatgcagaggcaagtgttctatcaccccacatctcagcaatttggggtgaagacgaatctgggccactttttaattattattttaaaattttgctttccatcttttcaccttttagcataactcctcctcttctgtggagtaaatgtggcccctggggcctctaggctacttcatgttagggacaatattaaaatatgcatataactgatcatattttccagaagaaatacagttatttggcaaaatttgtttaattggggcacaggaggaggccattgcttgggactgagctcctgcactaggccccaacagaccaaaccaaaatgaagtcactcatgctaaatgccacatgatcaaactgaagctttaaggaagtagatggatccccaaacagaatagttttc

SEQ ID NO: 833454 - DNA, 515 bp, Homo sapiens
atgtttccaccgttttgaacaatttggggtcatccctgaatgcatgaaatcaagcaagtgtgctgtgagagttcttacccactgggagctagcagacakttgcacagactcatgcagaggcaagtgttctatcaccccacatctcagcaatttggggtgaagacgaatctgggccactttttaattattattttaaaattttgctttccatcttttcaccttttagcataactcctcctcttctgtggagtaaatgtggcccctggggcctctaggctacttcatgttagggacaatattaaaatatgcatataactgatcatattttccagaagaaatacagttatttggcaaaatttgtttaattggggcacaggaggaggccattgcttgggactgagctcctgcactaggccccaacagaccaaaccaaaatgaagtcactcatgctaaatgccacatgatcaaactgaagctttaaggaagtagatggatccccaaacagaatagttttc

SEQ ID NO: 833455 - DNA, 623 bp, Homo sapiens
taatgagtttctataaaaacatcatttcatttaatcttaataaaacactcagaagaaagtattattatgtcgatttgcacattagaaaaatacattccagagtattcaatcaactacctaaactttggcattatcaagaggtgaaaccacaggataaatcgggtctgtcttcctcccgaatctttctctttctccctagatcactgctggtttgagcacattggtgtggtttaaaaggggcttacgaaccaggcgtctctctagggcttattgctgtgcttattttttatcttacagagataaacagaactcatctacggtgcgtctctgaagccttgtcatttgggatttggaaaattcagtgtttttcattctacctacttaccatttatagagttcttgagctctgtccaaatatctctttgataaaaacaaaaacaatgtcaagtttgatatggaagtggaataacaaaaagtgcagaaatctgccccccaaataaasaagccatatagtttttgcctttagcattatggaagaggactgtgttagtcccttttcatgctgtgaataaagacgtacctgagagtgggcaattcacaaaagaaagagttttaatagactt

SEQ ID NO: 833456 - DNA, 462 bp, Homo sapiens
tgggtcaggccacccgggcccctggagaaaatataagaattttsatgtttgttctatgtgacagggggtacacttggaatatatcaagaggaaaaatgacatgaattagacggtgatgttttaaaaggatcacagtgacgttatacttataaactgtggaagcagggcaagactgaaagaaggcaatccagttttgaaattattgcaataatccaagcaagaaatgataagaagtttgttgctaaatgacagtagagagaagaagaagtatttgaattcagtatatattctgaaaatggagacattggatagagtgatgagagaagttttccctggcaaggtgacattaacctgagaatgaaatacaagaagaaaaaaaaagggggtggaagaaggcgggagagcattcctgtcagaggaaggattcagcacacagtccatgggatagaaacaagcttggtt

SEQ ID NO: 833457 - DNA, 462 bp, Homo sapiens
tgggtcaggccacccgggcccctggagaaaatataagaattttgatgtttgttctatgtgacagggggtacayttggaatatatcaagaggaaaaatgacatgaattagacggtgatgttttaaaaggatcacagtgacgttatacttataaactgtggaagcagggcaagactgaaagaaggcaatccagttttgaaattattgcaataatccaagcaagaaatgataagaagtttgttgctaaatgacagtagagagaagaagaagtatttgaattcagtatatattctgaaaatggagacattggatagagtgatgagagaagttttccctggcaaggtgacattaacctgagaatgaaatacaagaagaaaaaaaaagggggtggaagaaggcgggagagcattcctgtcagaggaaggattcagcacacagtccatgggatagaaacaagcttggtt

SEQ ID NO: 833458 - DNA, 462 bp, Homo sapiens
tgggtcaggccacccgggcccctggagaaaatataagaattttgatgtttgttctatgtgacagggggtacacttggaatatatcaagaggaaaaatgacatgaattagacggtgatgttttaaaaggatcacagtgacgttatacttataaactgtggaagcagggcaagactgaaagaaggcaatccagttttgaaattattgcaataatccaagcaagaaatgataagaagtttgttgctaaatgacagtagagagaagaagaagtatttgaattcagtatatattctgaaaatggagacattggatagagtgatgagagaagttttccctggcaaggtgacattaacctgagaatgaaayacaagaagaaaaaaaaagggggtggaagaaggcgggagagcattcctgtcagaggaaggattcagcacacagtccatgggatagaaacaagcttggtt

SEQ ID NO: 833459 - DNA, 631 bp, Homo sapiens
atggtgcctggcctgaattgagataacactgaagattttattgctgatatattataaattatttctattactgtggtcctgcgggtattgcattgtcaatgcactttgcttattacctcacttaatgttattaacacactttggggtataaaattacagttttatcatggaaaccttaaacacttacatccaaagtactgaatcaagttattatctttactgaccagacctattttattgtcattttatcgctcataaaatctgagattcaatttgatttaactattaagtaaagcttggtctactagagtttaaacccagctgtaatattaatatattaatatataagatgacttcattttattaaaggtgaggtaactttgaaaacctcttttaatgtctttctgcagctaagaaatttaacgtgacctgtttgcacttctatttcaccaacatcgacaaaaatttaagatcaccttcttgcaggatgctgagcgctgactctaacctgcttctggcctgcagaaatgcctgggacacattaatcagccacaaaatagcacygctcatcaaagtgtcaagacaagatgttcagttttaaaacaaaagcactaagaatccagcatgttaa

SEQ ID NO: 833460 - DNA, 526 bp, Homo sapiens
agcattggggattacatttcaacatgagatctgggtgggacaaacacccaaagtttatcagcttctgatgatcgcgcgatgccacctgttttcttctgttttcttttcttttgtccgttcttcatgtccactgctatcactgagccttgttctctattgaactttcccatcaacagtttctggcctacagatgggagacacctttgagcttcttagtgatactagtgccccttatgctagtttcctcctaaatgatttttaaaaataatcaagcccttctatggaacagtcatttgatgggtgtttctacttttcattgtatacctcctccagcatgctcatttctcggacttttaaatccctgttttccagcacctgccatagtaattctggtatgccmactttgcttaatttaagtcatcactttctctctgcctttaggagccatgctagcagcatgtttgcactatttcacttgcttctttcaatggtgttgaatactgtatttggggagagtactcccaaa

SEQ ID NO: 833461 - DNA, 653 bp, Homo sapiens
ccaggcagatttccaggtattcagagcaccccctcactcacctgaatcagcagcctgagccaccctacccttcctgtgcatagacttagatacagtggggccctctctattcctaatgtggccagayctccaggcatttagagcaccgattcacatgaaacagcagcctgagacaccctagtcttcctgcgcatagatctgggtacaggaggctctctctgcttcacacccaggcagatctccaggcattcacctggttcagcagcctgaaccttcccacccttcctgggcatagattgtggtgcagcacggctctctctactcacgtccaggcaggtctccagacataaaggatacctgctcaccgagatcagcagactgacatgttctgtgcttcctgtgcacagatcctggtgcaggaggccctctgcttcatgcccaggcagatttctaggcattctgagaacctattctcctagattaggagtttaggctgccctcatccccctgcagagaacttggggctgaggaggtttcccaactccacacctaggcccatttctgggtgcttggaggccacccactggattcttgcttggcactggtacctgtgcctgccattggaggacctgttggcagacctgcctgttcca

SEQ ID NO: 833462 - DNA, 601 bp, Homo sapiens
agaatatataaggaaaccagacaactcaataggaaaaaagcatataatttcactaaaaaaaatgggtgaaagatctgaatagacatttctcaaaggaagacatayaaatggccaagaagtatatggaaaaatgctcaacatcactaattaccagagaaatgtaaatagaaaccacgatgaaatatcacatcacagtaattagaatggttattatcaaaaagacaaaaataacaaatgctggtgaggacatgaagaaaggggaactcttatacactgttgatgggaatgtaaaatagcacaaccactagggaaattggcatggaattccatcaaaaaattaaaaatagagctaccatattattcaggaatcttactacagggtatatattcagattaaatgaagtcagtgtgtcaaaaaaataactgcacacttgtgcttattatagcagtattcacaaaagccaagacattgaatcaactgaaatgtcaatcaatggatgaatggatttagaaaatatttggcatatttacacaattaattctgttcaactataaaaaagaatacaatcctgtcatttctagcaacatggatgaggctgga

SEQ ID NO: 833463 - DNA, 601 bp, Homo sapiens
agaatatataaggaaaccagacaactcaataggaaaaaagcatataatttcactaaaaaaaatgggtgaaagatctgaatagacatttctcaaaggaagacatacaaatggccaagaagtatatggaaaaatgctcaacatcactaattaccagagaaatgtaaatagaaaccacgatgaaatatcacatcacagtaattagaatggttattatcaaaaagacaaaaataacaaatgctggtgaggacatgaagaaaggggaactcttatacactgttgatgggaatgtaaaatagcacaaccactagggaaattggcatggaattccatcaaaaaattaaaaatagagctaccatattattcaggaatcttactacagggtatatattcagattaaatgaagtcagtgtgtcaaaaaaataactgcacacttgtgcttattatagcagtattcacaaaagccaagacattgaatcaactgaaatgtcaatcaatggatgaatggatttagaaaatatttggcatattkacacaattaattctgttcaactataaaaaagaatacaatcctgtcatttctagcaacatggatgaggctgga

SEQ ID NO: 833464 - DNA, 631 bp, Homo sapiens
tcttctgtcctggactgctttttccacccacgttctatgtaattaacctcttaacattataccctttcatattaagttctttgcttattgtgcagagatattttcaccatggcttcaaatttcctatctctggaatattttagtcatttctgaaactcctctaagagtgtatggttcacaacccacaacaggaacctgaaggtgatactacagatttaaagtagtcttaatgatagtgaaatgacttgaaactaatagtcaatattttagtgttctggtttcatttttggattttattccaaaacctccagaagtacacattcccattattctacaatgctccattgtgatgtgaaaaatataatcactggctatgcttttaaacagccataatatgtttccttatatctgtagacaacttttactttttaaaaatagcattctttaaactgatatatttctggattcaaaatattaaaacctcataaacaagataacttttctgcattataaccaaactaaataatactrattttttacataaattatgtcttcgcatatgtacacatatgcacaccaagttatatgcacattttacttgacactttgagaaaaaccacaagatccaaaa

SEQ ID NO: 833465 - DNA, 584 bp, Homo sapiens
tataaatgacagtggtatatctcggcaaacaagtcagctcacttttagccacagttacatggctgtgccctgtgmctgagataaaaatatgtatagtccaacttaagttaaaagtgaaaaaaactaggtgtgaaagacttataaaataatatatgaagttcataatgaagaatagaacatgataatggcctaataaaatatttgaatagcaacaaatgagaaaaatcttatggtttatcaagaatttaggtttaggcataaaattaaggaaaaatgcagttagggcactaacaggaaaatattttattgaaatgggaactcctgataaaccagtttgttcagaatgccactgaaataaaactttataaactttcatatcatacatataacaggagtaacagttttaaaattcataatgagacttccatatttagcacatatattttccttcgttatctcccaaatctcactaaaatgatggtagaacatttataaaaatgtttacaccataaaaataaggatgacaggagagatgaacagacaatattaagaaaacttctggataatgttgagtaacttttgga

SEQ ID NO: 833466 - DNA, 563 bp, Homo sapiens
cagtttctgctttacttgattttttttccatctcagagccaaaaccaagctcagcaaacatagttcgcatgtgcccacaattctgattaaaccaaaagccttggcaatagaggactgaacagaagcacttagtcactagttccccagattttatcattgcactatcatttgattcttcaactctagcattaataagtacaaccaactgatagctgtgcctagctaattcctctcattcaaggttgtctgtgacccccaggcaagggtaatccttgttttgtgccctcaaggtgccaagtacctcttcttccccagtagtcagcctgctcatattgactgattttatgtctgtctccactgcctggctgcaagctacaaggggacagggaccatatctatcttgctcatcacagtagccccagctcctcctattacgctggcacatagcagactctcagctcatatttgttgaaatgaaaattaaattgaaatggggctaatcaaagaacacgtcayggaggaagcaaatccagagaagatttttgcaaggaggaatacaccat

SEQ ID NO: 833467 - DNA, 564 bp, Homo sapiens
tcccatggcacagatgaagaaagcaagcccttaagatcgcacagctaggaagtggcacagcaggaaatctgggtcaggctggctccagggcccacactttccagtcctgcactaattgccctgaaatccaaatgtcaggcaatagggaatgtttaattagattataggacatccactgcatgaacactgcataaacaagtatactgatgaagccaagcaaaatgggaacatgctaagttaatgaaaagcaggatgaaaactgtttatgagggcacctatatgtatatatatatgtgaaatatacatgtggaaaagcttggcagggaaaatacacaaaataaaaatcacggttgtggccgggtgcagtgattcatacctataatcctagcactttgggaggccaaggcaggttgattgcctgagctcaagaccagcctgggcaacacggtgaaaccccatctgtactagaattacaaaaattagctgggtgtggtgkcaggcacctgtaatcccagctactccagaggctgagtcaacgagaatcacttgaacctggaaggtggc

SEQ ID NO: 833468 - DNA, 579 bp, Homo sapiens
aagctcaatcaattcttttgccatgctcaraatgtacagctgatattgtgaagtgctaaaccctgtggaaatgatagttgtcatcagttcaatgaacaaaatgcaagcttgaaaaacaggactttcaacatgtgtttaccatcaattgatatgaaccgaacagccatatatctctttttagtgggctgaaactgactcctgtcacaggaagaatgggaaaaagtttgattttgcttgaaaaaaataacattatgaaagctaaaactcatgattttagaaaatgtaatatcttctatttaaaacaaatatagtttattacagcattatattgcaataatgttggagagataattgattaaaataaaatgaaaatgtatggagtaagcaaaattgaattaattgcttctgaatgtaatgttgttttcttaaattgaatgaaatgttttgagtctttattcatgctttttcgtagccctttcagacattttaactaatatatattagtgagatagagaaaccaatataaattagtgaaattaatatttgttatatctcaaatggatataaaataggtatttt

SEQ ID NO: 833469 - DNA, 594 bp, Homo sapiens
ctagggcaattgaaatactagaactttcttgatatggagaaaggtacccaaatgcttagggggaccaaaatgctggggtagatttattatgtgaggcctgcttgcytatcactttctaattatgtccccaggaggggccagaagacactcccttcatgaaggtattgagatatggtacacagaccaaaagagaagccccagtatctgtaaagagcctatggtacgtagtaactataaccaggaatgacacggaaactgctgccacttaagtgcactccacaaattcacggggatgatgggatgcccaggtatcagaagccaactggaagacactcaatcaccagacatgaggtagttactgtaatgaacagcagagccaaaacattaactggaatggtttgatctgcagaaggttgatcatggtgtccctgaaactgaaatagatgtgtggcctactcaagtcttacttgatttacgtaagttgaaaaggtctgggtctggtgaaagaggtgatgatcacaatagagaatcatgacatccctaattaattctgagacttcagccagttcttattcaaatgaaaggggagtggat

SEQ ID NO: 833470 - DNA, 598 bp, Homo sapiens
ttgtagttattttccaagttccagaattggtcatcttaggaacagatataccaaacgactagyagaagtgccatacaggtttccttctccatggggtatggtgagaaaaaccaagtgaaagccagtagaatctcctctacctacaaaagcataaactaaagaaatatcatcttcctgggggtattgcagaaattggtgccaccatcaaggcttgaaagatataaggatggtatatcaaggcttgaaagataaggatggtgaatcccattcaaattgcttatttggcccatgccaagacacgtagatcttggagaataacagtggcttatcataaacttgattgaatggtgactgtaattgcagctgctttcccaggtgttattattttttttctgaagaaactagtacaacctctaatagctcttaatctgaccagtgctttgttgccaccccctataccttgataaagacccaccagaaatagtttgctttcagggacagcattacaccttcactgttctacgtcaggtctgtattaactcccagtctactgtcaaaatctaatcccagggatcctgatagcctctccatcccacag

SEQ ID NO: 833471 - DNA, 598 bp, Homo sapiens
ttgtagttattttccaagttccagaattggtcatcttaggaacagatataccaaacgactagcagaagtkccatacaggtttccttctccatggggtatggtgagaaaaaccaagtgaaagccagtagaatctcctctacctacaaaagcataaactaaagaaatatcatcttcctgggggtattgcagaaattggtgccaccatcaaggcttgaaagatataaggatggtatatcaaggcttgaaagataaggatggtgaatcccattcaaattgcttatttggcccatgccaagacacgtagatcttggagaataacagtggcttatcataaacttgattgaatggtgactgtaattgcagctgctttcccaggtgttattattttttttctgaagaaactagtacaacctctaatagctcttaatctgaccagtgctttgttgccaccccctataccttgataaagacccaccagaaatagtttgctttcagggacagcattacaccttcactgttctacgtcaggtctgtattaactcccagtctactgtcaaaatctaatcccagggatcctgatagcctctccatcccacag

SEQ ID NO: 833472 - DNA, 598 bp, Homo sapiens
ttgtagttattttccaagttccagaattggtcatcttaggaacagatataccaaacgactagcagaagtgccatacaggtttccttctccatgrggtatggtgagaaaaaccaagtgaaagccagtagaatctcctctacctacaaaagcataaactaaagaaatatcatcttcctgggggtattgcagaaattggtgccaccatcaaggcttgaaagatataaggatggtatatcaaggcttgaaagataaggatggtgaatcccattcaaattgcttatttggcccatgccaagacacgtagatcttggagaataacagtggcttatcataaacttgattgaatggtgactgtaattgcagctgctttcccaggtgttattattttttttctgaagaaactagtacaacctctaatagctcttaatctgaccagtgctttgttgccaccccctataccttgataaagacccaccagaaatagtttgctttcagggacagcattacaccttcactgttctacgtcaggtctgtattaactcccagtctactgtcaaaatctaatcccagggatcctgatagcctctccatcccacag

SEQ ID NO: 833473 - DNA, 608 bp, Homo sapiens
caaaatttcgatgtgaaaactactgtttgcacttcaaatagtgaaactggttaaaaagaaaagttaaatgaccagtctcagcawcatgaaatacccaccaatgccccattctgttttctgtcttcaaccaggactgcagatgctctgactattgtatgcatattgcagccacaggtggcagcccaaatctgtacattttgctgcattctgtattatttgctcagtaattgaaggagaattgcattcttcttctttcctttgttgtctttacagacaaagtatctaattgttagggaaagcaatgaaatgccaataaatatattggcataaccttgcaggtcattataaaggattttttgttgttatttctgagaaagaagctgcatagttcaggagccagttagaccaacccgtgtttgcttggcacctgggtcctagtgaaacaattcaactgacttgtaaacaggcatgatgccatccagccatatgggtgcacatagatgctgccaagtgaccatgtagaaaaatcggaagcgtttgttgagggcagcagtcccagtatgagacatccaaacagctgtctaccctgagattcatacgcctgtggt

SEQ ID NO: 833474 - DNA, 603 bp, Homo sapiens
agagaagggtggcgtacactaaggtatggtgaagggggcgagaaggaatgaaattcaggttatattttgaaggctaaactcagcataatctgttaattggatgtggatttgagagacaagaaagacaaggctgtttccaaagctttttgcctgagctattgtgaagtccttaggaaacacacgagtttggaatggagggaatctggagttcaactctgcacaagttaactttaaggagatgtcatgtcaatacaatgggatgtgaatctatagtaagattggaggttggggctgtggaagtatacatttcagagttatcagtatgtatctggcatttacagtcagaaggctacgtgatgtcacctagagataaatgtgtagagaaggatgagttctgggaaaggatctctagacctgccaatatttatagatcagaaaatgatgaggactttgggaagatccagccaatgacttgatargacaataggaagatttcagagtcctagaagccaagtaaaaaaaaaaaagtatctcaagaacgataaggggaaaaaaaagaatgatatgaaagatacaacaaatatatgaaaatcattttgagga

SEQ ID NO: 833475 - DNA, 683 bp, Homo sapiens
aattagttttgcccctccacaatgtcagcaggaaagttctaatctggatccttcagcataacctcacacggtggtctctgagaattaattcagtgcagtaaaaggcaacccttctttggggaatacaccaggccctcccagtcatattcctaaccagtgctcctcacctcaggggaggcactcacgtgaggagggctgaggattaacgctcagtgggagtttgacctattcagccgaaaggtcagcttgccatggaagaacccattacaaaacagaagcaggacagctcggtggacacacataatgaaaggggaaaagtcacgagccctacttgccttgtgccctgctctttcccttcataaccccagctccttgccagcatggttcacaatgggaaggtggaccacaggcagagagccacagaggggcttgctattggagggatcacttgaagaaggtattctgaagtgaagaggactgtgacactgtgaggcagggtttctaatggattgttttattaggccaaggcagtcactggtggataggaaacatcatttcagaggtacttccttatcctcccccataaggtggagggcagtacggcatcacrggcaaatgtagtcttaaagttcggcaggtagtatctcaggaacgcctggcaaaaaggcaggcttcatgcccgg

SEQ ID NO: 833476 - DNA, 642 bp, Homo sapiens
aactgttattaaaaaaagaacactgcatttagtgatgaacgaacaatagagcgagatggaggtacctaaraaaactcccaaggttcttgctttggtgactgggtagatgactgtgttatcaacaagatggagatcaccaaaaaaggagacattgtggggtgacaatggggataaaattgaggtagttggtgttgatttatttttaattgtgtttaaggtctgtataacatccaattgtacttgaactggtgtttggtctacgccatagatacaaatctggtaaatcttatcccagaaagtgaatggctccccaaatttttctgcctttacatattccagaagtacaacataatcttattaatagcatctccctttgcatgccagtgattctcattcaaggagtggagcatgtcagaatctgccatgtacaagactgtagttcaaaaaggccagcttatcagagatgctgacatattccatagggaatttttgtcaaatctttctatatcctccattggaaattattgatatacatgatggctaaatccatgagttcaggtgtcatcacctacagctttatgtcaagtgaggagaacgttgaagggctcaaagaagtaaaagcagtatttgaaagctcacata

SEQ ID NO: 833477 - DNA, 587 bp, Homo sapiens
gaaattttgactaaatatatctgtgggataggtaggaatttgaattttgagcaagcagcccttatgattttgacacaagtgctagttatgtttctatgctttatgtaaacaacatgtstgtgattcttaggactttatcaagacactgagagaaatgttacactggaaactcaagatagagagcactcaagatagatagagagcaccatgaaaccactagggatctgttaggctttgaagggaaggcgagggtaaaagagagagagagttgctggctcaacaacaacacaggtttattggacaaaagacctgcagaaggggataccagctagcgctggagcccgctgccatttgcatgctggagtaattataggtccgagcgggaggggtctgggcttgttgtgaaatggggtggacagtgaggttagctgctgaaaagggaggaattttctgcagttaggcagttaggcctgggacttatccagcaggatgtttttcacagcccaagccttagtggaattttccactgtgaccagggtctgtggaatggcgggagtttacaaaatgttgggctaacaggatcttct

SEQ ID NO: 833478 - DNA, 642 bp, Homo sapiens
tgaaacagagcttcttcctattctgatgtgtgccaccacatgacaccaaagatcttgggattytattttcttctccttatactgatggaattactttcaaaatacacatacatatgtgagttggcaataaaccaatttttatagtggatatatctaaatgttaacatggtagattatttttatttttttccttgtgcttatttttgatttccaaattttccacaatggaattatattatattccattgcaaaaatgaattaagaaaatgcattactgataaactatttatggaataaaatgagctcacataagtatgaaaaaaatgtgcccaagttaattgattggtaaattaccatttctcctcattcatttaccctgtgctgtctctttcttctctgaagtgatatgaatcctggataaatctgatatatgtatatttatgtgagagtagcaatttacatttcacatgaaattatgcttccaattactaaatcaaggaatcatcaaaaacatcttcatcaccataaaaaggaaggtagtaataaaagtaatacactttttgatattactttaggcaaattaaaacttcaatgaggcacaaaaggttatgctgggaagtcacatacaacaaaagcctaaag

SEQ ID NO: 833479 - DNA, 647 bp, Homo sapiens
gttaggaagaaaatagattttggaagttatgagaactgtagagagtgagttgagcatagtttgtgatttttagggcttctaaaagtattaaggtgatggcagctgctacayggagacatgacggccagtgcagatgctgaactaacctgtaagacttggctggtttttgaataggtaaaatgggagaattgtaaggagagtttataggttttacaagcccatgctgtagcaggggagtgataacaggcaccaaatgtcacacacgtgccatgtgaagagaccaccaaacagacagcgcctgagcaataaggctgtttatttcacttgggtgcaggcaggctgagtccaaaaagagagtcagtgaagggagataggggtggggccattttataggatttgggtaggtagtggaaaattacagtcaaagagggttgttctctggcgggcaggggtgggggtcacaaggtgctcagtgggggagcttctgagccaggagaaggaatttcacaaagtaatgtcatcagttaaggcaggaaccagccattttcacttcttttgtgattcttcacttgcttcaggccatctggatgtatacctgcaggtcacaggggatatgatggcttagcttgggctcagaggcctgacag

SEQ ID NO: 833480 - DNA, 625 bp, Homo sapiens
agaataaaaatatagcttgacaaattctaaactactagtatgaagaagtctgtgtcctagtttaagagaaagtgtttttaatagaaagtagcacaaataacaaaaaatctgggcaatgatcttggaatatagaagaaaaaacatcacaataatatttaataaatgaaaataatgtatatggtaaatataaacttcatctgtaaaggttgtgaaaaactgagaagttgatttcatcccctagggaataaataagaaattgatagaggtcaactagtgggaacttctgaaggtttgtttgtagtgggaatattggaaacaacgttagtgtgtcctatgagattgaaaatatataataagcatgagcttttgtaggaaaataacaaaagatgcattttaaaataattgcagtttgttcttcaaacaaacttagaggtgatcccgaactttatgaattcagcctgcatgccttctcctgagcattcttgaagattcgtgacttaaatttgtgtaaatctaattatgttgttatttcccaagccartatgaaccaaacagacaattttagacctaaaattggtaatcactatgtaatttcataagaataattccatttttgaaattattc

SEQ ID NO: 833481 - DNA, 614 bp, Homo sapiens
ttccaatttaccaaaagtgttggtaatatttgttttaaatatttaaacgtttgaatcatatgttaaatgaataaatattaatggtatctttkacaagtggacacttcaacgttttggagaggtaagcacatacatattttttgtgtgttcattcacacataaacaatctgtgattaactttgatcatactcctaaaaagactaggatttttttctgttttgtttatttttatataaaatttacataaaatagggtgaacgaatttaagtaatatttataagttttgacaaatgcatatacatatgtaattaaaatatagtaatgtttactattatgttgtagtaaccatcataccacaaagtccactcatgttctttctcatttaactgcatctccattcccaaggcaacaactattctatttacaattgattagtttttgtcttccagaaattcatatgaatggaaccatacaacatgtacttttgtgtacatattagttaaaataatgtttttgatattcataaatgctgttgcatatataaatagttggtctctttcaataggtaggtggtattttcttgtatgaatataccagatttttttctatttgtt

SEQ ID NO: 833482 - DNA, 624 bp, Homo sapiens
aatacagttgcagcatacaaaatcaacatacaaaaatttgtagcatttctatatgccaacagggaacaatccaaaaaagaaattttaaaaaatcccatttacaatagccacacataaaattaaacatctaggaattgacttaaccaaagaagtaaaatatctctacaataaaaattattaaccactgatgaaagaatttgaaggggacacacacacacgcacacacacacaaatggaaagatatttcatgttcatgaattagaagagtcaataatgttaaaatgtccatactacccaaagcaatctacagatgcaatgcaatccctatcaaaataccaatgactttcttgacagaaatagaaaaaaaaaacttaaaatttatatggaaccataaaaaatccaaaagagccaaaactatcatgagcaaaaagaacaaaactagaggaatcactttctctgacttctgattatacgacagaggtatagtaatcaaaacagcatgayactaacataaaataaacacattgaacaatggaattgaaaaaagaacccagaaacaaatccacacacctgcagtgaactcattttaaacaaagttgccaagaacatgcacttggaaaatga

SEQ ID NO: 833483 - DNA, 618 bp, Homo sapiens
tacaggtgacagattatgatctgcctaatagttatcttactgtattttatctctagtgacagggtctcactctgtcaccgatgctggagtacagttgcaaaagatcatcgctcactgtagccttgacctcctgggcacaagccatgctctaccggagccactgcccctagttatggttcctgtgtaagtaatgacttattgctttatttcttttcatagatatattcattaaataatcagttcctaacctattccaataactcacttctcattttctttctcatatctgcctattacacctaagactttcattgaaagtccaatgcttaccattcattgatagtcttatttgaccattcagtggtattttcaaaagcaaccacaatgtgtttcttaaatttattccctaattttcattaccctacagtggatgtttcctggttcctcccttaactgacctataaatagtagtatccttcatgtctttatcctaagacttcattttatctaccctctagtctatscagaggtggattaaaagagaaatgaatgaaatctaaacttcagggaccttcatttaactcctttaaaagcactgggaggagccattgcaatatg

SEQ ID NO: 833484 - DNA, 638 bp, Homo sapiens
tcatttggatgtacaaattccatcactttttgaaaaaagtcaaagtgttctacagtcagtcctgccagttatcttcaaaggcaacgagcagaaatcacgcagtcaccacgtgctggggcactcttcccattcctctcctcttgggcaccttgtggcagaaactctcataaagtcactgacaagatccagatccagatccatgtatggcaggtgggttctgtagctgaagcttcaacagttttcgagctggtgagggatctaattgttgcatgcttctctttcctgcagagaaaagaggccaaaaaataaatttcaattgaaataacgtaacatttattgaaaacttaatgtagggacattgtgacacacatggaagggcattacaaagacaaataagagagtctctggcctcaaggagatgacaatttggtaagaatgccagccacagctgggcatggtggctcacgcctgtaatcccagcactttgggagaccaaggcgggacgattccttgagcccaggagtttgagactagcctgggcaacacagtaagaccttgtctctacaaaaaaaaaaaaaamaattagcctagcatggtcctagcacgatcctccaactacatgggaggcaagaggatca

SEQ ID NO: 833485 - DNA, 583 bp, Homo sapiens
gcactgcagatcaagtagggaaagtgactgatattcaatgatggtgttagaacatatgatttctcataagaaaaaatataaacatatataccatctaggattatgtaagcacactttatgatgttcacaaaacaaaaatgttgcttagtaatgcatgtctcagaacatacacatgtcattaagccatgcatgagtgtactttatatcatctctggaacacttcggtcaatcaggaaacatgaccgagacaaatctcaatcattttaagaggtttatttgccaacattaaggatgcacacccaggagacaagtctatgcctttctttaaaaatgattatgagggctccaaatttaaaggggaaagggtgaaacactgagaaatacagttttcatgtaagactggggtagggggaaaacattcattgatatggtttggctctgtgtccccacccaaatttcaccataaattgtaataatccccatgtgtcaagggtggggccrggtggaagtaattggatcatcaaagcagtttcctctatgctgttctcatgataatgagtcacatgagatctgatggttttgt

SEQ ID NO: 833486 - DNA, 477 bp, Homo sapiens
aaataaggaattggttgagtaagtagagacatscctgtataggtttactctgtagccataatggataatattgagaaatctatttatggtcaatgaaagatgtttgtcatatattatcatataaaaagcagattataaagcactatgtacagtattttacaatgagtatttaaaaactttttatagaaacagggtcttgctctatcactcaggctagagtgcagtggcacaatcatagctcactgacgcctctgactcatgggatctggtgatcctcctgcctcagcctcctgagtagctaggactacagatgtgtgccaccatgcctagctaatttttaattttttttgtagagatgggatcttgctattattgtccaggctggtcttgaactgctggtctcaggcaatcctcctgcctcagcctctcaaaagcactgggattataggtgtgagccactgggcctggccatatttg

SEQ ID NO: 833487 - DNA, 529 bp, Homo sapiens; identical to SEQ ID NO: 823935

SEQ ID NO: 833488 - DNA, 507 bp, Homo sapiens
aagaaattcagtcctcaccctccttgactttctacagtmctttgacactggtgaccacgctctgccttaaaatgttctctcattggctttcctgatatcctctcaatctcactcctctctgactggtcattctcctgccttctgtgacctgtcttcctcctgctccctgaataaaatccctccccaaggttccattagattctttcttttcctctctttactctcattccctaggtgggttctttctcccttggcttcacgtgaaggactcccagatcttacaacttcatccctaaccccttcccagtgtcccagacctgcatcaaccctgtctgttgtgcatgttcaccaaaatatagcccagtgcagtcccaccaacacgactaagcaaccaaaaggagctatccagaagcagctcagcctgcctcctcccacctgaccacaatgctgcatctcctcaggattcagctcaatgccttggattcaccaccaaccctttccttcacc

SEQ ID NO: 833489 - DNA, 601 bp, Homo sapiens
ttccacttaaggccccagcttctggaggtagatggagaaaacgagaagaattaggttgcatcaaaaatgaaacgtgggctttattttaacctcagaagacaaatctyactgtctgcacaccctgggctgcatgactgttagagctcttgaacgagggtctctgtctcccctggagcctccctcttagtgttcacacttagctccatgtgtaattaagcagatgctctttgacgctcaatttaaattatcaaatgtcaggacatgacactttatttgtgtatgttttccttgcttagcaattcaggcagtacctggggaagggaaatgtgtctgttcaactttagaaaagagcttcaccgtgtagctctatgacgtctgaaattctagtattagagggtcacttctttggcatgttacttcttttcatgcaaattccccaggagaactctacagactcacttacttacctgatcagaggttgagctaataatatcttttcttgagatcaaaaagtgggagtggttataagaacgtgggttgcctaagaggtaggatggttctggtcctggtgctggagacaatagcagattccttttcaaca

SEQ ID NO: 833490 - DNA, 593 bp, Homo sapiens
actcagggggctgaggcaggggaatcacttgaacctgggaggcagaggttgcatcactgcattccaacctgggcaacagaacaagactccccgtctcccccacaaaaaaaaaaaaagaaaagaaaatgaaatcmgtagcaatatctgcattcccatgttcattgcagcactattcataatagccaggatacgggatcagcctaagtgtcaacagatgaatgaataaagaaaatatgagatatatatatatatacatacatacacacacagtggaaaattataatcctgtcattgtgacaacatggatgaacctggaggacataatgttaagtgaaataggccaggcacagaaagataaatactacaggatcttacttatatgtgcaatataaaaaagttgaactcatagtagagaatagaatggtgattaccacgggctagacggggagagggaaagttggggaaatgttagtcaaagcatataaaatttcagacaggaagaataagttcaagagatctgttgtacaacatggtgactatagttaataacgatgtactatatacttgaaaattgctaagagtaggttttaagt

SEQ ID NO: 833491 - DNA, 364 bp, Homo sapiens
atgtggctaatggctaccatagtgggacagtgcaggtctggaggatgtgaaatcgggtgaacacacaacctttacacccgaaacagtgctgcagaattgatgataattactctaaatgctcatctcttatcttttcgcgtctgaaaactgctgctgagtgtacaaaccaggtaacagtaataagggccaatcccagtggtagaaatggagttgatatggtggagaaggatctgttgacaccagaccctcaaccacagccatgcacagctggacagaagccccctcggactcccaggkctggagtcggggcagaggcagaaagtctaaaaagaaatacatcagtgtagtcatttcagtaataaat

SEQ ID NO: 833492 - DNA, 364 bp, Homo sapiens
atgtggctaatggctaccatagtgggacagtgcaggtctggaggatgtgaaatcgggtgaacacacaacctttacacccgaaacagtgctgcagaattgatgataattactctaaatgctcatctcttatcttttcgcgtctgaaaactgctgctgagtgtacaaaccaggtaacagtaataagggccaatcccagtggtagaaatggagttgatatggtggagaaggatctgttgacaccagaccctcaaccacagccatgcacagctggacagaagccccctcggactcccaggtctggagtcggggcagaggcagaaagtctaaaaagaaatacatcartgtagtcatttcagtaataaat

SEQ ID NO: 833493 - DNA, 453 bp, Homo sapiens
aaaatggacattttaaataatatagtgtggcatctcaggaaataggattctctttatgtcaccagaatctggttttgtagrtgattattactgtcatttgccaatattttggttagtaatttttctcaactgtctttttatgtctgtggtttctgtcctttgcggccactgaagactccatcaactagcttagtaaccagctaatgatggatcaagatatctttaaaaaactggaactaatataatcatacctgattttatttcacttcactttattgcattttgcagatattgtgtttttaaaaattaaaggtttatagcaaatttgagtcaagcaagtgtatcagtgccattttcccaaaagcatatgctaacttcatgtctctatgtggcattttgctaattttcacaatatttctaactttttaatcactactctattttttaagtggt

SEQ ID NO: 833494 - DNA, 502 bp, Homo sapiens
tgcctctacgggccttcaagatcaaacwttttttttctgaattagttgcataagatacaaatgcaactggcaaatgccctgacttgactaactggttattttgacagtgccctccagctttttatgcttttagttgatttccttggcaacatggcatcatgacttattttcatctcatgtgccttccctttggaaggacatgttgatctgaatatttgtctacttcttttcatcaaatcctaatagtcctcttagattcaaatatcactacatgacagaggaacctgtgatatttattaattaaatgtatacattctatgaatatatgtgacatgttagcattccttaaataaataagccatatcttaattaatataaacatctattcagaattcagtggagagttgtaactgatgctgttttcaagcaatgtaccatccaatcgagtgagttacattagataacccctaaactacattatatacaaatatacatttatatg

SEQ ID NO: 833495 - DNA, 469 bp, Homo sapiens
gttgtagtaattcatatttctaaaagcagaatraaggaactgtaaagaaccaacaccttattctttgcctaaaattataaaaaaacacagaaaataattttcccttagtggacaatatatataggccccagaaaattatttgctgaaaccaaatcaacaaaacagcattttataagtggcctattgataacttctgattgctttttagtgtgttacttaatggcctgttttaaaaaactaaaaggagttcttaaactcttcagtatcattgtcttaagatattaatatatcattattctatttaccttgatcattgctttcttagagttatttgattaatggactgctttaatcttgacaggaggttgaaacctacttttttgagggtctgctgaaatggagagaattaaacctcacagaacacttcggtattttctatttcgtttctattttattcacccatagtttg

SEQ ID NO: 833496 - DNA, 662 bp, Homo sapiens
caaagcccatgcgtgcgtgttctctyagcctacaatggggagatattcaggtgcactctccgatgtgccaacacacagaaaggttcaagccgtgcagggtagtcctttccccatcacgtctcataaaaacttctgtgtcaagtcaaaagaacttactcggccgggtgcagtggctcatgcctgtaatcccagcactttgggaggctgaggcgggcagatcacttcaggtcaggagtttgaggccagcctggccaacatggtgaaaacttgtcttctaaagatacaataattagccgggcgtggtggcacgtggctgtagtcccagctacctggggggctgtagaattgcttgaaccgggagggggaggttgcagtgagctgagatcgagccactgcactcgagcctgggagacagagtaagatgtctccaaaaaaaaaaaaaaaaaaaagagaaaaaaaaaaacttagttctggtttcaacatgatacataaactcttcaaatctgagcgagtagcaacatgcaacattcagaattggctttgtcctacagtaactaagtgattccttagaataagaaccttcttagaaggctcctgatctttcatgcaaatagacctctggtgggccctctctagctaacctcccaacagtcccattaggg

SEQ ID NO: 833497 - DNA, 561 bp, Homo sapiens
gaatcaaaaagctcccttaagaccacccagctttcaagttgaatgatgagaaaaaaaaaaaaaaaaggaccacccagccaacaatgatggagccagcattcaaacacaaacagtctggctccagattcagtgctctgaatcaaggttgctcaaagagtgacccacaggctggtgccagtctacaaactattagctgtctctgtggagaaagtgaaagtgtatgtatagaaacctttctagcaagtcaacatcactgcaacacttttatttctaaaactattggtccataatttattggaaattgtaaaacattcttgtcttttaccatagagtttgaggaaccttatttagcttatcacataagcactgtgatttaaatataaatcacagcctttctccaaatgctcttaagttcctatgaataatgttggagtcacttggcagtcccaaaatatattacttcttgactcaattccaatgtttcaaaatagagktatttgagatatttttagttctcatgactctgggttagaaagggatcctaagttctcagtggagctt

SEQ ID NO: 833498 - DNA, 611 bp, Homo sapiens
taatggatacacaaaaaataaaaagtaagaaactaactcatatcacaacagaaaactacatttgctaaaagggaagctagtaaggaaaaaaagaagaaaaataagagaacaaaacaaccagaaagcaaataacaaaatggcaggcattaagtccttacttatcaataataacattgtacataaatgaactaaactctccagtcaaaagagatagagcatctgaatagataagaaaacaagacccaattatatgttgtctacaggaaacacacttcatctataaagacaaaaatagactgaaaataaagggatgaaaaaagatattccatgccaatggaaaccaaaaaagagcaggaatcactatccgtacgtcagataaaatagagttcaagaaaaaaactgtaagaagagacaaagaaaggtcactatataatgctaaaggggtcagttcagcatgggaatataacaattttaacccaatttgcacccaacactagagcacccaaaaatataaagaaaatgttattagagctaaagaaagagatgccaaaacaataatataataataactggagacgtcatcatcccaytgtcagtattggacagaacca

SEQ ID NO: 833499 - DNA, 517 bp, Homo sapiens
cttaaatacttcctctaaatgtaaagaaaaaaaaaaaaagaaaagaaaagaaaaaaagaatgctggctaatagaaaaattgtccgaggtctgtgggagtttcaagttaagatacccataacaaatgtgtctgtcactgggtttaagacactgttattcagtttttgaaatagtatccatgaaataaaaacaaaaaaacagaacaaaacaaaaaaccttcagcccaaaatatacaacaagtcttccagattggaggaggaattaaagaattcctgtaatggaagcaatgtcatagaaatccttactgatacttatcatcttcctgcattaccctaacattgtaaaagaaaacattcctcacaagctgtttcttgatcagccttgttgcagtaagttccatctatgtaataagttccatctctgtcaatctgggcagcagcttttgctgtgagcttgggcttcaagyctcagagcagggctcacaacttacattactgtatcattcccctacttacact

SEQ ID NO: 833500 - DNA, 512 bp, Homo sapiens; identical to SEQ ID NO: 820825

SEQ ID NO: 833501 - DNA, 676 bp, Homo sapiens
agggaaagcttttctttaaagtggaatgccaactaataaatttagaaggaaataggccgggtgtggtggctcacacctgtaatcccagcacttcaagaggccaacgtgggcggatcacctgaggtcargagtttgagaccaacttggccaacatggtgaaatcccatgtctactaaaaaaaaaaaacacacaaaacttagctgggcttagcgggcacctgtaatcccagctactcaggaggctgaggcaggagaatcgcttgaacctgggaggtggaggttgcagtgagctaatatcgtgccactgcactccagcctggatgacagagcaagattcggtttcaaaaatgaataaatataaataaataaatttagaaggaaacaaatagaaaaaaacattttgcaagtccacagcaataactgactcaggtacaaatccatgaatgttaaaccattgaatgaaaacttgatgaggagcagaataatattcacatattcacaaaggatcttcctacatatttgttatagtttgccaaggggtaaaatagtgccttcacaatggagtgctctgggagtatcatctttgacaagtgatcaaagtgaacattttcaataataggacaaaccgacatcgtgtgcctcctggtacaacaagctgaaaagaacaccgcatcact

SEQ ID NO: 833502 - DNA, 676 bp, Homo sapiens
agggaaagcttttctttaaagtggaatgccaactaataaatttagaaggaaataggccgggtgtggtggctcacacctgtaatcccagcacttcaagaggccaacgtgggcggatcacctgaggtcaagagtttgagaccaacttggccaacatggtgaaatcccatgtctactaaaaaaaaaaaacacacaaaacttagctgggcttagcgggcacctgtaatcccagctactcaggaggctgaggcaggagaatcgcttgaacctgggaggtggaggttgcagtgagctaatatcgtgccactgcactccagcctggatgacagagcaagattcggtttcaaaaatgaataaatataaataaataaatttagaaggaaacaaatagaaaaaaacattttgcaagtccacagcaataactgactcaggtacaaatccatgaatgttaaaccattgaatgaaaacttgatgaggagcagaataatattcacatattcacaaaggatcttcctacatatttgttatagtttgccaaggggtaaaatagtgccttcacaatggagtgytctgggagtatcatctttgacaagtgatcaaagtgaacattttcaataataggacaaaccgacatcgtgtgcctcctggtacaacaagctgaaaagaacaccgcatcact

SEQ ID NO: 833503 - DNA, 590 bp, Homo sapiens
ttgcagcccctgagcctgtggcttttcmccacccagccaagtcaagccaagccaagtcttgccatccagtgtgctggtgtgtcacagagaacagcagacagccacattgcaagggggctgatgaactaactaattcacactcaaaggtgagtgtctaaaggtcgcttttctgcagcccttcccaggaggaactgggattttaacaaaggagtgagaggagcagcgtgggcctcagcatagaggactttaagcctagttctgacaaagtcactttcaaagtgagggtcattgttacctgggagccatttcatgggactttaatcagtgcccaggtcagagcagtgacatcctggcctgtccccgaaaagcctgggtggcctcaaggcccagactgctcacccaccaaaggcctccaatttagactcctcagcaaacacaacacctgtgtcacatggattatacgaagaggacgcccacttcaaagttttcattcagcatcccccatccggatcacacttcatatttccaaaaagaaagctactccttttcttacgcatagtacaacttgattacactgtaatattcttggc

SEQ ID NO: 833504 - DNA, 539 bp, Homo sapiens
ccaagtcaagccaagccaagtcttgccatccagtgtgctggtgtgtcacagagaacagcagacagccacattgcaagggggctgatgaactaactaattcacactcaaaggtgagtgtctaaaggtcgcttttctgcagcccttcccaggaggaactgggattttaacaaaggagtgagaggagcagcgtgggcctcagcatagaggactttaagcctagttctgacaaagtcactttcaaagtgagggtcattgttacctgggagccatttcatgggactttaatcagtgcccaggtcagagcagtgacatcctggcctgtccccgaaaagcctgggtggcctcaaggcccagactgctcacccaccaaaggcctccaatttagactcctcagcaaacacaacacctgtgtcacatggattawacgaagaggacgcccacttcaaagttttcattcagcatcccccatccggatcacacttcatatttccaaaaagaaagctactccttttcttacgcatagtacaacttgattacac

SEQ ID NO: 833505 - DNA, 565 bp, Homo sapiens
agagtgaagaaaacttagacttatgggacaccaacaaagaaatgaatatgtgcattttggaagttacagaaagttaaaagaaaaagaaaagaacgaaaagtttatttaaagaaataatgactgaggtcacttccaagatggccgaataggaacagctccggtctgcagctcccagcaagatcgaagcagaagatgggtgatttctccatttccaaatgaggaacctggttcatctcactgggactggttagacaatgggtgcagcccatggagggcgagtccaagcagggtggggtgtcacctcacccaggaagtgcaaggagtcaggggacttccctttccttgccaaggaaagctgtgagtgactatacctggaggagtggtacactgctgcccaaatactgagcttttcccacggtcttcacaaccggcagaccaggagattccctcctgtccctggctcggcgggtcccatgcccacggagccttgctgactgctagtgcagcaatcygagatggacctgggacactggagcttggtggggggaggggcgtccaccattgc

SEQ ID NO: 833506 - DNA, 405 bp, Homo sapiens; identical to SEQ ID NO: 830213

SEQ ID NO: 833507 - DNA, 613 bp, Homo sapiens
ttatctatcccagttggaactaattgtgcttcctaaatctgaggattcatgtctgtcaccaattctggaaaattctcagctagtcttttttttttttttccatatttcctttcctccattctctgtagkgcctatttctgtaactcatattaaacatacatttttcttttcattcagtgttatcccttagactttgaaaaatatattttctttctttttattgctctttcttgcattttgagtagtttcttcaaatatttcttctagttcattaagccttttctcacctatgtctaatcttccatttaacccttatattgagtttttaaaatttcaatggtgatatcttcatttttagaagttctacttggtcatttttttttcctatctgtttttgtgtttcatagtgtcttgttatgttattattttttataacttattttgggtatttaataattttaaacacgtctattatatagtcttatgtgatagctcttgtatgtctacactcactctttgttatacctgctgactcttttatggtggattgtgttcttgtgggttttgttgttttagattgtgagctcatgtttggtgggacattgtctactgg

SEQ ID NO: 833508 - DNA, 628 bp, Homo sapiens
gatcctccccactcagcctcccaagtaactggacccacaggcatacacctccatgctaagctaatttttaaaatttttgtagagaccatgtcttgytatgttgcccaggctggtcttaaactcctgggctcaggcaatctttccacctcagcctccaaaagtgccggaattaaaaacttcaggtgtcaaccatcgcacccagtcagtacaggttaacaataatgtacatttcagtatatatttggttatgaagccaaacataatgaaaggtgccattttaaattttatttaaaaatcacatttttaattatctaattaattcaaatacaagaaagtgtgtgtcatttgctaaatagggaaaagtcaaaacatttcttgctatttatataatgtgaatattattacattttattaggataaactatataatgtaacatttactaatacagtgatataaactaaaataatgcttccttttatctgtatgccaaatgattacataatttaaaacttcccgaagggagttttcaataatatattatagtgaaagagtgagagtatcggaaagggtggtaggcactgatgcaaagtaacgatgtcaatggcactagggaaataggaagaggac

SEQ ID NO: 833509 - DNA, 512 bp, Homo sapiens
tccccgggaagccgcggctgccgcccctccaggcccggcctcgcgcccgtccgcccgccccgctctgacgtcaggcgtcttggagcgggatatttatggcaaggttactctgaattttccctaggtagacttctgattgcagtttcttgggatttgtaattttcacactttcagaccgaacgcaggcggggggagagcgccgccggcagggcgaggcgtacaatgagggtagctgttccccactttggcagggagcgttctcagggccccttctgttttggaaacatggaagggtcaaagaggcaaaagtggccacctgggcagcgggtttctccccggctcctcctctgggctacgggcaaatggcctggtctgaggccggctcggaggtgraggtcccggtgccaaggaatcccctgtccctccccaaagtgtccctgcactggacagtgtgtcccaaggggtgctgggcaagacaggagcgaaatcaggcacaacagaacagctaatta

SEQ ID NO: 833510 - DNA, 592 bp, Homo sapiens
atggatgatagctaatactcattgagcatgcactatgtacttactgagcaatcacatatactrgggcatgtgattttcacgtacagctcattggattgtcatggcaaatgaggtagatattacagtatcattttccccacttaaagataaaaagctggttcaggccaggcgcgttggctcatgcctgtaatcccagcactttgggaggccaaagcaggtggatcacctgaggtcaggagttcaagactagcttggccaacatggtaaaaccctgtctctactaaaaatacaaaattagcagggtggggtggcacatgcctgtaatcccagctacttgggagactgaggcaggagaactgcttgaagctgggtggcagaggttgcagtgagccaagatcgtgccaccgcactccagcctgggtgacagagtgaaactccgtctttaaaaaaaaaaaagcaaagctagaacagagaaagatgaaataacttgcccaaggacatagagctaataagtattaaagttgggatctgaactgcacttatatggctccaaagtccctgctcttagtcaatgtgttatatggtctccccc

SEQ ID NO: 833511 - DNA, 612 bp, Homo sapiens
cactacttactaaaactctgctctacaacttaggccacccaaataattcaagtaatcaagcttaacactaatgtggagatcaagaagtcaattttaatatagttttcatgtaaaaaaaaaatgccttctwgtcccagttttgagcccctaacagttagctccccttcttgaatatctgatttaagtccccccagcctcttcccttatctggttctcacactgtatgtcactatatacctgccctaattgcccagggctaagtaccagacaactacaaacagccccatggacagctatgtcctagagcttgtgaagttattcaaattagctaaggcacagggttctcaggaaacctaattctactccaattaccatatataaggtactctctacagctccagtgtgttgttaccctgtccctgtgtgcaaccactgtgtggccctacatggaattcttctcttgtttggagctataagtaacaaagaggtttgcctttcacctatccaagagtcttcatgttgtgtcctgtcatcaaaagaatctttaatcttataaaacagaagggtagaatctttgcttcggtcttagtttccagtggtttcctggcaacc

SEQ ID NO: 833512 - DNA, 619 bp, Homo sapiens
tcaaaaatcagaggcagagagaggatcctgaaggcagcaaaagaaaagaagcaataacataacataaaaacgggctcaaatgtacctagaagtggacttytcagccgaaaccttatgggccagaaaagagtaggatcatatatttaaagtactgaaaaaaaaaaaaaatgaaaaaccctaccaatcatgaatactttaactagcaaaactgtccttaagaaatgaaggagagagagactttctcagataaacagaagatgagggaatttctcaccaccagacctgactcatcagtagtggtgggcacctgtaatcccagctactcgggaggctgaggcaggaggatcacttgaacccaggaggtggaggttgcagtgagccgagatcatgccactgcactccagcctgggtgacagagcgaaactccgtctcaaaaaaaaaaaaaaaatgtgaagagagaccaaaaaggtctttatatattgataaagaggtcaatttagtaagagcatataacaattgtaaatatatatatgtacccaacattgaagcacctaaatataaaaatcaagtattaatagatctgaaggcagagatagactgcaagacaataacattaggg

SEQ ID NO: 833513 - DNA, 629 bp, Homo sapiens
ttgttccattttctttcctgtggcacatacattgtatgataaaggcaatagtctccaccacctaaagattagatgtagaacattgcctttgttgtttaatttacaattctctttgtttctagatattaaaacttctccattaatataaaaaatactttattatatatcatatttctaataatacataatacaggagaaaattggttaatctctagattgggttcaatatattatttatattttgagaattttaattttttatgaaggtctaatatttttggaataagatcaccaacaaagttatgttctagtgtaacttcatatgttgtggataaatgtaacacatgaagttctttatcaagcttttcttttatcattctcttttcatgtccagttaacacttcatggcctgtaaagatggctacaaatgctgtgctttgttgccctcctatcgcattaagaaatttgatcataataacatgggaaataatcctgagaggccagccttcctgcacaaaagcctacargaaagaaacaaatgagaccaaggaaaccaactgtactgatgagagaataacctgggtctccagacctgatcagaattcggaccttcagattcgtaccgtggc

SEQ ID NO: 833514 - DNA, 630 bp, Homo sapiens
tttcacatcaccagatttgtgacggaaacaaatgtctctctgaattccatatgctttatgtgaaaaccgaagcatttttttccctctttcctctctgcagttacacctgaagtgaccctgtttcaaaacaggaatagaactgcagtatgcaaggcagttgcagggaagccagctgcgcatatctcctggatcccagagggcgattgtgccactaagcaagaatactggagcaatggcacagtgactgttaagagtacatgccactgggaggtccacaatgtgtctaccgtgacctgccacgtctcccatttgactggcaacaagagtctgtacatagagctacttcctggtcagtaattcttttagttttattttttatttttttccattcttttaaaagagttaagaaaaaaaaagatgtgcaaatatattttgttcgaggatgctctccccactcttcatttttatctcttccctgaccaaaataaagagatgagttkaggagaatagtacagacatttgttgtaaaaagcccttttttagaatgcagtttaattctactattaatgttcacttctatgctagtagttaattagcatgagtagtatacttttaaaaataatacttatg

SEQ ID NO: 833515 - DNA, 373 bp, Homo sapiens
gttaaagtctcccattattattggatgggagtctaaatgtcttcgtaggtgtctaagaacttgctttatgaatctgggtggtcctgtattgggtgcaaatatattcaggatagttagctcttcttgctgaattgatccttttaccattatgtaatggctttctttgtctcttttgatttttgttggcttaaagtctgttttatcagagactaggatttcaacccctgcttttttatgctttccatttgtttggtagatcttcctccatccctttattttgagcctatgtgtgtytctgcaaatgagatgggtctcctgaatacagcacactgatgggtcttcactctttatccagtttgccagtctgtatctt

SEQ ID NO: 833516 - DNA, 613 bp, Homo sapiens
ctcagtgacacacatttgtttggagagtaggttggtcatagttcagaatctttcaagctcactttgggtacaattcagctctccagccctgtagttctacatattcctgtatttattcagtagattcaaaacaaacaataatagcacagtgattgtgaaggcacagaaatagagcttgaaatacttcaatttgacattctgtgtgactacgtaaagttcttacttttttggaacttcaagcaagagtagttcattcacttcagtatcacctcgttgttggaaaattctgtgtaatgtaggtataactatgagaaagcttttccagacaagatgaagctgtgtccacaggaaagacaaatttcgtgaagttaatgtcaacctttgaagtactatgcaatctaaaagaaaatgtggcacaaaaagatcagctcaagttttattctttcctttatataattatttttcttttccaagtaatttttttttatttctgttgtgaagctttggatgagtgatgtggttcggctgtgtccccacccaaatctcatcttgaattgtaactcccacaatttccacgtcacragaggatcctggtgggtggtgattgaattat

SEQ ID NO: 833517 - DNA, 634 bp, Homo sapiens
ttattacttcagaagtactgtaaattattcagtgacacaccagcagtcatctggctgacacaattttgcttgttatcmtaagattgctcaacaatattacctttctttccttaaaatcttatttaaaaaagatttaggcttaattgtgttatgtttgatgtgttttttatataaatgcaacatatttgatctttcttgatgaattatgcatagtagtcaagaagcaaagagaagaagcataaaaaccacttctgaaacatttaaagttaaagggacatatagccagcaggaaataacaacaaagtgttaagaaaaattttggactgctgttacaaagtccatacgctaggaacacgacaaaacaacctttgaaagaaattcttttgatgttaggttggtccatatgaaaaaactgacattagactgttttgacatataaaaatatcaatttcatatggttccacataatacttcagtataaactatgttaaatgaataggaacctcactggtcactgtatagcagaattcggtatgagttgaatcagggtcacaaatagcattcataactccagtcagccatctattgttgcataatattgatcacactgggaacaggcaatagagtataaata

SEQ ID NO: 833518 - DNA, 641 bp, Homo sapiens
tgctcttttgcccaggctgaagttcagtggtgcgatctcgactccctgcaacctctgccttccaggctcaagcagctctcgtgcttcagcaccccaagtaactgggattacaggcatacgccaccacactggctaatttttgtagtttaagtagagatgtggtttcgccatgttggccaggctggtctcaaactcccggcctcaagtgatccacctgtctcagcctcccaaaatgttgggattacaggtgggagccactgcgcccggcctacattaaattttaaagcctttctatgtcagtgcatatacccaacctaattctttttttccgtgaacttttttgttatgcttgtagccttcctaccccagattatttcgaagcaaattgtcattctgtaatttcaaatattactatttcagtattttacaaaatggttgcagtttaattgttgttccttttttatttattagcttgcatatttctatagagagtttaccccacatcaaccatttggattacctgaagtaagggtggtacaggaaagggagaaatcttgaaatactaggttccttagcatcctcaaagttgaccaatgagattttttgcttgtttrgttgtttttttctgtgtcttcatggac

SEQ ID NO: 833519 - DNA, 576 bp, Homo sapiens
ggattataggcataagccgagcccggctaattgttgtattttttagagatggggtttcaccatgttggccagactggtcttgaattcctgacctcaggtgatccgcccaccttggcctaccaaagtgttgagattacaggcatgagccaccacacccagtctaaaaatattctctttgatctagagcttaaatttagatgaatgctagaatcagacgctcttaaagaatacataggaactcttgcttccattttctgtcttttattaatccatgtttcaccaaggactaccacctacatagcaaatccagtaacttttagacctgaaaaatatacatttcatagctactattgttgtgtgttctctaaatctgtattgtgattaggatccttttcttttttagcattttatttggtttgagaacctcgaaccgtgccatccttacatttcactgattttacttgtcactctatagttctggtagcccacatctgaattctcayttattagtattctacagaatcacattctatatatcttgtttgacacagatttctataaaaacacatattttaa

SEQ ID NO: 833520 - DNA, 614 bp, Homo sapiens
attacctcacatgactggtatgtggcttatatcagttagtctcagcaaagcacttagtattattgtggtttattcaaaaatgctcaacattgctagttatcagagaaatacaaattaaaaccacaatgagatagtacctgacacctgttacaatagcaatagacattatcaaagataacatgggttggtgagaatgtaagaaaaaggaaactcttgtacactgttggtgggagtggtaattaacacagccattatgacagtgtggaggttcctcaaaaaactaaaactagaactactatatgatccagcaattgcactcctgagtatatacacaaaggaattgcaatcaacatgttaaagagatgtctaggcatccatattgattgcagcattattcacaatagccaacataagtgtccatcaacagatgaatggataatgtggtacatatacaatggaatactattcagccttaacaaacgaaattctgtcatttttgacaatgtaggtgaaactasaggacattatgctaagtgaaataagccagtcacagaaagacaaatattgcataatctcacttatatgtggaatctaaaaaagttgaacttacagaa

SEQ ID NO: 833521 - DNA, 576 bp, Homo sapiens
aggagatataggacagatcagcctgtctaagagaaatacagtgtgggttacattttttccagtatccacatgaaaaaagaaacaggtggggcaggagaaggagctaaaaaaaaaaaaaaaaaccaacaacaaaaaacaggtgaaattaagatattttatttaacccatatttccaaaatagtattatgtcaacatataatcaatgtaagaaacatttaatcctgttttaatttacaaacttaaactaattaaaattatagaaaattacaggccaggttcggtggctcatgcctataatcccaaaactttgggaagccgaggtgggttgatcacgtgagcccaggagttcgagaccagcatcggcaacagagtgagaccccgtctctacaggacaaaaacaaaaacaaaaacaaaacccaccaattagccaggcatggtggtgcacacctgtagtcccagctactcgggaggccgagacaggttaattgcaccactgcgctccgtcctgggtgacagagtgagaccctgtcacaaaaaaaaaaaaaaaaaraagtaaaaaataaatacgagttacaa

SEQ ID NO: 833522 - DNA, 669 bp, Homo sapiens
aggaataacctgggatccatacgatacccaccggaggagcaattaaatccggacaaagaatcgataagccaaaagctccaccacgaccctttcacagcacaaaattacagaacaggaccaaacccaagaaagatggtggccgtagccaccaggccgacactcgtcactgccggacatgcgtcggccaggaccacgcgaggagggggcgccgcagtgcaccctccctcgccccagcatccgggcactggggcggggcgccagaatccagaagcttccagaacaatctcagctctcgaggaagggcggaggaaggagcccatgaatcttccagaacctgctcccctccccgcccctcctccaccgggactgcaagaaagatctggaaggagggagtatcgggtgctggagaccgaaagctctcttcccacaccgtcaaccctccctcacagaaacaaagcacccaagaaggctttaacaacgcgtccgataagagaggtgacaaagccagtcccacaaggccgtgctgagtcacccgagcgggcacccccgccaccctgyggtccccctccgacgccccgtagccgcgtccggaagtggaggggcaaaaatggcagcgtcccgggccgcgcggccaccacgtgcagctgccagccgcccactgccccaacc

SEQ ID NO: 833523 - DNA, 579 bp, Homo sapiens
aaaaacagaaccatttgtgcactgcatatattattacatccttataaaagtggctgccggaaggaaaacattttcatgtgttgtggctgcagatgttccacgaggtggttccaatggcgtctgaagccggagcctggcccgtgtgtccccagcaggcgcctctcctcctccccatggccctaacacaggcaagtgtttggaagctggcagcctttcccccagaggggatgtattacacctcccactgccacgtggcatcttctagcgcgacccgcagggcgtggccctaaggcatgggccccactcaccggcgctgaggccccgcagctcctgtgctgcagcccgagaggaaagggcctgggcttgtctaggcctccatgtctttgccttcacctcgcactaaataaacaaatgtacacaaaaggcctagagcgggacttgccagaatggcagctctcaccgaytgtcaaagcacagctccatccccagcactcttctggcctctggcatcctcctggtcaccacactgtgctgtgggttggaggtcaggacccggcgtgcagccaggccagaagatgg

SEQ ID NO: 833524 - DNA, 494 bp, Homo sapiens
gctaagggacgcccaaatagctggtaaacattatttctgagtgtatctgtggtggtatttattgaagagattaacatttgaatcagtagactgagtaaagattgccctcaccaatgtgtgtgggcattawccaatccactgagggtccaaatagcacaaaaaggtgaaggaagagtgaattatctcgtttcttgagctaggacatccatcttctcctgcccttggacactggagctcctagttcttgagcctccagtaccctctgccttccccactggttttcaggtctttggcattgaaggaggagttacaccatcagctccctgattctcaggtctttggacttagactaaattatggcaccagcttacagatagtatatcatgggatttctcagcctctataatcctgtgagccaatttccacaataaatctctctctttacctacctacacagctcccattgtttctgttttgggggagaaccctaatac

SEQ ID NO: 833525 - DNA, 494 bp, Homo sapiens
gctaagggacgcccaaatagctggtaaacattatttctgagtgtatctgtggtggtatttattgaagagattaacatttgaatcagtagactgagtaaagattgccctcaccaatgtgtgtgggcattatycaatccactgagggtccaaatagcacaaaaaggtgaaggaagagtgaattatctcgtttcttgagctaggacatccatcttctcctgcccttggacactggagctcctagttcttgagcctccagtaccctctgccttccccactggttttcaggtctttggcattgaaggaggagttacaccatcagctccctgattctcaggtctttggacttagactaaattatggcaccagcttacagatagtatatcatgggatttctcagcctctataatcctgtgagccaatttccacaataaatctctctctttacctacctacacagctcccattgtttctgttttgggggagaaccctaatac

SEQ ID NO: 833526 - DNA, 517 bp, Homo sapiens
ttttgctcaaaattactttgggtatatggggtcttttatggttctatatgaattttaggataacttttcctatttttgttaagagtttcattggtattttgataggtattccactgaatttatagataactttgggtagtaagaacattttaacaatattattttttttcaatccatgacacaaaatatttttctacttatttatttcacagatttttttgtagttttcattgtagagatcttttatcttctcagttaaattaattcctaggtattttatatttttggccactattgtaaatagggttgctttcttatttctttttcattatcagcatgtacaaatggtattgatttttgtatgttaattttgtatcctgcaattttactgaattcattagttctaacttttttttgrtatagtctataggattttctatatataaggtcatgtcacctgcaaacaggaacaatttaattttcttctttctcatttggatgtcccttatttctttct

SEQ ID NO: 833527 - DNA, 538 bp, Homo sapiens
ctcatcatggctgatcctaagctactcaagtgaacctactgaacacagagttgggaagagatgcagaggagcagctttcttggasaggtgggagctggctctagcacatcactgcccggtgacctcttagtgccacccccttctgatgtcctcacagtacttatcccctttcctggccttcttaggctgcgaggatctcctggttctccttctcaccatctgccctttgcttctccatgaatcactccaccacctgccctgcagagcagcattctcagtcctgactatgtgtttggctcccatagggagcatttaaagctgcccatattggctaaacgcggtggctcgtgcctggaattccagtactttgggaggccaaggtgggaggatcgcttaagcctggagaccaactggagtcccaagaccttgtctttataaaaatttttaaaaagctgggtgtggtgatgagcctgggcatttgaggctgcagtgaactaagataaagccactgcactccagcctgggcaacggagtgaga

SEQ ID NO: 833528 - DNA, 605 bp, Homo sapiens
cagcagacctgagttccatcccccactggcctgtgagccgccctgtgacctcatgcaaggcagcctcccttttagtctgcaaaacggggctgacacctggctttcccagctctggggggtaggaatcccagggcaagtcaggtgatgtccatggagcaggggtctcgtagatgggactggttgtacaagactttctattgtggtgaataaataataagagttaggggtcgagcgcagtggctcacgcctgtaatcccagcactttgggaggccaaggcgggtggatcacctggggtcaggaaatcgagaccagcctggccagccaacgtggtgaaacctcatctctactaaaaatacaaaaattagccgggcgtggtggcaggcgctattcgggaggtgaaggcaggagactcacttgaacctgggaggcagaggttgcagtgagccaagattgcaccaccgcgctccagcttgggcrgcagagcgagactccatctcaaaaaaataaaaataaaaagaagagttagggttggcggggagaggggccctttttcaggagacagttttcctttttacctcctggacctggggtggcctcctctcca

SEQ ID NO: 833529 - DNA, 634 bp, Homo sapiens
cagggttttgaactgtgtgggttcacttatactgaattgttttcaataaacacacacagaccatacatgaaaccatacacattcacagagcaatgtaaacaagcataaaactgcaggattaaattataactgcatgaaattaactagcatatactgtactactgtaataatttaatagccacctcttattgctatgggtgaaatgaaatgttgctagtatttgcttaaaacactacgtgacgtcatctccttgtgatcatttcatctgactagcaaattgtatcacagcaaaaagttacctctcatggtcagtacaaagtgattgttcgtggttctcagctatttttaattgtgtttagggcaatactgtaaactttgaataacaccatgggctcataggaagtgccaccagtgatgctagaagtgctcccgagaagcaaagaaaagtcgtgacattacaagaaaaaggtgaattgcttgatatgtactgcagattgagtctgyggctgtggctgctcaccatctcagacagatgatttatcttggaaacagatggtgtaaactttccatatcgataaatacagcacaatgctgtaaatatatttctattccttatgatttagtaataaagatt

SEQ ID NO: 833530 - DNA, 634 bp, Homo sapiens
cagggttttgaactgtgtgggttcacttatactgaattgttttcaataaacacacacagaccatacatgaaaccatacacattcacagagcaatgtaaacaagcataaaactgcaggattaaattataactgcatgaaattaactagcatatactgtactactgtaataatttaatagccacctcttattgctatgggtgaaatgaaatgttgctagtatttgcttaaaacactacgtgacgtcatctccttgtgatcatttcatctgactagcaaattgtatcacagcaaaaagttacctctcatggtcagtacaaagtgattgttcgtggttctcagctatttttaattgtgtttagggcaatactgtaaactttgaataacaccatgggctcataggaagtgccaccagtgatgctagaagtgctcccgagaagcaaagaaaagtcgtgacattacaagaaaaaggtgaattgcttgatatgtactgcagattgagtctgcggctgtggctgctcaccatytcagacagatgatttatcttggaaacagatggtgtaaactttccatatcgataaatacagcacaatgctgtaaatatatttctattccttatgatttagtaataaagatt

SEQ ID NO: 833531 - DNA, 634 bp, Homo sapiens
tatgaatgagaacatgcgatgtttggttttctgttcttttgttagtttcctgagaatgawggtttccagcttcatccatgttcctgcaaaggacatgaactcattcttttatggctgtatagtattccatggtatatatgtgccacaataaattaacacctaacagcagatgttaataatattgtctaggccgtgcagcaatatacctgaagattgaatttgatgcatcgggtacttgtgtagacaaacataagaggaaagaagaaaacattattgcacacacattctgtaccaggcctagacttaagtgttttctcatgaaagctttctttgaacacaggctttgtgagcaagcatgtcatccctaatttgtaatgaggatattgagactcaaattaattatgtgacctgtagcagagccttctaaattgaagtttatgtggttttctctcacgcacagtctcttcatgcttagatctgtgcatgttatacccaaatgtattaggcacatagactttggagcaagaatgcccaggctcagattcaggtctaggacttaccaactgtataaccttgggctaaatgcttcctatctctgtgcttctgttttctcatttgtaaaaacaaaaatgaa

SEQ ID NO: 833532 - DNA, 637 bp, Homo sapiens
gagctaaaattaagagttttatgagctgttaagaatgaggtagtttctcctaggaccccccaaagacagtgcaagtaatgaccgtttggatctcattcgycgatctttgatagtatgttctggagtctactccccaggagccaggacaggcgtgaagatggagtccttgtcgcagctggagccttgcctagctggtgatcacacagcctggcctgtacctgcaccccactggatggtggtacatggtggcagggacaggaccacacccagttaaggccagaccaggctgagtgtgacccctgaggtaaacactccactaagctgtgtcttgttcatgccccctgctcagtgaaaggtgagtcccgagaccagttgggtacctctctatgcgaaccagagacatttctggatccaggccaggtgaagattagggccaggaagcctgagcccccggggcctcaaggtagggagccgaagaggctgccaggactctgctgggttgaaatttgccggggaggactcttgtctccccctcaggagtatttttgttgaggctttcctggaggtgaagaagcaattcccattgcagcaggttagagcgagaatcagacagagggcaaaaaccaattcgcttctc

SEQ ID NO: 833533 - DNA, 598 bp, Homo sapiens
cctagttcttcacattcactcactactcactcactgactcacccagagcaactcccartcctgcaagctccactcatggtgagtgccctagacaggtctaccattttgtatcttggttttttattttttatttttttgagatggagtctcactctgtagcccagagctggagtgcaatagtgcgatcttggctcactgcaacctctgcctcccgagttcaagcaattctcctgtctcagcctcccgagtagctgggattacaggtgtgcaccactatgcctagctaatttttgtatttttagtagagacggggtttcaccatgttggtcaggctggtctcaaactcccgacctccagcgatccgccagcctcagcctcccaaagtgctgggatttacaggcatgagccactgtgcccggcccattttttatctttatactgtatttttactgcatgatttctatgtttagctatgtttagatgcacaaatacttaccatcgtgtgacaactgcctgcaacattcaggacagtcacgtgctgcacaggtttgtagcctaggagcaaaaggctggaccatggagctcagggatgtagtcg

SEQ ID NO: 833534 - DNA, 509 bp, Homo sapiens
tttgtcttcactggccttgtccctctttaggtcctctgccccaccaggaacccaggggctttctgtggcttcaggcttcccaagacatttcctcactcctgtgctctcctcttctaaagacttaaagtgtgactctccctgtactctgggttttcccaccccatcaaaacttagctttgctacaccccatcttctgctttaaatggtgataataagccagagcctaggtaacttactgaagtcttcattgttgcaaaaatgaatgaatgaatgaaaggagaaagggcttccttcctcctctcccagtgattccttagcttcagtgggttgtgtgcctttcagcagggctcttggggaaagagtgttttgactcacaagagtagctstacaggattagcattttagtccacacagcaggccagaggaggaggggtttggcggtagatggaagagtttaggggtagatgaggcctacccctgagctcccgctataccggcaatcacctctg

SEQ ID NO: 833535 - DNA, 559 bp, Homo sapiens
attttaaattcagggatacttgcagtacaggtttgttacataggtaatcttgtgtcatggggatttgttgtacagattattttgtcaccaaggtattaagctgagcacccattagttatttttcctgatttcctgcctcctcccacccttcaccctcttctaggccccagtgtgtgttgtttccttctatgtgttcatatattctcatcacttagttcccacttataagtgagaacatgcagtatttggttttatgttgctgcattagtttgctaaggataatggcccccagctccatccatgtctctgcaaagtgatgtgatgtcattcttttatatggctgcatagtattccgtggtgtatatgtaccacgttttctttatccagtctgccattgatgggcattaggttccatgcctttgctattatgaatagtgctgcaaggaacatatgcgtgcatgggtctttatgatagaacaatttatattcctytgggtatttacccagtgatatggtttgactctgtgtctccacccaaatctcatctcaaattgtaatc

SEQ ID NO: 833536 - DNA, 608 bp, Homo sapiens
gaaaccccaaaaccaatgaaagaattccaaccttaatattctcttcctctagaactactcctggtaccaaaatctgtattagtcagggatccctagagagcagagctaatasgatagacataaatatacctatagaggggagtatattaaatattaacttacacaatcagaaggcacaataggctgccttcaagcttgaggagcaaggagagccagtttgagtctcaaaactaaagaacttggagtctgatatctgagggaaggaagcattcatcacgggagaaagatgtaggctgggaggctatgccagtcttgtcttttcatgtttttctgcctgctttatatttgctggcagctgatttgatggttcccatcagattaacagtgggtctgccttccccagcccactgactcaaatgttaatttcctttggcagcatcctcacagacacacccaggatcaatacttcgcatccttcaattcaacaagttgacactcagtattaaccatcacacccagtaatgggattgctgggttgaatggtagttctatttatcgctgtttggggacaattgctacaatgctttccacaatggttgaactaattt

SEQ ID NO: 833537 - DNA, 608 bp, Homo sapiens
gaaaccccaaaaccaatgaaagaattccaaccttaatattctcttcctctagaactactcctggtaccaaaatctgtattagtcagggatccctagagagcagagctaatacgatagacataaatatacmtatagaggggagtatattaaatattaacttacacaatcagaaggcacaataggctgccttcaagcttgaggagcaaggagagccagtttgagtctcaaaactaaagaacttggagtctgatatctgagggaaggaagcattcatcacgggagaaagatgtaggctgggaggctatgccagtcttgtcttttcatgtttttctgcctgctttatatttgctggcagctgatttgatggttcccatcagattaacagtgggtctgccttccccagcccactgactcaaatgttaatttcctttggcagcatcctcacagacacacccaggatcaatacttcgcatccttcaattcaacaagttgacactcagtattaaccatcacacccagtaatgggattgctgggttgaatggtagttctatttatcgctgtttggggacaattgctacaatgctttccacaatggttgaactaattt

SEQ ID NO: 833538 - DNA, 632 bp, Homo sapiens
agaagacagacaaaaacacatataaaataatttcggatggtgataaaaactgtgagaaaaactaaagtaggataagatgttagagaattatgggttgggggatacagacagataagagtacaggaaaatttcagactctgaaattcctataactgaccactatagatgatgaaaacgtcccttactgaaaatgaacctacattttgtattcaacataatttcaatttgcttaacacttcctgtattccaaatcacctcttagagagcattcttttatttttctatcttagtttttcctctacatgtgcaatcatttttctcagcatactttttcattaagactgtttctaatctagtgatatatatcgaaagtttaaaaccttttgaattctgaattgatgaaataaaaatgataatttggcaatcttaaatgatcaatggtatttatttaaagaaaaatatcgttaaatggaaaataaccctggcaggtatttaatggtaaaaaataaaattaatttacatagaaactstttgttgacctagagaaagcctagcaaatgatgaatgttgtttttagtgtatacgtgtatatgtgttcctgtgggatggcaaaggtagtagggataaggaaa

SEQ ID NO: 833539 - DNA, 633 bp, Homo sapiens
cattggctattaaaaagcatattgcttaatttccatacatttgtatagtgtctgaaattcttcttggttgttgatttctagttttattccattgtggtcagaaaagatgcttgatattatttaaaattttgtggaatgttttaagactcattatgtgacctaacatatggtctgtcctaagaatatatattctgcagaatttggatgaaatgttcagaaaatatctattaaatttatttggtctatagtacagactatgatgtttatttgttgattttctatctgggtgatttgtccaatcctaaaagtggggtgccgatgtctccagctattattgcattgtgggctatctctctgtttagctctaataatatttactttatatatctgggtgctccagtgttgggtgcatatatatttaaaattgttgtatcctcttgctgaattgacctctttatcattatatagtgatcttctttgtctgttcttatagtttgtgtcttgaaatctattttgtctaagtatagctactcctgctctcttttggtttcastttgcatggaatatctttttttccccttttatttttagtctatgtgtgtctttttagatgaagttgtctacatttcttat

SEQ ID NO: 833540 - DNA, 674 bp, Homo sapiens
ttgcacagtgaatttttacatttcaaaaactaactttattgcatttaatacagatataagcacgaataagacaaattagttccattttcagacaggaagaaaaacattttgggtasggagaagttaattgctggtaaagtgtagtagtattattattctaaaagataatgagttcagaagtattaaggaaatatgtgtgtgtgtacgcataggtattcaggtaaacaccaataacaataaaactctataagcggtcacagacaacacaagtacaggaggaacatttaaatgttaaccaatgtcatgaaagaaagagtgatataagcaattctatacagcaaaaagagaatgattaacaatttattgagttttatttatctacaaaaatatagcaatacagtgaacttcaccaaatcctaaatattcagtacctgaactggctacaacaccgtgtgcacacccagttcctgcagaatctcttgcagatatgggagagtcagccagtgaaaagatccatttcttgggaatccttgtcaacaagaccagttcagaaatccaggatatatagaagcctactgtaatttaaaaacagtaacaaaaaccccaacaaaacccaaatcaacaaagaccaagataaaggtgtgataaacattaattgtaatggttttccttta

SEQ ID NO: 833541 - DNA, 643 bp, Homo sapiens
accaaatcctaaatattcagtacctgaactggctacaacaccgtgtgcacacccagttcctgcagaatctcttgcagatatgggagagtcagccagtgaaaagatccatttcttgggaatccttgtcaacaagaccagttcagaaatccaggatatatagaagcctactgtaatttaaaaacagtaacaaaaaccccaacaaaacccaaatcaacaaagaccaagataaaggtgtgataaacattaattgtaatggttttcctttacatgcaatacatgcattttaaaatcactaagaaacacgaaattttgtagagcaaagtttgtgtttcacgtaagtgcaaatgaatatatattttattttttatactattaaattatatatattttttccatacaaaagcacacagtgttaatctataaaatgacatccaagtggatgatgattgtttttgcatgtccccctgcttagatttttttaaaatatatagtcaaaaattaacatccttctttaaaaatacagaaggaaaaaagggcaatwaaaaaaatacaacttggctttacggactggtgaagcatttttcctgatcaagaggcaaagttccagtgacagctgccacagggccctttagtcctccagcgg

SEQ ID NO: 833542 - DNA, 541 bp, Homo sapiens
gttaaatggtgacaagaatttaagaaaagtgtgaccgttgcacacaattcctctgccttctattcccacctgaaacrtaagaaaaaatttatatgtaatcatttgtcattttcacactctgacaaaccctttccatatttgtattaccaaaacactgtaaagtgtacaaaatgcacatgatatagcgaaggttttatgtcactttccagaccaactctattgcaaaagcacagagcaggctgtctcccaagatatatttgtgcaaggactggtgtaacgtgcaatatattctggattctccctctgcccaaccttcaattatttgaccaatgggtagcttttcattatttgaactgagaatgtccttttgataaatttgtacatatttcagctttacttaggaaaggcatctgcttcgagtattttctgggaaaagccaatatgttgcatctgaaaaaaaatttcactgggcaatatttatcaaaaagtaaatcacaagaggttcatatattatgatctaaactgaatctttttctagcct

SEQ ID NO: 833543 - DNA, 610 bp, Homo sapiens
attctcagcaaactaacacaggaacagaaaaccgaacactgcatgttctcactcataagtgggagttgaacaatgagaacacagggtggggaacatcacacctcagggcctctcaggrggtgggggactagggtagggatagcattaggagaaatacctaatgtagatgacaggttgatgggtgcagcaaaccaccatggcacgtgtatacctatgtaacaccctgcacgttctgcacatgtatcccagaacttaaactataataaaataataataaaaaaaagaatttacctcgaaggattgttatgaggatcaagtgacacaatccatgtaaagtaactgagacacagtgagtgctcaatatgtactaccattgttattgttatagaagtactagatccaaatcaactatttagtctctacactgggtgggtaccaggagtggaaagcaatactcgttaagttctggaagcacacacaacacagcaaatccctctcaagcctcctctgtctggcaatatttgggagcagaggttcaggtgagcacctaggcatggatgccacagctatacagatgtgctcacctcattctcaaatcttctggcttgga

SEQ ID NO: 833544 - DNA, 536 bp, Homo sapiens; identical to SEQ ID NO: 818053

SEQ ID NO: 833545 - DNA, 455 bp, Homo sapiens
agcaagccctccttgacctttatgataattactttgggattccgtttcaagatggccraataggaacagctctggacttcggctcccagcacaatcaacacagaagatgggtgatttctacatttcaaactgagcctctgctggtgatacccaggcaaacagggtctggagtggacctccagcaaactctgacagacttgcagctgagggacctaactgttagaaggaaaactaacaaacagaaaggaatagcatcaacaccaacaaaaaggacgaccacaccaaaaccccatctgtaggtcaccaacgtcaaagaccaaaggtagataaaaccacaaagatagggagaaaccagaacagaaaagctgaagattctaaaaaccacagagcctcttttcctccaaaggatcacagctactcaccagcaacagaataaagctggatggagaatgact

SEQ ID NO: 833546 - DNA, 590 bp, Homo sapiens
ttatgttcaatgtagtgcacattacaaatctgagtttatatccaatgtacacttctcaataaaraaatagatatttctacatatcaatcattatattctatagctttcatagtagcaaaaaaaggagatgattattttttcattattagcaaaggacactgggctttgggtaatggggatctaaatcaaggtaattgataatagttgagagtagctgaaattacacataagaaaaaatgcgcttataagcagtgtccttagaacccactaactatccagaaataaaacaatttactgtgttaataaaagagagaaattcaaaaggctgcaggaaactggagaccaagggtaattgagaatcttctgaattcttcagcagcatccaggaaacatgttctagaaagtgtcctcagattgaagaccactaatgtaaacatcaagctatagaaggagaaagtgagatatttttatcctaacttttcaatgcgcaggctggagtaaataataaaggagaaaaactcagaggactgagaaagcagtcaaaattggaattaagaagttgttcagaagaaggcagtccaaaagagaaa

SEQ ID NO: 833547 - DNA, 590 bp, Homo sapiens
ttatgttcaatgtagtgcacattacaaatctgagtttatatccaatgtacacttctcaataaaaaaatrgatatttctacatatcaatcattatattctatagctttcatagtagcaaaaaaaggagatgattattttttcattattagcaaaggacactgggctttgggtaatggggatctaaatcaaggtaattgataatagttgagagtagctgaaattacacataagaaaaaatgcgcttataagcagtgtccttagaacccactaactatccagaaataaaacaatttactgtgttaataaaagagagaaattcaaaaggctgcaggaaactggagaccaagggtaattgagaatcttctgaattcttcagcagcatccaggaaacatgttctagaaagtgtcctcagattgaagaccactaatgtaaacatcaagctatagaaggagaaagtgagatatttttatcctaacttttcaatgcgcaggctggagtaaataataaaggagaaaaactcagaggactgagaaagcagtcaaaattggaattaagaagttgttcagaagaaggcagtccaaaagagaaa

SEQ ID NO: 833548 - DNA, 565 bp, Homo sapiens
ttcttatggaaagctattgtatactgttgcctgtaattggatttgtggtaccraaaaccctttgggacttttttttacatgaagaaatcatgagctgcaaatcctcccttctttgttaatattcaattttggaaactcagtgtaaaattttatatgtcccctgtcaaatttcatgttgtttatttgacttctcaaaattaggtttcatttttactcagaagtccagtgtattagctactcttcacaattttctgttcctaaaatttttctaaataggtctctatgtctttgttaatgatgtagtttaaaatgtataaaagtaggcccaacatcagagctttatggctccaagtcttccttccagtaatttttctttttcttttctttttttcttttttgaggcagagtctcactctgttgctcaggctgtagtgaagtggtacaataacggctcactgcagccttgacttcctaggctcaagtgatcctctcacttcagcctcccaagtaactaggaccacaagcacacaccaccaaatccattaatttttttttgttttttttt

SEQ ID NO: 833549 - DNA, 565 bp, Homo sapiens
ttcttatggaaagctattgtatactgttgcctgtaattggatttgtggtaccgaaaaccctttgggacttttttttacatgaagaaatcatgagctgcaaatcctcccttctttgttaatattcaattttggaaactcagtgtaaaattttatatgtcccctgtcaaatttcatgttgtttatttgacttctcaaaattaggtttcatttttactcagaagtccagtgtattagctactcttcacaattttctgttcctaaaatttttctaaataggtctctatgtctttgttaatgatgtagtttaaaatgtataaaagtaggcccaacatcagagctttatggctccaagtcttccttccagtaatttttctttttcttttctttttttcttttttgaggcagagtctcactctgttgctcaggctgtagtgaagtggtacaataayggctcactgcagccttgacttcctaggctcaagtgatcctctcacttcagcctcccaagtaactaggaccacaagcacacaccaccaaatccattaatttttttttgttttttttt

SEQ ID NO: 833550 - DNA, 622 bp, Homo sapiens
gacacttttaaaaagaagacatacatgtagccaacaatcatataaaaaaagttcaayatcagtgattattagagaaatgcaaatcaaaaccacaatgagataccctctcacaccagttagaatggctattactaaaatgttaaaaaaaaaaaaaaacaggtgccagtgaggttgtggaaaaaaaggaaggcttatacattgttggcgggagtgtaaattagttcaaacattgtggaagacagtatggcaatttctttaagacctaaaaacagaaataccactcaacctaacaatcccattacttggtatataaccaaatgaatagaaaccattctattatgaagcacacatatgttcgttgcagcactattcagaagagtaaaggcatgcaatcaacctaaatgacccatcaatgacaaattggataaacaatatatggtacatatacaccatgaaataccatgcagctataaaaaagaatgagatcatgtcctctgcaggaatatggatgaagctggaggacattatccttaacaaattaacacaggaaaagaaaataaaatattgcatgttctcacttataagtgggagctaaatgatgagaacacatgaacacatagag

SEQ ID NO: 833551 - DNA, 613 bp, Homo sapiens
ctcaaaatctttggctatgtacctgagtattctgtaaggttaatgaagacctcaagtcacactctcaccatggaagwttaaagacattgcctatcatattccacttcttgtccaaaacactttctcaatttttatttttacttttcatgattactactgaaccaagggtaacataggagggaaaaaaaggaaacagtgcaagctctgtcctatgctgaatatccattttttcctcttagagtcctcatttgagatgatttatctgttcacaagaataagcagggtggagtggggagccgaggagctgaggcacggaattggactggttgggaaggaggaacacttggcttaatcccccatcaacagcagaactcaaatttaaaattgtagttaatgagaagagcccaccactatcacaaagattaactgacttccctggaagctgctcggtgtgcacctttaaacctggttctatgaatacatgtcacctccatctataaactttgaattaatatttttgaccttttctctctatttaaaggataaaattatattccactgcatttgtacatgctaaaaaatttaaaatacaccgcaatatattctatcttta

SEQ ID NO: 833552 - DNA, 530 bp, Homo sapiens
tggggccgcaggcggagcttcccgccagtcccgcgccctgtgccctgcaccggcactcctcagccctgcgcccgcactcctcagccccagttgatgggaccgcgtgctacagagcrgggggcagcgctcgtcagggaggcttggctgcgcaggagcccatggccccagggaggaggcttggacatggcgggctgcaggccccgagtcctgccccgtggggaggcagctgaggccccgcgagaattcgagtgcagggccggcagaccggcactgctgggggactgagtgcactctccgcagctgctggcccgggtgctaagcccctcactgcctggggcagccagccggtgccagccggtcgctccaagtgcagggcccacagagctcgcgtgtggagctgatgcccacctggaactcgcgctggcccagcaagcgccacgtgcagccccagttcccacccgcgcgtctccctccacacatcctgacaagcagagggagccagctccggcctcggcaagcccagagagggg

SEQ ID NO: 833553 - DNA, 497 bp, Homo sapiens
catctcagtgatagccacgggaggcagagaaacaacagaagggtaaactgatrattatgtaagataattcaactgatgaaaaatactacaaaaaacaaaacaaatgatgaggtgtgagagaaaataactaaggtagaaaggttgcctaagataagctaatcaggagagacttcttggaggaagtcacatttgtcttgcaatctgaataatagggagccagtcataaaaaaaatttggttagagtattccaggcagtgggatgatgatgatgacgatgataatcataaaatagcaaatatttattgtatgcttactatgtgccagctttatcgtgaacacttttctggtactattttatttaatgctctcaattactcattgagataagaggctattattatccctgttttattggtgaggaaattgaggcacagaaatggtaggcaactgcccaaggctctacagctagttaaggatcctgatgcagcaagtacaaa

SEQ ID NO: 833554 - DNA, 496 bp, Homo sapiens
ctcaaatgagcaagcacagacctctctggcctctggttttcctataatcctccgaaaggagcacaaggatggaatattttaccaagacctgtctactgcacaaaawcatgggactatagtggttggaaccagcagtgctggtttcaacccttcactcttttgctggtagatggaaagcacatgatcagctaaatcctcagctattttttagtgaacagctgcccagtcaggagtctcttcttgcacttacgaaatgagtttgtaaccttttctcgtgcgcaatttcacttttactgtttttttgttttggtttcatttggtttggtttttgcctcagcgtccatacctctgaatattattttaatcgcatatcctttgttaatcatatgagctacgaatccctccctattatgcctgttagcaaacttcacaaggaacctgcttttatctttgtgtatatcctttataaaaatgttggtcaaaaagagatcaggac

SEQ ID NO: 833555 - DNA, 625 bp, Homo sapiens
acactattatcagccgtatgtctaataaaagggaaatgacaaattaaataatagcatacccacaaagagaaattctcaaaaaacactccaagtgacaktttagtgattgtaataaaaatggaaaactcctcatgtaagagaagtataaaaaatgaacatccagaagtatgttcaattgaaaaatataaaattatgcaaattaaatatttgtatttttatctcattttcttttgtaagatatagtatataagatattatctcttattttataggaacttggaaaagatttcaaaataaaaaggtgaagaaaaatgatagccctgaactttctgctgcttagctttttttatcttcatactatgagatagacaaatgtttgtatatatacttatttgatttccttgttctcactttaaacattttgaacaagacatacaaaagagaaaataaaggaaacaaaaagctcgtaattttgccaactagaaatgaccaccactaatattttagagtgtttcttacagcttttcattgcattatattttcatggttgaaatcaggctccgtataccgttattttaacaacaacataaaatgtcaacacaagattagttataggagatacgtt

SEQ ID NO: 833556 - DNA, 619 bp, Homo sapiens
atttgaaggtgtcctttgacccagttttcatcattgaattgagaggacaggtttgctggaagatctttcatgaaagttctagaacttacataaacaataggaagaaacagtgccttctcttgcactgaacatgactaaaagtgactatgcaagagtctcaacaaggacaaaagtctaatgaaagtggtaaaattgaaagatggaaagaactgggtacttgttaacatttctgagacactgaatgaccaacccaaaaacacattatccctagccattaatgaagctatgataacatgcttattactactattattattattaacttttattttaggttcaggggtacatgtgcagacttgtaatataggtaaacttgtgtcacggggatttgttgcacagattatttcatcacctatatactaagcatagtacccaatagttattttttctgtttctgtccctcctcccagcctccacctccacataggctccagtgtcttctcccttctttgtrtccatgttttctcatcatttagctcccacttataagtaagaacatacagtatttggttttctgcttttgcattagtttgctaaggatgatggcctccaggccaat

SEQ ID NO: 833557 - DNA, 527 bp, Homo sapiens
ctcactggtatttgaaatatcgatgccccctgtgtctccagtcacccggtgatcatcccagttgttctggagcagaagcgtaggttagacgtgcttccaggtactgacccgaggcttggggcagctttatgttctccctcacttgtcactcagtctccttgcagccctgctttcacatcacctttttttttctgccttaagtgttgctgattctcttaggctctggacgtggaagcggcaggtttgggttttgactgtatggcactttccatttgctttttcaagtgctgttttgttgcagtggtggtagtggatgtggcagcttgtctacctgtccctccaggctctcctgtgctctctagtgctctgccctgtagtgggacagcctcctgcgggtgtgtccttyctggtgacatctcagttcttattttaattctctctgctttgcatttgaattgttaacccacagacattaactgaagtcttcctctgtgctaggccggaaggacaaagtctagggactctga

SEQ ID NO: 833558 - DNA, 610 bp, Homo sapiens
acaaatggatccctggacactgcaaataataaagagcccctaatgttctggtatgtacagttggctttctagaattaaaaaaaattttctgaagcgaattttatcatgaaatagttttaaaatacagaaaaatatagaaaaaaattgacatctatgtactcatcacctagatatagtgtaaacatttttccatatttactccaagttttttaaaaataaaagattacagatatagttgaagccttttatgttgcccagttgcaatcccactctctaattgccctcatcagagttaaattctcttctgaagctagtgtgcatctttcttatccatgttgttaaacatttacttttatgtgaatatagtattattttgtgttttatagtttatataattatcataatgtaggtattactttgcaacttcatttattcaaaattatttgagatttattcatgttcatacatgtagatctagttcattcatgttaattttttttttctttgagacagagtcttactctgttgcctaagctggtgtgcaatggcgygatctcagctcactgcaacctctgcctcccaagttcaaatgattctcctgcctcaacct

SEQ ID NO: 833559 - DNA, 603 bp, Homo sapiens
gtacaatcagaaatatgacttctggatattttataagataaatttaggagaaaaatttaaaagggataaaagaacactttgaagacctagaaaagctcgtgaaaatcaggggtgtaaggaggatgcagagagagaagggaaaagttacaaggtcaagaaaggagaaaaggaaaagacattttagaaatttctctttctaacctgagccacatagcaagaccctgtctctacaaaaaaatcaaaaactagccaggtatggtggtgtacacttgtagtcccagctactcaggaggctgaggttggaggatcacttgagctcaggaggtcgaggctgcagtgagctatgatcgcgccactgcactccagcctgggagacagagcgagaccctgtctccaaaaaaaaaaaaaaaaaaaagaaagaaagaaaaagaaaaaattatcttcttatcccgctcttctcaggcattaatgagcttatctggtatactgaaggatttagcttaacccacaatatatgcctgagtagattctttggcagtattacsttgtgtgatgtgtcaattccttggcaatgattcacgcacgcgtgcacacacacacgca

SEQ ID NO: 833560 - DNA, 658 bp, Homo sapiens
tggttatactgacccctggtggttctaaaagggctcttytttttaaggggcttattttttcttagctgaatgcctcaaattaacatacctcaaatgacaagtacctgatcagtatacttgtcttcaaaaagataaagatgctttatagaatatacaaaagggaaaattgcatttggttcaagacaaattattgctatatagttttcacacattcgttttaagaaaatactgctttctacttacatgcaaaagcactgaacttggtcccaggaatagagaggtgagcaagaccagaaggtcaccagctttacaaaggctactgtctatcatggaccactaattaaaagtgagatgaatgaattaagggaagcacacagtactatgggaatgtctggaacagccaggccactttagagaatggctgcaggttaaaagcaagtagcgagaataaggaagaaaaaacattctcagcagagggaacagcatgatgaaaggctctagaatgagacagatcggtgagtttaagaaacttaagggacataagatgtctaaagcatagagttcaagaggaagggcggcactttacaagactgaaaagttgggcaagggccagatcctgcaaatgcttttcattttttaagcacctaaatttccttaa

SEQ ID NO: 833561 - DNA, 568 bp, Homo sapiens
aaatcaagaaagtaatcccatttacaatagcagcaaataaagttaaatacccaggcattaacttgatcaaagaagtgaaaaatctgtacaatgaaaagtataaaacactgatgaaaaaaattgaagatgacaccaaaaaaatgaaaagatattccatgttcacggattgaaattatcaatattgttaaaatgtccatgctgcctaaagcaatctatagatttaatgcaatctctatcaaaataccaatggcattcttcacagaaatagaaaaaaaatcctaaaatttttatggaaccaccaaagacccagaatagccaaagccatactgagaaagaaaaaaaaaaaggaggaatcacattacctgacttcaaattatgctacagagctatagtaaccaaaacagtatgatattggcataaaaacagacacacgaccaatggaacacaatagagaagccagaaacaaatccatacacctacagtgaactcatttttgacaaaggtgccaagaacwtatattgaggaaaagatagtctcttcaataaatggtgctaggaaatctggatgt

SEQ ID NO: 833562 - DNA, 488 bp, Homo sapiens
cacaatattgtagtctattatatgtagtagaattatgtctaaaaaagcaatgtatatacctcaattaaaaatacttcattgctaataaatggtaacaaacatctgagccttcagcagttttaacctttctgctagtggacagtcttgcctccatattgatggttgctgatggatcagggtggcggttgctgaagtttgggtgactatcaaaaatttctaaaataggacaacaataaagtttattgtatcgattgactcttcctctgaagcatgccatgctatttggtagcattttgccaacagtagaaccttttcaaaattggattcaatgctctaaaatcttgtcactgttttaacaactatttstgtgatataatgttttgtggtcatgttaactatgttttcagcatcttcatcaggagtagcttccatattcagaaaccactttctttgttcatccataagaagcaacttcttatccatttaca

SEQ ID NO: 833563 - DNA, 552 bp, Homo sapiens
ttggtattcaaagttctccatgttggtgactatttttctaaatgtatctctttcttttcctttttaaataccctaaattccagctaaaagagctttcatgtatttaccaatggaattttggtagttttcaacaaatgttttgttttatgctcaaacttatttcactcctacattgctcatccttcaaatttcattgttctcattgagaattttctgatttctccagccagaaatcatctttctgtcttttgaactattacaatctcttttctgggcctctattctacttcgcacatactatgttgtattatagctatttgcacatgatctggtcagtcagaatcaaacaggcttaggtttaaatttagtattttccactttttagatggatgaccttgtaaatttcctgagctgtaatttcttacgcytacatatgttaagtataaaaatatctaccctgctgtaaaccattggcaaaaaggcctcaattttcaaacctgtatctttgctctttgcactgtgactttgtagctcattcatcaataggcagag

SEQ ID NO: 833564 - DNA, 589 bp, Homo sapiens
tgctgtgggcaggatattaggcacttggaataagtttatacagcttatgtgaatttgctaartcctatggcaacaagataaattcaattcaaaagcatttactgacagcctctgatgtgccaggcattagggttggcactgaaagttgatgcaacaaatctttactgaggacctactatgtgtcaggcactgccatcagttctgggaagtcaattatgaatgagagatatggttcctattctcatgaatcttgcaggctagtgggaaatatgggagataaacaagtttctatatgtctatctgtgtaaagtttttggtaagcatgttgtagagacaagacggtaatggatcatagcttaaagcatgtatgggagagaaaacctaggtagcatggtcaagggtggtctctctggaagggtcagctggtagactctggaaggactgggaaagttgcttctaaacagtggcaggagaaaggatgtccaaggcagagcgaaagtgagcagtcttggcagagaagagctggatgtgttcaggaacagagaggaagtcagtcgacttgagcctgatggaccagatgaggagaaga

SEQ ID NO: 833565 - DNA, 507 bp, Homo sapiens
tcagaggttatctggctcctcctcatgtcttcaggtagttaggtacttcastcatacttgatagaggacagtgtctgcccctttcctcaaaaagccctcaaggggaaatttgctcttttaatcaccttggaagtagactttattatcgccctgattctcaccagtcttaatggaatttgagacatagagacgtcaaactaacttgttcaagataaacaaaaaaaaaaaaaacaccctggcaagtggtgaggtcaaaattcaaaactcaggttgttctggctccagattccttgtgttcttataactcctgtgctatacttcctccctaacctggtgccctgacttaagccaaacatgttttcttctgagcctcagtctcctcctttgtaaaatcagggtcataagaggacacactttgctgaatatctttgtccaccaaagtgatagtgaaaaatcaaaacaataaaattagcaatgatcatcatagccaattctttttattcacca

SEQ ID NO: 833566 - DNA, 678 bp, Homo sapiens
actagaaagcctagaagagatggataaattcctgtacatatacatcctcccaagactgagccaggaagaaatttatttcctgaacagaccaataacaagtttcaaaattgaatcagcaataaataaccyaccaactgaaaaatgcttgggacctgatggattcacagccaaattctatcagatgtacaaagtagagtgggtagcattcctactgcaactattccagaaagtagaggagaagggatgcctccccaactcattctctgaggttggaatcatcttgataccaaaaacctggcagagacacatcaaataagaaaacttcaagccaataactttgataaaaattgaagcaaaaattctcaataaaatacttgcaaaccaaatttagcagcacatcaaaaagctaatccaccatgatcaagtaggcttcatcctgggatgcaaagttgattcaacatatgcatatcatttatgcaaataaataaatgttttattacacaaacagaactaaagacaaaaatacatgattatcttaatagatgcagaaaaatcttttgatgaaattctatactgtttcatgtttaaaattctcaataaagtaagttgaaggaacatacctcaggataataagagccatctacagcaaactcacagccaacattatactgaatgagc

SEQ ID NO: 833567 - DNA, 551 bp, Homo sapiens
ccaaaaatataatagtaaataatttaccagaagtaatttttttctctttttgtaaacttcatgaaaaaggcagagagaggatacgtgtgaaagaagggagaaaggagaagaagggaagacagaagaataaagtcataaagtgagacatgctaaaaaaaggatgaaagtaagtaatgggagtagaaaaaaaggagacagaagaaaccctttgcctaattaaaaaaagaaggaaagatagaagagagtaggctatgaaggtgaaagacaagcaagcaaactagcttttagtcgaatatgtaaacataatgctatattatggaaaattatcaggaggccaaatgaaagtaattattaaaaaaaactttctgcaattatatgcactttctaaaagtagtatcataatttagattactgaacattctcataatgctttcttctttttattttatttccaatggaaataggtggcccaatttagatcagtgaaaattcrcataatgctttcttctttttatttaattttatttccagtgaaaataggtggcccatag

SEQ ID NO: 833568 - DNA, 572 bp, Homo sapiens
gcaaacctactgcactgccagtggcwtaaaagtattgcacatacaattatgtgcagtgcataatacttgataatgataatgaattactatgttgctggtttatatctttactatacattttattgttattttagagtgtactccctctaatgataaaaagttaattgaaaatagctttaggcaaatcttttaggaagtatttcagaggaactattatcataggagatgatagctccacatgtgttactgccactgaaaacctttcagtgggacaagatttggaggcgaaagaaagtgatattgatgattcgaactctgtgtaggtctaggctaatgtgttaccctcgttaatgtgtttaaaaggttaaaatattaaaaatagaaaaaacattccataatatatgaatttacagaaaaaagtattttagtgcaagtgtacaatatgtttgtgttttaacctaagtgttattacaatgagtcaaagtgttttaaatttaaatagtttataaagtaaaatcttacagtaagctaagattaatttattatcaaaaaatatatattttacaaattta

SEQ ID NO: 833569 - DNA, 611 bp, Homo sapiens
gaatacttaccaaatataaaaataatcatcagcacacacaactacatgaaagaatttcaaagtaattattctcagtgacagaagctggggatcagaatgtactctacttaaccacaaaaatcaggataagaggatttcagaaaaagaagttgtggccagcatcatcatatgtaatagataatttaacgagaatcaaaataaaaaattatttactatacttgacaatgatgcaatcctaaaagggaattataacattcaatgacaagtgagttgaagaaatgaggagtaattgtgaaataaaaaagttaaaaaagacgattttcactattagtatttttattaatcatttttagcactttatagaatacaaggtttttcacatattttattcattgattttcaaagaaattatttgaaatggtgttcttataattggttcccctttgccaaactgaaaataatgcttgtatttttttcttcctcatctatagttgatcaagaatcatcaawagatagaagtgcctagaatttttacagatttcagatatcaatgcaatcaagtgacatagccaaaatatctgtaaagcggatggaaactgttcttgctaaat

SEQ ID NO: 833570 - DNA, 601 bp, Homo sapiens
ctgtggacccggttgtatcaaaagcctgccttgccaatcatttttaattaaataaaaggcaagccatcccagagcaagaattacaaagraagtctgctttccagtggagcagctgtgtaaacgagttctaaaattagtccagtcatttccaagctgtgttttacagcttcaatgtgtcttctgcagcccatgtcaggatgagaaaacgaattttctcaagaacatcccagtcattttaggttcagttcattttaatggtgtcatagctaactaactcaaacctctcagtcctaagcagtctgggcacagggagacatgatcaaaagctgccattcaagaagagtgtttgctttaatttagatgatgttgacagagccatgggtactgtgataaaaccacccagcctcttgcccaggggatatataatctaaacaagacaaacagtaatataatgaacttggactgacagacagtagtgctagcttcagatttcagactccctgggaaatcttcattaggacggtaaggaagacgtcttcagttcctatttctaattctctctttttttgcaggcacctcagtgccattatgccattatccc

SEQ ID NO: 833571 - DNA, 664 bp, Homo sapiens
tcttatctatatatattatatatattctattatatgtatcttatctatacatattatatattctattatatatatcttatctctatatattrtatatattctatttatcttatctctatatattatatatattctattatatatcccttccaccaaaaatatattcttttatattaataaaatataaacccagggtccaatggaaaagacttaagggcagacacagagtgggatgtggtttgtgttaggagagggctgaagggacatcatggcaggcatttgtgtgacctcccacaaaacaccctcctccactctgacctcactttgttcttccttccctttgtccttattatttcctttctgcttctctttcttttctgtctccctctgccctgccctagaacggtgcctttctaattgtgggttataacacattattagtaggtcataaaatcaattcagtggatgtggaccagcattttaaaaagggaattaatagaatataaactccttaaaaggcgtcactcatactcaggataatactgctgtgtaaaatttgttttaatatgtgtcagcatgtgtacactgtgtcaagatgtaacacttacatcctattttaagaccctgctgtagactaaaccaggacccccatggtgctccaggc

SEQ ID NO: 833572 - DNA, 646 bp, Homo sapiens
tgcagtgagctgagattgtgccaaaaaaagactcctcaagacttaaggaagagtggcagcagggactgctgaggaagctgccgggctccctgtgtaccactggccttcatgaacaaagctgacaccatcatgctccttcggacatattctgctagcataaagggacccccatctccccaaccgaattaggcagagctggccttccttctagcggagttcctaggagtgagttggtgccaccccttgtgaggcttgatccaaaaaccagaacctctccagaccagggatccatgtcctctaacacaagaggggcagacctaacctctaaaatccctcccactctaaccttcagcatccacagctcaaaacaaccaggatgcctcagaaacagcactcactggggcgagcaggattaggcttcagaaaaaccaggtagatccagtttcttctgtcagaaaatgtttttttttaattacaatttttcataagttgccactacatgccaggcttttctcattttatctcattagagcctctttttcttttctttctttytttttttttttttgacacaaagtctcgctctgtcacccaggctggaatgcagtggcaacaatctcggctcacatgcaacctctgcctccca

SEQ ID NO: 833573 - DNA, 550 bp, Homo sapiens
ctaatattcagaatctataaggaacttaaatcaacaagcaaaaaacaaataaccccatttatggcctttgcttactttttgggcagtcctcaaaagaagacatccaagtggcaaacaatcatatgaaaaaatgcttatcatcactaatcatcagagaaaagcaagtcaaaaccacagtgaagtatcatcacacaccagtcaaaatggctattattaaaaataacagatgttggcagtgctgcagagaaaagggattgcttatgcactgttggtgagaatgtaaattcatttagctactgtggaaagcaggagatttctcaaagaactaaaaatatatatatcattcaaaccaacaattccattactagatatatatccaaaggaaaataaattgttctatcaaaaagacacatgcacctgtrtgttcatcgcagtattattcgcaatagcaaatacatggaatcaaccaaggtgttaatcaacagaggagtggataaagaaaatgtggtacatatacaccatggaatactatacagtcagaagaaagaat

SEQ ID NO: 833574 - DNA, 587 bp, Homo sapiens
gtctaatgagatattgcaccaaatcttaagacaaaggacattggacattaagaaagaggtccaccccagtctttacaatctagtgctgttacttttcttcttgtgtgtactctgctagcattattgcaaaaaccaagacatggtcctagtgtctgcaattttagcacagtgcttatacaagaaggtaaaataatgtctaacaatcagacagttacctctctctcaacattaatataaaactgtttgattccttcaagggtcaattcttcctttttcaccagaattcgaattggatctctcatgaattttttggtcacttccaacacatcagttggcattgtggcagaaagcaacacaaccttaaaaagagaaaattatgttgtagcacaacttacacattaatacccaaaggaaaatgtctgaagccaagcgtctctgtcttactacggaatgaaggtagacagagttatgcatcaagtgctttaagcagggggaacgacarcaaaacacatcagttgtattgtaacagtacctgcattaaataaaccccatctctacctttaagaggggggtgaagtaatgcttac

SEQ ID NO: 833575 - DNA, 564 bp, Homo sapiens
ccagcctggccaacatagcgagaccccatctctactaaaaagaataataataataataccaaaaagagcatgcatgtgataagtacagaaaaaaagcaattgttttatttattactcctttcaatccacactaagtatcaatgctatagtaggcatttcctatcacttaatccagatattccaatagaaatgctctatgaaaagaaacgtgtccaaggataagctttccctggtatggaaggaacagaacttggcatcttttaaactaaaccagacactgtgttgagcacttaggctttctttacaaatagtcctacagctggttggaagcacttgggaaaggcaatgcaaatctaattaggctatgccatgtggccagcattagtagcaatttttgaaaagagcccaggagacaacttacagaaagtgatttttttccctttaagggttgtctttctctgttgcttgcacacacacacacacacacacacacayacacacacacaatctcattttctgggtgcaaatataagacatgctggggaccatacagattcttactga

SEQ ID NO: 833576 - DNA, 600 bp, Homo sapiens
ttatttttcttttcatcttttattttaggctcaaggggaacatgtgcaggtttgtcagtggcataccaccctgaacgygcctgatctcatgtgttctattctttcttgtctacctctacaataggaagataagctccctaagcaaggtcacctgtctctgaatttgctgctggtatctccaggatctataaaagtacctagcacatagtaggtgctcaataagtatttgttgactgaataaatgaatgactgtggcctggcattaaaactattcaaatcttggctctcagtgcaaaagttgagtcaaaatacactctggaggctgagacaagacgatcacttgagcccaggagttcaagtccagcctgggcaacacagtgagactccatctcaaaaaccctcaaaacacaggaaattaaacgtggacgcaataatgtgggtccaaacactgagtgacaacagaagagccacgggcctctggtgccaacacaaagcctgcttaggcctgaaagccttaaaattatctccttggtagggcagagccaagggctggtgtgggagtcggaagtcagagacaagagcccagcctggctgtcagaa

SEQ ID NO: 833577 - DNA, 654 bp, Homo sapiens
cagcgtggaaatttccatgcactgaaatgaagtcagtgtggctggaaggcagagagcaagttgaacatcactmatgagaggggctggaggtgcagagagaggccagaagcagcccgtgttaaagatttctctctattctaagcatctgcctctaggcaagtctaaaccctctgcatacgaggtattcattatttgcctttttatcaaccatctcaagaggagtttaacaaacttccttagcaaaatcccattgttgccctgaaaataagtcaaatttgtccctatgtttaaaaggagattataatagaaagttaaagacattctctttgattcaccaataagaatttccatggacatgtatgtagtcaaatgatttcaagacttcttggttcctagaaatatcggggagttcaaaatagaacagtcatcatttgctgcttaggaaatttcaatgctataccaaaggatggatgggaaagaaggagggtaacagtcactgaggcccaacagtgcaccagacgccaagcagaccgtgggagccacaggtttttcttatttcacctttgcatccaccctgtaaggtgaagatcatcgttatccccatttttatagatgacaaaactgaggctcgttaggtggaggtttgcttaaggc

SEQ ID NO: 833578 - DNA, 654 bp, Homo sapiens
cagcgtggaaatttccatgcactgaaatgaagtcagtgtggctggaaggcagagagcaagttgaacatcactcatgagrggggctggaggtgcagagagaggccagaagcagcccgtgttaaagatttctctctattctaagcatctgcctctaggcaagtctaaaccctctgcatacgaggtattcattatttgcctttttatcaaccatctcaagaggagtttaacaaacttccttagcaaaatcccattgttgccctgaaaataagtcaaatttgtccctatgtttaaaaggagattataatagaaagttaaagacattctctttgattcaccaataagaatttccatggacatgtatgtagtcaaatgatttcaagacttcttggttcctagaaatatcggggagttcaaaatagaacagtcatcatttgctgcttaggaaatttcaatgctataccaaaggatggatgggaaagaaggagggtaacagtcactgaggcccaacagtgcaccagacgccaagcagaccgtgggagccacaggtttttcttatttcacctttgcatccaccctgtaaggtgaagatcatcgttatccccatttttatagatgacaaaactgaggctcgttaggtggaggtttgcttaaggc

SEQ ID NO: 833579 - DNA, 548 bp, Homo sapiens
tattacccctggagctacatcagaatccccagggagtttattagaattgcagattcctgagtcccaccagagacctactaaattggaatccatggcagtgaggtcctggaattggtattttatcarccttccccagtgagcctcatgtaccctacagtttgagaactgctggcccaggcacggctctggcattttgctaaatggagggtgagctcatttgtgcatgcagctcatcagattagtggttttgaaacttgatcagaatgctttcttaaaatcaactcttcctcaggatttcaaaacacaaaataaatcagagggtagctacatatagccccttgtttgcaagtccaacttgagtggctggtaggaatagaaagcagtctacagaagccatatcaggggatacgtggctccaacagggaatagaacagccaaagagaggacaaaggtttgcactggaggaagaagcaggctgttacaaagccctgatgaatggcagagcagacagtcagggataggccaagcccagggtagagacaacagca

SEQ ID NO: 833580 - DNA, 633 bp, Homo sapiens
gttgctggtctaagaaacaaatgttgaaaattactggtctagaaagatagaggaaagtaataattagcccttgcctacaaatgtatccctgtataataaatagacaattataataatgtcataagtgttataataaatgaaacacagggtattctagaaactcagaaaaggggaaatctaatatacctagagattcagaaaaaaatccaagaggaaatgatgttatgctgttctataagaaccctcttaacatgttggtatcaatgtccaggtaattatgagcatgcatgagataagacatccttccccaatatctgccccttgcactagcagcaaggttcacacttgcatttgacagatgttattggcaattgagatcctggctgcacagaggctactttcatgcaagcagagatagatgctaaccaggcgtcaggaagtatcacagggacctgcagattcagccaacacaggaactttgagggtctactgtgtagcaggcattgttcaaagtgccktatgtggaagctctgtggaaatgggtattgtcaccccctactttacagtagaagaagctgaggctcagagaagtgaaatagctcacttgtcatacagcccataagtggcaaaaat

SEQ ID NO: 833581 - DNA, 631 bp, Homo sapiens
caggtacatgggttgagccacgttttactagtgggtgtgataactragcctgaagtatcagaagccaagcccctctccctaactcacttcctgtccccatgcatgggagactcttcggcttccatctctatgtggtaaatgcactctcaggagaacttctagagcaggacttctcaacctcagcactaccgtttggatagtttctcactgttcatgagtattggggttagggtagggtcctgtgtattgtaagatatttgagcagcgtccctggcctttactcactagatgccaggagccatcaacctttcccagtggtaacaataaaaaatgtctccaaatgccaccaaacaccctgaaggaggtaggagggaggcaaaattgtccctggttgagagccatcgcttcgagagaggtctagcactcaaggagacagcaggaccatatagctattgccgtccataaagttgaatagccaagttcaacatctccttaattcacccagcccttctagattcgagagagccaagagtagaagtcactatttcagtttctacacccaagcatcttgccccagcaccaatcaccagagaatcccgggactggggagatattatgtggtcacagctaa

SEQ ID NO: 833582 - DNA, 619 bp, Homo sapiens
acaaaatctaaactacatcctaaataaccctctttacagctagacgtcagtaacaatacttgtagtaataatgagaggttttatgctcctattattagtaacatgagtagattctctgttaaagcagactgtgcaggggcagaaacaagatatggataaatcttagtatttctgtttatgtggcctttctctttaatcactctcactttgggacaccagccacagggcaaagtattccaaactcacaaatttaacttgcaatttgtttccaaggttagaaagatgaaaaaagacacagcgtccttagaaagcagggcacatgtgtctatggattagatggcagatgctgcaaattttgggataatgtggcttctcaaaggcacgaaatcaaagattgtaacccatttaccatcgtgctgatcctccaacatggcaggaacaggatgctgaaaggctcacattggtttgtgtgtggttataatatctgccacttaactggagtatgagcctttagttaggaaaaagaaatgatagaaaaatctgacagataaatagaaaatagcatgtgcaagatcatcaratatacccctacaaatgtcagactattctctcatgttta

SEQ ID NO: 833583 - DNA, 609 bp, Homo sapiens
aaaaattacttgaacccaggagatggaggttgcagtsagccgagattgtgccactgcacttcagcctgggcaacagagcgagactccatctcaaaaaataataataataagataccattttggggggaaaatattgggggaaatatttaaaatattggtagcattcagtgctgacaaagatattgtgcaatagacattgcgatatgttgctgttaagactttgagttactacaagttttggggaaggaaacgtagcagtatgcaccaaaataaaaaatatgatacccctttacccaggaattgttcttcctgaagtctctcctaaataaatgaaagtaccagaatataaagctattcatataaggatgtttactgaagcattatttgggcaaaaattttggaagcaactcgaatgaccaataagatggaaaaaatgaaaaatttttatatattcacactaataaaaatagtgaattagtgctatatgtattgccttagtaatattcgagatatattgagggaaatcaaaaatttgtactataatgtgcatagttcaatctattcaacatttttttttccctcagagatggggtcttgctctgttgcctg

SEQ ID NO: 833584 - DNA, 524 bp, Homo sapiens
tagtttctatctatagtaatcattcaaaaagtaatagtgactactctattatgaagttcagtastattagtatacatgagagctgagtgattggaaggagatatttctggcccagtgttatcttaggatgatatcagagagtgaatcggtatttgatcttttcaggatgaataaatataacacagtgtttgttcttttttattttttatttttgtcatttgagacagaatctcactgtgtcacccaggctggagtgcagtggcatgatcacagctcactgcagcctcacctcccaagctcaaacaatcctcccacctccacctcccaggtagctgggactataggtgtaccatcacgcccagctaatttttatttttacttcagtagagacagggtcttgttatgttgtggagactactcctgaactcctggcctcaattgatcctcccaccttggcctcccaaagtgttgtgattataggtgtcagccactgcacccagctaattttttgtattttttgtaga

SEQ ID NO: 833585 - DNA, 626 bp, Homo sapiens
tgcatagaattaattggggaggaatacttcctcctcaattctgtaaagcaaatgcaacaaaaacaaaaactgaaaattggaacataattaaactaaagagcttctgcacagcaaaagaaaccattaacagagtaagcagacaacctactgaatgggagaaaatatttgcaaactatgcatctgacaaaggaataatatccagaatctataaagaacttaaacaaatcaataagaaaagcacaaacaactccattaaaaagtaggcaaaggacatgaacagatacttctcaaaagaaggcatacaagtggccaacaagcatatgaaaaaatgttcaacatcactaataatcagaaaaatgcaaatcaaaaccacaatgagataccatcatgcaccagtcggaatgggtattatttaaaagtcagaaaatgacagaagttggcaaggttgcagagaaaaggggatgctcatacactgttggtggggttgtaaattagttcagsccctgtggaaagcagtttggagatttctcaaagaattaaaaacagagttaccattcaaaccagcaattccattactgggtattggaattactgattcgaaaatcaatcattctaccaaaaagata

SEQ ID NO: 833586 - DNA, 633 bp, Homo sapiens
ggataatgacctgcagctgcacccatgttgctgtaaaggacatgatttcattcttcttatgcctgggtagtatttcatggagtatatagaccacattttctttatccaatccaccattgttgggcatctaggttgattccatatctttgctattgtagtagtgctgcaatgaacatatgagtgcatgtgtcttttctgtagaatgttatttttcctttgggtgtatatccagtaatgggattgctgggtctaattgtagttctgtttcagctattttccaaaatttccctgttgtagccagccttcaagatgaccctcaataattctcaattactggttcatggctttgtgtagtcctctctcacattgaataggttcgagtgacccatgttaacaataagatgttgtgaaaatgctggtgtgttacttctacaggtaggccatacaacacattgtatcttctatcttgctcctgcttggatcattcaccctggaggaagccagcttcaatgcagtgaggacgatcagamagctcaatggagaggtctgtgtggtggggtccatgtatgctggcctcctgccagaagcactcagttgccagtcgtgtggatgagccaccctggaagttaatcc

SEQ ID NO: 833587 - DNA, 694 bp, Homo sapiens
cccttcaacatccaaaacgttgcagaacttttcagagaacgtaacacccctctcaccaatatatttatcaaggccttggtgaagaggatatcttctgaaccctcttaacaaacatggttaggataggtgagtcgatcacaatcaattctattgctcattacctttgggttatttccttatacatcatgccaaggaattttgggcatctaaactttagcatgggccatgttttaatccagattttagccatttggccaagaaaacactttgattgaattgattattaaattcagtctaatgtagtgctcttcctttcttggtacttcagaatatcttctcacacatatctcccaaagttttgttaaaataattgtccagttctttttatttctttggggtgaaatcttccctttttaggttttaactttgaatgtggtgaaatctcctcctcttaggcttaaagctttgaatctggcttacatgtatattccattccccaattctagtaggatgtgtgcagacattgaggtacaggcaagtcttcagaagaactgacttaccttgcaaagaacttttcttcatcatcttcaaatcagatgaaactgcctcatcagacataaaagatggcatagctycagctggcaaaggaagctagtgagagttagggtacaaagtacatcaaggtcattgtatc

SEQ ID NO: 833588 - DNA, 493 bp, Homo sapiens
atctaaactttagcatgggccatgttttaatccagattttagccatttggccaagaaaacactttgattgaattgattattaaattcagtctaatgtagtgctcttcctttcttggtacttcagaatatcttctcacacatatctcccaaagttttgttaaaataattgtccagttctttttatttctttggggtgaaatcttccctttttaggttttaactttgaatgtggtgaaatctcctcctcttaggcttaaagctttgaatctggcttacatgtatattccattccccaattctagtaggatgtgtgcagacattgaggtacaggcaagtcttcagaagaactgacttaccttgcaaagaacttttcttcatcatcttcaaatcagatgaaactgcctcatcagacataaaagatggcatagcttcakctggcaaaggaagctagtgagagttagggtacaaagtacatcaaggtcattgtatcttt

SEQ ID NO: 833589 - DNA, 646 bp, Homo sapiens
aaaaatatcactcacagccaggcgcggtgacttacgcctgtaatcctagcactgtgggaggctgaggtgggcagattacctgaggtcagagttcaagaccaggttggccaacatggtgaaactccacctctactaaaaatacaaaaaattagccaggtgctgtggtgcatgcctgtaatcccagctactctggaggctgaggaaggagaatctcttgaacccaggaggtagaggttgcggtgagccgagatcacaccactgcactccagcctgggctgcagagcgaggcttcatctcaaaaaaaaaaaaaaaagaaagaagtaaaaaaaaatatgtcactcactataggggtgggaattcatctacctaatttcatctgggagtcagtgcattttctaaaagtaagtgctcaacagtggagtacctgctgccaaaatcctcaaagataagaatgtgttttaaaagggctggctctgtgataagcagaagggcctatccatcagtaatacttcttgctggaaaagcagcctcagagaaagtggaaccgatataaggcaagttcctggaatattgttttgctaataatrtctccagaaggggagattcattacagagacaacacagggcccagtttgttcagggtcat

SEQ ID NO: 833590 - DNA, 582 bp, Homo sapiens
tttatgtgacttgctcaacaatacacaaatggtttatgatagagcctctgttagttcccattctcttgacttccagaacaccgctggctgtatgaaagatctcaagagaagctttaatgcataaaacatatttttgcctttcttgattcctaaaagctttttctctaggcatttggattctgagaacttgatttcttttcctcttcttctttttctatttgcataacagctaactctaatttaagctctttcagccccagttataggaaacgtattatgcatccactgagccagttcaattctcagacaattctcagtgtttggaatggattccagagtctcccagcatttgactatttatttataataaggaaggggaggctgggcacggtggctcacgcctgtaatcccagcactttgggaggccgaggcaggcggatcacgaggtcaggagttcgagactagcctaacaaacayggtgaaaccccgtctctactaaaaatacaaaaaattagccaggcgtggtggtgggtacctgtaatcccagctactcgggaggctgaagccggagaattgcttgaa

SEQ ID NO: 833591 - DNA, 639 bp, Homo sapiens
ccatgcagacttggattgagctgtagcagattacagaagttcttgaacgattgttttccttacttctggatgggaagaatatacatggaggaagttctttttctttccttgaagatcaggattccccaacccctaggcagtggaccagtacccggcagtggcctgttaggaacctggccgcatagcaggaagtgagcagcaggcaactgagcattactgcctgagtgccatctcacatcagatcattggctgcattagagtctcataggaacaggagccttattgtgaactgtgcatgcaaaggatgtaggttgcatgctccttctgagaatctaatgccctaatgcctgatgatctgaggtggaacagtgtcctcccaaaaccaatccccctcctcaacccacctctccatccatggaaaggttggggatggctgctgtagatggcatatttccagattctctagagtctttggctttttaaggatcgttttaacccttgtatattgtgttttcttctaattgtttcctcttaaataagggatcacagaactagacacctctatggataagttttstgctaaaaagcagttccttatctacaatcttttctccttcaggccattgccacttcctcttc

SEQ ID NO: 833592 - DNA, 611 bp, Homo sapiens
aatgaaactggatcctcatctctcaccttatgyaaaaaatcaacttaacgtggatcaaagacttaaaaatctaagacctgaaaccataaagattctagaagataacattggaaaaacccttctagacattcgcttaggcaaagacttcacgaccaagaactcgaaagcaaatgcaacaaaaacaaagataaatacatgggacttaatgagatgaaaaagcttctgcacagcaaaagaaacaatcagcagagttaacagacaacccacagagtggaagaaaatcttcacaatctgtgcatctgacaaaggactaatgtccagaatctacaaagaaatcaaacaaatcagcaagaaaaaaacaaacaatcccatcaaaaagtgagctaaggacatgaatagacaattttcaaaagaagatatacaaatggccaaaaagcatatggaaaaaatgctcaacatcactaattatcagggaaatgcaaattaaaaccacagtgcaataatactacctcactcctgcaagaacagcagcccttgaatcctagatcttccataagaatgaccataatcaaaaaatttaaaaaaaatattagatgttggcatggatgcag

SEQ ID NO: 833593 - DNA, 618 bp, Homo sapiens
ctgcaagctcacttgaagcacatactcttggtcagcatgcaatttgatccatttgttgtcatctcgtttgtctgcagtcagagttgagacagagagttcattatgtccttcaactaagtcatcccacgagcctttaacacttatgccaacatttatcactggcaagtgagataagaaattccatgcctaaataaaaagagaaaagaaacaataaaggaggagtttatgtgaaatgcaatgatcaattaagaaatagtgtgcttttagacgaaaattaaccttttaatgttgagattaattctagatccaatgcagttgcaggaaataatacagagacattctgtggaccatttacccagtttcctccaaaggtagcatttttcaaaactacggtacttattactactaggatattgacattaacataatccagtgattttgttcagatttccccaatttttcttgtatttgtgtctatatgcatgtatgtgtaagaatattgtgcttttagtctttttaatgtctttgtaaaaataactaaaagagggcttatcattatttaaacttgtgattcctttattgtaaatccytcctgatactgagcagctgttgactata

SEQ ID NO: 833594 - DNA, 593 bp, Homo sapiens
tttattatgaatatttaaatagtattttgtgccaatcttgggttcaacagaaactgaacagtcaatcagacattaatgcctgttacactttttccaagtcttgctcaaaaataagttccacttggaaaaaaaaagacacggtttagaagtttcttaatacctgcatttgcaagtcaatatgttaattatgttataaatcgtgaacgtttactttgacatgtttagggtaaaactgcttaagacttaaagtctagatagccaaatatttctggcattgttcattcatatttttggtcttcctaaagattgcttggagacatgatccttgttgttttctgcaatacagatttagctttctatgtaagttatatggttcactcacacacatagtttatttgaaaggatacttttgaatctagaagcaaagtgattataataagagaggggcataaacaaataactgagggcattgcatgaaaatatacccaagcawacagaaggaaacactaccctgaagagagggagtagaaggctaggataatgcagacgagtgatggacaagctacatgaggcttttcgcagccagcttagta

SEQ ID NO: 833595 - DNA, 494 bp, Homo sapiens
attgctttggctattcaaggtctctgtgcttccttgtgaattctaggattttttttttctatttctgtgaaaaatgccattagaattctgataaggattgcatttaaactgaagattgctttggsttgtatgaccatttcaacaatattaattattccagtccatgatcatgggatatcttctcatttatttgtcttttcttcagtttctcttcaatgttttatagttttcattgtacagattttttacctctttagttaactttattcctaagtactttattctttctggtgctattgtaagtgggactgtcttctttttttttttttttttttagatagtttgctaacagtatatattctactggtttatatatgttgactttgtgtccttcaagcgtattgaatttgtttattaattctaacagtttttttatgtagtatttagagttttcttgttcttaattttgtgagtacatcacactaaaatagaaa

SEQ ID NO: 833596 - DNA, 575 bp, Homo sapiens
taattgagagatgttattttgagtccctttttttgtgagctctgctgtgaactgcaaactgtgtgcatgtgtataaaaggttaagagcccggrtagctgagtggggtgccatgctgttagcagacgatgagggcagtattactcaccaggtgcatgctgtcagctctgtagaagattccatcttcatggagtcatctcatggtccactttttcttgaagccaggtaacatttccaatgggttggcctcgttggagtttttccagcttgaaaaacctaagcattttcttctctgactttttttttaataaaatgctgcctgttggaaaaactaacttgcaagctggaatgaacctgtgatatcactttgctttgtaagaaataattatgtgaggagtgattttttttttttaaatagaaactggtgagggtgagaattggagtgttgtgtcttgctttgttgtgttaagcatggagcactctggcttgtgttgtagacttttgtttctagggatgtacagactattttgtgataactaatctgttctctttgactattactgaggcaaagtagttt

SEQ ID NO: 833597 - DNA, 538 bp, Homo sapiens
gggctcctggtccagggctctgtccacccacacttcagaggtcacattccatgtgcctgggccgtctgtcccagctgcccacaaatggagcgaaaaaacgccagtaaatatgacctgcctcccagcagccgaggggttaaactagagagtccccgcttccaaccagctgccttacttccctaatccaatattcccgccaataaaatcagtgcactgaaacaacgggagagaagaaaaaaaatctcacatgcagccagcactgctgctgctataaaagctggaaagcctgcagatctttggggaatacaaaccttttgcaggccctttaatttcattctcccagagcctcaaagagtgagatagtactcacccacagcgaacaagttggtaaccagtcccctcagcatcttgctcacccaaacgggttaagagtgcagaggctgaaagccaggcagggagcttccattccaatacagctttctatatctatccctggtagaaayggtttcttgtgaaatgacttcaagaaaacccaaca

SEQ ID NO: 833598 - DNA, 594 bp, Homo sapiens
gaattgcctattattataatatgttctttctcatttaaaaaggtattatgtaatctcttagcatgtttaaaactgttaaccttatcatgcatgtcatacatatcttccgtattttacttgcttttcattttgtcttgtataatgtacaggaggtttgaatttttagataatcatataaatatgtctttttatgtttctatttttggattcctgcctgaagagatcttttcccatccaagtttttaaaaaactgttcgcttacattttaccttagtatgcaaaaaaattaaatcttgaatatattcattaaatcttggaatgtgatcgagctattttaacttactttttgccaaattgtggaatgtagatttcccactaatattggaacaaaaaagaagtttggtcaaagaaagtagattttcagatttatgatactagtattggagatcattttgagggttttcaaactttaaagacaaaggatttattgaaggcrtatatctgaggcagatcaatgtagtggaattggattagaattccagttctgctgcttgccagcaagcttctaaacctctttatattacagttttctga

SEQ ID NO: 833599 - DNA, 688 bp, Homo sapiens
gcataaaaggcctttgataaaattcaacactccttcatgctaaaaaccatcaataaactaagtattgatggaatgtgtcttaataagagctatttatgacaaacccacagccaatatcatactgaatgggcaaaagctggaagcattccccttgaaaactggcacaagacaaggatgctttttctcaccactcctattcaacatagtattgaaagttctggccagggcaatcaggcaaaagaaagaaataaagggtattcaaataggaagagaggaagtcaaattgtctctgttgcagatgacatgattgtatatttagaaaaccccatcatctcagcccaaaatctccttaagctgataagcaacttcagcaaagtctcaggatacaaaatcaatgtgcaaaaattacaagcactcctatacaccaataatagacagagagacaaatcaagagtgaactcccattcacaattactacaaagaatataaaatacttaggaatacatcttactagggatgtgaaggacctcttcaaggagaactataaaccactgctcaaggaaataagagaggacacaaacaaatgaaaaaacaatccatgttcatggataggaagaatcaatatsatgaaaatggccatattgcccaaagtaatttatagattcaatgctatccccatcaagctacc

SEQ ID NO: 833600 - DNA, 620 bp, Homo sapiens
taccccacaccaggattccttcgtggyccccaatgactactggcaaggggtgaatttcacagtcaaggaatgacttattcttgctatggacctctggaatcatggcagcaatagatcccatgacacccatggacacttgagcttgcagggaggtgtaggactccagcctctgcagtgcccagagtgtttggtacaggaatgtgttcagtggagtatgaccagggatgcctatcccccaaggttcgccatgtgccctttggagactttagccttagaggaactgttaggcctgaacagagcaaagtggcctcggctgtaagatggggcagtctgacttgagagcccccttgtcagctggcctcttccagggcctcagcctcactgtgcgcatttgcagtacatccttggatgcccatccagagtgcctccagcactgaatccaccttataacacaatcaaacccccaagcacatcaaaaagataaaagaaaaaaaaatccaaaggatggcaacttcaaagattaaacgaacatcaacccacagtgatgaaatagaactagcacaagaatttaggcaacttaaagagctggactgtattcttacctccaaacaactgcacta

SEQ ID NO: 833601 - DNA, 578 bp, Homo sapiens
tggagtctccctacaccttcaatcatggaggattctgtctggtagtgtggtggttcttgccaacttattcctaatttgcaggtaagacccagatggtcttagaagtatgcccagcactgcatgatttgctggtagagacaaaagacctgggaaactatcacagcctttgagcagttgtctcacgacaaagttccaactttctactatggcttacaaggtcatttttcaggatctggatctgaccttaaaatcaacaagtcatggtgttcccgaataaagtcttctccctccatttccaatgcaacaccatagattacattctagctcttcccatttacatatatgtaaatccttccttcagctatatgaaacttggttcccctcagtgatttttaaaaaataacttttgattttgaaataattttagacacacataagttacaaaaatagtgcagagagttcctgtacatctctcacccagtttccyctaagtttatcatcttgcagaatcctggtacatttgtcagaagtaaaattaactgtgatacattacaattacctaaactacagactttact

SEQ ID NO: 833602 - DNA, 556 bp, Homo sapiens
acacacacatacacacagttatgcatgttatgctatgcagttagccagtgttgtttwggtctgatgctgtcttgggttagtgaggaatcaagtgaagggcagtacattcttccctgtcaagttttttatttttatttttttggtttgttcgtttttttttttttgatgatgcttgtctccatctgcctgcttctacttggtttcctgcatatttcaattcctatcaatctcctgccttctagacagctgcataacgttgaagttgatctatcatttgatttctgtgggcatctctaacttttgcctgtcctccttcactaagctgagcctctggtgcattctgcttttctttctcctagcttcttgcttccttaccttgattggcagccactaagagcccacttagacaaaagcattatgagatcatctggcagcatttggccttaggtacggaacagaggagtatatcacggtggagtgatgcaatgaattgaacaaaaggtcaggtcacaaaatagaaaaatactggggaagtatagtcaagaataatattttg

SEQ ID NO: 833603 - DNA, 537 bp, Homo sapiens
aggctattagaagccaaaatgacsctatactactgttaagtgggaaacagtcacagtggtttcagccagccacttagtttggatttcctacattttcaaacattatcaaaatttatatagtgtacaaacctaatattaagaactcccattgaagcattaaaaaatactcatgaattccaagataagaataaatgtataaaacaagaggatttgaacaatacttacctgctctcccggagtgtctggatatatttatatttatcaggtaatgtaccgttggatgtaatcactgcctaaatgtatatgacacaagacatttctttagtatccacattttagtcctacaaacaaggtgtcatgactgatagagaaaagacagaatgacaaagatggagagagagagaaacagagagaagagagcaaaaatggtagtaaaaaaatacatttatgaaaaaatattctgctcataacttacatctctcaccacaggagaaaaattctgactttcaagaggctgtgtcgcgtctgataatatct

SEQ ID NO: 833604 - DNA, 594 bp, Homo sapiens
ggcaacagggcgagaatctgtctcaaaaaaataaaataaaataaaataagaytatgtattcattacaaccacttcatgttacagatgaaatatctgagactcagaaaggaagtgagtgccctgctcaaggttataaagcaagttgatatctccagcaaagcctggcatttgtactctccttctcctgcttctttaatgcctcagcaccaactccagacacattgcagatccagcactgactgtatcagcaacacgtccttaacttctctgtatttgttttataatggatttaatgatggtaaaatggatttaatgatggtatttacctaatacggttttcatgagtacttaaaattaaaatatatttagtactttgaacacttcctgcacctagtaggtgcaatatcatgtctaaccatgacagtgcctgctgcctgcattttctcaagcctgctacatctccctgttgacatattccaataggaaaaagaaagggtcaaaatggaatactatttgaaagaaaagaggatcacagactggaaatttcatttattcttgccccactaactattgttctattttagtgtaagagct

SEQ ID NO: 833605 - DNA, 610 bp, Homo sapiens
cacatagctctgtggtaagaagaggaaagtgtattgctacccctgccaagtaaaagcaaatgttgtcaggcaatctttactcatcatcaccaaagaaaaggaacattttccaaattgatagcagtatgccaggcccatgggatatgtttaattactccagaagaaaccataactgggacaccagctaaaattggaatcatcccctgattaagttgcatgattcaagtatcattttccaaaattgacttttcttttacacaggccaaacagatgaatttataaacataattatacttgtatcttatgtgtttggtattaatatttgaaactatctcaagatattcagcaggacaaaatatgacttttgagattaataaaaaaagtttttccgtacaaagcctagattttaagacatctaactatagatccaaaagactaactctgaaactcaaggtacaataaaaatacaaagataatcttattgttcaagaaatatattttcttctcttccytaagatttaagtcttttattgaaaaaaatggcttacatacaagaaagatacagatggtgataaaaatactcctgttaaaatcacttcctcaggaaagc

SEQ ID NO: 833606 - DNA, 581 bp, Homo sapiens
attcaaataagttttttaatacaacactctgaatattcattgtcagatatattctaaaggcaaaaaaaaaaaaatcaaagaaatagtaaacttcatttagtgggcttactattagttgtaataatagtattgtgatcctgacactatttatacatatcataggataaagcaaacaatatgcattaatattaaagaattaagatttttactgttggagaaaacagatgcaaatataaaattttaaaggtaaaaagttgtgcaatgttaaattttaattttcctggacattaatttttcctctggaggtcttttagtatcagtattaactcatgattaaataatatatatatatatgtgtgggcaactgtttgtgtatatttctaaactctgtacactaatagagcctaagagcaacagtatctcagtaacaataaacatgcttaacatcagataccagatcttggtctctatataataaaagaaaacaagtcttcttggtgaaattattaatttcctkatgtggggcaggaaaggtacaaggtgagactaggacaatttgttatcctaagaaacaagaaagc

SEQ ID NO: 833607 - DNA, 513 bp, Homo sapiens
tctggtgagggctctcttcctgggttgcaggtggctaccttctctctgtgtcctcacatggkggtgggagagagagagaaagctctctggtctcttcttttaagggcgctcatctatgaggactctaccctcatgacctcatttgaatctgattaaccttcaaaggcctcacctgcaaataacatcatattggggttagggcttcaatatatgaattttcagggggatacaaacattcctcactccgtaaatctctttatcctaccttcctactttactatgtgtaatcattataatgactacaaatatcaagcacttactatgtgtttcatattttttttatttcattcaattctcattcttatcctaagagggtaggtaattgatatggcttgaatatttgttccctccaaatctcaagttaaaatgtgatcctcagtgttggaggtgggactgagtgggaggtgtttgggtccccagggcagatcactcatgcatgaatggcctggtgcc

SEQ ID NO: 833608 - DNA, 460 bp, Homo sapiens
aagaactatcctatgttggttcatagtatartaaaatttaaaacatcagctgtccatgacattgagaacaacccttccacttattccccgacgtcatcgcaatttagtcgcagatttggggctcaaaatttggaattaggctctgggttttttttttttttcctctatttaggataggtctatttaacactggcttcaaatattggtgttttagtcttttgcaagccaaccaaaacacccaccactccacaaccaccaaacatgccaaccctgaagcaagcacacacatgaattagataatagggatgtgtattagttacctgtggctgccataacaagataccacaaactgggtggattaaaacaacaaaaattcattctctcacagttctggagaccaaaattctgaaatcaaggtgtcagcaggattggttccttcctgagggcttaaagcaagaat

SEQ ID NO: 833609 - DNA, 551 bp, Homo sapiens
tgtgtgtatcagtggtttattytttttattgctggagtagtattccatttcatcgatgtaccctaggtcattcattccttagttgaggaatagttgggttgtactagggtaaagggctgtgaatagaggcttatcaattgtattgatattttcaaagaacaagtattttgtttcttaattttctctattgtttttctgtcttaaatttcactgatttctgctcttgtttttattgtttcctcccttctgcaattctcccttctgcaaagcaaaatccaaagaaatatgatttgggattaacttgctcttcttttcctagtttctcaaggttgaacatcacattattgatttgagctctttcttcttttccaggataagcatttaatgccacagatttctgctaagcactgctttagctgcatcccacacattttgacatgttgtactttcactttcattcagctgaaaatattttctaagttcatgtgagaattccactttaattcagtgattgtttagaagtgtgttgtttcattcctatgttatttttt

SEQ ID NO: 833610 - DNA, 559 bp, Homo sapiens
gaatataggggaattttctgtaccttcggtttttccgtgaacctaaaactgatgtaaaaaataaagcctattttcaaaaaaaatctgaaaccaaacaaacacaaaataaaggtccttcaagtctcccctatttatgttatatttgccatgtgtatttcatctacatatattgaaattctcccaatgttatatatatatatgtatatatatatacatatatatattttgctttcaataatcatgcatattttatagaacttaagaggatatgactttggctttttcttttaacctcacaataatcttggtaaataggtaaacagatataatgaattccatttaagaggcaagcaaactaagttagatacttgtctgctctgacacagctggtgaagagttgaaccaggactcaaacctatatgctacttctttcccctgtaccaggctgcattttgttcctcatttgtaagttacrgctttgatacagaactagagtctgtgtggaacagaacgtaccatgaaattgtaaaaatatattggcactgagaatacctaggtt

SEQ ID NO: 833611 - DNA, 559 bp, Homo sapiens
gaatataggggaattttctgtaccttcggtttttccgtgaacctaaaactgatgtaaaaaataaagcctattttcaaaaaaaatctgaaaccaaacaaacacaaaataaaggtccttcaagtctcccctatttatgttatatttgccatgtgtatttcatctacatatattgaaattctcccaatgttatatatatatatgtatatatatatacatatatatattttgctttcaataatcatgcatattttatagaacttaagaggatatgactttggctttttcttttaacctcacaataatcttggtaaataggtaaacagatataatgaattccatttaagaggcaagcaaactaagttagatacttgtctgctctgacacagctggtgaagagttgaaccaggactcaaacctatatgctacttctttcccctgtaccaggctgcattttgttcctcatttgtaagttacagctttgatacagaactagagtctgtgtggmacagaacgtaccatgaaattgtaaaaatatattggcactgagaatacctaggtt

SEQ ID NO: 833612 - DNA, 607 bp, Homo sapiens
aatcaagaaatttaatgaggcttgagcccccaaattcagggtcttaaatctaatacaatttattaaccatccttctctgggcctccccttccttayacataaaatgttaggattgaacaaaaggatatctccaaggactctttaagtgaaaaattcttttaaaagattcaatgtaattaaaacaatgagttcaaaatgatgaaatgaatcaattaactaagagtttaaatatgactatgagcttcagaggcttgatggcaacttcctcctgtctttccctggtcccgttacaacattccaggctgcagggtccagtggttctggggggcccctggacgaggcctgccctcaaggaagaattctgagcagcaggaagagcaagcagatgggagcacctgacccataaggaggaagtcacggatggatttgcagacagtcaaatttctgaagactgtcagttcagaatacctcagatggagaggaggcctggcagggggcatctggtccaaagacacttttcagatttgatttataggctgtgcagcagtgttacctctggcagttttattttccatatgtttttcatcagcacaattttaattttttt

SEQ ID NO: 833613 - DNA, 614 bp, Homo sapiens
aaacgttctcaatcttaagagagtataaatatcaccaagggtgcttcttgaaaatgcagattccctgccagggcctttggctaggcctagatgtgtacatttttaacaagaaccccagacgtttctatgtagatggttcttggcctattccctgagaaacgctggaacatctggcctgctgaagaaaaatgtaatcccatttgaaaaagtgctagacaaactaaaaatcattttagggatttatgtgggctaccaaatgaggtctgaccaaaatgattagaaatgcagtctggaaaaatataggctgagaaaagatccagttgaacattatattgtcatgatccagagatcagaaatattttttaaagtggggtacccaattaaatccaaggcatatttgacagtctactactgttcttctggacattggccaagggaattaaaggctgatttccttgaaaatgctagatacattaaattttaatatttccttttttcyctcgtaggttactcattttcaatgcaaagcctactctctactaatcaggctggtcatttagggtatagatgattcaatcattatgcccttcttctaaattatgttagcctactga

SEQ ID NO: 833614 - DNA, 596 bp, Homo sapiens
gcctgagtgatggatccagactctgtctcaaaaaaaaaaaagaaattgggcaacatagtggttttcgtagtgaacttgaagaactagagaaagttcattttgttcaagtatctatgtgaatacagaggaggaaggctctagttcagtgtttctcaatttggtgcttttttgcaccctgatagacacctgacaatatctggagtccttttttggttgtcaaaactggactaggggagctactgacatcttgtgtgtacaacctagagacgctgctcaacatctgaccatgcacccttgttcctggaccaaaccaagggtcaggctgcttattctcttagcccaatgacaagatgcaggtgaactgggagagaagggagtttatttctgtaactgggcacagggagaagatctggaaaatattgccagaccaactcaaaattacaaagttttccagagctcatataccttctaagctatttgtctacatgtaagagtgcattcatctrgacgtaagcgattaacttcttccaatctgtaactaagatgtcagtcctgaagatcttcctctgtagcctcagtaaatttatttaaactaa

SEQ ID NO: 833615 - DNA, 618 bp, Homo sapiens
tcctctctccatccgaaagaagtatgaacgattatccctcctcctggcgtctacgatgctcagggagcagttgttcttactgggatccccaaggaggcggaatcagccctgagtctcctcctgtacttcttgatctagcttgtttgtggccactggagagtccctggatacaatggctccttcccggaaccagtaaccatgaactgagaaattcctgttgtagtagggtatgggatgggagaaagtgcagggcacgaggacgcacaaaccctcctgtaccgtcactgactcctgcacttgcagccggatttttggatccatagccagggcccctgtggggaaacgagggtcagctcggcccagcccgacaacccctctccccgcagccattcacctgcccacagcaggggcagcagtagcagcagtggcatgtctgaggcagaggcttcccgggcttcctgtgtgagcagagaagaggaagggagtggaggrgaaggactacagggccggacaggaagctggggaggagcaggaaacctcagccctgcatggaagaggaacctcagacccacacgtgctcagagcttgtcccctccacacagattgaccctcatgggc

SEQ ID NO: 833616 - DNA, 618 bp, Homo sapiens
tcctctctccatccgaaagaagtatgaacgattatccctcctcctggcgtctacgatgctcagggagcagttgttcttactgggatccccaaggaggcggaatcagccctgagtctcctcctgtacttcttgatctagcttgtttgtggccactggagagtccctggatacaatggctccttcccggaaccagtaaccatgaactgagaaattcctgttgtagtagggtatgggatgggagaaagtgcagggcacgaggacgcacaaaccctcctgtaccgtcactgactcctgcacttgcagccggatttttggatccatagccagggcccctgtggggaaacgagggtcagctcggcccagcccgacaacccctctccccgcagccattcacctgcccacagcaggggcagcagtagcagcagtggcatgtctgaggcagaggcttcccgggcttcctgtgtgagcagagaagaggaagggagtggaggggaaggactacagggccggacaggaagctggggaggagcaggaaacctcagccctgcatggaagaggaacctcagacccacrcgtgctcagagcttgtcccctccacacagattgaccctcatgggc

SEQ ID NO: 833617 - DNA, 556 bp, Homo sapiens
ttcataacacccccgctacgtccactggcaagccccaggtagcttcagtatgggggttggtcacaggaaagaacaaggcatgattaaaaggttgggactttcagctcatctcccagcctctgtggaggggagagggagtgaaagttaagtggagcaccaatgggcaatgatttaatcaatcatgcgtatgtaatgaatgttccattaaaaaaccgcaaaagactgggtttagggggcttctggacagttgaacacacggaggttcctggaaggtggcatgcctggagagggcatggcaactccattctccttcccctgcacctcaccctgtgcgtctcttcacctgtatcctttgtaatatcctttataataaactggtaagcataagtgtttttctaagttctttgagctgctctaaaaaattaattgaagagaaargtgttatggaaccccaatttatagctggtcagtcagaagcacaggtaaagaacctggagcctacaattggcattggaagtgggggacagtcttgtgggaccaagccctcaacttgtgg

SEQ ID NO: 833618 - DNA, 428 bp, Homo sapiens
gccccaacctcgtaagaagctcttcctttctgcctttgctctcatttgtctctccctgtagaggtattctctaggtcccatatccaaacttacataaacacaaaacaaaagactctctatttagaagacagtttaccaacttttgaacttgaatatccagcttggagtctgaaaaatcactccaagcagtttattaaggattttctccaaataaataagggttctccccaaaaggtgttttggtgaataatatatttttcatatcattacatatagatgtgtacacacacacacattgttttttcttttacaaaawcagtattgtcctatttataaagttttgtatcctactttcatagaatatagtgagcatttttcattttattagagattgtttataaacactattttatatctgcataaaattg

SEQ ID NO: 833619 - DNA, 600 bp, Homo sapiens
acaatgatggtccttcctactgtcaagactgcctggattcaaattttggctctgctgatgattagctgggtagtgattgctcaaattaattgagctccttctcagtcttttctgtgaaataaacatactaacacattcgcctcctagtgttatcatgagaactggctctgagaaagcagtcagtgaatgttagatattattcttttatttcattgttagtgtcttcctgctgctttaactaagaaagtgatttttaaaacctgctcaatgtatataagaagtttcacctaccgtctcaaagataaggcaaggatctccctgaacagagtttgtattttttgtggcttgcccagttctgtataacattgtgcatttttcttcctttttgtatttagcgaatacaaataagaaaaacagaagaggctagatgtagtgactcacactttgggagaccgaggtggtaatatcacttaagccaagaaatttgagaccagcctgtgcaacatagcyagaccccatccctacaaaaaaattaaaaattaaaaattagctgggcatggcagcacatacctgtggtccaagctactcaggaggctgagg

SEQ ID NO: 833620 - DNA, 600 bp, Homo sapiens
acaatgatggtccttcctactgtcaagactgcctggattcaaattttggctctgctgatgattagctgggtagtgattgctcaaattaattgagctccttctcagtcttttctgtgaaataaacatactaacacattcgcctcctagtgttatcatgagaactggctctgagaaagcagtcagtgaatgttagatattattcttttatttcattgttagtgtcttcctgctgctttaactaagaaagtgatttttaaaacctgctcaatgtatataagaagtttcacctaccgtctcaaagataaggcaaggatctccctgaacagagtttgtattttttgtggcttgcccagttctgtataacattgtgcatttttcttcctttttgtatttagcgaatacaaataagaaaaacagaagaggctagatgtagtgactcacactttgggagaccgaggtggtaatatcacttaagccaagaaatttgagaccagcctgtgcaacatagctagaccycatccctacaaaaaaattaaaaattaaaaattagctgggcatggcagcacatacctgtggtccaagctactcaggaggctgagg

SEQ ID NO: 833621 - DNA, 565 bp, Homo sapiens
ttcatgcaagacttagtagtaacagaatatttacgacatgtcaggcattgtattaaatacttcacatacaatgcctcatatgtgaaatcctcaaagtaatcaaaaaaggttagatactattattmatcttattattattattttagtatatttaacatattattatcatcatcaggactgtcccaccaaattataatttctataagggcaggaaccttgtctgttttatcatattcttccctgtcctatgaactctatcaaagttctcatatgtactgtatttaggttttaggaatacaatttgattaacataaccttcccaaagagaacactagttcatcaaaatgatctctgtaattggtgaaattttagaatatttgtgaaatagtgaataagaacacctatataaccctgcctataatatcctgcaacagcaagaatctgttcttaaagaatgtgtgcttcaaccagtatccatggaagtgccttcattttctctgcggcctaggctttccagcccaggacagcagcattcacccaggggttctggtacatacatttgtcc

SEQ ID NO: 833622 - DNA, 626 bp, Homo sapiens
gatgcctgtattttgttgactctttttggtcacaagggcagattgaattgatattttcaaagaacagatctcckggccttcttggtaagaagttatagcttagagcctattagattaaaaagcataggccgggcgcggtggctcacgcttgtaatctcagcactttgggagaacgaggcaggaggatcaagaggtcaggagatcgagaccatcctggctaacacagtgaaactccgtctctactaaaaatacaaaaaattagccgggcatggtgacaggcgcctgtagtcccagctactctggaggctgaggcaggagaatggcgtgaacctgggaggcggagcttgtagtgagccgagaccgtaccactgcactccagcctgggcaacagagcgagactccgtcaaagaaaaaaaaaaaaaaaaaagcatagcatggattcctttttcttaggaaggcaacttgtatttaggataatcctagttattttagtttaaaaaatccaatatcataaaggggtgatcttacctaacactaatacagagaaggtacagacctgaggctaactgctagataaatttgctatatccatccctatgaacacaaattatggctcttagttgaat

SEQ ID NO: 833623 - DNA, 586 bp, Homo sapiens
ggagtttgagaccagcctgaccaacatagtgaaaccccatctctactaaaaatacaaaaaattagctgagcgtggcggcaggcacctgtaattccagctacttgggaggctgaggcaggagaatcacttgaacccgggagccggaggttgcagtgagccgagatcttaccactgcactccagtccaggcaacagtgtgagactctgtctcgaaaaagaaaaagaaagaaaagaaaagaaaagaaattggcccttagtctagaattagcatatgtgttaaaaaaattcagggtaagaacctgataattttaaaagggaggtggagaggaggcttattgcattttcataagtctttcttgagtaaatactatcacctacatgttgtggtgaggtgattaagatactgtgacagactcttttttttacctgccttggtagtggagcctgaatcattcagagtagctaacatgtctactttgtttgaattcrccaaatatgtttttctcagattttcaaatctgtttctgatattgtcagaattgacaaaaattaaatcactctgctaatgtgaaaataacaatttaacc

SEQ ID NO: 833624 - DNA, 592 bp, Homo sapiens
tcattccccttcaaggcaatggcccatctaccctatatcccattttagagaccctctgtgttatccacacattccacttttttacactccccacctccaaggggtatgcacactctgtccmttttactcaagaaacatgtttattctctactgctttggctttgggcctcctgactttccacactctagcaacagctccctctttgaaccactggaaaagcctcctgactggccctcctgccacattatgtcctccatgtgttgcaagaagcctcttccttaagtcaatttaaaaaaaaaaatcacaaacacctgcttcaaatcttttccctttcctttccttccttacttctttttcttttttttttttttttggaggaggaattcttgctaattgataatatttaatatttaaactccgtagattcacatatgacttcatcaattggctcaactaatttttttccagcttcatatcctggtattcaaagtcatgtacaatttttttattgcacaaaatgtctcatctttctctagaaataacagcccttgccataaattcctgcttttgtaacatgaaactgctttcctt

SEQ ID NO: 833625 - DNA, 671 bp, Homo sapiens
acagcagactctggcccccatctatgagaggagaatgccttcctcagacactgggtcgggaccacttcctgagcccagtcacagaccagggcttcctcaggcggaagcaggatgagggccacccagatcccaatcccaaagaaacttcttcaggccactgccctcccacttcaaccagggaatgtgcccaagagctaggggtgtcccaaagcgcaaggcatgacacatgtagaaactatgaagatttttcggtgattttttatttgctcaaacctgaacacagtccacgtggggtctcggtgtctctgcctctctctctctctcacatgtgacaaaaccattttcagagaagcctggcatctagggacctccctactctggccctgactggcctttccacaatagggttctcagctgtaactggtttctcccttcactggaactctgggcccaccaaaagaaggatgaagttatccagaaagcaaagacccttggttgatacaaagggagcctcagatggagagatccaagaggtggtcaaaactgtgggagaagtggttacacggggagccttagagctaggtgccaccagcagggaagaggtgtgaacgscaaggatggaggtgagggcctgactcctggccggcacacctggggttcaagtgctaatc

SEQ ID NO: 833626 - DNA, 450 bp, Homo sapiens
aagtagctgggattacaggcaagtgccaccacacccggctaattttttttttttttttttttgtatttttagtagagacagggtttcaccatgttgcccaggctggtctcaaactcccgacctcaggtgatccacctgcctcagcctcccaaagtgctgggataacaggcatgagccactgcgcctggcctaagtaatgtctttagtaggtccctgagcaaataatggcaggattaaagagaggctgcccatcctatcctcccatctctacacctctgtaagagcatagttaagaccatggactctgaagccagactgcctggcttccgtgccagctccactcctcctgagctttgtgaccttaggcaagttattgagctttcctgtaagcagtatttcttattcactgttayatctcccaggtgcataattgggatccagtgtcaaaga

SEQ ID NO: 833627 - DNA, 559 bp, Homo sapiens
aatggtctctgaaatgtcccttcatcgattctacaaaaaaagtgtttccaaactcctgaatcaaaaaaaaaaaggtttaactctatgagatgaatccacacattacaatgcactttcacagatagtttgtttctagtttttattgtgggatattgggtttttcactataagcctcaatgggccctgaaatgttcactcgtagattctattaaaaaaaaaaaaaaaagggtttccaacctgctgaatccaatctaaggtttaactctgtgaaatgaatccacacatcacaaagaattttcagatagcttgtttctagtttttattgcagaatatttagtttttcactgtaggcctctatgggctccaaaatatcccttcgtagattctacaaaaaaagtgtttccaaactgctgaatcaaaacaaagttttaactctatgacatgaatccacacactgcaaagcattttcacagatagttcgtttctartttttatcatggaatattacgtttttcactatacgcctcaatgggatccaaaatgtccctttgtatattct

SEQ ID NO: 833628 - DNA, 588 bp, Homo sapiens
gagaagaatttaaaagagtaactctgattacaaaaacttacaatagccacgattaaattctgatgaaagtcttcaattggcaagaaatgtgttattatatgcagcatttgaagataataaccagaattatgaatracagcatcacactagaaccagcagacttttgtaaattttataaaatccttggaatagttagactaataatatatctatacaaatataactttagaaaagatttaacatagttaaaagtatgaccaataccacatggatttttataaatttttatcatttttggaaaatttatatcaataacatatccataaatgtaagaagatcaatgttatttatgattcgataatgccttccatacagttttccaaatgtcttactgaagatgccgaaggttcaaaacacttgatcaaaacaaaatcattggtcattttaaaataagttattcatttagctagagtgataatcaaaagacctcaaaagcaatacagaaagtttcaccagtataaaaaccttaacactgttactgcccagttttcacaaccaatcagaaaaaaaaataaagacaacacagga

SEQ ID NO: 833629 - DNA, 667 bp, Homo sapiens
gtatgtgaggatcctttaccccaggttgttggccagtttctttccacattgctgagagtccgggtttattggtcacaccggatgggtctcggtcccttacccctgaggccactgcaagaggcagcrgagtgccccctcgtgagagaggactagagacgcccctggaggaaagtatatccccatacaattgccaccaaaattgttagaaaaagataatcagtgccgtgaagaaaagtcagcacagagacaaaagatctctcagcaaggccatctttactttttgcagaaatggtgctcagtcgcagatggaacaatggtgagagcacacctgaacaaaggaaaagcagatgtatttatcccttacgcatttgggttgtccttactgctatgtcctgcatccattggctggagtgggacctcacaatcttaaagtgatacccgatttgctaataacctgaaactttcctaaataggtaagtgcagggaagaacaaataagttgcttatgaaaagtctcaggaggcaataacatcaccaaataaggaaggggcataggctgtgcgctggaatatgttggtgagcatgtccaacagttacataggatagagcttaacaaagagttattagcacaaagcaaggaggcttgaagaaagttagtctttaaaaga

SEQ ID NO: 833630 - DNA, 667 bp, Homo sapiens
gtatgtgaggatcctttaccccaggttgttggccagtttctttccacattgctgagagtccgggtttattggtcacaccggatgggtctcggtcccttacccctgaggccactgcaagaggcagcggagtgccccctcgtgagagaggactagagacgcccctggaggaaagtatatccccatacaattgccaccaaaattgttagaaaaagataatcagtgccgtgaagaaaagtcagcacagagacaaaagatctctcagcaaggccatctttactttttgcagaaatggtgctcagtcgcagatggaacaatggtgagagcacacctgaacaaaggaaaagcagatgtatttatcccttacgcatttgggttgtccttactgctatgtcctgcatccattggctggagtgggacctcacaatcttaaagtgatacccgatttgctaataacctgaaactttcctaaataggtaagtgcagggaagaacaaataagttgcttatgaaaagtctcaggaggcaataacatcaccaaataaggaaggggcataggctgtgmgctggaatatgttggtgagcatgtccaacagttacataggatagagcttaacaaagagttattagcacaaagcaaggaggcttgaagaaagttagtctttaaaaga

SEQ ID NO: 833631 - DNA, 667 bp, Homo sapiens
gtatgtgaggatcctttaccccaggttgttggccagtttctttccacattgctgagagtccgggtttattggtcacaccggatgggtctcggtcccttacccctgaggccactgcaagaggcagcggagtgccccctcgtgagagaggactagagacgcccctggaggaaagtatatccccatacaattgccaccaaaattgttagaaaaagataatcagtgccgtgaagaaaagtcagcacagagacaaaagatctctcagcaaggccatctttactttttgcagaaatggtgctcagtcgcagatggaacaatggtgagagcacacctgaacaaaggaaaagcagatgtatttatcccttacgcatttgggttgtccttactgctatgtcctgcatccattggctggagtgggacctcacaatcttaaagtgatacccgatttgctaataacctgaaactttcctaaataggtaagtgcagggaagaacaaataagttgcttatgaaaagtctcaggaggcaataacatcaccaaataaggaaggggcataggctgtgcgctggaatatgttggtgagsatgtccaacagttacataggatagagcttaacaaagagttattagcacaaagcaaggaggcttgaagaaagttagtctttaaaaga

SEQ ID NO: 833632 - DNA, 562 bp, Homo sapiens
ggtgataaagcaatggtggcaaggtgctcacagttggagaataggcggaggtacaggaatcctttgtactattwatgaagcttttctgcacattggaaatgatacaaaacaaaaagttaaaaaatgaaagagaggtggggtgagcctagagcatggagccccaggacccatagaattttgttgattcctcttagtgttcctgctagccaggcaccttgtgtgaaatttgccattaactctctggaaaaaatccgctttgggaggaggccactgcccgtgtggccacctccagccctgagaccagagcagaaggatacaggagcaactgcttggagacggctggcggatctgcacatgtttctatccatcccacttcccctctgtaaggttctaactctgccctgctgttctccctgctgtccaggccattgctgctgatttctgcagtgacggggccagcaacaactgtctcaaggcagcttgggaaaagacaagcctgcctccaactgttgctcttgtcactgcttctagctgtctcctccccaggttgcagttcccaaca

SEQ ID NO: 833633 - DNA, 618 bp, Homo sapiens
caaaggtttaaaacactcgatattacaaaataggattacaggtcattgtaaaataagtcattcatttaaccaaagtgataactcaaggatttttttwaaaaaaaggcaaaaacattcattctttgagagagactaattttccaaacaataagccctaataaaacagcatgaagccaattaaatttgttttccaaaattttataaacaatctataaaatttcatcttgattttaatttataacttccataagtctttataacctttgtaacctttattaaggagtcatctaatgttttatgaaaaccttgttaatctgacatgggggctcatatgctggtcttgcatcagtgtgcctttgacattaatgattagtttatagagaaataacttattttatctctcaaaattggcccttacaatctcacatgcccccctcttccatgattgtccctgggccttgaggagttgaataactttaatttctgaccctgtgtttcaggaacgcagataattttgaggctttaatgcagttaattaaagatgaggctttaatgcagttaattttgattggcatcttctaccaggtctgagatgacaggaagattcaagaatctaat

SEQ ID NO: 833634 - DNA, 610 bp, Homo sapiens
tctatctctgcctaaaagccagcatcatgctaaggtgggagctactagaagtatttaatatggtactggaagtattgccaatagaattaaatgtacacataaatattggraaggagatagcactagcactatttgcaaacgtgatcaaattccagaaaaacctaagagaatcaactaaaagctactaggaataataaggacatttagtaaaggagcagcatacaaattagtcacagaaatcgaacaggaaggctgcatataatagctaacaccacgtggcacttatcatgggtcagacactgttgtaagggttttatgtacattaatccttgtaatcttcaccacaaccctataaggtatataccattattatctccatttagaaataaggaaatggagtcatagaaagtaagtccttcttggtcacaactaaggcagaatttgagcccagggagtctaagccccagaatccatgctttttaccactaggccatactagttcttgatacataaaagaggaggtggggacaatttacaatggcagcaacaacaaaaaaaacacctaagtacaaattaaacaaaaaatgtgcagtacttatgtgagcaccct

SEQ ID NO: 833635 - DNA, 510 bp, Homo sapiens
aagtgttccacctcagatcaccaggaattagattctcataaggagcacacagcctagattcctcacatgcgcagttgtcwgtaggatttgcacccctgtgagaatctaatgcctttgctgatctgacaagaggtagagctcaggcggtaatgtgtgcttgcccactcctcacctcctgctgtgtggcccggttcctaacaggccactgaccagtaccagtccacagcctgggggcttggggacccatgcactagacaacatccagtccaggcttgtcattgtccagaggaatgggaagccaggtcaagagcagtggaatgacttgcatatactttgtggagttagaggcaaagccaggatgacaagataaattgctaaatttaaattcaggacttttcctcttcaactggctcctctgttttgtttggacccaggagtccaaactgatgataagaaagctttttaatgaaagaaaattcaggaacaatatacagaaaattcaggaaagat

SEQ ID NO: 833636 - DNA, 581 bp, Homo sapiens
cttggatatattccctttctttaggagaacaggaaatgaccatttgatgtccagaggccctatcaccaactgggactgtagaggtatagctataatagataatactggcatatgtgtatattggatgaacagtaactttaaaaccaatatttaattatcactcattttcatttttccccctattagacataatattagttaacactagagttgtttctgcacataaaataatctcattcattagaatgtccaaatgtctgagataggaccacaggctcttaagcctgactcccaggctacacttacgaggtgtgtagccctcagcaagtcttaattggtttgtactttggtttttaggatgtaacagaaccttccttgcagacatgttgaaatggtcacaagagctacttactctgtgctaagtgcagacagctatatcaagcactaggaaagcactctagagagtcatagctgggtgccatgattcacacytgtaatcccagcactttgggaagctgagtccagaagttagagatcagcttggacaatatagaaagacacccatttctaaaaaaatttaa

SEQ ID NO: 833637 - DNA, 636 bp, Homo sapiens
ttgaggttgcaatgagcagagatcacgccactgcaccccagcctgggagacggagtgagactccaactcaaaaaaaagtccgaagatccacatttttccaaattctcacttgaaccawaaaaatcaaactgtatacgttttctttgagtacaaaaatgatatatggtcactgtagagagcttagaaaatatatacaggttcaaagaagaaaatttaaattacccattatgatgcattctctcccagtcttttttttctatgcagatataacttctctatatactgttactcttcccaaccaccaggcaacagacaacacatctcccactgtggcagtaacctaggcatccttagtggaatcatgttccagggatactttttcaatgtctaaattttatagatgtatacttacataaaacaagaccaaatctgctattgagtaatcctttaaagtttcccttaactcctgaattctacgaagacaaagaatgcagattcaagtaaaaatgcttccaatgactagaaatggacctaaatttaacaaggggagaaaccgctcccattggttttatgtactctaagtctgatattatcatatgttctgctccaagtaggccaggtcctttggggtctata

SEQ ID NO: 833638 - DNA, 516 bp, Homo sapiens
ttttccaccggccgtcgttcgtgttttttttttttttttttgagacagaatcttgctgtgttgcccaggcaggagtgcagtggcacaatcttggctcactgcaagctccagctcccaggttcacgccattctcctgcctcagcctcccaagtagttgggactacagacgcccatcaacatgcctggctaattttttgtatttttttttaatagagacagggtttcactgtgttagccaggatggtctcgatctcctgaccttggattacaggcgtgagccactgcgcctggccaaggacaccatttttaatacaggctcatacaaaatcaaccattctttggtctgcagcatgacagcacagacattttagtctttgcgcagagattgagyacctgccctggagtagaatagaggcctccacagccagaactatggaaagtgcctcagcagcaggaactggaattgtaatttcccctgtcattggcctggggcaggagaagagctgctacagctac

SEQ ID NO: 833639 - DNA, 602 bp, Homo sapiens
ttgcatttttcgtagagacagggttttccatgctggccaggctggtctcaaactcctggcctcaagttatctacctgcctcagcctaccacaggactgggattataggcctgagccacggtgcccagcctaaactctatgtgtttaaattttaaaagtctaatcaaatcatgggacaatgaacacaacataataaaaattagaagaaaattagatttgaaaaatatgaatgaaagaaaaatcttctttttctgtcaaatagcacatctggcagcaaacgtgtgggttttccacaccaaacaattctccaattctctgtagacaccaattgggtgtcctgcaacttaattctgacttaaactacctagaggtaatgcagacctctaagactgcctctacttcagacaccaatgacaaatgtccggttatcttgtgcgtttctgagcaactagctgtgtactgaagcctcccataacctcctcgggtttgataatttgctataatggttcacwcaactcagagaaagatttacttatatttgcgtgtttattaaaaaggatactataaaggatatagatgaacagtcagatgaagaagtggata

SEQ ID NO: 833640 - DNA, 610 bp, Homo sapiens
tggatattatgccatctctaacaaatgagaggctccaggggatcctgctaacgaggaccggctggctgtccctttaagccarttccgtatactggtacatcatgtaccagttagtccatggaggcagatgtcaatgagtgtttgaagcagatgccaatgagggtgcccccagttctcctctcgttcctaaagtccttgaacatcaattatgtgcacacccagctcttgaatccatgacctctgtccattactgtctctggatttcttgttcagataggctctctctatctgaacagggcaatctctatagattgtcttctaaagacggcagtctcttaaaatacagcgaactatattcctagtcccatgttaccattgggtaatattcagaacattatctgttctcaggttctaaatccctgaattctttgaatccattcacttaaactcagccctaagaaaaatgtgcagaaataattaatctccaaatattttgaagacatcagagcttgtaactagtttgtacattctgccagggcagggaatgggcttcatgctcttggtgtcttacacagcccatatacaagcagatgcttagccaggcgtgctg

SEQ ID NO: 833641 - DNA, 513 bp, Homo sapiens
aatgctgcagttaacatatgtgtgcatgtgtttttatggtagaaggatttatattcctttgcgtatatacccaacamtaggattgctgggtcaaatggtagttttgttgtaagtactataagaaattgtcaaactcattttcacaatgtctgaactaatttatatacccaccagcagtgcataagcattcccttttctccacaacctcactagcatctcttattattagacattttaacaatagccattctacctggtgtgagatggtatctcattgcggttttgatttgcattactctaataattagtgatgtttagcattttaaaaatgtacgcgttggctgtgtgtatgtcttcttttgcaaactgtctcttcatatcctttgcccaccttttaatggagttgtgtttttcttgtatatttaagttccttatagatgctggatattagacctttgtcacatgcatattttgcaaatattttctctcattctgtaggttgtctgtttattc

SEQ ID NO: 833642 - DNA, 584 bp, Homo sapiens
cctttctaggaaatattaaaatgagctttcaagtttcttttaaaaaactgttgggattttaattggaattgcattaaatccataaactgacatctttgcgatattgagttttctcagtctaagtattttagttggacgcttgcctcaattacttcactgaaataactcttgttagagtcatcagcatatttgctctcactgtatgcaatgtcctctccctactttacctttagctgcattgcactttgttaataaataccctttctggaaacattgcttcacttgttttttaaaacaacatattttattagtttttcttctaaaacgatttagtcttcttttcttattctatgtgttgttcctgatctttaagcctttagatgttctatttttttacattcctatattctctataggtttaaatactacctttctgtttctataattttaatattacctcgttgtktctatacactgatgacatccaaatttataacctgacctcagactgtcttctaatatccaaatattttttatctctttctttacatttgtaatgaaacctttattttatatatttacag

SEQ ID NO: 833643 - DNA, 605 bp, Homo sapiens
actcgtacgtggaatatcattgctctgggcctcaaatgcaatggtcaaaagagaatattgacttagataacctatatagtcctatcctcagaatctaaattctttgattactggtatctctcatgattgcatttaggaaatgtgggactctttccattttttttactcaagaaaacacgacaactccaaaatccaattttaacagaagctgagtcatagacaggctactgcttttcagaacacttagtgaaaaattggcttcaagaacagcgctaagttcataattcctagtcctgagtccaggtaactggaccattcatgttttttaggaaaatatgtttttgacttataaataatttttaaataactaataataaagcaataaaaacgcaaaaactttgtatgtttgtgtttgtcttctttcatagtttttcttttttaattttattattattataatttaagttttagggtacatgtgcacaacgtgcaggtttgttacatatgtatrcatgtgccatgttggtgtgctgcacccattaactcgtcatttagcattaggtatatctcctaatgctatgcctcccccctccccccaccccaca

SEQ ID NO: 833644 - DNA, 290 bp, Homo sapiens
ctcgcttcagccgggcgattcttcccctcatttgttgcattgtttgcattaatatgaatatcttgttctgtttgttttgtctcctgagagccaataaagctgtgttttttctttmcaccaaaaaaaaaaaaaaaaaaaaaaaataggaataagtagcttatggcacagtgacacactggtagaattaagttatggtggtagcagtcgctgactggggaagccatatttacatcatcctgtttccttgatgagtcctgtgcctgccccctctccagctgattcataggaag

SEQ ID NO: 833645 - DNA, 629 bp, Homo sapiens
caaaatatttgaatactgagctcaaaacagctttgatagaatcagattcctcctccctttctttattttttaccctggtgctaggaggtggtgtagaggaagggtgatcttttcacaaatggtgctaagacgattaacagtttacaaaaataaaataaaattgggtgtctacctccccatacaagaaatcaactcaatgtatgggtagtatagctcttaccagataatatagataatatagattatctggtgacctgtgggtaatagaagatgttttgaacagaacatgaatgcactagccacacaggatgaatgatatatttgcctgcaataaaactgatcactttatttcatcagaggaccttcatacaggaatgaaagggcaaggcacggagatggagaagatgtttgtaacatacatagcatttaattatatgaagttcctaaaaataaatatgtaaaagacagtgctattgaaaattggagttgggcgtggtggctcatgcctgtaacccaaacgctttgggaggccaaggcaggaggattgcttgagccctggaatttgagaccagtctgggcaacatrgcaagaccctgcctctagaaaatgaaaaattaaagagctaggca

SEQ ID NO: 833646 - DNA, 431 bp, Homo sapiens
tctgttctgtcccattgacctatgtgtctgtttttatgccagtaccatgctctttttgttactatagttctgtgattcctgcagtgytgtgattcctccagttttgttctttttgctcagatggctttagttattctgggtcttttgtggttccatatgaaatttaagattattttttctatttctttaaagaatatcctcagtattttcatagggattgcattgaatctgtagattgctttaggaaatatggacattttatcaatattgatttttccaatctatgaatatggaatatctttttattttttgtgtcctcttcaatttcttgcatcaatgtcaaatagttttcattatagagatttttcacttctttggttaagtttgttcctagatattttattttatttgtaataatgtaaatggaattg

SEQ ID NO: 833647 - DNA, 515 bp, Homo sapiens
tattgtttaatttccatgtgcttgtatagttttttaaattccttttattatttctagttttattccattttggtcatagaagatacttgatattatttcagttttcctgaaatttttaagacttcttttgtggcctaatatatgggctgtccttgagaatgttccatgtgctgaggagaagaatgtgtattctgcagccattggatgaaatgttctgtaaattttgattaggtccttttgtttctttgttgatcttctgtctagataacctgtccaagtctgaaagtggggtgttgaagtctccagctattattgtataagggtctatctctctagctgtaataatatttgctttatatatctgggtactccagtgttggctgcatatacattaatacttgttacatacycttgctgaattgacccctttttcaacatataatatgaccgtttgtgtttctttttatggtttttgtcttgaaatgtattttagctgatattagtatagctactcc

SEQ ID NO: 833648 - DNA, 641 bp, Homo sapiens
attagataagaaaaataagagagagaaaaaaatagaaggaaggatataaaaattattatgttcatatgatggcaacaaaggaaaataaatgaaagttttaatcctggttaagagctttatacatagattcaaacagcatttatcaggttggtacaaaagtaattgcagtttttgccattaaaagtaaaaatagcaaaaataaaatatataggaataaatcctaattaaaatcatgccagaactatgggaaaacaattttacaactcttctacgactcccacttgcagtcaagatggagcaagagggcccatatacaccctactctgaaataactaaaaaactaggcaaaacatacaatgactcttaagatattagacatcaatcaataaatgacagtgatcactgagaaatgggaaaccagcgaggtgtgctctacaataatgtcagcttacagcgtagacagtttctagactgtggtgcaaggaggggaaactcaaaaccttgcagtctccatgagttgagaagatggaggtgcaagtcacagaagggttaggcagmtagaatttgcagggcagagtacctgagaagagagagatgggcacaaagagaactcttgagatttgaagagagttcccctctgg

SEQ ID NO: 833649 - DNA, 628 bp, Homo sapiens
cattctgcattttttttataggccctggttctgttggtttttcataaccttgtggctggtcaccttttatgtaaggtacgtggccttccctgaggttctcagacaatctttcaggaacatgcttccaggagtcaattgctgaccaccttgaaaggtgtttcatgagctatatcttgaaagatgagtaagagtttctgcaatagatgaagaaaaattattccacgaggagggaaaaagcacacagaaaggcaggcacacagctctacagggaccccactgtggcttaaatggtgtgaaacttgccttagtgctgggtagaaacaggcaaggaactctgctttcacctaagaattatcattattccaaagagttggtgggaaatagtatgcttaaagtatttgtttagcaggaaatatatttggatttcaggaattaaaaataatctgacccagagaactagatattctgaggacagggtggcagccccacctcctgatattcatgacattgtataattgcctcactttagcagcttgtctttgaccaattgaatagggcaacactgaggtgtgtcaycttccatgagtaagttacaaaagattattacttgtgacttgctagctgactt

SEQ ID NO: 833650 - DNA, 488 bp, Homo sapiens
ggtaggaggtcatgtgggcaccagggtggggaatagaagtcagcctgtgcaattgagctgctgaaagaacttgctacagagtctcagagtttggccctctcctctgtaccatgttcttgagtgacacaagtgagaacacagtaaagcacctggatcaattctgtgaatgacttaagacaagaaaagggagctcatttatttgaatggcatatctcaggctcaccactgacaggccagcaccaagtttagagattatatctaacataaatctaacatccttcccttactttcaaatgccagagactcaagcacaaaagatgaagggacctgaactgacagaagttcttgtgaacacaagttgacaaactcctatacatccttcaaggaccagatgatctcttccctcctaggtgaagcctttccgagactccccttttatacatgctttcatcctagtscctctcatactggatcctattcccattctc

SEQ ID NO: 833651 - DNA, 488 bp, Homo sapiens
ggtaggaggtcatgtgggcaccagggtggggaatagaagtcagcctgtgcaattgagctgctgaaagaacttgctacagagtctcagagtttggccctctcctctgtaccatgttcttgagtgacacaagtgagaacacagtaaagcacctggatcaattctgtgaatgacttaagacaagaaaagggagctcatttatttgaatggcatatctcaggctcaccactgacaggccagcaccaagtttagagattatatctaacataaatctaacatccttcccttactttcaaatgccagagactcaagcacaaaagatgaagggacctgaactgacagaagttcttgtgaacacaagttgacaaactcctatacatccttcaaggaccagatgatctcttccctcctaggtgaagcctttccgagactccccttttatacatgctttcatcctagtccytctcatactggatcctattcccattctc

SEQ ID NO: 833652 - DNA, 592 bp, Homo sapiens
atgtctcagtttctccctgccacaccaccccatgatttcctttactgcaatttcatgatctatgactattattcattcacgtgtttacatctttatttcaagttccatggggtcagtgaccttgtctgtcctgtttactgtaagtccctatctctgggcacagtacctggcacctggcagatgtttgcctcttcctgtattcatgctttttgccatgaactttgcagtgccctctcatgtgggtgggtgtatttctcacttctccttttgagtttcgccatgtgacctgctctgaccaatcgaatgaggtgaagcaatggtgtgctagctctaagcccaggcctctggaggccttgtgtatttctgcttgctctctgccaccactgccacagccatgaagagaacatgcctaggccatcccactggtctcaggagctgaaggagaaggggcatgtgaagcaaagccacctccagccaaccrcagcctacatctgctgacccacagatcaatggaaatgaatgattgctgttttaggacatagagtttggggagtggattgttaggtaacattctcctccacctgtaaaatta

SEQ ID NO: 833653 - DNA, 614 bp, Homo sapiens
caggcaaaacttcctggcaaacttgtggagactttttttctacaccagaattgttccctttgctgcaactgccttcattttcctcttagttctagaggtgaaggctatttagaaacagaataaagagctaaaattttcaagctttcaaggcagggtaaagaggggccaggggaatgtgtatgtgtggtcacatgtatgtgggcacatgtgtgttaagtttgatgcataggttgggggaagcgggtacggtttgaaagaggataccaaaagcaaacttaatcttaatcctccccctcccaaaaacatggctcaggaatcaatcaggcaagaactagaaaattggtctgggggtcatgaaatctaatctttagtccaccagcaataagactttcaaaaagtcaattgctcctgactcttgtcttctcttttcataaaattttcaacatccacacaggaatattgggaataaaattaaataacagctacgaaaaggatgcgagaatacttttattattattattattattattatwataaagttttagggtacataagttagggtaataaactttagggtaaagttttagggtacatgtgcacaacgtgcaggtttg

SEQ ID NO: 833654 - DNA, 558 bp, Homo sapiens
ggcgtgagccactgtaccttgcctacaaccaaatttgagtaacagattatatttgtgaaactgtttagtatacatggcttccatgtaacattttatttggggaaagaatgtttcattgcttaaaaaagctcataaatcacgaatgcatgttagttatcattttatagggtacaatatcagaaaaagaaatctccttttgcaccaagaatggtttcaaaccaacacttttgcactcttatttagaatagattaatacttgtaagcaggaaatagctacctcttctgggcaacagttatggaaaaccttcctcctttgaatgtcatttcttaagaacaaaacaaaaacaactttcttacttttgggccattggagttagaatctgtttcatttcatccataataagttctaatttttctggctgtacctctaacactttgtccagagttsggtgatctgctgactgcaacaaaacaaaacaatcaaacccctctaaatttaatcaattttttcacttcaggaaaaagaaaagtaattagtcattttaaaataagttttaa

SEQ ID NO: 833655 - DNA, 578 bp, Homo sapiens
gatagaggcatccactggcaaaaaatgaatatgctaactataaacaattttgaactatttattcaaacaagaaccgytgtatgccctgcctttaagtctctaagtcacttaagagtcaggctatacctgtaagtagtttgacaaattttttttgtttttctaaattttttaatatagattctctttccttcctcaaggcaccccaaattaatgaggtcctgcaattattcatactgcaaatatatgacgacattctgtttatactattgtcatggagtaaatgatggcataagcatcaatatattttattattctaatgtgtgattactcaaacatttatgtcagagacacactcaacagaatgaaagaaaaatgtgatgactgctgacttgcatgaaatattctgtattaaattatcccatgggggtagcctacacagcagctaagaaatccttgaattattaaggaaacagttatttctttcatgatttctcaagaatttgggtttctacattttaataaccttcgaaagtgatttttttaatttaatggaaatctgagtatagtcttagaatcct

SEQ ID NO: 833656 - DNA, 619 bp, Homo sapiens
tatagaaaaaaataatatttacccataggtcactaaaatatgttgcaaaaatggccamaaatccctcccattcctctatgcatacccttttgtggcataatttcgccttttctcatatcagaagtgaagtctatttatcctcttaaatctaggcagggatacgtgacttctttagccaaagggacaatatgaaatgtgacatacgcagggctgtgaaaagcgctcatgcattaggacttgccctcttgttgctggaaaccctgagaccatcatctgatgatcctggaccagcctattgacatagcatgagagaccatgtgggagagatgccagccaacccagccatcccagccactcgcagaattgtgagctaaatgaaatagctgttttaagctactatgttttggggtggtttgttccacagtaaaagctaattgctgcagttctaccacaaaaattccagatggattgtagatctaaacgtgaacagtaaatgacaaaagcttctacaacagtgctgtccaatagaaatgttccctatttgcaatgcccagtagggttgccaccaagccacttgtaactactgagtactgaaaacatgactagcacaaatgaggaa

SEQ ID NO: 833657 - DNA, 610 bp, Homo sapiens
atgaaaactaaaaatgaagtatgtgtagagaaagagtggattcattgaggaaatgttgacaaaaagacaaggggagttttggtgggggtaagacatattgagcttaagatttaggaatgtaaagaagagggagcttcttataatggctcactgttgtctttagggcatcatgaggtgaaaggcactgcatatatgacccacaacataaaaccagagccagggaggtactcacagtggtgcacacctttaatcccagctacttgggaggctcaggtggaaagacggcttgagctcagaggtttgagactagcctgagcaacatagtgagacactatctctcctctcctcttttcctctcctctcctcttctctctctttggggttcaccagccctccctcccatcttctacacccttgcagataacacaaagattgaacaactctgccacatcttcctggtgtccttgagagagttgggattgtcagcaaactctsattctgccaataacaccctgtccattgtctctgtaaggctgataatgggttccagacaggacttgaatctgcaaaaataaattccttcatgttactccttacaaagacctgcccc

SEQ ID NO: 833658 - DNA, 434 bp, Homo sapiens
tatcagcctgacaaaatacgcaattaggctcctctatcttagcatagttcttttgacaagaaacaacactgtgaacctctgtgttaacatgaacaggtgataaagggggtcaaatagccaatcgcagctgccaataggagagtttcatgaaacatgcaaatctcaaagccagctatttagctgaagccccagggagcggagtttgctttctaactctcaaggtgttctcctcttcccagtcctgccacaagccctttctctctatatagcttggcagcccattaaagcaaaaaatgctttagtcgctgaagcaatawagttgaataattgctgccttgagtctttctccaactcatttgaaggatgaccattgtaagatagatttacttctggtaaatgatctaccttaaagagtgggttatagaacagccggg

SEQ ID NO: 833659 - DNA, 565 bp, Homo sapiens
caccagattaagggtggatccgccttccccagcccagggactcaaatgttaatctcttttgccaacaccctcacagacacagccaggatgaatactttgtagctctcaatccaatcaagttgacacacagtattaaccatcacagtccttaaagtctaaaactcacttaatgaaacactcaaacaaatttaagaattcaagaactgcaatctcacataataacaaagtgtattgtccttgactttgtccattgattctgaagaaaggctctggtcttgtcgtctgctctaggaagtttattgccatttcaaaacttcatttaaattgaaaatagattagttccatgtcaaaaagcagtgtctacaaacttgcttcatgtcaacctgtctaaagagatggaaacttgaaaagagtatattcaatttagaagagatctttaagggaatctaatttaggcaatttkcctttttaactttatatttatatagagttaacatatataacatatatagttatataatgttgagcacagaatcttactaccaccagaatgcctattcttcac

SEQ ID NO: 833660 - DNA, 470 bp, Homo sapiens
tctaaaaatgtaatagaagaggttccacactttataatctcagaatgcagaggtagtcaggggaaagggcagtctttaagatggaataaattttaagtctcatcaaataggaacatacctggmgtgttccttttggcagtagcatgtctcaaggagctacatacaagatgatatagagctttcctttacataattacactatctattggtacagatgtttgatttcttctctgaccttctagtcacataattttatatttatacaccaatctatctaaattcaatccatttttcaaggccaagcactatgtgttatattgtgttatatttttgttctatgatattcttcttctttcatggggtcaaccttgtctgagtcagcacaggattttacattttttttttctagaagtcatcacatggctaacctagtttaaatcactcaatttttagttgaaagaagagaagcc

SEQ ID NO: 833661 - DNA, 555 bp, Homo sapiens
ggaaatatacatctgggtttgtctgttactgtgcctagcacataatgaacactcartacataatatctactattattaattctttaatatttaaacagatatcataaactgcctagtgtaattaagtgccaaatacatattacagatggtgagagagatgatctacagagattcgttcaaggaagactttgggcagaattaaatttgagctcttcctcatttaataggcaggaaggattctgtgcattattttgtgctatattacactattttacatcatattgtattatgtatatattgtattatatataaacatacatgccatagtgacataatctatacaataattatctcaagacctgcccccacgtttaccactattttttaaattcagaaaaaacataaaaatataaaaatttaagacataaacacacacgcaatttctcagcagtgcaaaaacaaaagcaattagataataagtaggtcttctgtacatttcacaagaaaagaaagataaaaatctagggcagagcaaattgtcaagaaggagaggac

SEQ ID NO: 833662 - DNA, 660 bp, Homo sapiens
ctaatttttgtatttttgtattttttatttttttgtagagatggtctcagyatatcccccaggcctgtctggaactcctgggctcaagcaatccacctgtctgggcctcccaaagtgctgggattacaggcatgagccaccaaacctggccaaaagtcacccttttgagtttattcacagggttctgtgatcactatgatgtaactctagaacattttcgtcattgctgaaaagaaaactcataccctttagcggtcacccccacttttcacgacccctcaatcctggcaaccacgaagcaacttcttatttctacagatttactcattctgggcatttaatgaaaatggaatcacatggctcatggcctttggagcctggctgctcactcagagagttttccaggctcatccatgctgtagctggtgtccctgtttcattcttttttgttggctgagcggcttcagcattttaaaagcccaccatgaatgtaggagagtcccagctgctccacatcttggtctcgctccttttttttttttttccttgctaactggttatttcttgctatttaaaatttttattttaatccattagacagtaggcttaattttcaatctattatttagtttcatgtctctcagtctcccatgccaccat

SEQ ID NO: 833663 - DNA, 673 bp, Homo sapiens
gtcctcagcagagcttcccttctaacacaaagcagcccaggaaaacatttcttgtctaacaaagagcagcctgaaaaatcaagctgcaaacatagataagcaagctggaagcttgcaygggggaatgccggcagctgtgccaatagaaaagggctacgtgggggccaggtgtgtccaacatggaggctccatcttccctttttttgttaccaggtgtacagtaaaggaatgggcaacatggcacagctgaggcaggggacccacctgcatagtaagagattagggtgggggctgccagagattcgagccctgtgcaaatggcacttctggtctaaccagtttttcacactctatgcaaatggcacatttggtccaaccagtttttcatgccctatgtaaaccagacactgcctcctcaccagctgatctataaaaccccctgtgtttcaccatggatccggcaacccacttctccaggacccctctctgcagcagagagctgttctttcttttgccaattaaacttccacttttaacttcactcttcatatctccatgtccttgttctccacggccatgagaccacaaactctgggtgatactctaacattcaggtcgtttcaatatacccactttgcctcttttaaaagagaaaaatcagtagcccccgaaa

SEQ ID NO: 833664 - DNA, 601 bp, Homo sapiens
aagggtcatctgtataccaggctctgagctaaaaactaaaatggtctcaagacctctctgcactcagcccctggcaagcctggcaccatgtaacaattctgcctgacaaaccgcctggtttttagttattccatataattatcagaagtcagcagaatggccaggggtatgggttctggcatcagaattcagactctgcctgtcttttatgttgctatgacttggagaagttacttaacatctctgaacttcaacttctggtccagtacatatctaccccattgagtttatctgcaaattcacaaaaattatcctcataagtcactccgcacagtgcctgccatacaacaattactcaaaacattagctggtattattgaccaaagtatttcctgcggcgctctgaattactggaaaaggcagcatcaaaccactgcactgtcaggtaaatgatttccagcaatatttcacactcttggaagcacagtyaaaaattgtattgagcccctgcaatgtccaaagcacaaagctaaaaatactggagagaaatcagagatagaaaaaatacccatttttttgtcccctagaagaacttaaaatt

SEQ ID NO: 833665 - DNA, 552 bp, Homo sapiens
cacctcgcacatctctttcttgttcttgctttcaccatgtgatgtgcctactcctccttttccttctaccatgattggaagcttcctgaggcctccccagaagcmgaaactgccatgcttcctgtacaacctgcagaactgtgagccaaataaacctcttttctttataaattacctagtctcgactatttctttatagcaatggaagaatggcctaacacagttgtttttgggggctggtcatgtggacatttctccccagcatatgctgaaattccagactcctagaagaaaagcaggtgtcctgcataagccatattttttatacaaagagtttaggtgcagtacgcccctttcatcagttagggaatggtgggagtcctcctaaaatccacatttccgtgaaccagccaagggccagccttgccagcagcctttgtaaggagagcgggctcaggcctgtgatgcaaactcttttatgcacattggcctttcagccatgatgctccttctgtgcaagggcccagggaagcaaaagcaggctggtcagga

SEQ ID NO: 833666 - DNA, 552 bp, Homo sapiens
cacctcgcacatctctttcttgttcttgctttcaccatgtgatgtgcctactcctccttttccttctaccatgattggaagcttcctgaggcctccccagaagcaraaactgccatgcttcctgtacaacctgcagaactgtgagccaaataaacctcttttctttataaattacctagtctcgactatttctttatagcaatggaagaatggcctaacacagttgtttttgggggctggtcatgtggacatttctccccagcatatgctgaaattccagactcctagaagaaaagcaggtgtcctgcataagccatattttttatacaaagagtttaggtgcagtacgcccctttcatcagttagggaatggtgggagtcctcctaaaatccacatttccgtgaaccagccaagggccagccttgccagcagcctttgtaaggagagcgggctcaggcctgtgatgcaaactcttttatgcacattggcctttcagccatgatgctccttctgtgcaagggcccagggaagcaaaagcaggctggtcagga

SEQ ID NO: 833667 - DNA, 640 bp, Homo sapiens
tgctccttctgtgcaagggcccagggaagcaaaagcaggctggtcaggaacacagaggcaggtcagtgtrtttagaattcagctgtaggaagaatcgtggagaggaaggaggtagaggtggaagtgagaacaaatttgcggctctatcacttgctagctatgtcacatttaacttctccaaacctcagtttgttaatatgtaaaatgggaacaatacctatcttatagggcttaatataaggtataaagcagagtgcccagatatttgttaaaacataatatggtgtctcttattattggttttaaattgggggcctgatttaatctcattcccgttaaaataactaacatgaatagaggccttagcatgagccaggcgttgatgtaggaaagtgcttctcatcggtgaagtcatcccatcctatgacagccctgtgagggacagacactctaccgtgggccagtttacaggtgagacagctgaggcacagagcgcggtgtccaaggtcacacagctatggagggctgcgcaagaattcgaacccaggaagcccaccaaagcatacaagaaaccagctggattacaaaatttcagttcataaggtaaagttttgaagcagttttaatcttcttccagtaa

SEQ ID NO: 833668 - DNA, 640 bp, Homo sapiens
tgctccttctgtgcaagggcccagggaagcaaaagcaggctggtcaggaacacagaggcaggtcagtgtgtttagaattcagctgtaggaagaatcgtggagaggaaggaggtagaggtggaagtgagaacaaatttgcggctctatcacttgctagctatgtcacatttaacttctccaaacctcagtttgttaatatgtaaaatgggaacaatacctatcttatagggcttaatataaggtataaagcagagtgcccagatatttgttaaaacataatatggtgtctcttattattggttttaaattgggggcctgatttaatctcattcccgttaaaataactaacatgaatagaggccttagcatgagccaggcgttgatgtaggaaagtgcttctcatcggtgaagtcatcccatcctatgacagccctgtgagggacagacactctaccgtgggccagtttacaggtgagacagctgaggcacagagcgcggtgtccaaggtcacacagctatggagggctgcgcaagaattcraacccaggaagcccaccaaagcatacaagaaaccagctggattacaaaatttcagttcataaggtaaagttttgaagcagttttaatcttcttccagtaa

SEQ ID NO: 833669 - DNA, 509 bp, Homo sapiens
aaacaatatattttcagtgcttgtgctagttttcttctttcccatctctcaagacccctatcattcccagaataatttgcacatcctgcatgtgcacctatgttttttggacaaacttcaattaatgatgaaatctttcatgttgaaacctgttctcatttttctcttttccacatctcaataagtcatcttgcacaatcaatatctcgtaggtcaactgtgttggttaggattctttgtaacagagacatgcctttcattgttgtttctgtttggttgttgctttattttggtgatgtaagcaaagggtctgttttataaagttttgttgccacccacttttaaaaataatttatgaagaaaatccaatatagtaattaatattactctctggagtactttaagaagtagaacacattccattttctaaaaaataaaataaaataaataactgtgccttttacattctggtatctgggcccctggtyggtgaaatttgtcgcttttta

SEQ ID NO: 833670 - DNA, 540 bp, Homo sapiens
cacccagctacttgggaggctgaggcagaaggatggcttgactccaggagttcgaggctggcctgagaaacacagcaagatcccatctctaaaatggacaaatgtatgaatgaaaaaaaaaaaccacatgtgcaaccaagaactaaaaattaaattctgaaaagaaaaaacttctaaaaggagataaaagagtttaaaaaaattctccatgaaaattagagaaaatgtcctatcagattgcagttgctgagtcattttttaataaaaggatgaactgaattatttttttcctacagaaataaccaataatggcaaaagctagtgaacatgctaaatctagaaaagtaaaactgatattctgataggaccccaagcctaatgtcagataatgtcctaaagcataaaaagcctatccaccagaaaggaacaagaaagkcatcaaaacaagggaggcagagccttggggtcacggctcagcctggtcctcagacacacttaagaacctactctgctcccctcttcccttcttctccctcactt

SEQ ID NO: 833671 - DNA, 520 bp, Homo sapiens
atgagttaacatatctttgtgtttccaaaggacttctacattgtcaacaatttagcattttagcagtgactctgaattgccagaagctgcagcagatgacacgtagagaatgatagctattatcctccagctcattatcagcaccctggaagtcccccttgctctccctctcaatcactgccacctcaaggaaaacgggtatcctgactttttttctcccagttgtattaagatataatcaacaaataaaaactgtatattggctgggcatggtggctcatgtctattatcccagtacttttggagaccaaggctgggagggttgcttgagcccaagagtctgagaccagcgtgggtaacatagtgaggcctcatctctaccaaaaaaattaaaattwaaaaaaaaagaaaaagaatttgtatattgttggtgaggatgtagagagaagggaacccttgtatgctgttggtggaaatgtaaattggtacagccatgtggaaaatactacagaggtttctg

SEQ ID NO: 833672 - DNA, 601 bp, Homo sapiens
ttctggtacattcctgtacttaacaaacagaattttctgggggtggggctgcctggggtgtgcagattcacctgtgcacgttcaggcagaaaacggtgggatcctgttccactttcaaggcgtctcgtttatcgcgagtgaacgcaagtgcatcccatcctcggtttgcttctcttttctggaaaatgctttgtgcttttccaggcttcagtcccgggaaggacacacactggacacatccctccggggactctcttcagaagagggaggacccccgcacactcaatcagtgctgccaactggcagggacagcctcgccactggcgcttctgttttgtcttaaagatctcgctttcccggagcggaacaacatttacttggatgtgactgtgaagcctgggatactgcgaagagcccacggtgtgatacagagacttggaggaagagcaaactcgacccactcgggtgtaggtcayagtggtgttggcacttgtcgtgatggaaaaagagagaacgccggctctaaagcccctggtggcccagcacctgtccccacaggagctcttgcccaggaacaggtcctgctcaggagacccggcca

SEQ ID NO: 833673 - DNA, 628 bp, Homo sapiens
ggctggaaacctcccaggcctctccaaccctgatgatttcactacttcccgatctcactggcawagcatatctcatcttttttggcttacatattttctattttattcaggtgtagcatctttcatacagttgggtttttgtattttggtagggatggatttagggaatgggttttggccacttgactttctcattttgcccttggtccatttttcgtttgattgttatttatcttattatctttaggaattttttgtcaagtggattcccagccctcagcattggttatctcctgcagcatagcccattatcctaaaactcagtgtcttgaagacaccaacatgtcttctctcctagtttctgtagttgaggaatctgagtgctgcatgcctgggtgcctctggtctgggtctgtcatagagctgcaggggaactgcaggccagggctgctgtctcatctggaggtctgactggggaggattggttcccatgagcactcatgtgctggcagcaggatgcagtccctgggtggtgttggctgaaggcctcagttccttgcctatgggcctctccatggggcagctcacagcatggcagctggcctccctcatagggagctagggagag

SEQ ID NO: 833674 - DNA, 510 bp, Homo sapiens
gcaaattcactacctactggttgttcagagcacatatggtagttaccaaattatttcctcagttagaggtaatatgctttgggaaagcaatcaaaatacctgattaggtattcaaggagaactgggacagctaccaaaccgataattactttaaaagggagagtcgttatattctagttatgttctgatacttctcgggatttcttttttaggatgcattttcataagctgcagagttagaaaaggctggtttgcttcttttatagaggaaaacattcactgctcagctgaactttgtgaattgaggatacgctgtttctatacttctagagaaattgtaaaacaattttaagagttttgtgtgtaacataaaaatatctgcttaacagttttgtgtacaataaaaagcttaggtttatcacatsatatgataaattcagtcatttcgtgaggcttttaagagactctctggcctgtgttaccaaaatctcttgcatgttgctgtctgaa

SEQ ID NO: 833675 - DNA, 600 bp, Homo sapiens
atccagaaatcatcctaatctctgaagaaacctaataacaaagctatactgaacaaagctatacaacaacatacacatttatatctatgtatgcttatatatatgtatgtgaatatataaagtgtccrtacataaacattttaatcagtcttactttgcatcacaagtagtagaatatgaatgttttttcccaagatacttacatcatgcagtatataattgtttttatgaaagctgttttccacaattcacaacaatgatatatataaacctatattatatatgtgtgtgtaagtctttatcaatcataaagtgttttagacctacttgatctttacagaactccaggatgctgtaaactcaaggaaagaattagcacactcattttcaaataacacacaaagcttgtcaaaattcacatagtttttaaattacagagacaaaattgtaacctaggcctttgtattccaaatccaatagccctcacctttttgaaacagggtcttgctctgttgcccaggcttaagtgcagtggcgtaattatggctcactgaagccttgacctctcaagctcaagtgatcctctcaactcagcctcga

SEQ ID NO: 833676 - DNA, 527 bp, Homo sapiens
atccgccgtctttttcctgcaacatcagctttccttcttctagtcaatctatctcatcagcatataaatatgctaataatatttttcataaaaacaatgttctcatcatctcacattcccttacttctccacacaacttcactgcaaaactcttagagaaagatttttccatactcactgtccccactacctcactttctagtttcctgagccctttcaaatcagactttgtcacccacttctccgtcgaaactgctcaccagggttaccaatgacctccacatttcccagtcaaaagatccattcccagtctgcgtattgtggataactctcatcaagctggtcattcctttctgccactttgttcacttaattcctgtgttatcacactctcctgaatttcctctacttctcaagctactccttctggktttttggtaggatttagctcctgatggctaaatatagaacattgcaggcttagtccttatatctcttttcttccatattgacactaactccttaca

SEQ ID NO: 833677 - DNA, 619 bp, Homo sapiens
aagggaggggaaacagacggggagttctattcatttagggttccgtgattccattaaccttctgattcttcagagcttctccacacctttccaattcctctctgctttcatttctacattggtgttggggggraaaaacaaaccttattagccacacataaacatcttccattaaactgctctaaagcaattactgctgttaacacagttaatggactgtcaatgtcaaatgtgaaaccttttctcctggaaaggcaacaatgacttcgtgaaatcgttttctgtgctgtagcagaaagggaggaattctggaggatcgctctttctgcaaacatcgcggtctgtgaaatctgccccctaaaaaacaaacaaacaaaaaaaccaaaccaaaacaaaaaaaccctgatcatatgcctgttatcctaaaatagcaccttcctccattatgccgaggttcagcgcaaaactgactcatgcagtaccgggatcgctgccagagcgacggagcgcgcgagcagcgcggcatcaacaggcagaaggtgccacggggcggacgggacccactgcccgggtccagactttccatccgagaaagcaaaagctttcagtatccaactta

SEQ ID NO: 833678 - DNA, 531 bp, Homo sapiens
ttttctagacatttggtttacatagtggcaataatacagtgcattcagacttggactctaatctgtttcctctcaacgctgtaacctaagcactyttttctcatcacgtaaaattttttagtaaacttacgtaatgactacttaacattaaatcattttaccattacacagtatacttatcattttcccatttttaaaaacttaagttttacccataaatgttttattgaaaatattacatagatcaagcacacaaatcttttctctatgaaactgacaaatgtctactcttacatagctaccacgcagatcaagtatttgacacagcagcatcccaaagtctcctatatgtcccttctcaggcaatacccccaaaggtaattatcattctgacttttagcaccataaattcgtttcgccagtttctgaacttcacagccctttttgcctgacttctttcgcccaatgttatgtctttgaaattcatccaagcttttgtataagtagtttattcattttcatttcttcaaa

SEQ ID NO: 833679 - DNA, 640 bp, Homo sapiens
aaatatttgaatgtcaaagaaagtatagtgaagttttagaacaccaaagaaaaagagatcttaggagcagctagagagaaaagactgatcatctgcaagggaacaataattaggtaaagagaagacttctaaaaaatggaagctgaaagaccggagcaatactgtccacattttgacacaatcacggacaaggatgctgagtggagccacataggctgtgcactgaacaactccagaggggtgtgattcacataggatttagtttgtgtagtgttccctggagttggccaatgcagcataaaatagaattttgaactcaacaaaattatctttcaaatatgacctgtaatttttcaggaagtagaagaggaagcaatttcagcctcatatcatgagaccaatagaaccctgttactaaaacttgacaaaaatacttaagaaaattagtagagactatagcacgtaacacagagccacaaaaaatccataataaaacactgacaaatcaaatccattaatgtatcaaaaggagaataaattatggctaagwggagtttgtccttagaaaagaagtttggtttatcattaaaaactcaccaatctatgcaattcagcatattaacagaataaaggttaaaat

SEQ ID NO: 833680 - DNA, 538 bp, Homo sapiens
aaaaactctctgaggtaggttctactattattactattttataaactagtcacagagaagttaagtaaattgcctgggggcacacagccagtaaccggcagagccaggctggaaattctggctgtctgtctccagtgcctacctgcctaaaaatgactgaatacttttattgtgaatcaggcactgtgctaaagattttttaatgcattcatatattcttcacaccaacccttttatgagaaaaccgagacttgtaaagggtatgtttcttgaagcccatgaataataaatagcttaggtggggctcaactcaggtttatgaaatatgcaagacttagcaagatctgtaccagctcagccccagatcccgcgagaacctctgcaatgcccttaacatggtcatccattgcatggataatctgggcttcgtttagactactctgtcagaaaattctmcctcaggctgaacttgaaataatcgtggctgtaactttgtgtccacagctctggagccacatcagtcaggtctgatatagtc

SEQ ID NO: 833681 - DNA, 612 bp, Homo sapiens
ggccctggcctcttcgtgggcttcctgctgcgggcagcctctggcgtaccaccccccccacgcccaggaagtggtgcgcataagctgggaccagccctgtccacggggycccggggcctgtgtgctctgccagagacaggggatgcatttgaggaaacgcctccgactacatgcctcccacacaagcggtctgtgcagatcgcatctgacgcctacccggaggactcagctgttctgtttacatcgtggcggcacctctcaccctgaccctcgcaaaggttctggagatttctggagaatatatttgttaaagtcacctcttcactttaaaaaaaaaaaaaaaaaaaaaaaggacaaaaagcaatagatactggtgaagtgtggagaaaagggaactcttatacactgttggtgggaatgtacattagtacaaccgttgtggaaaatactgtagagatttatcagaaaactaaaaatacagctaccatattcaccagcaatcccactactgagggtctatccaaaggaatagaaaccagtgaatatatcaaagggataccggcactggcatgtttatcacagctctattctcgatagtaaagaaatgggatc

SEQ ID NO: 833682 - DNA, 555 bp, Homo sapiens
tgaacttaggagagtatctattactgccccaccatttgataaatgagaatatactggcccaaaacaatgagatamccagcccaaggactttgagctggagagaagaaagttctggacctgaacccaaattttctaaatccttagtctatgctcctgccactataccaagcttcttaccaatgatcaggatttctcaactccctgaactcggttcttgtgctgaatactgatggagtaggtagtttatttcattaatgccccccatcaatgtgcttatggaataacatgtcaaagtaaaattaagaaggaaacttaagtcagtaatatcttctgtcaaaacctgaacacattaattacatttactttcctattgcttgaacctgacttactttcctattccataaactttttcaaaatgtaaaaaccaagaccattttgtttttgttgttgctgacattgtagttattaggagtttagaaaatattttagatatggggcttctttgccaaaacattattctgattctaagtgcccgtaagttggaagacaaagtaa

SEQ ID NO: 833683 - DNA, 567 bp, Homo sapiens
gacccttaagactagctagtaaaagagtacctggtggctaagaacctataagccatgctgggggttgcaaaccaaacttattacagggacctgcacaaagcaaagactggggcctycaagtacagattgtagaaagttgtaaaattctgtttagtccaaaggggccagtcgcagttcatttagctagttctgcagccaataaacgcctagtgggaattcagtaccaggacactctcagattttttttttttttttttttacttttcaagaaaaatcagaaattctcattttattttaattttggaagcaaatgtttatttttcccttaggcatataattctttcagaggctttaaagtttactactgtttttcccacaaagtctattcgttcagtctcctattagagttatatctgggcattttaaggttgtttttataatgttacatcttgtctaacttttttttcttccacttttcctttttcttcccctctttttggtattattatttctgctcttttcgctaagatgaaatataaagacatcagccttagaagaccagtagag

SEQ ID NO: 833684 - DNA, 491 bp, Homo sapiens
agaagaaatgagtatatttagtaggagcattgctctgctccagtgtcattgtataagaattaaccttgaatatcaagtggcatttgcccaacatttttcatctgaatatctaaaactgtttaaaaactaattataaaacatcatttatgggtcattaaatacatctatttctaataggaaaataagttatttatttagactattcaaatgaataccaaatgcagtgtataaaaagtcacaaggtaaagaacccgtcaagaaacaaatgtaacaccattgtgagtagtttatatcaaaaatccattattgatctatagcaataatacttacagtgtcaaggtatattttttcctaacttgattttattctcttgtcaaaatgtaatgctataaatatgaaagtgttctaggttaaacgtagcctcaactgtatgtatgtgtaytagtccattttcatcctgctgataaagacatacccaggactgggtaatt

SEQ ID NO: 833685 - DNA, 602 bp, Homo sapiens
ggcatagttgaaatgtattagcctttactgttattcctgtgaaggcttatagtgttggcatccattccctctggatttcgagtctgtgttcacagytgataatctcacattgagccatgatactctttgtatcattatcattacctgatataaagaaaccagacagaccattacctgatacaaagaaacttcacagtgaattcatagaaaagacagaaaaaagttttgctgaatatgtcgtatatacatatatataatattttattttaaaatgtcattgaacatatacatttctttagctttttccaggggacattgcacctaagtttcaaaacacacaaaatagatcccctttactaaacagttttcattttggggttacaaaaaagtcaatgtttcacaatcacaaagcataaaggtacatggttctgaaacaatttccaggcagatttctctcattcactgtactagggtagttttggaaacccagaccatgatccattccttacaaatgatctccaccatgggcctccctgggtctccagaaaaaaaacaaagaaaactgggggcaaaacaggagtaaaataataacctcaggactc

SEQ ID NO: 833686 - DNA, 602 bp, Homo sapiens
ggcatagttgaaatgtattagcctttactgttattcctgtgaaggcttatagtgttggcatccattccctctggatttcgagtctgtgttcacagttgataatctcacattgagccatgataytctttgtatcattatcattacctgatataaagaaaccagacagaccattacctgatacaaagaaacttcacagtgaattcatagaaaagacagaaaaaagttttgctgaatatgtcgtatatacatatatataatattttattttaaaatgtcattgaacatatacatttctttagctttttccaggggacattgcacctaagtttcaaaacacacaaaatagatcccctttactaaacagttttcattttggggttacaaaaaagtcaatgtttcacaatcacaaagcataaaggtacatggttctgaaacaatttccaggcagatttctctcattcactgtactagggtagttttggaaacccagaccatgatccattccttacaaatgatctccaccatgggcctccctgggtctccagaaaaaaaacaaagaaaactgggggcaaaacaggagtaaaataataacctcaggactc

SEQ ID NO: 833687 - DNA, 537 bp, Homo sapiens
aagtggttatatttggcttgattatgggaggtgaagctggaaggaatagggttggctagagaccagggcttggtcacaatgggccttgggttgagtttgaacttggactttatcccaaggggactggggaggcttgggttgatatcagaggcttgagtgaaggcagcaggctttagaaagaactctcacacaggagatttctcttgtaggaaatagattctctttatgaagagaatgacccgggaaacaagtcatcagactcgggaatgatagcagaagccttcttctttctgacatctggtcttgctgtctccttttccaggaccattttatggctggttgaaaatctagtgatgctggtgggagggaagctaatgattcagacagtcattaatattctccctgaagaagcttccttgaagatctaaggggaaatcagacccccaaggccaggagaatttctatagtgcgtaactgcgggcaataatagcccccatgactatgctttggccagtcaktggggatgggcttgcatgc

SEQ ID NO: 833688 - DNA, 578 bp, Homo sapiens
attccccagaaccaagcaaacaagaagaaggtcctccttcagtgggctgtcatcgatcattccccgttccatggccwcaggactgactgctgatgaaatctaaaagaccagcttgcagaaggcatggaaatcctggggttaggggcccctctgctatggaggtatgactcacagtgggtcagggaacctgagtgggatcatccctggaactcagaatctctaagacacacttattggctctctataagcaataacagatggcaagataatattattcttctaatcttttgctaaaaacattcagtcatttctcaggggcctccctagtagaggaagacacctgcagggtatctcattctttcttgttctcattttcccttctaccattttccccttagtatatttctggccctatgtgcaggaaatcaggtagctgaggtgtggtttaagggacccattgtggttcttatggcccatcaacacaattccttcgtgttggctgcagtatccatgtttgttacccttttgggtcaaggcatgaaaacatctgtccacaatgccagtcttacctctgatat

SEQ ID NO: 833689 - DNA, 392 bp, Homo sapiens
atctatcgaaaatttcagtttgcatatcctttgacatagcaatattacatctaggaatttattctacttttttttttttttkgggggggacagagtcttgctctgttgcccaggctgaagtacagtggcacgatctcggctcactgcaatcgacctccacctcccgggttcaagcaattctactgcctcagcctccccagtagctgagattacaggcgcctgcaacaactcccggctagttttcgtattttttttttttttctgagatggagtctcattctgttgcccaggctggagggcagtggcacgatctcggctcactgcaagctccgcctcctcggttcacgccattctcttgcctcagcctcccgagtagctgggactacaggtgc

SEQ ID NO: 833690 - DNA, 609 bp, Homo sapiens
tcttcccattatttataattactatgtttccaattcagtttctgtaaatatgtgtcattaatattgaacaaattctacattaaattaaaatgaacatatttcattttacttataatttacaaccatgcttatttcttaattattttactttgaattactagatcaggtttccaagtttagccccgtgttaatttgcacaaatggctggaggtggtctggggagtttataaaaagctcaaccgttttgctatccacaaggtgaacatgttctttgcagtagaagaaaccgaactcttctattttggtcactgaaacatccatattaaaaaaacaattttaaaggaaaccgtttaaatgcaagtcagcaaacacatgaaaagagtctccccaaaaggatagattaatttagttttattccaggagggcagcagaacgaatcacaggaagtgtcactgacatgggtgttttcttctttggcggagaggctgaccaagaatcgcctggggaaagcacctctaaaaagaaagaattcatcgggacgttgrcagctagaactcaaaccgtatgtggtcgccatcttgtcgcctcactccatatccttcattttgg

SEQ ID NO: 833691 - DNA, 403 bp, Homo sapiens
acattcacaattattgctcaggccaatgcctactgtgaatgtttttgaaataagagcattctagtctcataattttatatcctcaatgtattcttaggaggcaggaagaagaaattattgccattcagtatgagactaactttttttgaaggcaagcctgaaaagaaagagcatttcttcacacaaatacatatttttgattcacataattattatatctacagaagacttaatttgaactcaataaaaatgatcattttaaactatgagtcaagtattctaygatattgcccttggattgaacaaaaattacatatgatgcaggcaatctttttttctggtttgttcactaaaatatgacaactataagacatattacagcttaggactagagaatctaaag

SEQ ID NO: 833692 - DNA, 658 bp, Homo sapiens
ctcaagatctagaaaatagcctctgaagggcaaatctaagagttattggccctaaagagaaggtggagagagacatagggrtaaaaagtgtattcaaagggataataacagagaacttcccaaagctagggaattatatcaatattcaagtacaagaaggttatagaacaccaagcagatttaacccaaagaagactacctcaaggcatttaataatcaaactcccaaaggtcaaagataaagaaaggactctaaaagcaacaggagaaaataaacaaataatatatagtggcgctccaaaatgtctgacagcagagagtggtatgacatacacaaagtgtggaaaaaaaaaaaaaaaagatctcacctcttattctagaatagtatatccagcaaaaatatccttcatgcatggagatataaagactttctgagacaagcaaaagttgatatgtcatcaacaacagacctgtcctataagaaatgctaaagggatttcttaagaaaaggacattaatgagcaataagaatcaattaaaaatacaaaactcactgatgatagtaaatatgcagagaaacgcaggatagtataacattataattgcgatgtttaaactactaatatcttgagtagaaagactaaaagacaaaccaatca

SEQ ID NO: 833693 - DNA, 508 bp, Homo sapiens
cctctgtgccacacagagacagcagcctgctatactgggctccctggatccccttcacaaacttctgttgtaatattaataattaccttgctacattgcagtaatgtgtttgtgtctgtcttccccactcagctataaatttctagaggccaaggactgtgtttagttcatctttgtatcccttagttcataataaatgctcaattcagttttcataaatggatgaaaaagaggatggatggaagaaaggaaggatggataaaaaagaaggaaggaaggaaggaaggaagcaaggaaggaagcaaggaaggagtgacagtgatggaccacattgcttctgactttctgatttctaagaaggaagaaaaacaaggtaattccagcagagkcggcttaattccctcttgtccaatttttgtacaacctcttcacacaccatccgtggcattttccttatcttacaaataccggaggacactagccttcacagaaattatcttggctcctt

SEQ ID NO: 833694 - DNA, 335 bp, Homo sapiens
aggggctatacaatgagtctgctgtgcggctgtctggctttaaatccctcaccgcttccctctgccatcttgggaaagctggtaggtctttctaatcctcagggtcaggatttagatcagggactggcaaacatttcctgtaaagggccagacagtaaataatttaggctttggaggccagatggtctctgtgacaactactgaactctgctgctgtagcacaaaaccagccctagacaacacatacacaaattggcatggctgtagtccaataaaagtttatttacaaaagcaggtggaaggatggatttggyctgtgggccagagtttgtcta

SEQ ID NO: 833695 - DNA, 483 bp, Homo sapiens
tttttgtccttgtgctttgttctgttttttgaaagacaaataatttgccctagctgcgtgctgtggagagctggttcttgccctggaattagagggtgacgaagggtaagatagttcagggaytcactgcctctctggaagtcctccctaattcacctgacagcttggaggaccaaactgcaatccattctgtcttaaaatattttgcctttactttccccttagttgaatagtttcaaagtgtggttgccagatcagcagcagcacctgggaacttgctagagatacaaattctctggccgctgcctagacctactgaatcagaacctctgggggtgggacctagaaatctgcaggttaataagcagtcaggtgattctgatgcatgtttcagttacagcccctgctggcccagctgagatgcaggcttgtaaggatttttgcatgtacctgatctgttggtgctaacccactccaccagcc

SEQ ID NO: 833696 - DNA, 631 bp, Homo sapiens
caatcataatgaaatataaagtatagcaggtatatagtggcatcgcaacttaatttatttgcccaggtttgaatgagaggactagatatcttttggctaataaaaaasaacactaggccaggcacggcggctcatgcctgtaatccaagcagtttgggaggccgaggtgggcagatcacttgagtccaggagttagaaaccatcctaggtaacatggggaaaccctgtctctacaaaaaaataaatatacacacacaaaaaatcagccaggtgtggtggcacgcacctgtagttccagctagttgggaggctgaggtgggaggataatttgagcctggcagtaagccaagatcatgccactacactccagcctgggtgcagatcatgtctcaaggaaagaaaacaaacaaacaaacaaacaaaccactatacaaattctttaaacttcagatagatatttcttttattctgtctctaaaaaatgcaataaaagcctcagttcatcaggcaccataatttcttaaaaacattttgacagacattttttcagagatggctttgatatctatggagtatttaggatcttgtatggtagaaaatggagttaaacatggaggagattctaagattt

SEQ ID NO: 833697 - DNA, 635 bp, Homo sapiens
gggcctggcaggaagtgattggatcatgggggcggatccttcatgaattgtttagcaccatcttcttggtgctgttctttttctccttctccttctccttctcctccacctcctcctcctcctccttcttcttcttttttattttttgagacagagttttgctcttgttgcccaggctggagtgcaatggtgccatctcagctcaccgcaacctccacctcccgggttcaagcgattctcctgcctcagcctcccaagtagatgggattacaggcatgtactaccacgcctggctaattttgtatttttagtagagacggggtttctccatgttggtcaggctggtcttgaactcccgacctcaggtgatccacccacctcagcctcccaaagtgctgggattacaggtgtgagccaccagagctggcctcactgctgttcttgtaaaagtgaatgagttatcacaagatatggttgtttaaaagtgtgtagcacctcctccctccctctctctctcttgccmtgctctggccatataagacttgactgctttccttttgtattccaccatgagtcaaagctccctgaggactccctagaagcagatgctgccatgctggggaactgtgagccaa

SEQ ID NO: 833698 - DNA, 583 bp, Homo sapiens
gaagactttcaatggcagctcattgtccagaatggcagacattctggtcattgtccagaaagttttagaaggtggaatttaatgtattctgaatacagaactcaatccagatatcaaattgccttggtgagatttacttctctggttaaagtatgatgcaggtaaagttccaatcctgattaatgcagttgtggtcaaagtttaattatattttggaaatgtagtatttaagtgacatctatcacttaaatactatcataaatgctgagtcccatggtggtattgatggacctgaaaatatatgttttttcaagtgcttttacaagtgaaaaaatgtagctaaaatgttatttctctattctatttaaaattaggtttcttggaaaagctttcattttctgaaataaacatccccttgagcctggtggtatgtataaatatggattcacgaaatgtgggtttgcttaaaaacaagatatgcccaacgaactttgcttccttttttgataragtggggagactgctggggaggggaaattccacagacaaaatgtgtctggatttcaggaagacgtttgataga

SEQ ID NO: 833699 - DNA, 647 bp, Homo sapiens
tgggtggatgccagctgtggtggaattggcaggttgggtcagcctgatctcagaccataggagtggtgttcaggtgcccacagctgcaaattggaatggacarccctcaagcctcttgatggtgtgcttggtactggagaaacagaaccaggccagtggcttctcttcaggcccctggtaatgtgttcaggcactagctgtgataggcaggggcagcatggtccctaggttatggcaaaatgttcaggtgggggcggtggtggttgcactgtgggcctgccactggggaggatgagaccacactagtgagaacagcataggtaggaagcggtggggtgtgtgactagctcacacctcggtctcacagcaaattatagcagcaatagcagtgggatttgttttgggggctacattattggggtcttgatttgcatttccttgatgactagagatgttgaacacatttttatatattttttggccatttgtatatcttctttggagaaatacctattcagctgctttgtccattatatattggggtaatttgttaatttgctattcaattgttctttatatgttttggatattaacccttatatgagttccttatatgttttggatattaaccccttgtcagatatatg

SEQ ID NO: 833700 - DNA, 579 bp, Homo sapiens
tacataaagaaaatttaagaaaatatttggtttgattcattaagattcacattataagattatacattatagcgagagggaaaaagactggtttaaacttaagacattaatcattcaacaaacacttattgaattcagtgtgagcaaagctctaataacgcaaaaatgaatagtttcttgactaaagtctagtaagggagaaaaattggaaaacaataaatatgaagtgtagaaagattgcacaaaaaatacaaaaggagaataaacaaataacagaaactcatagaaattaaccaattgcttgagtaaattgggatatatttttcaggaagtttgagatttgagctgtgcctagatgaatgaataaatttccaaggtagaggggaaatagcatttctgatatcagaagtagcactgtgcaaaatttcaaatgtatgaagttctgtaacagactcagggaaagaagaattgttctgtgataggaaaactttgtaataaacgtgaataaaacaaaggaagtyagaaaattatgtggatctttaaaagtacaaactgtaaagcacttattaatgatgtcat

SEQ ID NO: 833701 - DNA, 631 bp, Homo sapiens; identical to SEQ ID NO: 813900

SEQ ID NO: 833702 - DNA, 479 bp, Homo sapiens
acacacacatgtttacctgaaatacgttttatgaaacataacttactcttgctatatgttgtaaactcaatattttgtctgttctatttcattccattcaattgtattttgttatttaaaaaatgctagttgtgaaacacaaaattgatttcttaagacacaactcaccatgtgaaaaacactcttgagggtgggggatacagaagtgaatccttctcacaaattctctaagtcctcccttttttattgaagatggctaaaatttaccattgaggatgtctttgctgtggttaaaaaaagttatcttttattaaaatgtaagtgaaccctgaatgagtaacagattacacctggcccatcatttatacctctatgaagtggagragatcacattgcacctcacatcacaaatatcacctcatatacagtaaagaaagaaagtcaggttggatgagggaagggctggaaatgagaacagg

SEQ ID NO: 833703 - DNA, 585 bp, Homo sapiens
taccccttgaggaaatatttgttttacattttctaaaccaataaatagagtggcaagactatcagtgggtgaggtaatgttaaactatgatgtgtgtrtattacccaagtggaagatggagaataaattggatgtatttaaaaacaaatccataaggtagtaatgatggcatccattaacctacccataacctgagaaaagaacttgagagctggcatctaaattctataaaaaatatatgtgctttccccacttttatcactgagtcatagtttcaagtaatagtatatatgagaaagtgaactgaatgatttttatggcttgaaatacttcaaaattatcacttcagatgttgatgtgagatgaagctccatagtttatagaacatagaatttcattaaatgcattaagaaagttcaagatcaagcttttttaatggtattaaaacaaactcttaaaatgtatgattagtcatttaatgtaagtagcttgcattaaaactgacaataattttctgattttttttttttttttttggttgagacagagtcttgctctgtcgcccaggctggagtgcaatggcgt

SEQ ID NO: 833704 - DNA, 644 bp, Homo sapiens
gtgcagtggcacaatcgtggctcactgcaacgtctgtctccctggttcaagcaattctcctgcctcagcctccctagtagctgggattacaggcgtgtgccaccgtgcccagataatttttgtatttttagtagagatggggtttcaccatgttgaccaggctggtctcgaactcctgacctcaaatgatcgcctgccttggcctcccaaagtgctgggattacagacgtgagccactgtgcccagccgagaaaaatatttttatataggagctgttccataaatagtaattaaatgaatgaatggataaacagagcataatgtgaaaacagttgcatcaagatcattgagcacagctgtcttatcccctttccaaaactaacatgaaattaactacagtaataacttttaaaaaatacatttgcgataaaaatgccatctactaaccagaaatttgaacaacccctaacatgaagtaaacagacagaattcgattgactgagaaacaaactgggagaagatcacagcccacaaaacgctgggggttgcagcagaggtaggagctgtcgtgaggtktgctccaagcaaaggggacagcaaggaaaagaagagcctcaaagtgagcaatcgtcagcctaggacca

SEQ ID NO: 833705 - DNA, 568 bp, Homo sapiens
aatccagaggtggtacagccaggatttaagcactgtgctcttaatctttaggttaccctacagcaagtagctatttgtgattcactgaatgaataacacaagtcagcagctagaggaaccaagatttgaacttaagtcttctacaacattttgtcaatcaagaaatcctctgttctatatccctgaggttttggcattcaattttagcttgaaggaaaatgcaattatttcatcagtgttgtccaacagaacgttctacaatgatgggaatgtcttacatctgcacgtcctatattttagctagaagccctatggggcctttgagcatttgaaatgtagctaatgcaactgaagaaatgaagttctaattttatttttattttaatttaaatagccccacgggattattagctactatattgctcagcttaattctagtctcttctctgatcatttcatctgaacatggtctcatttctctggcagttagttgagtttatttcaaattttaagctratgaattcactgtgcagttcgctgaaaatgaacgaaaatatccaatcaactc

SEQ ID NO: 833706 - DNA, 566 bp, Homo sapiens
tctaaattcccactttttttgtcttataaatagctgaagtgttcgttgaactgttcgatctgggcaaaatgcaaactaacttgacttgaccaaagtttagtaaggcttttcccctttgcccaggtacctaaactttggcccactttgggcactggaacatggagccatgttaaagttagaggcccctccttcagggaactggctgaactcaggaaaaagtgttccctagtcaatgtcccatcatacctgtcacccatcccatcctagcacccagttcttgtttacttctctccataaaagaaagcctatttgtgtttgtcctctgagctacagatctcatagatctcagagccttttccctattgtcgtagtcaccttccccttacggcaataatccttttgaataaagtccctccttacataagtttaagctattttttttttttaaatgtgacattattaacagcttttawaatgtctaggcttttttaccaaataatctcacttctggaaatttaatcaaaggaaataattatatgcacacatagtttatttttttaaaaaga

SEQ ID NO: 833707 - DNA, 522 bp, Homo sapiens
caaaaggctggcataacctaaaagaaatagaaatcctgaaaatcattagaaaattataatcacaatgggtacattatgcctagaatactgcrtggaattctggtaaattcaaatcaggaaaaagaaagctgacaaatattcaactaaaggcaattactctgacccagagtataaagaagtttccatattgggccatgaaataaagatttgactcaaacccagaaaaataagggcctgaagcttgcacataacaagcctgggcataggagaataaataaggaaaaaaaaaaaaaaggcatcttagcctcttgggaatatgacctggcaaattggtagtgtgtttgtaagaagaaaatgtgttcttattgttcatctcccacttatgagtgagaaaatgtggtgttttgttttctacacataccggggcctgtcggggagtggggggcaaagggagggagagcattaggacaaatacctaatacatgtgggcttaaaacctagatgacagattgataggtgcag

SEQ ID NO: 833708 - DNA, 627 bp, Homo sapiens
aaactttgttttcctgccacacagtaagcacacaaagaaaaacagtaacagcaaacttaaaatttgccatagaacaatgagaaagcatgctaatagcttccactcaaagcaactatttgtctgacaaaataaatttccaggaaatagcccatagttaaaacaagagtactttttattaggaaaaggggatttaaaagacataagcataaaatgagattttacttttttattttctatttgttgctataatctgttattcctaaatttatttttcaaattagcattactcttttgtcaagagcatgtgcacattcagtgggaaataaaatttattaatatgctgaagtcagtaataagggaagacactcactaaatctatcattattctattccattttcaaaagagcctctgattctgttagcaagagggaagtgacagcatattaagtcactccagtcctaacgctcttttgcttttgtgtgctgaatgacaattgttatgttatattcattttcttattgcctgagaggaaggccrtttgtattcctgttttcctaatgtaaagcctgcgaaccagactgacgacaagaggcaggctaatgagaacagaaagactggtaaatgcc

SEQ ID NO: 833709 - DNA, 560 bp, Homo sapiens
ttatatagaatatttttgttaattttatctgctatagaaagtagtagtgtgttgttttatatagttgctaattacatactccaarctgatcatggcatctttgaattcagtaaatactttccttgaaggggagaccttaagtcaaagaaatttgtgattggttgtgagtggacatataggctgacccgctgcacagaccatcacctggacatgaatgaaacaaaatagaaaagccagtttattgtttttatttccagtattgtttatagctctatttgtaaaataatttagttagaaaagatcctaagaagacatcttaaaagagaaaagaccacttgctgtaaatagtagcaaaatggtaattgtcgattcagcataagaatagggcatttaattccttcttttaccttcatttagaaccaaattgaggtaatgccgggtgattttggcagtgtttatttaccacattgaatcaatagtcctgggtttctgtattgtttttattatttctttcccatttctaaataggaaagcaatatttactgatcatttatttcctg

SEQ ID NO: 833710 - DNA, 506 bp, Homo sapiens
cttgctagaacttctttctctaattcccttttcatttcggttatcttctgctctgaaacaaatggcccgtgctccatgaaatttatgtggaatttacaacaggaaatgacctctgacagacttgttttcgacycctttcttcccatccccaccactcagtctgcatccagtgccatggcctggcacctgcttgcatccatagccccgtggatctcatgatcatgaagaatttacaccaagagatgtctttttctctcaattaacacaatggcattattttgttacgtggttaattattatttcagaataatttcactgttcggatgtgttcagtgtataaactcctggataaaagcttttccactgtattcatagatagtccctgctttaaatcaagccacaaatagggtctcaaatttaaaagataaccaggaatcagcaaaaaggcatgaagctgcactggctttatattgttagtctttcttccagcaatcttttggccttcg

SEQ ID NO: 833711 - DNA, 530 bp, Homo sapiens
catgtacacatatacatgcaggtatataacatgtatgcacatgtatgtttatatacacacatttgcagcattttatttcaaaattgkgaaaaatacagaaagaaccagtaataaaggaaacattcaaaattattgagtgatatttcatcttatttcatcttcagattcttttgaaacttaaatcatattacacttaaataagacatcactgatggggttgtgtttctctgcttccctttccattccaatactcctcctccctttctcctcaaggaagacgtgatcaggaattttgtatgcaattctaatccattcgttttgctttatcacaaatatatgtgtctctaagctagctatctgtttattcatctaattatgatgtgcatttttaaattttccaatacttttgttatttaccaaaatattaattagtgttgtccttctaaagaaggcaaggacctagcatggtttaattttactccaaaaccacctcttcctttgcatatttctacactttttgttccattttt

SEQ ID NO: 833712 - DNA, 597 bp, Homo sapiens
cttctttatgcaaatctgtgtacacactctgctttcctatcttacataacagttagtgatctttctcctgtgttcagttcttgtgttctgaaatttcattttgttgctgtcagagtggaaacattaggcacggacgaagagtgaggaccctggaactggacagcaaggcttgagtattgctttactgtctaccagctgtgattcccaacctctctgtgcctccatttccttatctgtaaaatgggaacataataatatctacctcatgagattgtgttgattattaagtgagttggttttttaaagtgtttagaactggcgtatagttaatactcaatattctgagccggtattattatcctaatgtaatggttctcaaccagtgagagagagaccggattttgacctcaagaggacactaggcaacctctgcagacatttccgactctcacccctggagggggagtgctgtggcactgaataaatagaggtcagggytgcaactcaacagctcacaaaactcaggacagccaccccacaatcaagaattctctggttcaaaatatcaatagtgctcatatttgaataataacaaac

SEQ ID NO: 833713 - DNA, 502 bp, Homo sapiens
caggtgtatttggacataatgtaatacaaatcataggtagtaaaaaaaaaactgtggtgtattaataaattaattyccattttctctgacttgaccagaacttaatctacgtaagggcagggatctttgttagttcatgatggacttccaacatctagggcagtgcctagcacaactcaggtactcaagatatatgtgttgaatgaatggatgtggtcctaatgcttacgcaccatcttaccatcacaaaatgattgctgtgtatgcctgtcagtctatggatgcagacttgaaaatgtctcacaattaggattactggcaagtaaatgttgtatatcacttttctctcccatttctagcatcagactgttctgtttgttttcaaatttaattcaaatgttccttagaaactcacagatgatttcagaagaagaatattattttttgcaagtcaaaaagaagaatattcagctggaatctttaaggtaattttcattaagcg

SEQ ID NO: 833714 - DNA, 489 bp, Homo sapiens
ggaaataggccccctttctttaaaaagaaaaagataaaaagaagaaaaacaaaaaataaacagagctttgacatgcagtaattggacttgtcatatttcawccatgcaattaaaagttaaacccattttctaagattgcattgtttaattacaaaagtaagtacatataattaaaaagttaaatagatatggttagatgcactgtcagcagagcactgaaatatagcaaaagatatttgaagacagtttctgtcatttcaaatgattacgaagcagccttgtcctcacaaatgatgaaaataactgggatattccaattattggttatttttaatatttactctcatgctgcttgagtgtaaacaaaaagaaaatgtcttttttctatttaatctaaaaataggtaccatccacccgtcagaaaaagtatagcagaagatctgaagaaagatacatttttttggagtctggtaatttacctgcaggtaa

SEQ ID NO: 833715 - DNA, 538 bp, Homo sapiens
ggctaagaaaaatgaagctggatcaccaaccggcaattaagggctgcacagcttgcaattgccttgctcaattaagaggccacctcttatgctagtaataatgataccttctcttttacaaaaaagagaaggggggcatgttgggaaaaagccaagtgttgggagcgaaactgaggcagggcttgcataatgtcctctggaatgtgtctaaacttgctggctccttgcttctagccctcctaggctcctaggctcctattcccattatctcaagtagcagaacatgttccatataaatgctaaaccatcacagctgtaaatcatatgcttaatgcaatgtgtccttttgaccgccacattctcaccacctgtttgttggattgccaataaataccgtgggctcccrgagctcggggccttcccagcctccacaatagtgatggccccctggtgtcccacctttctcttttaaactctctttttctcaatcctttgactctgctggacttcgtcgcccccacgacctggtgttgggtct

SEQ ID NO: 833716 - DNA, 538 bp, Homo sapiens
ggctaagaaaaatgaagctggatcaccaaccggcaattaagggctgcacagcttgcaattgccttgctcaattaagaggccacctcttatgctagtaataatgataccttctcttttacaaaaaagagaaggggggcatgttgggaaaaagccaagtgttgggagcgaaactgaggcagggcttgcataatgtcctctggaatgtgtctaaacttgctggctccttgcttctagccctcctaggctcctaggctcctattcccattatctcaagtagcagaacatgttccatataaatgctaaaccatcacagctgtaaatcatatgcttaatgcaatgtgtccttttgaccgccacattctcaccacctgtttgttggattgccaataaataccgtgggctcccagmgctcggggccttcccagcctccacaatagtgatggccccctggtgtcccacctttctcttttaaactctctttttctcaatcctttgactctgctggacttcgtcgcccccacgacctggtgttgggtct

SEQ ID NO: 833717 - DNA, 622 bp, Homo sapiens
ttcttgatcagcgtgattacattagaatgctstacttggatacactgatttgtctttgagagtgctttgtgccacataaatctcatagaaatatctttaacttgctgccccagaaggccactgcttccctcctcagcaaacagaagcaacatcagggagtcatttgtcaaagtttcaaagggaatggttcatttatgaactgacattggatggtcttccgttccaacattcatgggattttaaaacaaagatgcattttatgattaacctccacaagcaaagagttatatttgtctcttttgacttacttcagcaacctgatttaaaaaaatctccttcaaggagaatcatatttattatacctcaaaaattcagtttatatgcatcattgttcagagcaatttctttctccctacattgaatggccaagtgatcatttgttttggagattcattcatgctttagaagacctggccacccatggaaaagaacatttttgagagcatttcccccctgcttctttcttaggacagggaaaataggtcttaaaagaattataagtgaatttagaaaatattgcttaaaagtttctcacttattctgggacatataccttcagttt

SEQ ID NO: 833718 - DNA, 578 bp, Homo sapiens
agatggcacctgaccattggagatttccagcagaacagtccctactgacatgcatcagcccacctgcagcctcccccaaccacagcctacccaatgccaccttgccagtatgcacttgtccatggtcaccccaccaccactttgccagtgcacacgtgtgggtggaccttgcctcttctcctccaatggcttatgtgtgcacatatcccactgctgctgttggcataagcacaacgtgtggccctgcctcccctggtgcttccatttctggtgtgaaagagtgcatggacaccagcagccccacccccactcctgctgacactgccaccagcgtgaatgtgtgcatggccccacaacccccccaacaccatcactggcacaaatgcatgcacagacaccagcaactctgcccctacccctgtgctgccactgtggctgctgcaaaycagcacacagacaaccacggccctgccttcccagtgccaccacaactgccaatgtgaatgcatgcatggatgctggcaactctacccacccctgcactgccactgctgcctgtgcaaactcatgcacaaaga

SEQ ID NO: 833719 - DNA, 599 bp, Homo sapiens
aaagcgtttggaaaatcaggaagggaggaagatatttagcagaacaggaaaccactcagttcctggatactcaatggaaaacttttgaaaaaaatttgcaggacttttaggaggatttttctgaaattcaagtttcggtaatttatagtaccaaacagtgggcaataatgagtgacggcaacagtctcttctaagtagcaggaaatcagtacatgctgcatgtgaaatgagagcagaatggtgggaagctatgggatcttccagctgtggctggacctccacactatgagacatgtccacactgacagtcacaggtggtacccttcctatgctcaaagcagaatagcccatgcatatgctatacccatgtaaaagggtatttctagactatggtctcatatattctaaggaactctttcctatttttcatcaaaggttttgagcagaaatgagaaattggtaggagctagaatgtactcaggagagtaagggatcaaaattatatttgtaatcagaaagaagggaggaaagtgggtgcctataaaagccttcccttmatcttcttcagtttggatcctgtgatgtgcaaagtgaacccc

SEQ ID NO: 833720 - DNA, 507 bp, Homo sapiens
gcataacgtctggcccagcaagtgagctgtaagtcatagccattatcattaccatcatcagtgtcgtcrtcatcatttaaaatcactcaaaggcccactacataaacaatagccatcatgggattttttttcctaccttttttctatattcgtaatttttaaaatttgttttgcatattttaaatataagcttatatcctgactttttttaaccttacagtctatcacatgtcaactatattaatcaatttttttattgtttttgaggcagggtctcactctcttgcccaggctggagtgcaatggcacagtcatagctcactacagccttgaacttctgggctcgagcaaccctcctgcctcagcatcctgagtagctggagccacaggcatacaccaacacacctgtcttattttttatttttatagatacaaaaatttgggtctcaccaggttgcccaggctggtctcaaactcctggcctcaagaaatcctcctggttcagcc

SEQ ID NO: 833721 - DNA, 515 bp, Homo sapiens
gttccattttcagagttcaaatggtcaagaaaacctcataaaaacaaaaactccaattaaatacttgctgggaactactggccagtttttctttcttctgrtttgggtcataccacaaccctcatgcaactagctggagtaacccttgtccgtagtttaaatcactctgagctttccagagtcgcaatcaggtggcttttgggcacaacgctaggcactgcctgtttctggtagttctaaggtggatgttttggcaagtgtgatgatttgcgtccacatttcagctgagactgttgctgcaggggtctttgttcagcatgactttcagctggcatcacaccacactctcaagttacccattcatacatatttaagctctgagctaggttctagggattctaggtcagagttcctgccctcaaagagctcatgaactaggtatttttaaaaaataacttcgtaattgtgcagacatgtaatcactcatgtaatcaccagaaagccaattagaaatc

SEQ ID NO: 833722 - DNA, 550 bp, Homo sapiens
tggtgtcttttttacatggattcatatgtatatctctgaaagtctttgctatgcatgattttttggggaagagaactgttctcaaaattttaaatacttaactcccctgctgtgattttctcctgctgacctcccatgcacccccaaaatggaccacaatatgctaaagacaaataattgcagcacaatttaattatcctgtctaatcacaatataacttatacaaaaattttgggggaagtcaggcatgtttttgagagagggtagagaggagattagagttttcacagatgccataataccatcttagtgtttatattttctttaatttttgtcagtgttttccatgttatggtgaatgatgcagtagaaacagctaagaaactctgaaaggagaaaaaaatcaactacactacaaatttttaaatactttaaattcaratgtgtattgtagctaccacatttataaatatatctattgaatattaatatattgcaccttaaccatcagtacatttgtctgcaaaacataggatgcacctttgtggga

SEQ ID NO: 833723 - DNA, 575 bp, Homo sapiens
tcctaaatttataaccatatgaattcaccttaatatagatgacatactattttatctatgcttttttggcctttcttttcatcacctgcatgtggcaatgcatccacagtgacatatgcagcaataattcatttatgaatatgtcaaaattaattcatccctttgtatgttaatggtcatttgggtcatttctacttttttcctcccacttaaaataatgctgtaaactttcttgtatatgcttcctggtgagtgtatgagtaatttcattactggatagcatgggatctattaattcaactttaccaaataatcctaaattgttcccacaggagtacctgagagcctccactgcccaacatctttagtattatttgtcataatcaatttctaaaatgtatatattagtgagaaacattattgtcaaaccatgtcatgtttttaatttgcatttccttaatwatcaatgtcatttctttgtaagtataattactatgtaacacattaggcaaagaattactgagcatactactgaatcctgagtcaaaaaagtttactgcaattgtatcatgttt

SEQ ID NO: 833724 - DNA, 406 bp, Homo sapiens
ctatatacctatcattaaaaccctgatgtgtagtgaagggttaactcaccaggggtggggtattgagaccatgtgcattccaaagaaaggactggctcctgggagataagatctaacccctcagaatatcctgcttgacaagagtgtctttgtatacctgggggtgtttggccttgccagagagtttatgctaagaatgtgacttaatggtagaagacttgggtcatgtggcattagtttgacctctggagggactggagaggagtagctaagctcagccacacaggtactccatgyttacatgacccacccccaagaaaaaaccttggacaccaagatttgagtgagtgtccctggttggcgtcaaacatcattgctgggagaactgagcaccgtctgcacaact

SEQ ID NO: 833725 - DNA, 629 bp, Homo sapiens
agccgtgggagacccatgcattgcaaggggctaaatcttatgtacttgctttctcctcttgctataaataarcgttgtatcacttgagtctggtgtgcatgttgtctcttcatagtgacctagaaacttgcactgtttccctgatggtacttacctgccttttgaccttggccacactgatgttacactttatcctgcagcacaagcttatcacctaataaaacatgaagcaacaacttaaaaacatccagaaaaaatagacaaacttttttattttatttttatttttttgagacagagtttcgctcttgtcacacaggctggagtacaatggcgggatctcagctcactgcaatctccgcctcccaagttcaagtgattcttctgcctcagtgtcctgagtagctgggattacaagcatgtgtcaccacgcctggctaattttctatttttagtagagacggggacgaggcaggcagatcaactgagtaaagagatcatttctacagcttctacagatattcaaagtatttttaaatagatttaaaatctgtagatgttatagtattctatagatgataaatagatactagaagataaaagcacagcataaacaactttatactatt

SEQ ID NO: 833726 - DNA, 581 bp, Homo sapiens
tacctaggtgatgggttgataggtgcagcaaaccaccatggtmcacatttacctatgtaacaaacttgtacatcctgcacatgtaccccagaacttaaaataaaaataaatactagctgggtgtggtggtgcacatctgtagtacaagctactcaggaggctgaggcaggaggatcacttgagcccgggaagtcaaggctgcagtgagacatgatggtgccactgcattccagcctgaagagcagagtgagaccttgtctcaaaaaaaatagtaaataaataaaaaaaccacgggtggggtgcagaccacagcaaaggccatgcctcaccacttccccctctcctgccccttgcctggctccttggccccttctacagtccgttcagcttctggtctgccatgccccctattcacttgccaaaactttgaggacagagctcctttaccctgttcttctgaagcctctacttatggattctcaagcgctatgttaggaaaaaaaggaaaaatgaaacagtattaaattaacaagtttgcatttctcccctaacagttgaattctcctggaggccatggtaat

SEQ ID NO: 833727 - DNA, 501 bp, Homo sapiens
aaacttttaaaattcttagggctcagtaacatcccatatcaattaaatcagaatccctgagtgtgagatcacagtatcccaacacatttactgcatcagtatttatcagttcctcagatgattccaacatagaataaaattgagaatcactggtttacttgaagggagaaagataatttggaggcttgatatgaagggaaagaaggaaacaagaaggctttaaagtccttattattagtgataggcttctatttggttcttatatattcaaactactatatattcattgtgaattgagatttttagcattataaaagtctttgtcacatttaccaccttttggtctgaattctaccttgtagaattcaggattgccatccctgattccttattatttgtaatctcatgttacatagtttcccatccatttctttttatcttttctgaatcacttactttcagatgtgtctsttgcattcagcatataatagggttttgctt

SEQ ID NO: 833728 - DNA, 568 bp, Homo sapiens
acagagatccttacagaaaggggaaatttggatccagagatagatgcacacaaggaaagcaccatgtgaagatgaagcagagattgaggcratgcttctacaagccaaggaacgccatctattgacagcaaatcagcagaagcgagggcggcagcctaggacagattgtccctcacagccttccaaggcaatcgaccctgtgacacgctaatctgaaacttcctgcctccagcacatttaacccatgcagttaggggcactttgttataggaaccctattaaaccaacacactgcttgacttttgggtttaggtacgtttcagagctgctactttgaagaagagaccacaaagaacagttctattttgctttatttgacaaataatcatgtctcatcagtcatatggaatcccacggaatttgccatttcacttttaacgctgtctgaaatctcattgaatgatatctcaacttggtatttaagaccaaataagcaaaagcaaataaataaaataaataaaaatgatgcttcagttaatcacattggctgccatcatcactgtcacta

SEQ ID NO: 833729 - DNA, 629 bp, Homo sapiens
gcaccatatcaatgggatgaaggatgaaaaccacatggtaatttcaattgctgctgtaaaagcccttgataaaattcaacatccctttatgagaaaaaccttccaaaacyagaggtagaaagaacatacctcaacacaataaaagctatacatgacagacacccagctagcatcatactgagtggggaaaaactgaaagcctttcctgtaagatctggaacaaggcaaagatgcccactttcgctactgttcttcgacatagtattggaactcttagcaagagcagttagacaagagaaataaataaagggtatccaaactggaaaagatttcaaattatccttgtttgctgcagatgatatgatcttatattttgaaaaacgtaaagactctatcaaaagactattataactgataaacaaattcagtaaagttgcagtagacaaaatcaacatacaaaaatcacttgaatttctagatgccaacagtgaacaatctgaaaaagaaatcagtaaactaatcccatttataattgctacaaataaaataaaatacctaggaataacattaaccaaagaagtgaaagatctctgaaatggaagtataaaacattgatgaaaaaaattgaa

SEQ ID NO: 833730 - DNA, 556 bp, Homo sapiens
gtgaagtgggaaatcaggggtctcacagccttcagagctgagagccctgaacagagatttgcccacgtatttattaacagcaagccagtcattagcattgtttctatagatatttgattaactaaaagcatcccttatgggaaatgaagggatgggccgaattaaaggaataggttgggctagttaactgcagcaggagcatgtccttaaggcacagattgctcatgctattgtttgtggcttaagaatgccttatttaagcagttttccaccctgggtgggacagttgttccttgccctcatttccataaacccacaaccttccagcttgggcgttagggccattatgaacatgttacagtgctgcagagattttgtttatggccagtttttggggccagattatggccagattttggggggcctgctcccarcacttggcttattcatctctccttttcctctaatccctgacaaccaccaatccttttactgtcttcatagatttgttttttccagaatgtcatatcattggaataatacagtataaagcctt

SEQ ID NO: 833731 - DNA, 605 bp, Homo sapiens
gtttcctattggcattttatccaccatgcataggatcaactrtatgctgttcttcatgtaaaaagcttaaaaacagaaaacttacaccatgttctacctccattgaagtattgactctccttctagactttgctgcttgtcctttctctaatgacttcaagtagctgattatggatgttttctagaatttgcagtggttattcctgacagtaagtctgatagaagcttacttagcaatactgaaaacagtacttgaaattttacaccttattcttctagagattttctccattgtgagagatatattcacccatccaaacccaaataatggacttagaaacacgaggaacagtaaaaagaagacttttaatggtgttcttgcaatatcgggtgtctggtaggctggcacacctggggcagtcacagcaggtaattcatctcctagcacgcaagtccctccctcagttcctcattggtcgagtactgtgaggttaccatcttcctggacagcacctacgtttcattatccccttataaggtggtaccacagtccccttctctgcttaagttttgatttcccaataacgaaactttcttccctttta

SEQ ID NO: 833732 - DNA, 636 bp, Homo sapiens
gtgcagtggcacaatcgtggctcactgcaacgtctgtctccctggttcaagcaattctcctgcctcagcctccctagtagctgggattacaggcgtgtgccaccgtgcccagataatttttgtatttttagtagagatggggtttcaccatgttgaccaggctggtctcgaactcctgacctcaaatgatcgcctgccttggcctcccaaagtgctgggattacagacgtgagccactgtgcccagccgagaaaaatatttttatataggagctgttccataaatagtaattaaatgaatgaatggataaacagagcataatgtgaaaacagttgcatcaagatcattgagcacagctgtcttatccccttttccaaaactaacatgaaataactacagtaataacttttaaaaaatacatttgcgataaaaatgccatctactaaccagaaatttgaacaacccctaacatgaagtaaacagacagaattcgattgactgagaaacaaactgggagaagatcacagcccacaaaacgctgggggttgcagcagaggtaggagctgtcgtgaggtktgctccaagcaaaggggacagcaaggaaaagaagagcctcaaagtgagcaatcgtcagcc

SEQ ID NO: 833733 - DNA, 584 bp, Homo sapiens
cgccattgcactccagcctgggcgacagagcaagactctgtctcaaccaaaaaaaaaaaaaaaaaatcagaaaattattgtcagttttaatgcaagctacttacattaaatgactaatcatacattttaagagtttgttttaataccattaaaaaagcttgatcttgaactttcttaatgcatttaatgaaattctatgttctataaactatggagcttcatctcacatcaacatctgaagtgataattttgaagtatttcaagccataaaaatcattcagttcactttctcatatatactattacttgaaactatgactcagtgataaaagtggggaaagcacatatattttttatagaatttagatgccagctctcaagttcttttctcaggttatgggtaggttaatggatgccatcattactaccttatggatttgtttttaaatacatccaatttattctccatcttccacttgggtaatayacacacatcatagtttaacattacctcacccactgatagtcttgccactctatttattggtttagaaaatgtaaaacaaatatttcctcaaggggta

SEQ ID NO: 833734 - DNA, 580 bp, Homo sapiens
cttaaaatcttatttgcttatttatttttttggatggctgttttgtataacatctattaccatccctatcaattactaccagaaaacatgatctaatgctgcatcggatctttcccccttgtttctcaatatttttcttacaggtcaaattagatccggaagttccaagctcagactcatttatgtggtgcaccaacacagttctccatgaaaactttatggggatttaaccttgtgttggcttttatcccttttcttaacattctaaaaggcaaatgttgtctggttctttgtttcataggttttgtttgtttgtttttactgtgttcctaatctagagctgttctatctaccaactattctgaaaaaaagaggcagggaacttgtataaaattatgtttaaaattggtattgtctcacaaatgtctttctcttcatgtagaaagtgatagccagaggattatgacctaagctgatagcattccactagtacagataaggraaactgagttttaaagccaataatgcacatctaagtgtacagacaaactccttaatttaaatctaagcttgtttactt

SEQ ID NO: 833735 - DNA, 634 bp, Homo sapiens
taggctgcaggcccaggtgccttcgtaacgttggcatgttccttaagcacatgctctttatcagaagtttgcaccagggaccatgtggcgatcttayctttttatggcaatgtgtggttccaaagcactttaacatacaatatctcactttagcctcataacaacctgagaggtagaaagagtcattgttatcctcatttcatgattgaaaaaacaaacaaacaaacaaaaagaactaaacaaaaccaagacttcaaaaacttgtggagcagcctaagatgagacatctgggaatgggtagagacgggaccacgcatgctgctaggaactgtggatacagccagaaagaaggcagatccagagcttcggttgagagggtagacagccaacgaagaaaacaaaataatcctattaacattaaaagaagtggcacacatatcaagatgaaaaagaaacgcgtccttctttgaatatttccagaaatatttagccttgtttatcgtaacctaaaagcatatcttaaggtagaagactctaaaagctgaataaatccaaaagataaaaagaatagacttcaaggtaacaattagacttccaaaaccagtcccaggatgcttctaagggccagtacctc

SEQ ID NO: 833736 - DNA, 624 bp, Homo sapiens
atgccaagtaggacagaggtcaaccatatctatttagggcatacctacctaggatacctccccaaagtgctttggcaccacataaatccccaagaaaagacctgccctcccaggaaagtgggaggtaakggaggaattcagttggactgtatagagtttaaatgtaaaatgactgtgcttgcttggaatcgacaatgattaaggtttatgtcagctggtaaaatgtggtcttttagttacagaaaataaagttaatctttttttttttttaagtgcccaagaacatggccggagaaaattgaaccttgctacaaaagaaattgaggcataagtatattatttaaagtaattaaagataaacaagcaaagaagtaaaaatgataatacatcaaatattagaaggaggaaaaggtgggagaagagaggatggttgtataagttaattaaatcctcatctttcatttctgggagacaataggctaaatataaatttgatacattcagaaatctcatatgcacgttatttagtattttgaaagtagcaagtataagaattaaagaactgaaacagttaagatgttgtttcttgggagaggaactggggggaaggtaggagactatttc

SEQ ID NO: 833737 - DNA, 617 bp, Homo sapiens
gatcagcgtgattacattagaatgctstacttggatacactgatttgtctttgagagtgctttgtgccacataaatctcatagaaatatctttaacttgctgccccagaaggccactgcttccctcctcagcaaacagaagcaacatcagggagtcatttgtcaaagtttcaaagggaatggttcatttatgaactgacattggatggtcttccgttccaacattcatgggattttaaaacaaagatgcattttatgattaacctccacaagcaaagagttatatttgtctcttttgacttacttcagcaacctgatttaaaaaaatctccttcaaggagaatcatatttattatacctcaaaaattcagtttatatgcatcattgttcagagcaatttctttctccctacattgaatggccaagtgatcatttgttttggagattcattcatgctttagaagacctggccacccatggaaaagaacatttttgagagcatttcccccctgcttctttcttaggacagggaaaataggtcttaaaagaattataagtgaatttagaaaatattgcttaaaagtttctcacttattctgggacatataccttcagttt

SEQ ID NO: 833738 - DNA, 637 bp, Homo sapiens
taataagcataataaccaaaaaataactcaatcaacatcaaacarctattatttacaatggtgattaaatgatgtttggtgccatctttttactaaatcacatatataggtaccttgaaaaatccttttaaactgatttatataaaattaatcttcttataggaaatcaaacctgtgagctttcccagcagcagctatgccatggtatcacatctgaaagtagcagtgaagtgtattattctcctgtcgtaagattgtattatgagagagaaaaaaaaaaaggtattttctcaaccaaaatttctcattaatatgggtcatcaactgctacaatttctccatgttcttcccatttattacctatcttaagccagaatcagtacccaaatgagagcctcttttttgagtagcaggattggaactgctgtttcttgctatattttctatcctcaatatggagacaaaggaagacaaggctgcttctgtgactaaaaatcactacttaccatgatttagccaataagatgggattactctctgactcattttactttagaaaattcacaaagttcataggcactgagaaagtactctgcacaccagtgcttattctgccaagcacaaaatgagcagtcct

SEQ ID NO: 833739 - DNA, 355 bp, Homo sapiens
acgttgttgaatcactaatatatattcttaaagaaggtgatttaaaatacctagtgtgtgattttttaaaattyatgcacttctttctttctttactttcttttttcttctttttctcctttctctttttctctcatatatatatatatatagaattacatatatattacatacatatatattgttacatacacatatatgtaattcttcccataaaattgtgagcaagttcaaaaacattattttgaagattaaaatttggttgcttacaaattagtattttatttttaaattttctgctgaacttaacaaaaattgtttaaaagccaatgttttctaagaagaataattgtag

SEQ ID NO: 833740 - DNA, 614 bp, Homo sapiens
  misc_feature 269, 270, 271, 272, 273, 274, 275, 276, 277, 278, 279, 280,281, 282, 283, 284, 285, 286, 287, 288, 289, 290, 291, 292,293, 294, 295, 296, 297, 298, 299, 300, 301, 302, 303, 304,305, 306, 307, 308, 309, 310, 311, 312, 313, 314, 315: n = A,T,C or G
  misc_feature 316, 317, 318, 319, 320, 321, 322, 323, 324, 325, 326, 327,328, 329, 330, 331, 332, 333, 334, 335, 336, 337, 338, 339,340, 341, 342, 343, 344, 345, 346, 347, 348, 349, 350, 351,352, 353, 354, 355, 356, 357, 358, 359, 360, 361, 362: n = A,T,C or G
  misc_feature 363, 364, 365, 366, 367, 368: n = A,T,C or G
ggaacatcacacaccgggactgtcgtagggtcgggggaggcgggagggatagcattaggagatatacctaatgtaaatgatgagttaatgggtgcatcacamcaacatggcacatgtatacatatgtaacaaacctgcatgttgtgcatacgtaccctagaacttaacagtataatttaaaaaaaggaaaaagaaaacctgtctttaactgccagccacatttcatgtttctttcctctttctttaactcttaaactgactatgttcannnnnnnnnnnnnnnnnnnnnnnnnnnnnnnnnnnnnnnnnnnnnnnnnnnnnnnnnnnnnnnnnnnnnnnnnnnnnnnnnnnnnnnnnnnnnnnnnnnntatggaaagggatatgaaagatagtgggaagtagggagaacatcaaagattcaaatgttcataggtctgtaggtctttgtcagatatttatgacatgttctcaggacactgaacaagagccagtgtttgagttcttagaataaagcaaatccaaaaacattagttttcagagcttgaatagaccttagagatcaccaaaccaaactccttattttatgaactagaaaactgcagtgctaagaaaaa

SEQ ID NO: 833741 - DNA, 632 bp, Homo sapiens
acttgattccatgttgctgagcaagtgccctaccagcacacgtgtagaatgctggaagcttattttctagaaatgattaaaaaaataaataaataaataaataaaagaggatactttcatttcctgtggttgtagtaaaagaagtcaccacaaatgggggtttcaaacttcaaaaatgtattctctctcagttctagaggtcagaactctaaaatcagtttcactgaatcaaatgcaaggtgttggcaggacctcatttcctccatgagagagtccctccctgacttcttctagctttctcaaatggctgtggctctccaaactctgcctgtatagtcacaccgtctcctttcctgtgcatgtcaaatctccctctgcctctctttcacaagggtacaagagatctcacccaaataatgcaatacagtcctaccatgtcaagattcttagttagatctgcaaagacccttatttcttataaggtaatattttcaggttccagggattaggacttgatgtgttttggtggccattaaaaatagtgcccttgctctaatacaaagaatatgtaatttgcraatgccaggcaccgttgagggcataggtaccataaatgactatatgaaaagaaa

SEQ ID NO: 833742 - DNA, 706 bp, Homo sapiens
ataatgaattcagcaaagtttcaggatacaaaatcaaggtacacaaatcagtaggtctgctacaccaacagcgacaagatgagaatcaaatcaagaactcaacccctttcacaacagctgcaaaaaatatatatatatttaggaatatacctaaccaaggaggtgaaagaccactacaaggaaaactacaaaatactgctgaaagaaatcatagatgacataaacaaatggaaacatatcccatgatcatggatgggtagaatcaatattgtgaaaatgaccatactgccaaaatcaatctagaaattcagcgcaattcccatcaaaataccaccatcattcttcacagaactaggaaaaacaattctagaagtcatatggaaccaaaaaagagcccatatatccaaagcaagactaagcaaaaagaacaaatctgtaggcatcacattacctgacttcaggcaatactataagaccatagtcaccaaaatagcatggtactggtataaaaataggcacacagaccaacggaaaagaatagaaaacccagaaataaacccaaatacttagcgccaactgatcttcaacaaagcaaacaaaaacttaaagtggggaaaggacaacctattcaacaaatggtgttgggataatyggcaagccacatgtagaagattgaaactggatcctcatctctcaccttatacaa

SEQ ID NO: 833743 - DNA, 504 bp, Homo sapiens
agagggccaccaccatccttcagcccccagaatggtagatccatcaacagcttgcacagtgcacctggaaaaaccacagatattcaatggccagactctgaaagcagctgggaggaaggctgcaccttgcaaagccacaggggtggagctgcctaagaccatgggaactcaccttttgcatcagtgtgacttggatgtgagacctggagtcaaaggagatcattttggagctttaaaatttgcctgcccagctagattttggacttgcatgggccctgtaacccctttgttacagtgcacctgtattttggccaatttctcccatttaaaatggcgtatttacccaatatctgtacccccattgtatctaggargtaactagcttgcttttgattttacaggctcataggtggaatggacttgccttttctcagatgagactttggactgtggacttttggtttaatgctgaaatgaattaagactttgggggactgttggaaa

SEQ ID NO: 833744 - DNA, 561 bp, Homo sapiens
tgcatttatcgtatatttatattttgtcaagttttgcatttcaatctgggatcctccgacttactaagtggttatattttcctaatttgggtgcattaagattaactctatayactatatagttctatgggttttgacaataagaatagtgtcatatactccctaatacaatatcacacagaataatttcaccaccttaaaatatccttgcttcatttacttaacaatctttccctccctcaattcctcggcaactagtgatcatctaaccatctctttagttttttatttttcagaatatcatgtaattggtatgatacaatatgtagccttttaaatggctctttcacttagtaatatgcctttaagattccttcatgtctttttatggcttactagctcattctcttcaaatattgttgaataatattctgctatatgaatatatcacagtttgtttatccatttacccattgaaaggcatcttggttgtttctagctttaagtgactatgtaaaacagctacaaatatctgtttttggttttgtataagtcatataa

SEQ ID NO: 833745 - DNA, 418 bp, Homo sapiens
aatgtagtaagagaattatatttaaagctaaaaaggactttgcaattagatgagataaaaaagaaacaagtacatttaccttatagaaaatagcagtgttgccaaataccaatggattatacaaactcaattaaaatgaattattattaatagtttttcatgttaactgacaatatggatacatttagatatgattaaaataattatgtttctagaagctagtctaaaatctcatttatctattcaatgccttctatgtctgtagtggaataaagattcactttactttccaattaatagcraagataaaagagataaactttagagatagggcagatgtaagtaataaaaaaatcaaacaaatcatagccacatgtggattagcttatgtacctgaaaagaaaaatgtgtgctatga

SEQ ID NO: 833746 - DNA, 619 bp, Homo sapiens
aaacataaaaagaaataatttatgattctgaaggattaaaagataaaagattaagtatgatcaacaatctaaatagtctatatacaacttgactacagtgatttaagtattcagacaaatactattatcaggaaatgatctcaggtttaggcaaataggtatatcttaacttacgggaattaggaaacccagtagctgttctcttgagggtaaccagaaaggctgttccacatttacctgtacttaccttacaaggctaaacccttgaattttctagaagttcctagaatatggttctctataaacaaagaatgtcaataacattatagtatcaaatatctttggaagtttatttttagcatgctgtgcatttatattccaggagaggactctaaggagcatctatagaggtgctaactgtgtggcctatataggctactgtgtggcctaacatttattgaaacctcagttacagaacaagaaggcatagacacattttcccctaattgtaactgctatgtacaactaaaaaccccagaagtaggggagaaggaaacaaaagggtggtaggcagaatgcaaactgatttgggatccragcactgcagaaaatggtcatc

SEQ ID NO: 833747 - DNA, 669 bp, Homo sapiens
atagttttatgttgcctcaggatccattttgaatataggtttaattttctcatgccaaaagcaggacttagtcacccttgacagtttccaggtctctgccttctcccagttcctcaatattgacaatccagatatctaccttatacaaccacatcctggtgatcagtttcctatgagacagctagatcaaacttacttgatttgtctcactcacttccatatcctgtgtggactgtgcagatgtgcctcagggatcacctctcagtcacagtgtgtctccaaggatctcatacctactcgttcaaaacccaattaaaattccctgaggaaagcctgcttgggtaatgcttggaaccccaacaaaggcttcatccaacagacccctctctctttaactttctccccacctgcctgttgagagtgcatgtcccagaaagcagccccccttcctgctggacctgcaaggtatgccacccaacttctctctgggaactgtcagtaataaaactgcttctgttattttatgtgttttgttgtcttgcttcctctgtgttttatccgaccaacacacctgaacctaacttctttccaagttagggctctgttagasagtgactatatgggtagaaataaactggacacaggtcaggcaaaagccacgaaagggtc

SEQ ID NO: 833748 - DNA, 601 bp, Homo sapiens
gttttttgtttgtctgtttgttttctttttagaggacaaaataggatcctggcttgtaaggtttctgctatgaagtgcastgttaatctgataagatttcatttataagttattagatgcttctcttttgctgcttttagagctttttccttcatattgactttagatagtctgatgactatattccttgatgaggttcatcttgcaaagtatctcccaggtgttccttgagcttcttgtatctgaatatgtaactctgtagcaagaccagggaagtacttcagaaatagtccctcaaataggttttctaagcttgttactttttttttttttctccctcaggaatacctataactagtaggtttggtcactttacataattccatatttcttcgaagctgtgttcatttcttagaattcttttttagttatttctgactgggttaattcaaaaggcctatctaagctctgacactcttctgtttggtctggtctgcctattgttaaagcttttgactatattttgtaattccttcaataaatttttcatgtctagttctgttttttttttaatctatctctttagtaaatttttcattca

SEQ ID NO: 833749 - DNA, 588 bp, Homo sapiens
aaggttgcagaatacaaagttaatatgcagaagtcaattccttttctataaaccagcaattaacaattggaattggaaatataaaacacagtatcatttacattagctgctcyccaaaactgaaatatacaggtataaatataacaaaatatatacaggatctatatgagaaactctaccaaactttgacaaaggaaagcaaatatctaaacaaatggagagatatttcatgttcatgtatagaaacactcaatatttttaagacctcaattcttcccaatatggtttataaagccaatgtaattccaacaaaaataccagcaaattgtttcatgggtatcaacaaattcattctgaagtctatatgaaaacgcagaaaacccaaaataatcaacaaaatactaaagaagaacaaagttggaagacagataatacaagatttcaagacttactataaagctacaataatcaagaccacaaggtactgttgaaagaatagacaaatagatcaatggaacagaatacagtatccatataaatatatccacacaaatgtagtcaactgatctttcagtaaagaagcaaaga

SEQ ID NO: 833750 - DNA, 556 bp, Homo sapiens
ggctcaactgtggacatagggaaagggtgaatagggaataaagaggcaccagaagcctgtatgcctatttcacrgaaagggcaagacttggaaatttggagaatttcattaagatagagacattctttcacagcaagcctcatgttttgcatgtggacatgatgggtaaagaggtggagttcttcacccagggttcaaggccggccagctcatggctaatgtagcaggactttcagcaagaccctgatgctgtcggagtacacggggctctctgctcaccccctgattctgtgtaatgatctcagcttcttcctgccctcactctctgcccaccaagctgtccaacagaaggaggcttttatagacagatgataactagaggagaatctggagatttcacgtgggcttcctggccagccatgtctcccatacaaaccagcaggaccccagaaccagggtccccaccaagtcctgaaactcttcagtgggtatttttaagaggaatcccagttcagctctgaagtcagtgaaaccattctgaaggctctgcttgcta

SEQ ID NO: 833751 - DNA, 590 bp, Homo sapiens
atttttttccgcattggttttgggacaagacagaggatgagcagagatgtattaataattgctgagagtcaaaacaaaaacaaaagctaaaacagaggtgagacagtaaagccttcccatcccaggcctcaaataaccaggggtgacaaggtgccagcagcccagcctgtgtgacctgtggtcttcccctggcttggatcatggaggagccccaggcagagccctgaagctgttcctggagagctggagtcctggagtggggcacttcagtgtgtgccacagtgtacttgggaaaatccccaaatggtgacccaccacttcagtccttccatgtctctccctcccccagggaccttggcagaaattggcagacaagttacttgtaaagagttgcctggcagttttcctgattgatatggtttggctgtgtccccacccaaatctcaacttgaattgtatctcccagaattcctgcatgctgtgggagggacccagggggaagtaactgaatcacgggggctggtctttcccatgctattctcgtgatagtgaataagtctcaygagatctgatgggtttatccggggttt

SEQ ID NO: 833752 - DNA, 456 bp, Homo sapiens
ctcccatgccacataaaacatttattatgcttttctcctgttgatctttcttatgttagtttatttctcagacacagctggagcctgtgaggataaaggatggaagtaraagttttccttccttacagtttctggcaatgaggatgggaccctaagaggctggacaccccactcactccagcctatggatgagatgctgagaggcctgacaaaagcctgcaaaaggtggggggattctttccaaagccagctttcccaaatatctatggatagtgcctagctaagagaagaaggtaaaaattttttcttgtcccttcttttctaaatttgaattggcaggagaaaaacatttgtaaggttgttctctgaattgtgactcttgtgaatttggttctaggttctaacagaaatcgctctttttttttgttttttaatctctgtcttctgtgtgattta

SEQ ID NO: 833753 - DNA, 456 bp, Homo sapiens
ctcccatgccacataaaacatttattatgcttttctcctgttgatctttcttatgttagtttatttctcagacacagctggagcctgtgaggataaaggatggaagtagaagttttccttccttacagtttctggcaatgaggatgggaccctaagaggctggacaccccactcactccagcctatggatgagatgctgagaggcctgacaaaagcctgcaaaaggtggggggattctttccaaagccagctttcccaaatatctatggatagtgcctagctaagagaagaaggtaaaaattttttcttgtcccttcttttctaaatttgaattggcaggaraaaaacatttgtaaggttgttctctgaattgtgactcttgtgaatttggttctaggttctaacagaaatcgctctttttttttgttttttaatctctgtcttctgtgtgattta

SEQ ID NO: 833754 - DNA, 620 bp, Homo sapiens
ccactcctgtttaggaaaccctagggccagaccccactgctggaacgggaccctctcgtgcctgcaggtggcaaagctcctgagggcctgatggaccctccaatgtcccacggccacaggtcccaccttggmaccgaagccctgggatggcccctctgcaacgcccagtgctccatcatgacctggacccaggtcgctgactgagggagtggaggggatcaggaccagggagaagcaaccccccagtaaatccgaagcacaggaatggcacagccccaagggagaccgggtaggcccctggccagcagggctgaggggaaagtctccactgcaaggcgcctgctgggcccacgcagtgtgctcctggcctcaaactgcccactgggcattcagcctggacagctctcagctcgagaccctcgctggtgaatgggacagcaacatcaaagaccacagcgacccgaagccccagaagcaaaagccaccctcacagcggaaggagtggacagagcccctgtggagctcacccagccctcctgtcccaccaaggggccttctaggacctgggagccctgccctcctgccgaggaggtgcttccccattaaacagggccaaggaa

SEQ ID NO: 833755 - DNA, 464 bp, Homo sapiens
ctctccgggcagcccaaaccctcctggtccgaaaacgtctggaatcttccaacaggcattcttcgcttcctgcactttccgggggctggcaggggaccaggcaccatttctcctgacaaatccaacttctgagaagaggccgagtcctcggtatccatggagtctgagatatagagaggatggggcgcacgtcaggccaaattctctgggtgcagtgttcagcactgtaacttttaaaaggcatgtgtgtgcccatgtatatacacacatggacacacacgcacacttacatatgtacacgcacacctatccacgtgcatacatacatccatacacctgcacaaagrcacatgcagagggagggtgccgagggaagaaaggggcatactggggcacacgtgctaacacgcaaactctgggggagtctggatgaagcagacacggaccgcccagcttcgcgtgtt

SEQ ID NO: 833756 - DNA, 464 bp, Homo sapiens
ctctccgggcagcccaaaccctcctggtccgaaaacgtctggaatcttccaacaggcattcttcgcttcctgcactttccgggggctggcaggggaccaggcaccatttctcctgacaaatccaacttctgagaagaggccgagtcctcggtatccatggagtctgagatatagagaggatggggcgcacgtcaggccaaattctctgggtgcagtgttcagcactgtaacttttaaaaggcatgtgtgtgcccatgtatatacacacatggacacacacgcacacttacatatgtacacgcacacctatccacgtgcatacatacatccatacacctgcacaaaggcacaygcagagggagggtgccgagggaagaaaggggcatactggggcacacgtgctaacacgcaaactctgggggagtctggatgaagcagacacggaccgcccagcttcgcgtgtt

SEQ ID NO: 833757 - DNA, 607 bp, Homo sapiens
ctgtctgctcaggctctccttgggcacggaggacccatgagttctctccgggcagcccaaaccctcctggtccgaaaacgtctggaatcttccaacaggcattcttcgcttcctgcactttccgggggctggcaggggaccaggcaccatttctcctgacaaatccaacttctgagaagaggccgagtcctcggtatccatggagtctgagatatagagaggatggggcgcacgtcaggccaaattctctgggtgcagtgttcagcactgtaacttttaaaaggcatgtgtgtgcccatgtatatacacacatggacacacacgcacacttacatatgtacacgcacacctatccacgtgcatacatacatccatacacctgcacaaaggcacatgcagagggagggtgccgagggaagaaaggggcatactggggcacacgtgctaacacgcaaactctgggggagtctggatgaagcagacacggaccgcccagcttcgcgtgttcaccccgtgatgaccgacgtgcagtacgcttcaacaacgygttccaaacaacgtctaagcacacgcccatctctgaagacaggtgaagtgacagactctg

SEQ ID NO: 833758 - DNA, 513 bp, Homo sapiens
ggagagccttgctgcttgtcaggttaccaggagcggccactgctctgtagcccagggcaccgttgactcagggatgccctcaagtcccaattagaagaaaaacactgcctgagagaaaacgcaggataaatatgactggccttactttaattaagtttgattgaaagttattctgcacccagggaagccagagccaattttcacaatgtggcttgcagaccaaaggcaagtcttctaagactatgggagaacacaggcccttacatttggcctggagtgagctgaaccataccttgaggcagtgcacacagaaaggaaaggctctgtggttcctaaaggctcagactcttaactacagcgcactgtcctcttgtcaaatccttggtggctcaattctccttccttacttggataatcttcctggaaataggtttagttcaccaggggagcattccggggtgwgtggctcagacctgggtccaagtcttctcaggctttcccgaacccatcccc

SEQ ID NO: 833759 - DNA, 659 bp, Homo sapiens
tacactgaagggaaaaacctgaggaagcccctgaccttcttgaataacctggatattgcagaatcatgcctggcacacggcactggcagagacgcagaagggaaagtgtccagcgatgagaggtaaggtgagacagagacctgcccagacctctggacgtggcatgggggcacatcttgcagtcaagagaatttttacattgtggcaactaaggagcgttgtttaaaaattctttgctaccccaacgaaacttgtcaatgggaaggatttgagacttcaaaaaaaaaaaaaaaatctagcagttggaattttagtggaggtggcattcctgagattccactctagggctggtacctgtctgtgctctgggaggttcctggggccttctctgctggggattgctgtgctctcaaaagccagtttcccctgcctattgaagttaaaagcacacttcccttgctcaatggttccctcaatatattctatcttttttatttttttgcccattggaatatctttcatgagagctcagcagctacagacaactgcctttctataaaactgagcgaggttattcagtacaaatggaatgaaygtgattttttctttctgatcaaagcaaaactcttttgaagtttagctatttgatagaaagtggc

SEQ ID NO: 833760 - DNA, 582 bp, Homo sapiens
gttttagtttatacatttttgtgttaaaatcttaattcttttgtaacacttagcttaaagcacaaacacattgtacagctgtacaaaattttttttttcattatattcttggtctgtaacctttaagctttattctctctttttttttttttttttttgagatggggtctcactctgtcgcccaggctggagtgcaatggtgcaatcttggcccactgcaacctctgcctcccaggttcaagtgattcttccccctcagcctcccgagtagctgggattacaggcacccgccaccatgcccagctaatttttgtatttttaatagagatggggtttcatcatgttggtcaggctggtctcgaactcctgatctcaggtgattcaccttccttggcctcccaaagtgttgggattacaggcacgagccaccgcacccagcctctatattaatttttaatttgtatttatttatttatttattaaacttccttgttaaaaactaagacacacaccttagtctgggcctacacagggtcagtagaaccccatcactgwcttccacttccactcttgtcccactag

SEQ ID NO: 833761 - DNA, 568 bp, Homo sapiens
gcttgtcttttcttctttctcccctttttcaaccaaaacaaagtcattaaagtaaaatattgcattaattataaaaataagagatgtgtgcatggagggccaggagagctgcaagcatcaggagctcagtgaactgcttgtgcaccttcctgggtctcttgtccacctgggaaggggcagaggcctgatgttttccaagaccaagacacacggcagagcagtgtggagtcggaggaagagaagatgctaattatgaatccaggctgccgtggagccgggctggcggcgggcaggtgcaggagcggtgcggtgacatctgatctccccgcacagccaccgtgctgcagagccctacgatggggaacatacgggattcaccaattaaaccaactcttgtttcctcctttaaaacatgctgccgcattaggcgaaataaagtaggttatgtcttccytcctcctatgtgcttttgtcagccaggccatcttgcctctgtggccctggctgctgctctctgtacctgggtccctccagctcgagacgtgtggacagatgggtgagaagagag

SEQ ID NO: 833762 - DNA, 580 bp, Homo sapiens
ccttggactttctagcccctagaactgtgagaaaaaaaaaatctgttgtttaaacacccagctaaactgttgttttaccacccagtgtgataatttttttttttctgacacaaagtcttgctctgtcactccagcctggagtgacactccagcctgagtgacaggctggattgcagtggggcgatctcagctcactgcaacctccacctcctggattcaagcgattctcctgcctcagcctcctgagtagctggaactacaggcgcccaccacacccagctaattttttgtatttttagtacagacagggtttcatcatgttagccaggatggtctggatctcctgacctcttgatcagcctgcctcgacctcccaaagtgctggggttacaggcgtgagccacctctcccagcccgggtgtgatgagttgatatcacagcctgagcagactaagtcagtcttgtagaaggtatgatggagatagtwgctgtgctagacacacctaggtatgcttcagcatagattcagccttacctaccaataaagtcacctgtacttcaggagctggcagaatttgtc

SEQ ID NO: 833763 - DNA, 639 bp, Homo sapiens
gagaaaaaagtgtaaatataatatataacatatatataaatgtacaaatttggcatttgtgatgtttttacatgctctttttttgtctcttttctccaaatgtacattccattttgagaagagacttaggaaagtagccagacatgagtaagtttggccgcacccaaagagagagctgatgaattcccttccaaatatacagttctataatatgtaaactgtaattgtttctcagactgttaaaaaattccatcaacttctctgatacattaagtagatttgtacattattttttcttttttaatgaaatagcaactgtcctctatcaaaatcaagagaccctaaataaaatcctgtccaaagtaacaaaagaaaggtatagcaatcatagtgttttcaattcttaagatctaaattaaacattaaacccccagaaaataaatgccgtctgtgttgaaaaactcagaacaaataacttctccaatcgtgttggaatatagtatgtacttcagatatgaaatgatttcacagatcctaattttaaygatcatgtcatttttatgaatggggaaatctaaggtgtagtgaggggagatatttaaaaatatctaaggaaccaagagttgaacagaccagaac

SEQ ID NO: 833764 - DNA, 582 bp, Homo sapiens
ctttgcatttcatggatgtttaaaactaaaattttagccctacatgttaaactcaatgcttctttagatacttttcgatcatcattcatataaacaattgaaagtgtcarggtaagttacagacatgtactttggctactgcaggggtgtcattctaaactcctactgcttgagctgcccagtatatattgcctttataatcaggttttaaaaatatttgattatctccttcctctaaaaaaaaatcagttgctgaggaaacatctagccagaacattgtttagaggtaaaattgtgtgttaagaacttccacatgaggcatttgtaaataataacataatgtaaataataacatgattttcacagcttatacaggaatctgtttactagatttctccaagtcagtggcattcttggattttaagaatctaaaagaaatttaagaaaaaccgaagacagaacctggagaagtaaatgaaagggtaacagcaaaaattcagaagtgctggtaattgtgtttgtttgtttcttttaggcagttacacaagcaagaaattgcagggcggagcttgaccttccaac

SEQ ID NO: 833765 - DNA, 573 bp, Homo sapiens
tgtaggtacaattattgtgccctytaaccactatagatgcacaataaactcagagtaataaattaacattcaagacaaatcattaaattcatgttcacaattccccccataaagaaagactgtaagcatctctttaaaggtatgtgacagtaaggttattttggcttaagaccaattttcagtgcacagatcaagaatgttacttattcttttatttgtttgtgttttaattgtggtgaaatatacatagaattaatcatgttagccattttcactgttcagttcaatagtgttaagtatatttgcactgttgtacaatgagtctccagaaccttttcatcttgcaaaactaaaattttctatccattaaacaactccttgtttctcccttccccagcccttggcagccaccttctaccttctatttttatgacttcacatactctagatatctcatagaagtgaagtcatacagtatttgtccttctgtgactggcttgtttcacttagcataatgtccttgaagttcatccatgtagtaacttcctttttaaggctgaatagtattctact

SEQ ID NO: 833766 - DNA, 458 bp, Homo sapiens
caggacatggaccaattgtgttccatggtgaactcttccggacccccttcatcctggtgattgtagacctctgtttatcggtcctgggatttctaacacagcctgtcctcaagccatttatcccaggttgtcatagaaacatgtatgcatttcaggccatgaggccttcgtttgggttcagaaaacatgaattttgcatgaatatggccaacatgcttcttcagcttcaagaaggctatttggaagaggagtgctccaggagtagttctcaggcaggagtgctagagtcccagataagcgtcacactccggtttaagttaatcrtgaaatcgaatgcctgggtcttcctgggtctggtgaaggccaagcaaatcatgctaacgtacaataaatcatatacttgacagcaaaaattgtaaaacatcaatcataatttaaaaagtacaattcataaatgc

SEQ ID NO: 833767 - DNA, 472 bp, Homo sapiens
tttgactatatttcaatataaataaracatggcatatctctcttcttgacttaagatctcctttctgaagtatggaagtcttgaaattctatcatatttactcacccaaaaaacactgagcaggccccgttctacggcaggcacagtgctagtcctgagggtatatcctggtcctctgagacttttctcttttcttctccacgacttccattctctctgtgtcctccagaggctggggcgtattgtgggtctgatctgctggaagaggggctaattatattaggatgacaagtcatgcccttcaagacgagcattgaagttgaagttatggtaaatggtcaaaataaacttgcaatcagaggttgagaactttctctcatggagattggccaaaagcagtggttctcaaagtgtgattcttggaccagccacattgacatcactggtgagtttgtgagcaaagcaagttccg

SEQ ID NO: 833768 - DNA, 599 bp, Homo sapiens
taacacttaatatttgagtttaaaccaaagtagccacagaacctttcaaaagcttttctgttggcctcattaatrttttctaaagcaggttctatttaattaatcatgtatagctaattcttcttttagaattagtcgaggtagacttaaaaccccagcccaacattcttctgagtgacatcaaagagtctctcactcattttgtatggagacagatcttatcaagatgaacaaaacacatttcttggaactagtccagtatttctgcagttgtataagaacagccttcatgttttgaaaattccaatgcatgaaacaagcacagcaatcatatatgcggcacactccttcacaacaacatggaaatcacgacggggaaacaaccacttttcatgcaaggcagaaggaaatgggttgaggaagcagaaattgggtgtggacaagaatcagtagaaatataagggaaggtggaatctctgtcctgtaatcccaagtgtctgatctcacagtctgtatcagtctgttctcatggtgctataaaagaccgcccaagactgggtaatttataagggaaaaggtctaattgactcacagttccg

SEQ ID NO: 833769 - DNA, 452 bp, Homo sapiens
tacaatatgtatcaactccatgataccttgctgttatttctgctttaagcatttacattttaaataaatctaacaaagaaatgttttatatttacctgcataggcaccatctctagtgctgtccggtcctgtatgtagattggggtttccatttaagaccatcttccttccatctaaagaatttcctttaacatttctcatagcgtagacttgctggcagtgattcagcttgggctttacacaaaagtattttgccttcttggggggctattgtggtaagctatacatagcattgcttttaccaccttagccatttttcagtgcacagttcagtggcattaggtacaatcacatgttgtgcaaccatcaccatcatccattggaacttyctcctcctccaaagctgaaattttgtccccattaaatactaagtccccatcctccctcactgc

SEQ ID NO: 833770 - DNA, 580 bp, Homo sapiens
ctgatcgccttctccagctacaacaagttcaccaacaactgctacaggtgagcccctagcagggccaggcaggggcctcatcaatactagggagaggtcgctgacttccagaaatagkgtgtccctggatgagaacagggcggatccactgaacccgcaaacctgtgagctgcgtggcctttcagacagaagcgacagcgaggcagctcccaacacgattttgatttcaactttaaagaaggcactgaagccagtgggtgtgtcgcctcctgggagggacctgcctaggtttgacctgcggccagattccccactgagggccccaagtggcaaggccagcccctccctccacaaggacacaccctcttccctcacaccagccccggggggtctctgtcctccctcgctcagggtccagcttcacaaccccctgagtgtgtccccccatcccatatgcaccccgtgttacttactggcaggcacctgaagccccgtgccggaccccaaatccttctaaaaacagaaacagaattttatccgggatctgcttgctttgacctttatggacttgtgcttactt

SEQ ID NO: 833771 - DNA, 576 bp, Homo sapiens
caccgtcctcaaaaaggaagctccactcrgggatagtttcattttaaagtcttcagagttttctcttctaagaagtatgtttccacgttcaatcctcttgcataaagacaggtgccgtggccacgttgccttggctgagcaccagccttcatggcggggtgtcccttgtaccccaaccccgcaacttccaggaggctgtggggtgccatggttaaactggggctgtgctacaaagcaccacaaagctggtggcttagaacaacaggagcatattctcccgccgtctaaaagcagaagtgccagaacaaagtgctggccgcattgggctcttctgaaagctccctcggccctcccggctcgtggtgggggctgtggccacatcctcctatggcctccttcatcattggccttctctccccctcttcgtctcctcttcccatagggaccctcatctgggattttagcttgagcatctgctttgtctcctcttcccatagggaccctcatccgggaccttgagcatctgctaccacctgtttcgaaatgaggtcccattcccggtaccaggagtgagga

SEQ ID NO: 833772 - DNA, 514 bp, Homo sapiens
gttccattttcagagttcaaatggtcaagaaaacctcataaaaacaaaaactccaattaaatacttgctgggaactactggccagtttttctttcttctgrtttgggtcataccacaaccctcatgcaactagctggagtaacccttgtccgtagtttaaatcactctgagctttccagagtcgcaatcaggtggcttttgggcacaacgctaggcactgcctgtttctggtagttctaaggtggatgttttggcaagtgtgatgatttgcgtccacatttcagctgagactgttgctgcaggggtctttgttcagcatgactttcagctggcatcacaccacactctcaagttacccattcatacatatttaagctctgagctaggttctagggattctaggtcagagttcctgccctcaaagagctcatgaactaggtatttttaaaaaataacttcgtaattgtgcagacatgtaatcactcatgtaatcaccagaaagccaattagaaat

SEQ ID NO: 833773 - DNA, 580 bp, Homo sapiens
tatttcctgaagtactatttatttgaaagctttgcttctctgacgccatgatcacactaaacctaaacaagagtctgacagattctgacaaggccttcggacagaagcaacataaaagaaacacattcttttacccagaaatccaattcaagttcactaagattagaacagtttcaaaatgcaaggatagatgactattattaacatgagtattcttaaaattcaatgacatatataactgatggtcagattcaatgtacctgaagggcacagatctctactgctatgtatgtatgatcgaaatgtttcgagttgtgctttaaaaaacatcagaaattaatgataagcatttcctgctgtacaatcccatatactgcaatgaaaaatcaaagccaataagaagtcattattactttaatttggcttctaggtaccttcttattcaaggcacaattgcatttcacagtgaagaacacaaagcctytccaacatattcacacacatttagagcagaatttgatttcaacactctaatcaataaatatttagcaaaatgtggtgaatattactgatgaggtaa

SEQ ID NO: 833774 - DNA, 602 bp, Homo sapiens
aatcattttacaagtatgttccattccatattgggacatamttatattttaaaaaattacttgctttttatctgaaattcaattttaaccaggtagcctgtatttttatttgctaaatctggcaaccctacaagtcggcttcccaggcaagaagcagttggtggccttgcccaagctttaaggatagtgaatccactaataacaccatcggaggcagaaaactggagaggctaaagctggacttagttgcttggagttcatatcctggttctgctactcactagattcctgcatctttcggagcttcagttcccctctctgtaaaatggaggcccacaacagtccctgtttccttaggattgttgtgagaattaatgcaataatccagaatgcctatcacatagtaaatgctcaaaaaactgtttttaatgttggtatgtttatttactgccagagaacatagtaatgataatcctttgaattatccacaatctatttatatatatacctgtatctgtatctatagatatatacactctgtctacatccatatatatgatttatgtcaggggttatttaactggacaggacatgtttaccta

SEQ ID NO: 833775 - DNA, 529 bp, Homo sapiens
caagctaacttggtttaacttttcttacctttattctccctttgttctgattctttagcttacttgtttatatttactttaatatatttacatattttggtaagcactttttatatccaggtatggaataaataattgtaagcaataggaacaaaggttttttgaatattcacaataacaacaacagcaataggatgctactaacattactatttttcagagcaccagacactaggcagagcccttttttatatattatctcatttaatccttttacaaatctataagttatctatcaagacagacatacaaaggtcatacaacttgcccaaagttacacaggacactaagcaagctgacagaacaggcactcttattttctttggcaggcaatatactctaaggttacarttatgatggttgacattttctaggagcatccattctgatgagagagatatttaaataaacaattacactgcaatatagaataattgtaattatactcagcataatgagtgcttacagg

SEQ ID NO: 833776 - DNA, 616 bp, Homo sapiens
gttgaggcaggagaattcttttagcccaggaatttgaggctgcagtgagttatgatgatgccactgcactccagcctgggtgacagagtgataccctgcctcaaaataaataaataaacaataatactgcaccttccagtccatgaacttggtacatttatccatgtattatatttaaatattttagagtttcagaatattttatagtttttattatgacgatctttcatctttttgttaaatgtatttctaaatattttgcttttgatattattttatattttattatttaactttaattttcaaatgttgccaggatataagaatataattgctttttgtatattgagtctgtataccatgatttagctgaatttagatattagttttatggggtttttttttggtagattctttgggatttttatataaacattatgttcttggggaaaaataattttacttcttactttatgttctatgtgccttttatttctttttcgttatttttattcctttcctgaaattcaatctttttctttatkgtactaagacctcctatttaatattaaataaaagtgtcgatggtggaccttatcaccttgttcccaatttt

SEQ ID NO: 833777 - DNA, 618 bp, Homo sapiens
actactgggtatatatcttataaaagtgtgttcacatgtgcaccaaaagacattaaagaatgcttttagtggcattatttacaacagcaacaaacyggaataacctaaatatgaatctgcagtaaaatggcaaaaatactatgatacatgtattcaatagagtattatgtagcagtaaaaaatacactgcaatggtttgctatgccacaatgaatctcacaacataatggcaagtgaaagaaacctgagaaagaagacattctgtacaatttttttatataaaactcaaaaccaggcaactcgaatctctgttgttttggtttaataagttgttaatgttgggaaagactgcaaatataataactgaaagagggcagaagtggagttaagaagtacagttaagatgtatacacttctatttgtatgtttaaatatatatatataaacagtaaaaataagtatattcctatgttagtaattctaatttgacaggatttgaaaatcagaaataatagtttaattttcactaaatgctttttgacatttattttctatatacagtatattatattttctttatcactaaaaacatttggaatcttgtaaaaatttcaattc

SEQ ID NO: 833778 - DNA, 654 bp, Homo sapiens
taatgaaaatgacattatcttttaccaaaacttgaataagggaatgttctttccaaaatgctctttgcttgtaaacaaatgagtatttttaccttgattgccataagtgtttattttaattgtatttgaatatttcttcttttagatcttaaacaaaaatgattatgtgcatatcccctagtaaatatcttggtgtctactatttctttaactagcattgttttttgttcagctctcactcttttctcactctaagaaagaatcaaatctgtatctgttcaagtatattctaggaatcgggcaccaagacagaggtgcaagttcaagagatttcttgagggtaatgcctatgaaaggtaatgggcagagagagcaggagtagggctaggaaagtctttagtaggtaatgcaagttggacacccatgaagatagatagaaagaaggagggttgggtagaaagaaactcacattgcagcccatctaggaactctgatgcgaagtccatttttcagcatgaggcagaaaaggcaaactgtgaaacctccactgtgctyagtctttgtctgggatcttccagaaagagcataggctctgcccaaatgctgtgatggatcccaaagacactccagctagatagaggctgtcagttaact

SEQ ID NO: 833779 - DNA, 641 bp, Homo sapiens
ttaagccatttcttccacagaagtgatccacacaaagtagacccagaggcattacataaaacctcaaccattgggaagattttccctcactactgtctttcaaggctacccgctggtgtagttttaatatagtcactatccatttttagtttgtgtccacataccaatctgactcatttgtaaatcaggtttggcctcattctttgtcttcaaggaaaaattgttcacatgagacttttcgtataaccataactgtgaggttgtgcaatcattgtgggtgatatggggatttagcttacctactcaggcagcttagtcatatactctgatgctattaggattctatcctttatataccatttctatcttatgatgggccactgccagttctacccaactttatgacttcatggtttgctaaaactcagctcaaaaggcaatgcattgtcacctggtgtctcttagttaagtgttacatctgtattaggacccagtagcatatcaggatctgattcttcaataatgyatacatttctgctccagagagcatgcccttgcttcagaactaaggaccttgtgatgattttcctaatggggcttcctataaactccatattctatcttttctaccatctagctct

SEQ ID NO: 833780 - DNA, 601 bp, Homo sapiens
actaactgcagacttctcagcagaaatttgacaagccagaagagattggaggacaatattcaacattcttaaataaaagaatttccaaaccggaattttatatstggccaaattaagcttcataagtgaagaagaaataagatccttttcagacaagcaaatgctaagggaattcatcaccacctgccttgcaagagttcctgaaggtagcactaagcatgaaaggaaaaactgataccagccactgcaaaaacacactgaagtacacagaccagtgacactatgaagcaatcacataaacaagtctacaaaataaccaactagcatcatgataacagaatcaaattcacacttaacaatactaacctttaagaaacccatctcatgtgcaaagacacatataggctcaaaattaaagggatggaggaaaatttaccaagcaaatggaaaacagaaaaaagcaggagttgcaatactggtttctaacaaaacagactttaaaccaacaaaggtcaaaaaacacaaaggacattacttaatggtaaaaggttcaattcaacaagaagagcgaactatcttaaatatacatgcacccaataca

SEQ ID NO: 833781 - DNA, 555 bp, Homo sapiens
ttcacattatagctgtacatcatctcctcagctccgcctgtcctggttgtcactggttttccaaatactgtctgtgctccaagttaragctaccctcacctgctctcaaattgccttccattgaattctcttcattgaaatgcttagttctcatcctcagctgatctctattcagttaagtgccctaactttagagtgtgagaatcacctgggggaaatgtatttttatgcaaatccctgggttcccctcccagaatatgtatcagtagatctggtgtgggtcccaatatttcatatttttttcaagctacataaggttctccgatgcagataatctgtaatcacatcctgagaaaccagtttgtacctattcaaccccactttctaatttcgagtctttatcagttttctcgtggttccttctttaacctcatctcaatgtcagcagatgactgagctcggtggttctcaaaccataaagtggttcctttatgttacaacaacctgggaggctcatagatatcccaatacacaacccacttctcatactaattg

SEQ ID NO: 833782 - DNA, 642 bp, Homo sapiens
gactttagattacttgttccttgcctctcccagtagaatgtaggcttcaygagaacatatactgtgctttgtttaccactgcactccctaccttcaaaagtgcctgataagtagtaggcactcaatggctgtaaatcagatgaataaatgacccacacggtgggttaatctgccaaacgtagagtgcctacaatatataaacaatccaaggaatgaatggatgtgaccagggcattgataaagaaggaaatgtgacggatcgtactaatatattgtaaaagatcaatatcattagtgtccccataactgcatattaaaatacttagataacctttccatttagaagattagtaccaattaaaaattactgatactattcactgctgaaggagatatgaggaaatggtcattattttacactgctggagaaagtttaaattgctactaaaataatctggtaataaatattaatgtgaaaaatgcgaactcctacgaatgttctagagagaatctataatatagatttaaaatcacataaaaaaaactctattgcagaattgcttgtagtattcaaaagtaaacattcttttttaaattttattttttaattgacaaataataattgtttatgtttgtgaggta

SEQ ID NO: 833783 - DNA, 490 bp, Homo sapiens
tttgtggtatcttccctgttgggggttctgctgataaccttttataggaccaagtggaacaacccayattaagtaggctgtagtggactcctaattagtccaattaatgtgatggctttaatttgtaagagatctaatggtgtagaatctgatttctttgaaatcactcctctctagaatgtaaaacaacaatgaaaggcagctaaagcagtcctggagtggctaagtactgcatttagttattgtatttcccaccccttccctccttaaagagaaaataaaaggtatttcttcctccatattattccccctggcatgccgcctttgttaggacaacagcagccaagagcagatttgaaatgactcctcggcattttcttaagatgagtccagtggaggctcttcaattagtagtggtcatgtgtgccggggtcaatattccagaatacttatgtttttgctcttttctgcagaaataaacattattatt

SEQ ID NO: 833784 - DNA, 591 bp, Homo sapiens
gtgatgatgctaaaattattttctgaatattttatctaaatttgcatgtttatatactaaattttcttaaagagggcatatttaaaaaaacaaatcatttcattacagcctragcaacatggcaaaaccccatctctacaaaaaaatacaaaaattaggcaggcatggtggcacacacctgtagccccagctactcaggaggctgaggtgggagatcacctgagcccaggaggctgaggctgtagtgagctgtgactgcaccactgctctccagcctgggcaacagagcaagaccctgtctcaaacaacaacaacaatttcataaaagcaatactattagttttcatgtctacatgcaggtgctagacaacttcttctgtaaaggactagacagcaaatactttaagcttctcaggccacatgggtctctgtcacacattttttgttttattcccccaactctttaaaaatgtaaaaaaaaaaaaaaaaaaaaaagaaaagaaaaagaaaatctcagattccacacatggtcaccaaaacagtacagggtgatactgctttatctccctgatagatctctaactcaacaat

SEQ ID NO: 833785 - DNA, 643 bp, Homo sapiens
ggtcagttgccttattatcatttttggatttactatgcaaattcttgcccttatgaatatgttctttttcatcctccacctagaattagaatgtcctctgtctatccaggttctgtttgtgtctctgcctggtttgagtcctgcttttccactcatccttctccggctccttcgaacattttcttgagattttctaacctacatataatgaatgctcagttaatgtggtataaaatatattgttattattgtttcttgtacattgagcttattactccatcatttgtatcttcctatacgtagaacagtgttggagtgttgctagttcaagtacactttgagctagcaattgcataatgctgtgggagcttacaaaggttagtagcctcagagatgggtaggcagagaattttttttcttttttttttggtagagatggggtttcaccatgttgcccaggctggtctcaaactcctgagtccaagcaatcctcccgccttggcttcctaaagtgctgggattacagatgtgagccatcgcatctggccracagaatttcatattgactatagcttgtagtgccaatttgttggcctttaacttgagatgggagctagtaaatgtccacacttttttttttttt

SEQ ID NO: 833786 - DNA, 581 bp, Homo sapiens
tgcatttctctgatgaatggtgatattgaacatttttttcatgtatctgttggccatttgtatgtcttttctttgagaaatgtctatttaggtgttttgggcattaggttttttttttggcrggggaggctattgagctgtttgagtttcttgtatattctggatattaacatcttgtcagatggatggtttgcaaatacttttctcccattctatagattgttttttcactctattgattgtttcctttgctgggccacagccttttggtttaatgtaattccatctgtctatttttgctttcattgcctgtgcttttgaggtcttattaaaaaaatccttgcccagtccaatttcatgaagcatttcccgttttcttcttgtagtttcagatcttttaggtctacgatccattttgagttgattttcatatatggtgagagagaggggtctatttcatttttctgcatatggatatccagttttcccagcactatattcatttcccaagttaccattaaccagcaccatttatttaagagattgtcttttccccaacgtacgttcttggtacctttctc

SEQ ID NO: 833787 - DNA, 568 bp, Homo sapiens
gatttcagacttctgaccctaaggactgcgagagaatatgtttctgttgttttaagccacccagttggggtgatttgtcagagcagccccaggaactaatagcagtcatgagtgtcagcctcccatggcacagagtagggccctgcagtgggggctggaagggtcttaaccaacagtaaccttacagccctctcccaagggaaggaagctactggattgcttccatacattggttgcaagcaacagaaatgaactctggccagtgacaatgaaaggaactaaaagggagctcgcagaattggggaaaaggatgggaaacaagcactggaaataggcagagactcggaaactcaggggcttggatgcaggggctatagggagcagtgctagagcaggaacttgtaggtcaggacgcaaggaccccagaacagccaacatgatcttgtaaaagaacagccaagttggaggactcatagttctcaattccaaagcttataaagctatagcaatcaaaacagtgaggtgytagcatgaatacagacatatagctgctcactggaatgaatgg

SEQ ID NO: 833788 - DNA, 641 bp, Homo sapiens
aactggatcctcactgagcaatgatggttgaagaggggaacctgtgccaggttatgccaataattgccagccccccaggattctagctcagaaatttttgtatgttctcaggagacaaaaatgagtgatcatcaaaggcagtcgaactcagcaggactgtcataagcctgaagttacaacttagacatgcaatagaaaatatcatcggtacctctccagtgcatcgcctgtagtaattaaaaacttgatccctgctgttttatcatctcattagcaatgggggcacacaacttttatccttgtttgtcaggaatcaaacataccagaggaactctgattataaattgatgaaagtaaagttaaacttttaaataagagaagagactgttcacaatgttttttttaaagctgattaaagggatctagttttttctcttaagagtaatctctctgtccagcctagaattgtagaggtcatctccaggattgctacatgtgacacgttttataaagggggtttgctttgtaagccrttctgatttaaaataaatatcagccctgaaaaacttcctgaaagcacagatgcaaagagtgtcatccttttcaagccttttgatgaagttgaaacaccttctatccct

SEQ ID NO: 833789 - DNA, 601 bp, Homo sapiens
tagtatccattactaatgggtacagtactcattaggaattggtatgggtacaattacccaacagttagaaggaataakttctcatgtttgatagtacaatagggtaaccatagttggcagcaatgtattgtatatttcaggatacctagaagagaggacttttaacactcacagcactagaaatgataagtgctcaaggggatgtgcagcctaaaaccctgacgtgatcattacacattccgtgcatgtcgcaaactaccacaggtaccccatcagtatgtgcacatattatgtatccaaaaaaaagtcataactgttcctgctatccctccccgtcttaaaagctgcctagagtgaacaccagcctgcggtcatgggcgggcctggctctggatcagacgcggagagccagcctggtgttgtaggaagagctgtgaactaggagcccggagacttggctctgtcaccagcggagggcgatcttggtaagaaggttcatttcccagggccacgtggattcatctctgaagcagagacaagtaggaaattctacacgcgccatccaaggtccaaagtgctacatcccttcctctttcctttt

SEQ ID NO: 833790 - DNA, 606 bp, Homo sapiens
ttccaagagatagatgctattatagtttccatttcacaaatgaggatcctgaggcacagaaaggctacaccgcatactggaggtgatcctgttgtgagatgctggggctgggatttaaaccagatcatctggctctagctcttgtcctctattgatctctaagtcatcacacccaatccactgtattagataaggtacgctgcctgtgaaagcaaccatcatttccccagcaactgtgtcttcctcctcaggagaataataacacttctcaaacagcttgcgctccactcttgtaacatacatttacgttttgatgaataatggatatcctgcctggtcactatgaaatttgactttgcctttattgaggccatctcattctcaaatttccttgtgaactcgtagtgtttgccaagtcatgcttttgccatctttggactatttaagttgttgcctttaagatgcacttgactttaggccattttcagatgatcctctggcttgggtggagctctctgtgctgggagaagaaaaatatcccrtgcaagttgttgaggcttgtaaccttttttttgttttgttttgttttgttttgttttgagatgg

SEQ ID NO: 833791 - DNA, 495 bp, Homo sapiens
acaaaggggcagtccttatgccctggatccagagggacagtccttgtgcccagcaccccagcagcctccctctgggagactgagagacagccttcccttttctgtgtttttctctgcctttaatgctcagcctagaacttggaatatgttaggtgctcagcaaaaatgtgtgctcacaggagcatgctgcagcaattaaagtgtgtatgtgtgtgtgtgtgttggaccttcatgagtgtgtgcacacatattcgatgaggatgcttgtatcttggggaggtcctatgaccctgtgatacacgtgtgtgcatacactcatgtccctaccgctggacatggactctgtgtgcccaatgagtgtctgcttgaggccctgcctagccacagacagccttggagagcccaygctcagatggccactccagacctggcaagatgaaaattttaaattggagatagggtgttctggggtggaagtagggttattgaaaaccg

SEQ ID NO: 833792 - DNA, 557 bp, Homo sapiens
tattgttcacagcttaaataataccaataattgcagaaacaatggacttcctgggactctggcttcgggtgtctgtggtcatgtcaaggacagtccagcttaatgcccaatttagggctgggaggaaagggagatgggagttttcggggttttttttttgttgtttgtttgtttgttttgagacggagtcttgctctgtcacccagggtgaagtgcagtggggcaatctcagctcattacaactctgcctctgggtgcaagagattctcctgcctcagcctcccgagtagctgggattacaggcgtgcgccacctcacctggctaattttgtgtgtgtgtgtgtgtgtgtgtgtgtgtgtgtgtgtatttttagtagagatggggtttcaccatgttggccaggctggtctcgtactcctgacctccagtgatccacccacctcagcctcccaaaatgctgggattacaggcatgaaccaccccacmcacccaggagttttcttctctctgtcacattgcctctgcatgtccctttcctttcccctctgcctagctc

SEQ ID NO: 833793 - DNA, 596 bp, Homo sapiens
atttttgttttggttgcctatgcttgtggggcatatgctcaagaaatctttttccaatccaatgtcctggagaggttcctcaatgttgttgtttagtagtttcatagtttgagatcctagatttaagtctttaatccattttgatttgattttttacatcgtgagagatagggatctagtttcattcttctgcgtatggatatccagttttcccagcaccacttattgaagagactgccctttccccaaagtatgttcttagcacctttgtggaaaatgaattcactatgggtgtacggatttgtttctgggttctttattctattccgttggtctatgtgtccgtttttttttttttttccagtatcatgctgttttggttactatagttctgtagtataatttgaagccaggtaatgtaattcctccagttttgttctttttgctcagggtagctttggctattctgagtcttttgtggttccatataaattttagtgktttttttctatttctgtgaagaatgtcattggaattttgataggaattgcattgaatctgtagactgctttgggaagtataaacattttaacaat

SEQ ID NO: 833794 - DNA, 641 bp, Homo sapiens
tttcctttctttggggtatatatacctagcagtgggattactggattgtatggtagctctatttttagttttttgaggggcctccaaacagttctgcatagtggttgtagtgatttttattcccaccaacagcgtatgagagttcccttttcttcacatccttgccagcattcattattgcccgtcttttggataaaagccattttaactggggtgagatgatatctcactgtagttttgatttgcattactttgatgatcagtgatgttgagcaccttttcatattcctgtttcatactcatatgtcttcttttgagaaaggtctattcagatcttttacccattttaaatcggattattagatgtttttcctatagagctgttagagcttgtaatattctggttattaatcccttgtcagatggctagtttgcgaatattttctcacattctgtgggttgtctcttcactttgttgattgtttcttttgctgtgcagaaggtttttaactggatgtggtcccatttatccagttttgctttggctgcctgtgcttctggagtgttactcaagaaatttttgcccactacaatgttctggagagcttccccartgtttttgtttagtagtttcatagttt

SEQ ID NO: 833795 - DNA, 586 bp, Homo sapiens
tgaatgagtaaatcattgcacgaatttataacttcatgaacccatggaacccattgactggtctgccctcatctccgatccttggctgaaaagcctaacaagccattatctgtccgtactgaaacactcctcctgatgtcaagaaccttctaaacataaaaccacctggtgcacggatcatttcttcttccaagatgtatctgccattgagagaaagaacaaatactagcttcagctttgtttgtaacactcatttgcaggaaggcaaacatgattatatatgatttaaatggaataaatgtatagtaaggagaacaaatgagtttatttgtgattctttgctagatactgttggagataactacagtaagaaaaaatatatataataacagtggtttaaaccagccagaagccttttttctctgtcaggcaaaagtccaggaatagttcaatattaaggttctgctctatgaaaagcttagctcatggcaccatcatttcctaggttgtagctccttgttcaagatggtctctagctgtcakatccacctccgtgcagcagaatagaggaagcggggagaaggga

SEQ ID NO: 833796 - DNA, 506 bp, Homo sapiens
cagagggcaagtgagcattactgcattactgcctgagctccacctcttgtaagatcagtggcggcattagattatcataggagcaggaatccttttttgacctgcacatgcaagggatctaggttgcatgcttcttatgataatctaatgcctgatctgttttttttttttttgagacggagtctctgtcgcccaggctggagggcagtggcacgatctcagctcactgcaagctccgcctcccaggttcacaccattctcctgcctcagcctcccaagtagctgggactccaggtgtccaccaccacgcctggctaattttttgtatttttagtagagatggggttttcaccatgttagccaggctgtctccatctcttgacctcgtgatctgcccacctcagcctcccaaagtgytgggtttacaggcgtgagccactgcgcccggccgacacaggtattttcatgctaggtgcacacatgattattttccatcaatgaacttg

SEQ ID NO: 833797 - DNA, 625 bp, Homo sapiens
aatacaggacagtacaaatatatttttataatttgttcttctatctgatttacaggacagctgtataaagcaattattayaaaactatagatgattacagtatgtaaacatgtaatctgataataatcacacaaagaagtggggagaaaatgaagatatactaaagcaaagttttgtgtactattgaaattaagttggtaataatgcaaactagactatttttagttaagatattaattttaattcccaggacaatcactaagaaaacaactcaaaaaatatagtaaaagaaataacaagagaatttttccctagactcattcatacccagagtctcacccatacctgattaagataatttagaagatgagacttgtaactttgagtggatgacatttagatggggctgatgctatgagctgaggctttgagggatgttggaaggagctctatgtattttgcatgtgagatgttacgtgaatatcgggaagccagaggacaaactgcagtaggtttaatagtggtcccccaagaatttatgtctaggccctaattatcagaacctggacattatcttatttgggtggggggaaggtgtctgcaaatgtaattaaggatcttgagg

SEQ ID NO: 833798 - DNA, 617 bp, Homo sapiens
gaaatcatgtctttaaacaggttaacatgatctrtatttctgcaggtcaccattgaaccttctgaagagcctttatttcctgctgatgaattgtatggaatagttggtgctaaccttaagaggagctttgatgtccgagaggtatgtgaaagtggaactgtgagctttatgaccagctgtgagtctctttgtatgtgtatctatttgcaaagctaaagtttgttaagatatgttcatgcctagaaatagatgtggatctcagtaaggagtgacatatgtggcaatgatacctttccatactgtggatatcattggcacagagtaaatactgaaagaggggagtgggggacctcaatgattggaaagttttcattgcgcaaaaagtgtgatttggtcataagtaagactccatgtcctgtgcacattatgaatgatgtaaggcaacttaacaattgtcagctatttcttttcattgttcttattttgggaaatgggtgaaatgtcagtaagttgttggaagaaaaaacatacccttttagatcaatatgacatttgcaatgattagacctgattacagttgaaaatgttgctatggttacacattgtcgacatagtgt

SEQ ID NO: 833799 - DNA, 555 bp, Homo sapiens
tttttccatgtttttactttccacctatttgtgtctttgaacctaaggtgtaactcttgcagrctgcctatagttagattttgccttttttatccaatccaaatatcttgttttttattggaatgtttagaccattcacatttaatgtaattaataagtttggatttacatttaccatttgctatttgttttcttttgttgttgcttaatttacttttcttttttttttttattttttattattttagaagcagggtctcattctatagcccaggctaaagtgcagtgacgtgatcacagctcactgcagcctcgaactcctgggctcaagagatcttcccatcttagcctcccaagtagctaggactacaggcaaacaccactacaccccactaatttttctttgtataattttatagagatggggtctcattatgttgcccagtctggtcttgaattcctgagctcaagcaatcttctcacctcagcctcccaaaatactagcattgcaggcatgagccaccatacccaacctgctatttgttttccatatgt

SEQ ID NO: 833800 - DNA, 627 bp, Homo sapiens
aagagatgcaaacacaagtgaaatacttaactgattatgggatctatgaattacagaattaagtagaacttttcctgtgaaacttaataaatcatataggtcttaactgagcatctttggtattatgtttttttttatttattttttgaggtggagtctctgtagcccaggctggagtgtagtgatgcaatcttgggtcactgcaacctctgcctcccaggttcaagccactctcctccttcagtctcccgagtagctgggactacaggcgcgtgccaccttgcccggctaatttttgcattttcaatagacacggggtttcaccatgttggccaggctggtctcgaactcctgacctcaaatgatccgcccacctcgacctcccatagagttggcattacaggcgtgagccactgcacctggcctggtattgggttttaatccagtgcttcatgataattaccttggaaagttttagatgtccagagaagcaatctaaagtaaacgtrtaagacaatgaattgcagttatttgtgggcataaatatttaaaatgccagattgacagtgagattgcaggggggaaaatcacagaatgcatgggcatgacctggagattgctagacag

SEQ ID NO: 833801 - DNA, 620 bp, Homo sapiens
aaaaattaggactacattaatgatgaggttgactatacacagtttggagtgagagagttactctacccagtatcactgacatgttggaatgccagatgaaactgaaacagaaaaattgtcttggggtctaaaagacgtctgatgtgctgatgtctgttcagtcttctgcactcatgggcgtaaactctcaaagagcaccactgggtcttagtccgtggcataaagactattctcaatgtagatattgtcttctgcttggacttccttttcaactgcattttgcaaagctttaatttgaaggctgctaaatgaaacactgtagaaagagttgttgaagaataacatgagtaagaaaaaaagcagaccacttctcacatataagctgcacttttgtttatgatcaggcaatatcaggtattcgagactccaggagccccgttcacacaaagtataaaataaatagtgccttccagagttgtaaaaggtgtggctcttattattaagttgaagaaaagtctgtttaataagcatgtagacaatctaaraagtattcaaaaactcagactggtctctttgaaactcgcataatagaatacaaaaatggaaaatctaaaaataca

SEQ ID NO: 833802 - DNA, 621 bp, Homo sapiens
tgccctaatgaagaaatgaatctaggttgtttagaagttatatttggtttagtccacagccatgttcattatcctaaggagcatgccagttcttccccttaaaaaaaacttttagggatcaatttttctgtaacagttactcttaaaattctgaaatttatcaggttgccaacttctcaaatatggatgaggatgacattgagttggaacctgaaagaaattcaaagaattgggaggaaattattccagaagatcaaagaagacgattagaagaagaagaaagacaaaaggaacttgaagaaatttatatgctcccaagaatgagaaattgtgcaaaacaggtgattttgcaattttaaagatatttctataaagtaagagtattcaacctgggctgattttgtttgtttctacgaggtatcagtccatagttttcttttcttgtaatggccttgatttgataatgtttgcctcatgaaatgagttgagaagtgtttcttcctcttttattcatcttttcaaagaacctgctcctggtttcattgatttktgtgtgtgtgtgtgtttttaatttcatgagtttccacaatttattatttcttcctttctgcttttgattta

SEQ ID NO: 833803 - DNA, 629 bp, Homo sapiens
ctggccaattctaagtatttttatatagtttttgacatcatgatgcctgaaaatgtmtgtggatcacattttgaaaatggcttaagtaggtagggtattgcagatgccctgaaaaaattgatagtagagagatttactgggagcttactatatgccaggcaccttgctaagcattttacatcaattaccctttataatctgattaacagccctctaatagagctactataattatctccaatttatgggtgagaacctgaatctccagccaagcacttgttcaatgtcccacaataatgccaagacaagctttgaatttagagatagcctgactccggcgctccatgccttctcccccagcagagcgtagcctcctcccacactcaaccccaaccttggggcagaatcagcaaagaagggtagtagtgagggacttggggacttttgatgtggtttttgtgattttttattttgtatttggcatgcaagctcttctgtgatttgcatcattctacagctaattctaggttccttcatcctggatttgttaatttacatccctattcctgtatacccaacatgcttctgttatgtctgctgaaaatgttgctttttcaaaggagatggga

SEQ ID NO: 833804 - DNA, 610 bp, Homo sapiens
gcaagagcctcatctctaaagttttttaaaatacaaaaactaggccaggtgcagtggctcacacctgtaatcccagcactttgaaaagccaaagtgggtagatcacgaggtcaggagttcaagaccagcctgaccaacatggtgaaaccccgtctctattaaaaatacaaaaattagccagacgtggtggcacacacctgtaatcccagctactcaggaggcggaagcaggagaatcgcttgaacccgggaggtggaggttcagtgagccgagatcgcaccactgcactccagcctgggcggcagagctagactctatatcaaaaaaaaaaaaacagctaactaaaaaaacccaagttaatcttttctcagtttcctttgcctttttcctttctcccactgattttgcctgattgtttttcctatttcaatatggttaaaaaaaaattacagaggagaaaagaacagttttttcaataagctgctaggacaactggaccaacagcaaaagaataaagctggaccccctacttyacatcatatacaaaaattgactcaaaatggatcaaagtcctaaatataagaattaaaactataaaactcagaataac

SEQ ID NO: 833805 - DNA, 247 bp, Homo sapiens
tatcctaacataaataataaaatctttagccataggttaccttcaatcactgatataaaatatttttttcagtgttaaaaatgattaaagttcaggtagccacaaaaaattaaatttattttaaatgcatgtttctctttaaatgatagaattcaccatagtgtgtctgtgtgtgtgtgtgtgtgtgtgtgtgtgtrtatatatatatatatatatatacacagacacatatatattcaagtttgat

SEQ ID NO: 833806 - DNA, 564 bp, Homo sapiens
gttagtttgctagggctgccataacaaagtgccacagactgggtggcttcaactgcagaaaytcattttctcacaaatatggaagctagaaatctgagatcaaggggttggcaggtttggtttcttctgaggcctctttccctggcttttagatggttgccttcttgctgtgttctcacatggtcatttctctgttttctgtgtcctaatctgctcttcttataaggacaccagtcgtattgaattcaggcccaccttaatgaacccattttagcttaattgcctctttaaaagccctgtatccaatatagatctgaggtactgggggttagggcttcaatatataaatttggaggggactaagttcagcccataacagcagccatctttctagcccagtgccctgcacatagtaggtgctcagtgatttttttttttttttgagacggccttgctctgtcacccaggctggagtgcagtggtgcgatcttggctcactgcaacctccacctcctgggtccaagtcatcctcccacctcagcctccaaagtagctgggattaca

SEQ ID NO: 833807 - DNA, 483 bp, Homo sapiens
ttaagatatgggtctagttaagagtgcattgctcaccatatttgarccactcagctttcagatatcagggtcttcatatctttaattcctattattaaaatatttctgggtttttatttccaacaataacatgaaaaataaactcttaggacctgctctcaggatatattcagtagccatctaactacacaggagaggatatgaacaaacagtgaacattttatcaatcaggaaactagctctcggccgagcgcggtggctcacgcctgtaatcccagcactttgggaggcagaggcaggcggatcacctaaggtcaggagtttgagaccagcctgaccaacaaggcgaaaccccgtctctactaaaaatacaaaaaattagccaggcatggtggcaggtgcctgtaatcccagctactccagaggctgaggcaggagaattgcttgaacccgggaggcagaggccacagtgagccgagatca

SEQ ID NO: 833808 - DNA, 612 bp, Homo sapiens
tggttagactgctttattgataaaatttgctgaaatgggtaagattttcccgttgctagggcaacctgcctacaggaataaccaatctatacatcattccagcaagcrgtctttgcaatttaataaaagaaaaaataaatgtagctacagagccacattggagagaagacacaaaataaaatacagaagggaaaatgataatgcttgagatggtgggtgttgggtttgaagattggagtgaaacatggctactttcccgaaagaaggccaactctaggaaggatacagaagaaataagatataagcagcatatggtctttccccttctgtcatcttatttttttaccacttccccttgctctctcctttccatcctcattggacttctggccgtttctcaaatgtgctgtgcgacctcccacctcactccatatttcctcatttgtctgcttggaaacctctccccagaaacacacatggttccctctctctcatatcctaccctcctcttatcagagcattctttcctgaccattatttatgaagtagccccctgccacacccaccactgtccttgactatcactttataatactttctttttttctccag

SEQ ID NO: 833809 - DNA, 580 bp, Homo sapiens
gaggcaaatggatcaaatacattatggtacaagcatataatcaaatactaagcagctattacaaatgaaatagaactacatgcactgacatggaaagatgtttaaaaagatgttggataggctgggggcgatggcctcacaatcccaacaatttgggaggctgaggcaggcggatcacctgaggttaggagtttgagaccagcctgaccaacatggagaaaccctgtctctactaaaaatacaaaattagccaggagtggtggcacatgcctgtaatcccagctacttgggaggctgaggcaggagaattgcttgaacccaggaggcagaggttgctgtgagccgagaacgtgccactgcactccagcctgggaaaaagcaaaactccttctcaaaaaaaaaaaaaaaaaaaaaaaaaagatgtgggataaaaggtataactcaatttttataaaatgtttgtatgtacataaagtctgacagaatgcacattcacctacgatattaattttttaaggcagtagaatccaggktttccttctgtgtagggcagaagttatttacattgttttctcctatg

SEQ ID NO: 833810 - DNA, 225 bp, Homo sapiens
cactgaaaactttcccacagtcactgcattcataaasattctctccggtatgaattttcttatgaactttaaggtgagagctcgtgttgaaggcttttccacactcactgcattcatagagtttttctccagtgtgtattctcttgtgcactataaggtaagagcttgtgccaaaggattttccacactgattacattcataaggtttctctccagtgtgagttc

SEQ ID NO: 833811 - DNA, 538 bp, Homo sapiens
gctgggcttgactaatcacagcagggtcatttaggagtgacataatcctaaacacaatcctgaaggtgaatgcatgctctcttttctgacattaaaggtggtttcaatcacgtctggcaccgactgaaaaaatgtattctggaatgcctcaggatgaaggaaagaaaaacatagatactgatcttccaacatcgcaatctggttctaatatcagttgtctacaggaagaattcactgttagagaatgatttcctcaagtctatttttaagatccctttaatgtagccatctgctaaattatcttgatacaaatgaggagaatttcagtgaacatctgaatttccttgtttataaaacgaaaactagatcacattccttatctagcctggtgataagaactaatttgatgtatacatatatcagtgtgtgtacgtaaatcatatacacagatttatactacatatacacacatgtgcaycaatcaggataagctagtttatgctgcatcattatctctgcctcaaacaaaccacccaaa

SEQ ID NO: 833812 - DNA, 493 bp, Homo sapiens
ggatccacttctaattctatttctcttgctatttctaccacatctgtgttacttgccccactgaagtcttgagacactcaaagtcatccatgagggttgaaatcaacttcttccaaactcctgttaatgttgatattttgaccttctcccataagtcacaaatgctcttaatggcattagaatggtgaatcttttccagaaggttttcaatttacttttcttagattcatcagcagaatcacaatctctgtcagctatcaccttaccaaatttatttcttaaataataagatttcaaggtaaaacttattcattgatccatgagttgcagaataaatgttgtgttagcaggcataaaaccaacattaatccccttgtacatccctatcagygctcttgggtgatcaggagcattgtcaatgggcagtaatattttgaaagaaatttttttttcctgagcaacaagtctcaacatcgggcttaacatattcact

SEQ ID NO: 833813 - DNA, 636 bp, Homo sapiens
ccaaagggactgcataactcatcagggaccaatcctggagaaagagagacatgtgacctttcagacaggaattctaaatagctgtttagaggaaactcagagaaattaaaaataagacagagaataaattcagaattctatcagataaatttaacaaagagatttaaataattaaaaagaatcaagcagaaattctgaagctgaaaaatgcaattggcatatttaagaatgcattagagacctttaatagcagaaataaacagaagaaagaattagtgaacttgaagacaggttatttgaaaatagtcagtcagaggagacaatacaaaaaagaataaaaaacaatgaagcatgcctacagaatatattatagaaaataatcttaaaagggcaaatttaagagttattggtcttaaagaagtggtagagaaagagatcgggataggaagtttaatgcaaagggataataacaagaacttttcaaacacagaaaaagatatcaatatccaaatacaagaaggttgtagaacaccaagaagttttcacccaaagaagataaattcaaggcatttaataatccagctcccaatggtcaaggacaaggaraggatcctaaaggcagcaagagtaaagaaa

SEQ ID NO: 833814 - DNA, 562 bp, Homo sapiens
gcccacaaaaactgtgagataataaattggtattgttttaacaaattaacaagcaaaacaaaaaaaaacaactccatcaaaaagtgggcaaaggacatgagcaggcaattctcaaaagatgacatacagccaacaagtatataaaaaaaagctcaacatcactaatcattagagaaatgcaaatcagaaccacagtgacatactatctcacacagccagactgtctattattaaaaagtcaacaaataatggatgctggagaggctggggagaaagagtacgcttatatactcctggtgggaatataaattatttcagctactgtggaaagcagcctggcgatctctcaaagaacgtaaaacaactaccatttgacctagcaactccattactgggtatatacccaaagggaaataaatcattccaccaaaaagatgcacacttatatgttcatcgtggcactactcacaatacaaagaygtggaatcaacctaaatgcccatcaatggtggactggataaagaaaatgtggtgtgtatatgccatggaatactacgcacct

SEQ ID NO: 833815 - DNA, 426 bp, Homo sapiens
aatgtgaatatgcatgtatatacacatacacacrcacatctgtccttacttttctttcatttcaccacgaagcaaagaatagtttcttgtgaactggcagttgtctgtggactggcatttggggactgatatgagaactttgtccctgaactttgacgttctctggtgtgacttggagagtgcctccactaagttatttctttgaaatcaggactcaggactacattgttgctttaggagagcttttgccctcttgagttacagaactcgttccctgctggcctcggtttgtggtagagaacacgtgagaaggtcagagctgagaggctcttgggaaccacaggacccaaggggtctgctggttaatcctcctaattttgtgcagaacagtacatgattattccagacagatgggaatgtgcccgt

SEQ ID NO: 833816 - DNA, 643 bp, Homo sapiens
gccctcacaggaagttaggagagcaactgggaaggtcctggtgtttctatcagacttgtattagggacagtgtcagcctctgcctgctgtcctggaagggggctgtggmccagagcccaaagaccttttacaggagcaccagggccaggtccctttgttcttgagcgttctgaatcttcagtggtgtaaactgcgagtcagaactggagatgagggtttgatgcctttgtgaagttctctgtagactcgtggaggaaagcactgtgcagggatgaagagctggacataagataccattttcactagggttttgtggttttccagggtctcctttattatctgagaaggaaatggcactggaatgatgcagcttctcatgggacctgccatttatgtgtcatttgcagttgagaaactgaatctatgcctgatacggctgttgttcaaaaattatatctgagggcatttttaactcacttaagagactggttaagattcatcggcgaatcagagctttgggaggaactcccattcgtattttcttggtgccgctagatcctgcctcgacagtattgaattttgcatttggctttaaagaaataaagcaaaacctatgaaaaagtcatcggcattatgacccaaa

SEQ ID NO: 833817 - DNA, 530 bp, Homo sapiens
ggggccctcaccctgaactcagcgtctacacccagagaactaatctactaacaatggtgggtgcagctctgttctacatagagaaactcaaagtcccttctgctgtcagactgggagcctctctctatcaaacaagaagcatccccagtgacctctgccaccatgatgcctctggtttatcatacgagagacctttaagacactcaggagttacatcttataataagtcctaagaatgatgtggttgtcaacacttattttcccccaattatccatccattcctctatctatctatctatctatctatctatctatctatctatctatcttttatctatccatccatttatccatccatctatgtatccatccatccatccatgcgaccatttatctatctatttacctgcctattcatycatccatccatccatccatccatccatccatccatccaccatcgatcctgtcattcatctgtctatctatccatccatctacccatccatacatacatacatcctccaat

SEQ ID NO: 833818 - DNA, 516 bp, Homo sapiens
atgccaacacagcttcctgatgctccgctggcagccacagcccagacacccgcttgggtytgagcccagctgaagggcgcagtgtagtggctgatcccggagcttggtggtgtgtcatcagcctgtgtgtgtcctccttcctgtgcctgtgccggcaacacacatcacactccacaccctctgtgtgtgcatcggcactttcccgggcacgcgctgtgaacactgtcacaggggacggcccagcccatctacacccgctgcagagtcagcacttcagttggagccctactcaactgtgcttgtgaaataagtggattttaggtctttctgcaaggcgacaactttttgatatgacctttgatgaagagatttaaaaacaaaaaccaactcgcagcagtggcaggaaggaaatgaccttccgttttccctggtttagctgaacaccctatgggtatttagtcattatggatccaaaccatagactcccagttcagcaggtagtgtaaaagctacata

SEQ ID NO: 833819 - DNA, 559 bp, Homo sapiens
ggtatttagtcattatggatccaaaccatagactcccagttcagcaggtagtgtaaaagctacrtattcatctcagcccagtcaagaaaacaatccaagccagttgatgggacaggggtgttacaaaggtaccaggaaaactgaaaagtcaaaggattcagcaatcggcagggtgatggcagcaatccacttagtgcttccgggaaggagaggctgaggtgaggtgttgccggaacacagggctggtgggactgaggaaggctagacccagggacctcacaaagggggaccatctgcagctagaggaaccttggactgtggaatgcactgacggaggtgcagtcaaagcagaaaaggaggaggaggaacaccctggctccccatctcccactctgcagtctcctgccagcatctgcctgtgcctgccattgtgtaggcacccagagccactggacagtgggtaagggagttggggaagacagacaagagcagggagggcccaggcagtggacgtgagcacggccagaccagcaccagcttggtgaccgtgcagaaccca

SEQ ID NO: 833820 - DNA, 559 bp, Homo sapiens
ggtatttagtcattatggatccaaaccatagactcccagttcagcaggtagtgtaaaagctacatattcatctcagcccagtcaagaaaacaatccaagccagttgatgggacaggggtgttacaaaggtaccaggaaaactgaaaagtcaaaggattcagcaatcggcagggtgatggcagcaatccacttagtgcttccgggaaggagaggctgaggtgaggtgttgccggaacacagggctggtgggactgaggaaggctagacccagggacctcacaaagggggaccatctgcagctagaggaaccttggactgtggaatgcactgacggaggtgcagtcaaagcagaaaaggaggaggaggaacaccctggctccccatctcccactctgcagtctcctgccagcatctgcctgtgcctgccattgtgtaggcacccagagccactggacagtgggtragggagttggggaagacagacaagagcagggagggcccaggcagtggacgtgagcacggccagaccagcaccagcttggtgaccgtgcagaaccca

SEQ ID NO: 833821 - DNA, 638 bp, Homo sapiens
gcagcaaaagacagctgtccatgaggagaggaaggaaaagaagatggaccccaaaggaatagctactgggagtaatttggccagactaatagtgcctcaagccacctcttcaatataacaaaatggaataattatggttcacaatgatgaccttgagtcatcaaaaaactatttaatcatgttcaaataattttgtttccagagagttcatttcagttcaacaaatatttatcatcagctaattacatgctgggggctgtgagcacactggggtaagctttggggagtgcgtgctaatttgagcagtgaggctgcagccctgaagtaacctgtcggtgaggatgcatatgatggcaagaaaatggcagctctgcctggatgtgctggcctcacaagtgcagacgcagtgtcaggcaaattcaggctcgattctggactcagggactctgtgatcccccacctgtctccacctggagctcagctctgccttccttagcagtgtggatcccgggggtcatgggatcactgctgtctgcaccgggcctccttctcctctcctttgagttaggsgaggacagagggtgatgtttatgggatctgttttaaaaaagaaaggtttcctagtcatgtcaacaaag

SEQ ID NO: 833822 - DNA, 637 bp, Homo sapiens
agcattgaatgggtaatgtattaactcagaaaaatctggtaatctcattacagtaattagttttaagcgatattctataattcattctaaacaaatgaaatggttaagaaatgagatatgaataagtagagagcctgagtatttctctgggcatagacctcagtcagacccagaaggaaaacttctggcaagttagacatcactactgggggtagggaagaggtcagaaagaagaaagaagagaatgaaattcattggaagcaatttgcaacagattcagtacttattacctgaatttgatttgaaatctggattgactgattccaaagtttctattcagactatgatgtgaaatgggtattatggaatatctggtgaaaaaactttatattctagtctggtaacagtgtgaaagtatatcagcaaattctttccattgtgcctgtaccttttttaaatgatattccctgaccttcaaatctcagatcttctcacctctcatagactaattgtattttttaaaatcaatactttctctacagcagataattcctccagtacatgttttagtatctctggtttcagcacccacactcaaatagatgcasaattttattttttccttgacctatgtcac

SEQ ID NO: 833823 - DNA, 509 bp, Homo sapiens
actaagaccaggcaggcacctttttatatctgcaggaaagttgatgttcaagtagggaggaactgtgactctacccctcatgcaagccagtatctggagggcgttcctttttttggggattcaatcaccctgaagtgtttcagaaaggccgtctatatgtgctgccatgctaagctcccatgggagatgccccagttgtttctgcagtgatggacaaaagtgaaaacaagtcttcttgaagaaccttcatgagcaccagagctgcttgcctgttggtagagctacacattttctctgttgaactcagcactgcagttgtgccttgcttaaagaaacttcccaccagtggaaaaatctgggacttaggcctgcagtccagattcttttgtcccatgaggtgttcccttratgtggtgtacttccccttctcttgggagtaggagtccctgtaagccagacaaccgcaaatattgctgctcctctgggtcaggctgcccagtgggatccag

SEQ ID NO: 833824 - DNA, 583 bp, Homo sapiens
tctatttcctgaagtactatttatttgaaagctttgcttctctgacgccatgatcacactaaacctaaacaagagtctgacagattctgacaaggccttcggacagaagcaacataaaagaaacacattcttttacccagaaatccaattcaagttcactaagattagaacagtttcaaaatgcaaggatagatgactattattaacatgagtattcttaaaattcaatgacatatataaactgatggtcagattcaatgtacctgaagggcacagatctctactgctatgtatgtatgatcgaaatgtttcgagttgtgctttaaaaaacatcagaaattaatgataagcatttcctgctgtacaatcccatatactgcaatgaaaaatcaaagccaataagaagtcattattactttaatttggcttctaggtaccttcttattcaaggcacaattgcatttcacagtgaagaacacaaagcctytccaacatattcacacacatttagagcagaatttgatttcaacactctaatcaataaatatttagcaaaatgtggtgaatattactgatgaggtaa

SEQ ID NO: 833825 - DNA, 631 bp, Homo sapiens
ccgctctagcgaaggccccagccgggatgctaggcctaattgttcagcgtggagatggcaactcacgtggtgccctaggtgcagctgcgtggtctggtatacatgctgcaaaattcacccagttcccctcattttaatttttctaacctacagcttaattttaataactttaaaacacttctaaatatttattttgacaccagcgtcaagacaaataatatcctctcccattattttcataagtaacacagattccctgatttttaaaaactaaaaatacagctaaacctttcttatgtataaagtatgcctatcatatacagggagaggtgggtaataaacttcctgtaatgacagtgtttggcatttctttatggatggaattggaacatgaacaagaccatgtccagcgtttttactgtgaatgtaaatggaacagcagcccaaagctgttgtctgtgccccagaggtgctacctgtagacagggaccaactccatgtgtgtgtgttaagtgtttgactccaattaagactcccaagcraatcctgcatattccaaatgtaaagagtactcagtgggaaaaaggttgttacctcaaagtcattgcttctttcctggctgggtcacagg

SEQ ID NO: 833826 - DNA, 604 bp, Homo sapiens
tcagctgggacttagccgcaatcctgggaaaggggatgggggatcgaaatgsaaatgaagttcagataggttcagaaaggtcgcagaaattcaccttccctgcatgtccacatttctagcatacttattactagctttagaaaatttctaaacagcacacaggtcatggtaaaaagcatatgaggcaaagtgctgaggttggaaaaaccttcgtcctggctcccttagggctccatcagttaaaagcacaaacctgcccattcggttctgaaaggagttccaaaacaaagccggcacagccccctcagattcctcctaatttgacatctagggcgtggctgattttctggagcaccgcacgtgaggtgaatgttccaaaccttttcctcttctgaaaaggactaacagaaccttgctaatgtgaatgggcctcatcctacactcagggtgttttgatcattgcccaagaaattgcataaaaggcctttaaaaatagaaaacattataaacatgccatcaaatgacttactggaccctgatgtggtcatcttagaatgccaaaactatcaatcaaaacctggaatttcctaaaattcaatgtttt

SEQ ID NO: 833827 - DNA, 611 bp, Homo sapiens
aattcatccctacagacccaacttattatagagtgacatgagctccaaaacactttattccaacaaatatatgcaaaagtaatattttggtgtattggaaaacactctaggtttaaatcctrgctctttttgctgtgtgatttgggccaaattattaacctctctgatcctcaatttaccacctgttaaatgggcataataataccaaactcagaatttatggagggatcatttatttagtcaacaaatatttactgagaccaaatatgggtgaggcattggacacagaatgatgaatacaaagactgttccttcacttatgaagtgtatcttctggtggaacataagaaataacatataaaaactgtattagcacaatagtttgaaataaggggtgctgaatagacagcacttttcattactatttgccattgttaatatttccatttgagctttcatgcctaggagatagaagtttcacaatggcgaggaactttattcattttgtacatagctaaatagcacatagtacataaccacaaaatatttgctgaatggatgagtccaaatgtttctcatagtttttaacaagcttagttcctgcgtaagta

SEQ ID NO: 833828 - DNA, 432 bp, Homo sapiens
tataatatacacaatctatatacaattatagataatatacttacacaagtttatgtgcatacattatacagagagagggatagagagtggggattgtgaaacaggagtaagactctaatccaccatctaacccccaagccagacctttgttttagcacatatttgtgtacagttcctcctcattactcagattctgtatttgcaaattcacttactagctaaaatatatttgtaacacctaaatcaatacagcacatttgcagtcatttgcagacatgcacaaagtgatgaaaaatttgagtcactcactggtttccagtgaggctcccattcccagttgsgttcaaaaaaggggatgctctggcttcttgtttcagctcctatgaagagtggatgaggatagagatcgggagcagtgcagtgctgtgtaag

SEQ ID NO: 833829 - DNA, 621 bp, Homo sapiens
aaactagcctggccaacgtggtgaaactccatttctactaaaccaaaatacaaaaattagccaagcatggtggcacatgcctgtaatcccagcaacttaggaggctgaggcaggagaattgcttgaacccaggagatggaggttgcagtgacccgagattgcaccactgcactctagcctcggcaacagagtgagttaaattccatctcagaaaagaaagggacattattggtgtggagttctagcagctggacttagattgcagacctgaagttaaaattggcatgtccttgtttattggaggccggcaaaatttgacttacgaatgatttgtcggggcagcccttccagatgcctgaggcctttaccttttaatggggatttggctgtctaatgctagtaacagccattcatttgtaagagcaggttttatgactcagcttcagggattaatgtttatttttgtgtaactttgtgggggtgggggagcggatcttgagatttttattttcctttacatagcaaaacaaacaacaaaacgcttccataacrcgggctggatggaatgcctatatactgacttttggggtccctgtacagtccctaggtgggttccatgaa

SEQ ID NO: 833830 - DNA, 552 bp, Homo sapiens
caccccctcacctccccaaattagcctcctgcctctgctccggaagcttcctaatggtctgtgtgcaactgtgcaattacagcagcctgtgttaacaaagctgcgtgatcaccagctttgggcaaaggcttgtgattggagcggtgtgaggtgttgtctcacccctttcacaggcagtttctcgtttttcacatgcgcccacttataaatgtctgtcacagggtttcaggccattcaccacttacacatttgctaattgttccccattcttctgtgtttcttagcctcagacttttcgtatccatctgttctaactaaaatctctctcatcaaattgaaagcccctccaaatgatttcttaccattttctcctaattgccactctagagacctggctatccatttgaaatacctttttgaagtcttgattatctgtaggaaatatttttttctgacatgatagaagtaaccagttttggtgctatttgggttgcttaagtaactacaggctggaaayaggagattctctttccttttttccttctatttttc

SEQ ID NO: 833831 - DNA, 519 bp, Homo sapiens
gagctgttcctaatcggccatcttggctcctcctgtctaccgagtatatctttaaactgtaagattatgtcttagaattcacataagtctcttttacttgcctcacctccattttaatgtgattaaaatagaggtgatatgtatacagggaaaaattggacaattaagaatagattatgccatgtaatatttctttagaatagttcagaacaatacagactcataaaacgtgccatttaagtttttcctagataaattactttgcataatctagctaataaaaaacaaataaagttaaaacttaagaagacagtgtagaaaagaacatataggtcagtatgtttaagggtagaatcaggggaggtgatggtaatggttggatttctgttcattcatgacactaattcraaaacataggtccaagataagataaggtaaagatagtcattagtcgaaaagaaataatatacgtaacttctacattgttagagaataaggagaataaagaaatcgcgttgt

SEQ ID NO: 833832 - DNA, 635 bp, Homo sapiens
atgtcaataatgcaggtggagaagccctgtcctaggtagaatacacttaaatcattttatctaaatttttcaaaaaaacttgttaatgttgaaaatcatctctaaaaataaaaattaagacttgctgatgagttgtcacaaaaagcagtagtgcctacttaggaattcaagagtaccctgaaaactagaaaagcgagcatacatcgtcactaacacagcctcaagatactaagagacactgaaaatgaatagagaatcatcaaataaatttattaattaatatgcagaacttttgaatttgagtatttagacttctaagaccatgtattagtccatttttacgctgctgataaagacatacccgagactgggaggaaaaaaatttaattggacttacagttccacatggctgaggaggcctcagaataatgacaggagatgaaaggcacttcttacgtggcggcaacaagagaaaatgaggaagatgcaaaagtggaaacccctgataaaaccatcagatcttgtgagacttattcaygaccacgacaacagtatgggcgaaaccacccccctgattcaaattgtctcccactaggtccctcccacaacacatgagaattatgagagtacaattt

SEQ ID NO: 833833 - DNA, 587 bp, Homo sapiens
ggcaggcacacaagccatgagagcataaaactaggctagaggtctggatgcatcatctggtacctgttataagtcaacaagatcctgtgctaagtggcttcacagattgcaccaagcaagaagcaagccccaggagaaaaagccaaggcaatattgctccaaagggctgtagaattgtggcagtggtctcagttagtgacattgatgatacagacgacaattaggagaaagggtttagaatgtgaatggggagcaattcagctgctacaatatccatcaacagactgttgcctgaggcgaaagggaccctgctgtcctttgtttttctgttcaaactagaagattggggagacgtgggggagtgaaagcggaatgtataaaattcatcataactgaaattttttgagctaaatgttgttgaataatttaaagtggccatttcttagaaatagagttggttgttccctccagctttaataaatgtgaratatcctacagcactgagatagttctcaacttaaaaaaatttgaagaaaaaaacctttaaagaaaaaaggtttctacctgctcagcttaactactaagtg

SEQ ID NO: 833834 - DNA, 587 bp, Homo sapiens
ggcaggcacacaagccatgagagcataaaactaggctagaggtctggatgcatcatctggtacctgttataagtcaacaagatcctgtgctaagtggcttcacagattgcaccaagcaagaagcaagccccaggagaaaaagccaaggcaatattgctccaaagggctgtagaattgtggcagtggtctcagttagtgacattgatgatacagacgacaattaggagaaagggtttagaatgtgaatggggagcaattcagctgctacaatatccatcaacagactgttgcctgaggcgaaagggaccctgctgtcctttgtttttctgttcaaactagaagattggggagacgtgggggagtgaaagcggaatgtataaaattcatcataactgaaattttttgagctaaatgttgttgaataatttaaagtggccatttcttagaaatagagttggttgttccctccagctttaataaatgtgagatatcctayagcactgagatagttctcaacttaaaaaaatttgaagaaaaaaacctttaaagaaaaaaggtttctacctgctcagcttaactactaagtg

SEQ ID NO: 833835 - DNA, 527 bp, Homo sapiens
tacaagtctgtttcactgacactgaaaatctgttgtttagtgtayttatctttatcagtgatcttagctagaccttctggataacttgctgcagcttctacgtcagcacttcttgcttcaccctgcccttatgtgttatggagatggtttctttcccctaagcctcatgaacggacctctgttagcttcaacttttggtctgcagctttctcacctctctcagccttcacagaactaaagagagttagggacttgctctggattaggctttggcttaaaggaatgttgtagctggtttgatcttctacccagaccactcaaactttctctctcctagcaataagactctttcactttttaaatcactcatgtgttcactggagtagcacgtttaatttctttcaaggactttcctttgcattcccaacttggctaactgtttggcacaagaggcctagctttcagcctattttggctttcaacacaccttcctcactaagcttaatcatttctagcttttaatttaa

SEQ ID NO: 833836 - DNA, 632 bp, Homo sapiens
aagacatcaggaaaggtaatatctctgtgtttctctttcacttacttgggtgatcaaccttggggggtgtgattatttctagcaataattatgtagctggtggacaaaaaagatggagctggaagtgcaaggcctgggttcaagcccctgttctgccactgacttggacaaatcccttcccttcctttcctttcccttccccaaatctgtgtctccaccacaataggttgaaggggtataagtggatcagagttcctcatattttcctgccaaaacctccctaatagcagagaccagggactgggatactgccaagggcctcacgacaaagtctagagatactatcaacatgcccttgataaatcttgaatcttgacctaaatcttcatgcaaatgttgcatcctactctggaatatgaccataaaatcaataaatcccccctctgaatttttgagaaaaaaggatgctctagaagatattcagatgtatgctggattttgtgtttcctyggatacagaaataagtgcccccagggttccaggtgccttggagagaagagcataggtttagatgacccatgagggccagtccggagttggcattctgaacttgggtgacactgtcctcctat

SEQ ID NO: 833837 - DNA, 522 bp, Homo sapiens
gtgaaactctgtctcaaaacaaacaaacaagcaatcaaacaaacaaacgggtgtggtggcgcttgtctgtagtcccagcwactcgggaggctaaggcaggagaatcgcttgaacccaggagacggaggttgcagggagccgagattgtgccactgcacttgggcctggtgacagagcgagactccatctcagaaaaaaaacaaaataagataaataaataaataaatattaaaaagttcataaggacccagatggaagaattccaggtttcagctccttttcctgagaacccaaactcccaccctccagccccttttttctcagaccaggatgcctaagtctgcagtccccagttctcctgtgatccaggtgtccagatgtccagcccactgattccccagaacttgggtgttacactagccccaaacctactccaggacccaggagtccttgtcccagatttgaggcccaacagatctcattcctgctgctaaatgatgccagaaaactacatctcccatg

SEQ ID NO: 833838 - DNA, 550 bp, Homo sapiens
tatgggcttgacagtcgacagatctgggttcaaatactggctctgctgccttctagttttgtgacactgggcaagttacttagtctctccaagcctcactttcctcacctgtaaaataaaaataatgatagcaattatcccgtaaggcttacataaatactaaattattactctacaaaatcacttatcattgtgcccgccatatgagatgctctcaataaatgctggctttaataatagtgactatactgtttattttactctcattaaataataggtatcattaaggcaaagattataccatactatgttattgtaattctatataccatctaacactgcatatattactcccaggcttcagtgactgcttttcaaagattttctctcctttttcctctgcatgagttactgacatatcctacaattccctagatttgaatgtctttgaaacttgtaaggaaagtcagcataaagcagagctatcaccaaagatttatttgaaatttgaaaaataagatgtaasgaagggatccagtttcagctttcc

SEQ ID NO: 833839 - DNA, 542 bp, Homo sapiens
ttattaggggttaggacttcaacacatctttctggacaacacaattcaacctattacagggcttaagagacaaagcaatctaatggatacaaatataaaaataaatatgaaaaaaaaawatatatatatatataatgtgaatttttaaaaaaagtcaggctgagaagttttattcacttacccaagtaacgaagcacattagtatcacagccagcactagaatccaggtccactgattcccagtagctgctctttctgttttgctaaagcctctgcacaactcattcaatggcttcttttggccttgtggacattatccaaactcttcaaggtggcctaaggacttgcatttttctggccccagcctcaactcaagccacttttcctcttctctgtgcccaagcaacactggcctttttcagtgtcataaacttcctcgcctctttatacttcaatccctcccggacatgttagttcttctacctggaaagtgacactcacttcttagcccaactcactcttcattctttacctctcaccag

SEQ ID NO: 833840 - DNA, 569 bp, Homo sapiens
ctatggtaaggaagagagaaaaacattttgctgtggagttgtgtgtgaatwgatagagctgctgatggaggcttcagctttgaacacttcataccttgtctgaacaagcgaaataacaattacatactgattatataagtattccatatctagatttatcatgtccttctccacttaaattatgtagtgcaaataacaggaaacaatgtctgccctgacggatcttttaatttcaggaaagtgactgcataataaattgaggtattaggccctaaatcccccacggtgaaaaatatttaacatttatcgacctattatgttatgctgggtgtcagctctaaccccacctcacttctgctttgtgaccttggggaagtaataaccacctcttgtgttaattacatagggataattaccagagaaaatgataaaagtatgcctatttcttcagggtctttgagtgtcaccgacactaccaatcaacattttaaatcataataaagaaaatatggcctctccatatatctaccaaactttcaaaaatagacgtcgatcacagtttcaatatc

SEQ ID NO: 833841 - DNA, 633 bp, Homo sapiens
cacatgaaaaaacacatcactgatcattagggaaatggaaatcaaagccacagtgacatgccacctgatatgattcagctgtgtccccacccaagtctcatcttgaattgtaactcccacaattcccatgtgtcatgagaggaacccaatgggaggtgattgaattatgggggcaggtctttcctgtcctgttcttgtgatagtgaatcagtctcaagagatctgaaaatgggagtttccctgcacaagttctctctttacctgctgccatccatgtaagatgtgacttgctcctccttgccttctgccatgattgtgaggcctccccagccacgtggaactgttagtccattataactctttttctttcagtcttggttgtgtctttatcagcagtgtgaaagcagactaatatactgcctcatgaccattgggatgccacaatcaaaaaaataataacaagtgtcagccaggatgtggagaaattgggacctttgtgcattgtttgkgggaatgtaaaatggtgccactgctaagaaaaacagtataacagttcctcaaaatattaaaaaaatagaactgccttgtgatctacaattctacatttgaatacatatctgaaagaattgaaag

SEQ ID NO: 833842 - DNA, 727 bp, Homo sapiens
attttctaatcttctttgtgtcatgatttctccctcccttctattttgtatgcaactgtagccgatgcctggtgatccatacatatgcctaaagccattccagagtcatctgccagcaaaacctgcacactctgacggctctgtgcatctctttgcctgagggtggtctctgacagggggagcaagccaaaagacaaggtagttaattcttcatggatgactcttatccaataagggataggagttggtggatagctatcttagtttccttccccatcagatgagacaattctgggccaggatctgcaccagcactgtccaacagaactttatgtaatagtggaaatgttccaccacctaccctgtccaaaatggtagccactagccacatgaagctattgagcacttgaaatgtggctagtgtgaatgaggaactgaaatttaaattttagttaatttaaatggaaatttaaatagccatatgtagtgagtggctactgggttagacagtgcacacacacagtctctcagaaggtctctggcaggattgagcgtcattgttgtcccccacttattactctacctctcattggctttwctctttcctgcctcactcccccaaccctctgtactttctggaattactctccaagtaaataacaggcttagaaattcttttctcagagactgtttgaggggatcccaacctaagaagcatttgttctgc

SEQ ID NO: 833843 - DNA, 595 bp, Homo sapiens
ttttcagttctctactacacattcaccctaacttccagctgtctggctttcataactgctagtattaatatattaaaacaggctgggcatgctggctcacgcctgtaattccagtactttgggaggccgaggtgggcagatcacctgatgtcaggagtttgagaccagcctggccaacatggtgaaactctgtctctactaaaaatacaaaaattagcccggcatggtggtgtgtgcctgtagtcccagctattcaggaggctgaggcacgagaatcacttgaacctgggagggggaggttgcagtgagctgagattacgccagtgcactccagcctgggtgacagagtgagactcaggtctcaaaataaaaaacaaaagcaaaactatatatatatacaaaccttttcaaggtatgtaattacattcctaatttaccaagtttagtgttttttctttgtcctcagtccttggagaaaaaaatcattcacttttatgwgaaggtcattggttactgtcttttgatagaaaggatgcaaatacaaaccagatggatgttttgaagatctggaaggaaggaatatatactatttgtc

SEQ ID NO: 833844 - DNA, 624 bp, Homo sapiens
tacagaatgatgccatgactattktcatccaagtaacaatgaaatagtagtagaataatcaacaatatttgtgactgtattttcacagacattttaacatagtaaattcataattaatataaaatactaaattcagatttctagacagtaaaattatgtatgtattaaaatttaatatattaaatcaattagaatttctattattatatatccttatatcagtagcaaacttttatagagcagaccaatagaaaaaaggttaactggccaggtgcgggggctcatgcctgtaatcccagaactttggaaggctgaggtgggcagatcacttgaagtcaggagttcaagaccagcctggccaacatgatgaaaccccatctctgctaaaaatacaaaaattagctgggtgtgattgcaggagcctgtaatctcagctactctggaggctgagtcaggagaatcgcttgagcccaggaggcggaggttgcagtgagctgagatcacgccattgcactccagcctgggcaaaagagtgagactttgtttcaaaaagaaaaaaaaaaagaaagaaaagaaaagaaaaaaggttaactcacacacacatctatgtacatacatatccat

SEQ ID NO: 833845 - DNA, 584 bp, Homo sapiens
tctcgctctgtcccccagcgtggagtgcagtggcgcgatctcagctcactgcaagctccacctcccgggttcatgccaatstcctgcctcagcctccctagtagctgggactacaggcgcccgccaccacgcctggctaattttttttgtattttttttagtagagatggggtttcaccgtgttagccagaatggtctcaatctcctgacctcatgatccgcccgcctcagcctcccgaagtgctgggattacaggcatgagccaccgcgcccagccctatctgcttacttcttgaagaggatggcattcatgtgtggtgctaatggatgtgtataaaatgaacgaaacttgcaacacctacatgaagaccagcgtgatatacattttacacactgacacgtgatctgcttacgggggaaaacaagtgcaggagtcagtctgtatctgatgatccaggggacatccaagctatgacaagcaagagcccggtatgcactgggaacagctggaggatgcacggtggctttgaatgctggtgacaacttggacctaaaaatacttcatgatcttgaaaagctaacag

SEQ ID NO: 833846 - DNA, 623 bp, Homo sapiens
attaatcatacttttacagtatcaatacatgctgttagtttctttttcatctttaaactgtctcaagagatttaggaaaagaaatgtgcataagtgagcataaagtgtgatttcctccatttaacactttttcttatacaaggatgagggctgggtgcagtggcacatgcctataatccaagcactttgggaggccgaggcaggaggcttgcttgagctcaggagttagagaccagcctaggcagcatagggagacctcatctctacaaaaaaaaaaataagaaaattggctgggtatggtggctcatgcctgtattcccagcactttgggaggccgaggcaggcggatcacctgagatcaggagtttgagaccagcctggtcaacatggtgaaaccccgtctctacaaaaatacaaaaaaagttagcagggcatgatggtgggcacctgtaatcccagctacttgggaggctgaggcgggagaatcgcttgaacccaggagatggaagttgcagtgagccgagattgcgccattgcactccagcctgggtgacagagtgagactccatctgtaagtaaatamataaacaaataaataaataaaaataaatacaatttaaaaa

SEQ ID NO: 833847 - DNA, 499 bp, Homo sapiens
tggtggtacaagcctgtaatcccagctacttgggaggctaggatgagaggctctcttgagtccaggagttcaaggatgcagygaactatgattgcgccactgtactccagcctgggtaacagagtgagactccctccccaccatcaaaaaaaaaaaaaaaaaaaagtgtttttaggtgtatagtgccgtagcgttaagtacattcatattgttgtgcaaccatcaccaccatccgtttccagaactcttcatcttgcaaaactaaaattctgtacccatgaaataccaactccccattattcccttcctccagctcctggcaaatgccattctactttctatctctgaatttgattactgtaggtacctcatataagtggaatgtttgtctatcggtgactggcttatttctttagcacaagttcctccagtttcatccatgttgtagcatgtgtcagaatatccttcctctttaaggctgaataatattacattgtat

SEQ ID NO: 833848 - DNA, 574 bp, Homo sapiens
tctgagcttgttttcagtttagcaggcaggaaaactgaggcccagaatcactcatcaggttgacagaggtggatgccagttcagccttagctggattcccaagccaagcctcctgcccaccatggactgcagccttctgcaatgtgcttaagagtgccttaagcacctgagcacagggtgcctcaaactgttggtttctagatgcccctggcaggaccatctcaatctggacattgccatgagcagctctagggagctgtttcctgcctcccttgctaataagtcccagtgtcccatcacccaagccaatagagtgatccactagcactacaatgcaggctcatttacattttacatagtctagtgggcatattaaaaaattaaaagaaacaggtatccctgtaacacaggctgtctacataaataatcacattacaatggtacttsagtgcatagaaaaaaatcattcaaacagaatcaattcattgatactgatattgccagtgatgtgtttttaatactagaaatgacacatgttccccaacacatgtactatagcatagcaataacattt

SEQ ID NO: 833849 - DNA, 639 bp, Homo sapiens
cagggcgggaaattgatagaggatgaaaacacacctgcccaaggcattactatgggcagacaggcaagctaacttgcttatggcctgcatagattatatatcatgtttggacctcatgaagacattctgcatatttagaaacatgtcaggaaatttggaggtgcaaatctgaagttattttgatgtcattagaagttctacacatttgcaaaattccataatcctttataaagtgaacataaaatagtggctttcctattttcttttaaaggaacgatgcggggatttttatcttctcagggttagattcgatccaggatcaaagtgtcatatttaaaatgtttacaatcatgagtacctgtcgtgacttcctttctaattatctgtaggagatgagaatctatttcatgccttgtatgaaaagatttctgttcatagctttaaatgaccaattatttctttctgcacattttggtaattttatttcatgacttttgaacaccttttattcttgaaatttctcaccaatatttgctttgaattaagtcacasggtgctcattgtacaccccaaatcttcatttatggacccgttgtcattgtgacaatcttacccgtcgtaaaaaaattctagcaagag

SEQ ID NO: 833850 - DNA, 570 bp, Homo sapiens
ttggtgtggggctggaggtgggtgattggagcagggttaggggagaagaatgctgtttttgtcatcttgtgttcttgacatttttgaagcatggctgtttctctcctttctctaamgctgcaggtattaatgaggttttactggtggcccgccttcatctataactgccgtccttttcctgctgattccaacagaatggcatttcagggctactggataccagatacggttaagtagttaggggaactggtggcgattggcagagatgcaggcctctagcggatgcagaaggaaaataaaacacagaggggcaccggcaacaggaggggtctgaagaggcagagggcagcttggccaagtcaaataaagttaatgaaagatcatgtgattgccaacttcttaggctagccagttgatgctgtgtatgtcatcttttgacatattcatcggttagtctttaaggtgtcatggggtgagtgcattctctataataacacttagctaaatatcctgagactggcctgggccaaaattaaaataagaatgcttacattattaggtagtaagatt

SEQ ID NO: 833851 - DNA, 493 bp, Homo sapiens
ttgtccctttgggcttctgcctattttattctatttcctttattttagtggcatttcaagggagggcagggccagcctgccatgttgcctggcagtcccctgcggtttcagggtcagctgccctctcagcccagtggccaggccccgcgtcaggcctgagactagcgtggactgcgcagggatgtgggggaggggcttttgtgttaaccaccagttcccttgaacttcctgcctgcctgctttctgctttgcagcgttgtgcctgcaccaaagcctggaggtgtgtcagggaggctcgcaggggaagttcttgcccatatgtgcaggaatgacactggctgataagaaacatacttttttattactctttaagcaaaactttcaatagtcaaaatccccctcccctcgcctctctttctctcttgtgtttctataataacttcaytggatctgggcatctggattataggtgttcattgaaaacctcaaaata

SEQ ID NO: 833852 - DNA, 493 bp, Homo sapiens
tctaaatatgtattttggtcagccacttcacayatgaacagtagcacatttctgaataaatgtttagaatatacattatgaagcgaataaattagatgtttttctttggtgtgactttttttcttaatagattcagaggaaaagagggtaagcccttccagggagagttggttagagaaagagatgccctccaaatgcttctgctcctgttagggcttcctagatctattattagagaacacgcctggaaggctcaatctttacaactgggcaggctgcctgtggaagatgcaaatttaattcaaggtcagtatgccttatcaagtccttctgcctcaaagtcctgccaaagctatgcagacaatatggatgatgtctattttaagtgaatatttagtgagataactgtaaaaaaaaccaaaccaaaacaaaaaagcatatgagaactgagccttttacggaatgatttcagttgtgaaactatcctactccc

SEQ ID NO: 833853 - DNA, 524 bp, Homo sapiens
caaagtggcaccagtacccacctaaggccagaggtgatgtctggaactctaagattggaccccacaggaggacrctccagaggatcctccggatctcaaactctccaaagaggacactcttgacagaggttctgaggtctaataataagccctctttagaattttctctcgaagttgcaaggctgcttggccccaaagttgtttagaatctgaagttaactgtttaatgggaaagtgggatggccttgcatatatccaggcttttgtactgctgttctaagcagagggcccggttaacgtgtgatgccctcctttggtactgttttgccccagtgttccttggagtctgggaaggtttagccttaaaaaaacaaactgccatggagactgctttacccaaaattttggttcacagccttccttggattatctactggggcaaagtaaaactcacaagcttatattgttatctcatggctaaggttccaagctattggatctttgtttatgtgtgtgtatacatg

SEQ ID NO: 833854 - DNA, 413 bp, Homo sapiens
atatattttttaattatgatgaaaaaatttcaaaacctagtaaacaaaatggcatataaatttaaatgtatgcaaactggmcaagatgcaagtatgttaagaaattacagataacctccatattgtacaaattgttacagaagtcttttcagatatgtctaaaactaaatgtgttcaatgaattttcaaacaaattctcaacatgtgattggtacaccattttatttgagattttagagagagaaaacggaaaacaaatataataaatattttcaaatggaaaattaaacttgaaggtcttattttattataattaaaaagttaaaaatacttcaccaacctatgtaagttatatgattacattataccaaaaacgacctcatgacttacagccagccttaaaatttacgaat

SEQ ID NO: 833855 - DNA, 536 bp, Homo sapiens
tccggaattgtatgcccagtgcctaacgtaactatatactatagtataattgtgcacagtgagtgtccaaagaatgcatattgggtgtcrttaaaatctcagctgggaggtggggagctgggatccattcaaactgacaacgggccaggtgcggtggctcacacctgtaatcccagcactttgggaggccgaggcgggcggatcatgaggtcaggaaattgagaccatcttggctaacacggtgaaaccccgtctctactaaaaatacaaaaaattagccaggcgtggtggtgggcgcctgtagtcccagctactcgggaggctgaggcaggagaatggcatgaaccctgggaggtggagcttgcagtgaaccgagattgtaccactgcactccagcctgggtgacagagcgagactctgtctcaaaaacaaacaaacaaacaaaacaaaacctgacaaagaacaggggaaagaatgtaaattggggattgggagagtatcaaagaagaaaagaccatgagaaaaccagtccaaag

SEQ ID NO: 833856 - DNA, 490 bp, Homo sapiens
gttattatgctaattacgctgctaattatcactaaaaagcatratgtggccaaacgagcataggatgaaaagtttctgccttgctgccaaatattttggtgtgctatgaagaaaggtggaagacagaatcccttgcaatacactttgacggcagcgtataggacaaaggcagcagccttcaggcaatcaagcatgagcctctcaagtggcattcgctttgagaaggtgtgaaatgaaagcacatattggaaaagcatgccggggtgaccgttggggcaccctgacttccatctgggccattaccagagcagacccaatacaaagcagcttcataagtcccctgtccagaggattccacattcatgataaccatgaggactgtccttcacttgaaatgttcagcctccttaacgatggcaacctttcagacagtggaaatgaaaggtagaataatataaagtttactctagggaaactaccaaattatact

SEQ ID NO: 833857 - DNA, 288 bp, Homo sapiens
ttaacttttgcatttatatgatggcccacaaaaattaaaactgataatggttyagcttatgccaattcacaattccaacaattttgtcacatgtggaatatccaacattccacaggcatcccgtataacccccaaggacaagccatagtaaaacatgcccgttcaactcttaaaaatatgctcaaaaaacaaaaaggggggaatatgggtaaagacccggcaacactattggcacaaaccttatttacccttaatttttaaaatttaaatgacacatttcgatcagct

SEQ ID NO: 833858 - DNA, 288 bp, Homo sapiens
ttaacttttgcatttatatgatggcccacaaaaattaaaactgataatggttcagcttatgccaaytcacaattccaacaattttgtcacatgtggaatatccaacattccacaggcatcccgtataacccccaaggacaagccatagtaaaacatgcccgttcaactcttaaaaatatgctcaaaaaacaaaaaggggggaatatgggtaaagacccggcaacactattggcacaaaccttatttacccttaatttttaaaatttaaatgacacatttcgatcagct

SEQ ID NO: 833859 - DNA, 288 bp, Homo sapiens
ttaacttttgcatttatatgatggcccacaaaaattaaaactgataatggttcagcttatgccaattcacaattccaacaattttgtcacatgtggaatatccaacattccacaggcatcccgtataacccccaaggacaagccatagtaaaacatgcccgttcaactcttaaaaatatgctcaaaaaacaaaaaggggggaatatgggtaaagaccckgcaacactattggcacaaaccttatttacccttaatttttaaaatttaaatgacacatttcgatcagct

SEQ ID NO: 833860 - DNA, 598 bp, Homo sapiens
ctgttaagaaaagtatttatgttacaggagggatgaggggtgtatgcaaagctaggtagggttcagacacatcggagaatgtgtgattgcagccctctggatwccaaagttggctggtctgcctatagtctaagtgtggcccaaatgttttatgggatatacttatgttaaggaattatggttatttatctgaaattcaaatttaacgagaatcttgttttgttttaataaatctggcaatcctgcctctaggatgcaagtaaggcacaggtgagccatagcaggtggccaggcatgcaaggaagcagagggaatagggggtctggcctacatggcatccatgtggagaaagccataagaatgttaccaccagcccaggccagggctgcaagggcactgagggactatatcttttaggcacgtggctgttactgagcatcaccagatctcttcacacccacaccagtggcccaccatgcaccagttgaaaacagcaggagagcccccttgctcctgcactgtccctctagcacccctactaagaaagctctacctcatgctgtctgtgcaggagaaaagctgaaaggaaacccctccc

SEQ ID NO: 833861 - DNA, 586 bp, Homo sapiens
aggcggatcccttgagcccaggagttctagagctgcacggtgaaaccctgtctctaccaaaaaatccaaaaattagccaggtgtggtggtgggtgcctgtagtcccagctacttgggaggctgaagtgggaggatcgtttgggccctggagggggaggttgcagtgagctgagatagcaccactgcattccagcctgggtggccgagtaagactctatctccaaaaatatataaaaataaaaataaagaagacactgagctcagacaccataccaaagctactgaggcacctgtaaggtgtctgttttataatattggatgacattcatcattcatcaaatgtactgagtgcccatctaatgccaaatgctctgctatgagctagtacagagtgaacaaaatagacaaaaaaatagacacaactatacaaacaaactacaggtcacataggaaagcatggatgctctgattgctattacgggattagrggtcaaggaaggcctctctgaacaagtcacacaagcttagaccccaggaataagtagtaggtaaggaggcagagactggaaaggtttctaaatgtgtc

SEQ ID NO: 833862 - DNA, 481 bp, Homo sapiens
tctttggttaatacatattcctggctaacagttgctgtattgaacacagaggaacagacacacctctagaccttcattcttctggattttgcaaacccgatagtcaatttccagctcasctttgatagtaatatttccaaatgataaggaacaggaaatgtcgcaacaagttctcctgacaatgaggtcctgtgtgcctaggttttgtagaacatactgaaaaagtaggtggccatgtctttgatatgctttccaaggtgcatccaactacagtctccttcctttctgcccagtaattcccatcagtgaacttaggcccaaaatcaataaagctgttttttataaactattattaaagggcatttccactacctgagaaggaagggaagacgttctagctcacccttattagcaccgtaggaggcactcgtgaatcaatacctgaaaatgtacaagtcccagacaatcagtgctcagagcg

SEQ ID NO: 833863 - DNA, 614 bp, Homo sapiens
agagatggcatttcaccatgttggccatgctggttttgaacttctgacctcaagtaatcagcctgccctggmctcccaaagtgctgggattacaggcgtgagccaccatgcccaggagaagtgcttttaactccacacgtgtttaggttttttggtttgtatttgttatttttacttttttccttttgctacatcaaaatgagtcctttataatttctgccctagggaattctaataatttatctttgtggtccaatataaaatcatttttaatgtatgccatgaatgtagtcaactattgataataatgtagtactagtagtttgctcagtcagcacaaattgtcaggacacattggtaatttctgcatgtggattatctcctgattcttagaacaacatgaaaccaggctcatgaaagatgagtaattatcccagggtactgtctccctcacctccaatggtgggccagagctaggtccaagactttgaattctagagtgttagacaccatcctatgcagcctcccactgagtaagggtggtcactgtttgtagggtgtagagtttgatagatacgtctgttactttgacttcattagttttatttaggatg

SEQ ID NO: 833864 - DNA, 624 bp, Homo sapiens
ctcgtccccgcgacctgcatgtcccactcgggccccgcgcccccacttmgccgctgaaggcgtctcgcggtgactttaccttgcctggggtggaagtcaacttcccaagacctggtgatgaagagcgagagatggtagagcagcccagtcagccacttggccacccacatggttccaccctggggaccccgatcggggaggcccaccagagccgccggcagccaagccggcttccctcgcgctccgatccctctcctccctctcgcccgccgctctccgcgcctcagcagcctagggaacagcagcgcgggccctgggccggctggtccagccacaccgcctgtctccgctcgctgagccgctgcttcatcgcactgcagcctcaccccccttcctgcgcccgcgctgccctcagaaactctctgctcaggttcagctcggcgcggggaagcaactcgacctagcaggaatggtgccaatatagccaccccggaccggcgagcgccgcggagagcccgcccctatgggctgttcccggccaatcagcgggaggcgcggcccctgctcgcttttccccgcgcagccccctcccttctccactcagccgcaaggggactgcggtac

SEQ ID NO: 833865 - DNA, 590 bp, Homo sapiens
aggctcctgaaatagcatctggcctatcttttccygctctcccttctcttttctgctactccctatcctcacaatcctgtttatttctacaagacagtgtcagttttcctttctttgacttcttgccccagagttaatggtacatcaacatgagaaccccttctatagccacctatcattctattctcccttagcaacaaaacctatttgttcctttatatttggggacaggtaaaatttgtggtcttggtctgcctttgggagtcctcctataactcctgcatttgggaaaggagtagagctaagtcctatgtcctcatatcccggtagcccccagtagtggaggtagcagttatgagggcatgtttttctctcttcaaatgcttctgactactaattggacagctaatatctaagtagatcaaagaattatacacagtcatacacgaaaatatatatagtgacacatgcttttttcctatgctatattttgttactgacttgcttgtttttaagagaaatgctactcatttagttctgatatgccattaatactgagatgggagctacagcacagcttcccattccat

SEQ ID NO: 833866 - DNA, 580 bp, Homo sapiens
gatggtatgtatctcattgtggtcttgatttgcatttctctaatgaccagtgatgatargcttttttttttttttgtatgtttgttggccacataaatgtcttcttttaagaagtgtctgttcatatccttggcccactttttgatggggttgtttttttcttgtaaatttgtttaagttccttgtagattctggatattagccctttatcagatgggtagattgcaaaaattttctcccactctgtaggtttcccattcactctgatgatagatttttttttgctgcacagaagctctttagattaattagatcccatttgtcaatttcggcttttgttgccattgcttttggtgttttagtcatgaagtatttgcccatgcctatatcctgaatggtattgcctaggttttcttctagggtttttatggttttaagtcctacaattaagtctttagtccatcttgagttaatttttgtataaggtgtaaggaaggggtccagtttcagttttctgcctatggctagccagttttcccaacaccattcattaaatagggtatcctttccctattgcttg

SEQ ID NO: 833867 - DNA, 598 bp, Homo sapiens
gccacagtggcttctatcatttaacactagcttgaattcatacagtgttttgcaatttataaaattctttcaggctgggcaaggtggctaacgcctataattccarcactttgggaggctgaggcggcctgatcacccgagttgaggagtttgagaccagcctggccaacatagtgaaactctgtctctactgaaaaaaaaaatatataaaacttagccaggcgtggtggcatgcacctgtagtcccagctatttgggaggctgaggcagaagaattgcttgaacctgggaggcggaggttgcagtgagccaagatcgcaccaatgcactccagcctgggtgacacacaagactctgtctcaaaaaagaaaaaaaaaaattatttcacatatattatctaatttcataaaatcccagaatttgagctgctcagggaatataggtgttctctaacccagggtttttgaacctcagccctattgatatttgtgataattctatgttatgaggggctgtcttgtgtgttttcagatgtttcataacatccctgtcctttacccactagatgcaaaagccccctacctccccaatgttgtga

SEQ ID NO: 833868 - DNA, 539 bp, Homo sapiens
tggtgtcttatgcctgtaatcccagcactttgggaggctgaggcgagaggatggcttgagcccaggggttcaagaccagcctggggarcatggtgagaccctgtctcaaaaaaaaaaaaaaaaaaatatatatatatatatatatataaaatacatatatatatatatataaaatacatatatatatatataaaatacatatatatatatataatacatatatatatactattaaataattttttttaaagttaaatttggaaggggatttgctggtccaccttcctcatttcatgcttgaaaaaacaggccaggggagattaaagtgactaactaaagtcacagacccagttaatcagagaacaggacccagaacctatgtatcttattttccaggttatgctgggtgtcattatatcctaatcagtgataacaaaaaacaaaattaaaaatcacggactccaccaacatcttaagatttaatatcacaagcaggttttaacgtaagcaccaagagaatggtggactagcccctaacc

SEQ ID NO: 833869 - DNA, 569 bp, Homo sapiens
ggggagacgggacaagtaagtaagggaatctgcacaggctgagcaaccccaccctcagccttgctgagttctctccacccagaggacactgtactcctgctctgggaagacagcgcctcccgccaggggattccgccaaccaccgctccctgcaatcggggttaccagtgatgattcttcccccagcatcaccctacggtgtcttggcagcctgcctccttcacagactgcctcgagagtccctcagagctatttccttaaagaccaaatgcgagcatatcttcactgacggggtttcagagcctcactttgcaagttttgaggcagaggctcaaactaattttgctgagaaggacaggagagctgagagaaaatcaaacagaacggcggctctcctcccattcatggcatgtaatgctctgggcccagctacatytgccatggcctccagggacctgctggaggggtctcccagccccacctggtataagccaagcctgctccagactcaggatctgcccagagggctgggatctcacagcctgaggtaagcatgagtcagtctgaat

SEQ ID NO: 833870 - DNA, 632 bp, Homo sapiens
caggcccagggctctactgtcctgcacagccttgggacactggtctctgcacccagctccggatgtggataaaaggggcccaggtacagcttgggctactgcttcagagggtgcaagtcataagtcttggtggcttccatgtgatgttaagcttgcaggtgcacagaatacaagagttgaggcttgggagtctccacctagatttcagaggatatatggaaaagcctggatgttcaggtagaagcctgctgcaggggtggagcccttatagagaacttctactagggcagtggggaggggaaatgtgaggctgaaacccccacacaaagtccccactggggcactgcctagtagagctgtgagaagagggccaccatcctccagatcccagaatggtagatccactagcagcttgcaccctgtgcctggaaaagctacaggcacaatgctcaaaactagcccatgagagtggctgcaggggctgaaccctgcaaagccataggggcagagctgcccaagaccttgggaggccacccctcacaccartgtgtcctggatgtgaggcatggagtcaaaggagattactgtgaagctttaagatttaatgattgccctgctggatttcagatttg

SEQ ID NO: 833871 - DNA, 545 bp, Homo sapiens
cctggccctaaatttttcttacgcatttctcatcttccattatttccatccagtgtgttttttcttttcttycttttcttttttttttttttggaggcggagtctcgctctgttgcccaggccggagtgcagtggcgcgatcttggctcactgcaagctctgcctcccgggttcatgccattctcctgcctcagcctcccgagtagctgggactacaggcgcctgccaccacgtctggctaattttttgtatttttagtagagatggggtttcaccgtgttagccaggatggtctcgatctcctgacctcatgatctgcccgccttggcctcccacagtgctgggattccaggcgtgagccacggcgcctggccagtgtgttttttcatttcagacattgtagtttttatctctagaagttcacctggggactcttaaatatcctccacaattctacttaattttttgaacataatgggatatggctataatatctgttttaccatccttgcctgctaattctagcatccgtgtcagttctggat

SEQ ID NO: 833872 - DNA, 481 bp, Homo sapiens
gtcaatttcaccttgttgggtgctggatatttttgtattcctctaaatgttcttgagctttgctcygggatgcagttaagcaacttagagtcagtttgatcgtttgaactcttaattgttttggtctcctcggactctcagctccatctcctcaacgtggggagtctcttgggctctgcctggacttccctttcctggcctgtaacctgcagactctctccaaacagtaagctggggtgatcggagggttcctgttgtttgcttcttatccctcagggatctttactcctccttgcctgatgtccagagtcttgaaagctgccatgttctatagttgtctgtttttgttttgattgtttctggggagagaagaactcttcccatcttgggcagaccctgtcttttatgttcaaacttttgcctaagaagcacattacatattttaactcatctaattatccgagcaatccaatcgggtagc

SEQ ID NO: 833873 - DNA, 542 bp, Homo sapiens
acctgagatcgggaattggagaccagcctgaccaacacggagaaacctcatctccactaaaaatacaaaattagccaggcgtgttggcrcatgcctgtaatcccagctacttgggaggctgaggcaggagaatcgcttgaacctgggaggcggaggttgtagtgagccaagatcgtgccattgcactccagcctggtcaaaaagagcaaaactctgtcttaaaaaaaaaaaaaaaaaaaaaagccaggcgtagtggctcatgcctgtaatcctagcactttgggaaggccaggcgggaggatcacctgaggtcaggagttcaagaccagcctggccaacatggtgaaaccttgtctctactaaaaatataaatattagccaggcatggtggcaggcacctgtaatcctagctactcgggagactgaggcaggagaattgcttgaaccgggaggcagagcttgcaatgagtcgagatcgtgtcactgcactccagcctgggcgaaagagcaagtctccatttcaaaaaataaaaataaacaaa

SEQ ID NO: 833874 - DNA, 622 bp, Homo sapiens
atttcagtggcatacaaaaacaaagattgatttctaggtcatgccacatgtaggcagctgggttctgcttcccatttctagactcaggctgaaggcacagttgccattgggaacatgccatttttatggaaaagataaaaacaagcaacaagatcactcttaaatatctgcatgaatataatatatgtcctttctttcttacatttttgacaaatgcaagtcaaagtgagcccaatatcagtggagtagtaaatattgacctcccatagaaagtagtgctctaggccaggcgtggtggctcacacctgtaatcccagcactttgggagaccaaggcgggcggatcacgaggtcagcagtttgagaccagcctgaccaacatggtgaaaccccgtctctactaaaaatacaaaaatcagccaggcatggtggcgagcgcctgtaatcccagctactcaggaggctgaggcaggagaatcacttgaacctgggaggcagagattgcagtgagccaagatcgcgccattgcactccagcctcggcgacagagcgagactccatctcacacacatacacacacacacacacacacacacacacacrcacacacaagtagtggtcta

SEQ ID NO: 833875 - DNA, 632 bp, Homo sapiens
tatttttacagcaaaatagaagtgaatctttataaaaaaatataatctatcgcrataccctttttatataggggaaacatgaggctcagaggttaaattaactgtccaagagtagtgcatctagtggacgactcatttaagattgtagtcaagttttttctaattctacagccactgttcttggatttgcatagccaagttgaagagaggggagacagacttagttctctcttctattattttttaatctttcattccaaatattttctaaaacatcacgtcaccttaaggatctaggaataatctttgatttaatcctcttcattttttcatattaaataaaactctacattgtctaatgcttaataatgatacaattttttgagcacttaacttgtgccaaacactatttcaaactctcttcacatactgttttatttaattttgaaccataagttttgtggtaggcatcatatcactttaaagacaaagggctacacatagtggctcatccatgtaatcctagagctttgggaggccaaggtaagaggattgcttgaggccgggagtttgaggccagcctgggcaataatagcaaggccttgtctctagaaaaaataaaaattagtagg

SEQ ID NO: 833876 - DNA, 468 bp, Homo sapiens
gctcattcttttcagttattttttaaaattgctttttaaaatgasagtcacagaagagaaagttcctatctctccccaaccagtgggttaaaagattgagttgaaccactactatgtaaaaaagattgtctacatgacaagacatacagagtgagaagaaaaataatttatccgatattttccattcaagggcaggtctttgttaacatcatttgcctcttcaagaaagaaaatggtcaaaggaaatgtcatattaatttatctgtgtggacatataagtaaaattctgttctcaaattaaagattatcgaacagactttgatctggtggtgtaaaaatcaacaaaatctatcgaacatctattctgagaaaccacaaggacacattggtcagtactggtttgccgcacagagacagaaagtaaaagctgaataatcttaacagagctaaggtggccttttcttgtgt

SEQ ID NO: 833877 - DNA, 339 bp, Homo sapiens
gggatccgttcggagaactaccagcttggcgggtgtggcccgggtcggtgagagcgaagagctctacggacccctggagcctccacgggtctcgcccagycccaggggactgtgggcccattcattccaccttccacttgctgcaaaataattccctacaaaacttaccggtagtgataggagttagaataacgtttacttctgaggggtggggcacgagggaacctatggaaagctggaaacattgcgtcttgatcctggtggtcgttccgggctgtgtacacatggaggaattcatcgagccggacacttaatagtattaccacattcatacggctc

SEQ ID NO: 833878 - DNA, 494 bp, Homo sapiens
actcagtgtcctttttagacccaggagtcaaagccctgtaactaaacagcaccaggactttaaaaacattacagaaagttacaaggatgtaataaccttcattaaaaatttttttatatcagctttcctaggcaaatcaaaacacagaacaatttagacatattaagaaatgccaggagcacagaatgttatattggatgaaaacatttcctttagacctttatgataaagcatttttagcatcaggctacaacagttaggacctgagggaaaaaatttatatgagctgacgaaaatgttgatggagagaattattctctcagtccttctcaaagaggagagaaagctgaaaatagcaagatgcaataaaagttgaacttttgagttaaaaaaattaaaatctcatgtaatgttattaacagtaaaataayaccttaagaaaattttgttctaaccaattctttagtgtattagtgcatttttaatatcaaaac

SEQ ID NO: 833879 - DNA, 590 bp, Homo sapiens
tagcatttgagttggtgtcaggagctgcctgtcaggcctggggtgtcccagtggtcagtgacagcatcaaggccrctgcagatataaatacaacataagtaaagacaatgggtttattagggtaaagtggcttcaagaaaagcctcctatcccaggtggccatagaaactcttttttttttttcctttttgagacggagtctcgctctgttgcccaggctggagtacaatggtgctatctcacctcactgcaacctctgcctcccaggttcaagtgagtctcctgcttcagcctcctgagtagctgggattacaggtgtgcaccaccatgcctggctaatttttgcatttttactagagatgaggtttcaccacgttggccaagctggtctcgaaatcctgatctcaagtgatccacctgccttggcctcccaaagtgctgggattacaggcatgagccaccacacctggcataaatctgtagccactgtttattgtgctcgctttacagatgaggaaacatgctcagcaaggaaactctggtctagtgagagtttgtaaatggcaaagtgaagttgcaaagtagagatg

SEQ ID NO: 833880 - DNA, 464 bp, Homo sapiens
ctcggcctcccaaagtgctgggattacaggcgtgagccaccgtgcccggccgctgctgaattgttttacattctcagggtttctgctcctgccgcccccgaccctggcacctggctgcgctcacacaaacatacaggggttgcctcctattcctcctggctcttcctggccttgctcacatccaccttccccccagagcctgggtgagtgttgatgctttctcagtccaacatcatttatttattttgagacagggtctggctctgtcacccaggctggagtgcagtggtgcaatctcggctcactgtagcctcaacctcacaggctcaagcgatcctcctacctcagcctccttagtagctgggamtataggcacacaccaccatgcctggcctgcgtcatcgtttaaggccctcagcctatctgtcattctttgtagaaatattctctcatcaggacctcac

SEQ ID NO: 833881 - DNA, 571 bp, Homo sapiens
cgggttgataaatgcaacaaaccaccatggcacagggatacctgtgtaacaaacctgcaygttcagcacgtgtatcccagaacttaaagtaaaataaaattaaaattaaaattaaaaaagagtttctctgagcctgtttctttgtttgccttgtgagagacaaaccactcttacaaatttctcaattcctctctacacacacacacacatccctctttaaaaagttaatattgcatacacagttgtttttttttttaccttgactcttaatagaacctgacattgttttatatcttcaggggaaaaataaaacatctggacaaaatgtgtcaatattaagaccattgctttggccgagcacagtggcttatgcctgtagtcccagtactttgtgggaccgaggtgagaggatctcttaagaccaggagttcaagagcagcccaggcaaaatagtgaaatcccatctctacaaaagtataaatacaaaaataaaaataaaattagctgtgtgtggtggcacactcctgtaattgcaactactcaggaagctgaggtgggaggatcacttgag

SEQ ID NO: 833882 - DNA, 628 bp, Homo sapiens
  misc_feature 595, 596, 597, 598, 599, 600, 601, 602, 603, 604, 605, 606,607, 608, 609, 610, 611, 612, 613, 614, 615, 616, 617, 618,619, 620, 621, 622, 623, 624, 625, 626, 627, 628: n = A,T,C or G
ggatattgaaaatgattgatcctaaaatttcaataacacgtaatcaagagcagacaaatatttttctttttaacattggttcagttgtcataaatagctttataactttatttgcacaaacaaggtattaacaggccattgggttcttttatttttttccctttgaagagtctcggcaaatgtaaataactttagtaagtcatcacacaaacactgagagtttgtgtgcagggaaaaatccctataagccttcataggtggtagtgattctcatgatgaatttctcatcattcaatgtctggttcttcaccttgcggtgtcgaaaacttgacagtcaattcaccaatagtgaatgtatctcaaaggtcagattcacattaaccatgttccaaaactaatacacaatgtcaaaaaagcctgtaaaccagattcctgtgaaactatttactcagcatattttcttcttgaaggtagaagtagacccacatgggaagccaggytgtaatgagaagtttgctgttgaatatggaatcaagattaagcacacaaaacgattgaagttttaatggcatctggcaaaaattaccataatacnnnnnnnnnnnnnnnnnnnnnnnnnnnnnnnnnn

SEQ ID NO: 833883 - DNA, 557 bp, Homo sapiens
gaatgatgatttccaatttcatccatgtccctacaaaggacatgaactcatcattttttatggctgcatagtattccatggtatatatgtgccacattttcttaatccagtctatcattgttggacatttggattggtcccaagtctttgctattgtgaatagtgccgcaataaacatacgtgtgcatgcgtctttatagcagcatgatttgttttctaggattttctttctcactttctactggttgcatttgccctcaactctgctgtctggtttttcaagtcagttaagaatggaggttttctaccagcgttttagcttttgcatatcgtggagaccagagcttgttctcaggtacaagtcgtaaattaggaaattcactcagggctgttgcttccttccaggagttgattttccttcactatctgctgcatctttttagtctccagaccttagttggctgttttacaataatttttccaggtttgaattgccattttcatgaggactgggccaactaggaactccccagccakaccagaagcaaggaaatatc

SEQ ID NO: 833884 - DNA, 598 bp, Homo sapiens
gtcagacctctggtaggtctagcaggttgatggttgctgactgatcagggtgatggctgctgaagtttggagtggatgcaacaatttcttaaaacaagaaaaaaatagagtttgctacattgattgactcttcctttcaaaaaatatattcatgtagcatgtgatgctgtttgatagcattttgcccacagtagaacttcttgcaaatatggagtcaatcctctcaaaccctactggtactttattagataagtttatagaatattctaagtactttgttgtcagttcaacagtgttgacagcatcttcaccagaaataagtttcatctcaagaaactattttctttgctcatccataagatgcaacccctcattcgttcaaattttattatgggattgaataatttgtttccatcttcagggtctacttgtactccagttctggtgcaatttcccccacatcwgcagtaactttctccactgaagtcttgaaccccctcaaagtcatccatgtggtttggattcaccttcttccacactctatgaatgttgatattttggccacctcccatgaaaattaatgttcttaattgtatct

SEQ ID NO: 833885 - DNA, 497 bp, Homo sapiens
ggccttcagctcctcaagtcccaaattattctctgatcctgatagacctggcccagagagagcagttggtggggaggctggtgagtaggcatctgtgtttctaacctagtgcgcccytgtgaggttctcagcagtgccagctcaagatgcctgaattcccaggccacttctgagaatggcagctgcactcttggagaaatgtgactaagggtccctgtcatgggcctggaagcaattttgttctgcttctttcttggttacatcttcacaggatttttcttcttagccacccagatgtcagagtcaactacatttctctttcttagtaagttggctctgtgttctcatatacaactgcatgatagcatttcagagcagtgagtctaccctcctgaaagcagaaattcagggaaagaaagaatatgtttttcatcatgtttttttaacatgtttcagtttctggtcatgccacaaatcttttgccttttctccaaggg

SEQ ID NO: 833886 - DNA, 610 bp, Homo sapiens
ttggtgcccaaaacatcagcagttttacataacattgctttggcaccatcagtgcaaatgtcaacccagtgaaaagatcaaataacacgttagctttattattaaaattgtttgacctgtgaactccctgaaacggtctcagggaccccccaccccataaggtctacagaccacacttggagaactactgcattagaccttgcatcacaatcctgggaattcagggaggtagcatggctttccaccaccagcaagtactacacagggtaagaatataaagaaacaggcatctcatttatgtcttagaagagcaattgaagtaactccatgaaagtaaatggttaatttaaaggcacagccacacaatgagtttctgatttgagaagacgaagggtcaaatgaccccatttctgcccccttcttatggctgctttcatcataacttagttcttccctctccttcttatctcccctgacctagaagagygtaggggacagagtttgcaagactgtacttaagccaaggtagtaaattcaaatgcctacaggggctgggcaatctatatgaacgaagtgctttacttaaaagaatgtgggtctaatgtctcca

SEQ ID NO: 833887 - DNA, 473 bp, Homo sapiens
agcactgattgtctgggacttgtacattttcaggtattgattcacgagtgcctcctacggtgctaataagggtgagctagaacgtcttcccttccttctcaggtagtggaaatgccctttaataatagtttataaaaaacagctttattgattttgggcctaagttcactgatgggaattactgggcagaaaggaaggagactgtagttggatgcaccttggaaagcatatcaaagacatggccacctactttttcagtatgttctacaaaacctaggcacacaggacctcattgtcaggagaacttgttgcgacatttcctgttccttatcatttggaaatattactatcaaagstgagctggaaattgactatcgggtttgcaaaatccagaagaatgaaggtctagaggtgtgtctgttcctctgtgttcaatacagcaactgttagccaggaatatgtattaaccaaag

SEQ ID NO: 833888 - DNA, 522 bp, Homo sapiens
attatatcaaatacatatgcatatataatacatttatatttatatagtctataatatatatatattwtttatatatatatatatgtagtacatctcccctccctcccatctctaggtccaagtcatggaacctctcccagccatttttctaggatggtttctcccttttccttccccttcccctttcccttcctcttcccttacgtttcctttctcagaacctctcccagatatcttttctaggatgatttctttctcctcttttctttttcttttcttttgttcttttcctctctttctccttccctccttccctcccttccttccttcctttcttttctttcctttcttcccatccctaggtccaagtcacagaacctctcccagccatttttctaaaatgatttctttctcctcttctttttcttttcttttgttcttttcctttctttctccttccctccctccctcccttccttcttttcttttctttctttcctttcttcccatccctaggtccaa

SEQ ID NO: 833889 - DNA, 522 bp, Homo sapiens
attatatcaaatacatatgcatatataatacatttatatttatatagtctataatatatatatattttwtatatatatatatatgtagtacatctcccctccctcccatctctaggtccaagtcatggaacctctcccagccatttttctaggatggtttctcccttttccttccccttcccctttcccttcctcttcccttacgtttcctttctcagaacctctcccagatatcttttctaggatgatttctttctcctcttttctttttcttttcttttgttcttttcctctctttctccttccctccttccctcccttccttccttcctttcttttctttcctttcttcccatccctaggtccaagtcacagaacctctcccagccatttttctaaaatgatttctttctcctcttctttttcttttcttttgttcttttcctttctttctccttccctccctccctcccttccttcttttcttttctttctttcctttcttcccatccctaggtccaa

SEQ ID NO: 833890 - DNA, 522 bp, Homo sapiens
attatatcaaatacatatgcatatataatacatttatatttatatagtctataatatatatatattttttatatatatatatatgtagtacrtctcccctccctcccatctctaggtccaagtcatggaacctctcccagccatttttctaggatggtttctcccttttccttccccttcccctttcccttcctcttcccttacgtttcctttctcagaacctctcccagatatcttttctaggatgatttctttctcctcttttctttttcttttcttttgttcttttcctctctttctccttccctccttccctcccttccttccttcctttcttttctttcctttcttcccatccctaggtccaagtcacagaacctctcccagccatttttctaaaatgatttctttctcctcttctttttcttttcttttgttcttttcctttctttctccttccctccctccctcccttccttcttttcttttctttctttcctttcttcccatccctaggtccaa

SEQ ID NO: 833891 - DNA, 624 bp, Homo sapiens
ggcaaccatgaagagcctctaattcaaatatttttttataagtttcgactcctccaggattttcaggcaggaaggaaagacaaacgataaagataggatatgcaagggaaggatccaaggcaacargctgattaatgcgggtcaggataaaaacaactcaatcaaaggagtggacaggaagcagaaactggggactgtcagacagcggaggaggagaagactctggttccagaggtcacgccagaaacagatgtccgctgaatgctcctgactcccgtggaaggacacagttgctggcagccatcaacacagaaacagtgaccatcaccctcagtgagtctgccattttcccacccatccccccttatctcattcacttctagactcatttttttctctagtcctccttgtttcccacgcgggtttagacagaaccattcattcgatggcttgcatcctgctttttccagcccaaccacttccctttcatctactcgacagatttagctcagcatgtcattttttttcctctttagcccttgagttgttcatctataaaacagaactgccctcttgctacattcccttccagttctacagttctctgaatcctccagtgcccca

SEQ ID NO: 833892 - DNA, 661 bp, Homo sapiens
catcagtgccatcctagctagacatgttggaactcagttctatgtcttcttcttattcagtcctcactcatccaatacacttggatcttcagtccagtccattttatctctgtgatgtctccyctttttgtatcattgcttataccagtactggttacagaaatagatcaggaaagggcctgtagaatactatggaacctgttgtagaaagctaatataagtatgggataaacatgtatacagaagtagtagttcctggggaaggctgagaatcacatctcaagttgattgtggcagcctaatttcagacaaaaattaagatatgggaatgggaagtgtaatgaggaatgtaggtttcttcagcacagtagtaatgagggaagagggttgttttggtgacagttgtggtgaaaaagacaggccaatacaggtcctgaaccaaggcagccaattcaagaagaggcaagagagcttggaaataattctgggggaaaagatagtgggaatgaggcacaaaagcaggccatagcccagctgtcagggtacagagctattcttctctctggtgctacaggcctgggggatgggggcagaactcaggtctcaaaaaggaggtcagcgtagaacagcctctctgtgtgggataagaagagatatggag

SEQ ID NO: 833893 - DNA, 470 bp, Homo sapiens
attggcagaccttcggtgcactgaatagcatgtggcctcttcacaagtagaaaagaaaggatacagagctggcaagggtgctgagtgtagtaaaattaatttcatctttaattaatgccagactcctactctggggggatattgtgtgaaataaaacttggactcaaaatccagaataacatcaatccaaccaagatgtactcaagcagctcctataaacagtatggagtaatgataatgatgaaaataataatattagaagaattgatgtagaagtggtatcagttatcgaacatacttttaaaacacagtaacaagtactttacatgtatcaactcatgaaatccttacaacaccactttmagagaagtactattgctgtctccattttacagacggaggaactgaagccccagagaaaggaagaaacttgtccactctaaaaaacaatggtctaggtaggagcctaa

SEQ ID NO: 833894 - DNA, 549 bp, Homo sapiens
tccagaaatctctcactatcttttactgcatgctgctaagtaagaaaaatttctacctgacatatgtactgacagattttgcttttatctatctatctatctatctatctatctatctatctatctrtctgtctatgtcatctaatctaatctaatctatcatttaggggatgggatctgaaactcatcactacctcaacatttttctgttaatcaagagctagggtcattaaaattgccaatattcaaagtaacccattaagtttaaaggattttaaaagaaaggacagatattgtactaccgcactgctttcttgacattccaataccagttgacaaagtagactactcctttcttgaaatatcttctaagacatcacttctgctggttttcctggtacacactgtactctcccagttagttcccatctcttttcttgattctaagtattatctccattttacactgggagctagccagtgagtcctagccactgtcaatacttagagatcaagaagagagaagggaaataatggggagagtacaat

SEQ ID NO: 833895 - DNA, 601 bp, Homo sapiens
agaaagagattgaatactcccttggaaaartatttgcaaacaaaaaatgaatagacagtggttcaattacatggaaatctctctaaataagggactctattcatcagtcaatcaagaaacattcctacacaacccattatgttttcagtggattgcgtcatatgttgtgaggatagaaaaccaatttgaaagagtttagatatgaaataactgttcaattatgtagctaactataagtctaatgagatttccgagggaataaaatggatgtggtttctttcagctatgtccctttaattacctggccctggccctggcccaccattagtgctggccatatgtaaaatgttccagaaacctgttaacttgcacatatttttctccagaagtatactgcttcaccctcttattaggtgctggtctcagcctacctattactgttgatcattctccaagccctctgctgcgcagatcttccagcttgtttacactaacctgcttctaatctttatctcaatttttggatcctgattctactctctcctcttctgggcattcccttggacagataagtcagtagagagcccaagtggcccccatt

SEQ ID NO: 833896 - DNA, 640 bp, Homo sapiens
atctttatctcaatttttggatcctgattctactctctcctcttctgggcattcccttggacagataagtcagtagagagcccaastggcccccatttcttctaactcctgcattttttcttgtgcattctgattataactcaatcccacagttgggaactagattttaccccatcagcccatcatccttgaggcacatgaaaataatggaatgtaaaagcatgtgagtgtgctgaatgttctagttctcaggaatgcgatgagaacttttcattcattgatgagagatgacctcttcgtagtgaaaacagatccctctcgagacacctggggaacaccttggtgaggttgactgctgtaagtacacatgacttaaccttgccaacaaggtacagtgccacatctggccatacctccaataagtacacctaaacaatttttagaaaactaggatgggctgcctcaatttctaatttatttggccagtttcacaagctgctcagttcctagttaagtcaagataagaagtatttctgatcttctgaacatgccctaaatgtaatgaagtgcttgatgcatgcctggcactccaaagaatcaaccttccacagtggctccaaggggctgggcttaatgaagc

SEQ ID NO: 833897 - DNA, 660 bp, Homo sapiens
acctgcttctaatctttatctcaatttttggatcctgattctactctctcctcttctgggcattcccttggacagataagtcagtagagagcccaagtggcccccatttcttctaactcctgcattttttcttgtgcattctgattataactcaatcccacagttgggaactagattttaccccatcagcccatcatccttgaggcacatgaaaataatggaatgtaaaagcatgtgagtgtgctgaatgttctagttctcaggaatgcgatgagaacttttcattcattgatgagagatgacctcttcgtagtgaaaacagatccctctcgagacacctggggaacaccttggtgaggttgactgctgtaagtacacatgacttaaccttgccaacaaggtacagtgccacatctggccatacctccaataagtacacctaaacaatttttagaaaactaggatgggctgcctcaatttctaatttatttggccagtttcacaagctgctcagttcctagttaagtcaagataagaagtatttctgatcttctgaacatgccctaaatgtaatgargtgcttgatgcatgcctggcactccaaagaatcaaccttccacagtggctccaaggggctgggcttaatgaagctgtgcctcc

SEQ ID NO: 833898 - DNA, 617 bp, Homo sapiens
ttcagtaactggttcagctcctggcacatggtaggcatttaattaaatttttatttttgcagtttaagtctacctccaatatttctgaaaaggaatttatatgctttgtagtcccattaagaatctaaatccataagagagaaggagatcagagaatcaggatacagacctcaaaagctcacctggctcaactgggattttaatttaatttaacagatgatgcaggttagagccaagggtcctaggatcccacagccaataagtgatgtagcaagggccccaatgtcccagaccagcacacttaatgtggtcagaaaaccagctaacatctcaaacacttattctggaattttctacacctgaagtccacaaagacaggcccagaagccacagaatacttgaaattatctggattactctcttgtgtctgtgtctgtattttggaaagttcattgtttgtgttgccaacagtcatcatcttcwgatgatactgttcactgaggatcatatttcccgtgaatcctggagatttttactttcttgatggtcagaagtaaatgtaggaagaagaccattgttctctggctccccagttggggctatgaactactagaatc

SEQ ID NO: 833899 - DNA, 587 bp, Homo sapiens
cattgaaatgcacagatgttttagtgaattgggaaaatggcctgctcatagagatcatatataataattgacaatgtgagtcagagttgggcctcattsagaattaatcttatcctcttaatgaaattgctgattgttttgacttgctcctctctgcctgtttcaagttgcctgacagtgtgttccaaagacagtcctgctggtctgaggctctattctcaagtgctgaattatagcgtccattaaggagttcagaagatctgtttggagaggcaggaatccagcaaagcttctaatttttccatgatgactgatggatttggagcactcttaaggggcggctgtataatgctaagtgtttagcatgtgccagatttgtcaccttacatgaaccctgtagctaccttttattccaatctcatcttcataggctaccaagaagtggtaggtgggaggggggaataggagggaactgctgcttccaagggaagaagatttctgactttgggagtagggagaggtgggagggaacgtgggcagtgaagggggaggcaccaaaaaaaaaaaaaaaccctgcctgtgtccta

SEQ ID NO: 833900 - DNA, 638 bp, Homo sapiens
ttgcactccagcctgggcaacaaacagtgaaactccatcaggcaacataatacagcagaaagtttattgaattagaaatcagaatgacttcattgagttttttaacctctctgccacacagtttcctcatctgtagaatgggaatattatcttccctggagttctctttgttgatgataaatattaaattatataacacatgtaaatattatcaattattaaatattaaagtgtagacactgaaacaaatgactgtttcagcccaagaagtgttacatggctatgattttggtattcttgtgtttactgtacctgcatcatgattccccaaagcagttagattatgtctaaagttacagcaaatagatcctgagtaaatggattctactttaaaaaaaagaaaaaagtcttacttttgttcatataggttttatttaaaattccacatatttttgatatctggagttctcttttgcttattttttccttctttgctctttttggctagttgagtttgatagatgggagatttctgagtcactgaagttttataatctgtgtaacttttttsagcatgaacacaaatgccatgaatatttaatgtaatatttcccatgttgactgtttctcaaaataga

SEQ ID NO: 833901 - DNA, 638 bp, Homo sapiens
ttgcactccagcctgggcaacaaacagtgaaactccatcaggcaacataatacagcagaaagtttattgaattagaaatcagaatgacttcattgagttttttaacctctctgccacacagtttcctcatctgtagaatgggaatattatcttccctggagttctctttgttgatgataaatattaaattatataacacatgtaaatattatcaattattaaatattaaagtgtagacactgaaacaaatgactgtttcagcccaagaagtgttacatggctatgattttggtattcttgtgtttactgtacctgcatcatgattccccaaagcagttagattatgtctaaagttacagcaaatagatcctgagtaaatggattctactttaaaaaaaagaaaaaagtcttacttttgttcatataggttttatttaaaattccacatatttttgatatctggagttctcttttgcttattttttccttctttgctctttttggctagttgagtttgatagatgggagatttctgagtcactgaagttttataatctgtgtaacttttttcagcatgaacacaaatgccatgaayatttaatgtaatatttcccatgttgactgtttctcaaaataga

SEQ ID NO: 833902 - DNA, 649 bp, Homo sapiens
ggagaagacgtttcctgaaccaaagctgtaaggccgagtagacaaatggcattggtgaattaaggttatgtcctaaataagcacgttttcccccaggaaaattctagacacttttgttcctagcatcaggttaagaatgctatttcttcagagtcaataataaatgagtactttttttaaaaaattcaagttgatgtatgaaaacgttatcttacttggagttttaatatgcaaatacagaacttttaacattagtggtgacattgccttaggagagtctgaagaaaaactaaggctgcaatcataaggcaagcagattataaccctgtggaggctggcaaccaaggagcaagagatctgagaatgttctttctaaatccaacatcttacacaagtcttgtggcttaaagttatctagtgaagattagcaaagtggatccaataatgagcttttgttaaaaaatggaagattttagttgcaagctacatttcaaaaagagcacgttttacatactagaactttkaaaaagtttatttcaggttgaagaattatattttcatagtattctagcataatcatgctacttaaggaatgagatttttaacaaagccatattcaatagcgctgtactgcttcataatcatggta

SEQ ID NO: 833903 - DNA, 614 bp, Homo sapiens
gttctcccttttccctgaactcccagctagcttctgtggaaattgtgacatacttttctgcaactaaccacttaatttattttcttttaaaaaataataatagtaattgtayatttatttcttcagacccctcttttgagaccttttgcctctctgtgccttcatgaagtctaatcgatgccctctatcagagctttgcagagtgctggagcagcatcaatccttttgaacagaggtttggctgccatcgcgcagggccaggactcaggccaggaaagtgaggtgcttaggctgcgcacttcacagcatcacagggttgttcaagtgctgatgttgagccacaaatagtctaatattactgaaaacttagggataaggatgtggaatagtgagaggtcagactggacaggcaggtgagggcctgatcatggacagccttctatgtcctggaatgcaatcagactctatcctcaaagcaaagtggagccaagtgcagtgtggatcaggagagaaacgtgatttcagatgggcatgttagaatgactgacttcatatcagcctagagaatcagctggaaagagcaagaaaccaaagacagaaaagagtttagactg

SEQ ID NO: 833904 - DNA, 628 bp, Homo sapiens
tttctaaatttttcattcagaacatacagcttgatastcaagtgggaggttttcaggccatccaataatacttcagttgagtaccattaattttattttgaatttgatatttctatgttttaattataaaccttatctacatactgaaacataaatatatagaacctacattgacccccaaatataaaacatctgaaatatgggcatttcctgtttcttttctgaggcaataaggtgagttgagaatcaacagaagagacatgaatggaaaaaaaagataatatctctagggtttaagttatttttatctttaattatcacaaattaccctggattgtttctcaagcctacataaatatcacttttttggcttttattctttttaatgaggttcagaattttctaattttagtacaatgaacacatactattctcacatagcaaatgttaaggaaagtctttaaaagtaaaatacgtttaagaacaacagcaacaacttcctaagaaaagctttaattcaggcttcaattctacctctcatcccatttctctttccttatgatttttgaacattgataggaataattgttgaaaggacacaaaggcataagaatgatacaatggactt

SEQ ID NO: 833905 - DNA, 630 bp, Homo sapiens
aaacagaaggaaatggtaacaaacaatacctgattctagcagtagagcagaggagctcacactgcccagtttaactcttggctttgccactttctagctactgctgcagtttccttatctgtcatatgaggataagaacagtacctttttaaaagcttgctggagagattaaatgagatgatacatgggcaatgcttaggactgcatttagtacatagtaatccctcggaaatgaatgctattaatataactgttaatattgttgactctttcagatttctgcaaaaggcattatctctatctacaaagaaacacttggggcaactcattctttttctcaaaccagcacatttctggggaataatgtgggatttaagcaataagttgtcatctaagacaaagcaattcagagggtgaattattccaggcatgtcttgactgaaatggccctaaaatgttcctttgtgcccaaagtttattataaaacatccatcagagtcttacaagtatactccaaaccacaagggctgttaaatctccaatccacccactttcaacctcagaaacttctcaactccatgctccaggcrgccagcaccaatcagctgaggttggcaaggggataaaaca

SEQ ID NO: 833906 - DNA, 635 bp, Homo sapiens
aggaacatatggatatcacaaaatacatagtccctagtacagtcaactggcctattgtgaccttcattaaaatatttgtctttaaggtcttacaattcttcttggggccacactcagtctcactattccttactgtcaggatcccaaaggactccaagcagccaaagcttcccaccacaattctatccccaccatgcctgtcatctttccgagacaatgctcctatattctacaccccttctaatcacagccagtgcataaaaacttaactctcctggccaggcgcggtggctcacacctgtaatcccagcactttgggaggctgaggcgggtggatcacttcaggtcaggagctcgtgaccagcctgaccaacatggtgaaacctcatctctactaaagaaaaaaaatacaaagttagccggccgtcgtggtgggcgcctgtaatcccagctgcttgggaggctgaggcaggagaatggcttgacccaggaggcagaggttccagtaagctgagatcgcaccactgcactccaggctggggaacaagagcgaaactctgtctcaaaaaaaaaaaamaaaaaacaaacaaacaaacaaacaaacaaaaaacttaactctcctatgtttccttatc

SEQ ID NO: 833907 - DNA, 646 bp, Homo sapiens
tgtggaagtgtctttgtttggtgcagtgattggcagtggctacctgcacttgcaggcaggggcggagatgttggaggtctctcratgcctgaggacagccctccccaataaataactgtcccatcttccacaaggagaaaggcctgtttgtaatcatctgactctacaaccaaaccccattttgtagataaacacacagcatgtttgcacgatttcaatgtacatggagtttccggcgttgtagttacaatgggaaaggagggaagcttgcactgtgtttagtttggagtggtgtcaaccatcagccactgtcttgaaaaacatcgtcatccacggcaatgccctgtgtggtactggagttcccagcaccgtacacggacaccatctgcagcttgcagctgtcagacatgctgtgattacagatatgtacatcctcaaaaggacatatttagcctttactgcaaaatgtcaaagacagatgaaaatgtctattttagctgaatatggtcctacttcccttatagccaggtttacttttttctttttgttaactttatttttgtttaattgatacataggagatctccctagtttcccacgcatgtgtaatttagtacgcctatcatttgtaaaggccaaatcagat

SEQ ID NO: 833908 - DNA, 646 bp, Homo sapiens
tgtggaagtgtctttgtttggtgcagtgattggcagtggctacctgcacttgcaggcaggggcggagatgttggaggtctctcgatrcctgaggacagccctccccaataaataactgtcccatcttccacaaggagaaaggcctgtttgtaatcatctgactctacaaccaaaccccattttgtagataaacacacagcatgtttgcacgatttcaatgtacatggagtttccggcgttgtagttacaatgggaaaggagggaagcttgcactgtgtttagtttggagtggtgtcaaccatcagccactgtcttgaaaaacatcgtcatccacggcaatgccctgtgtggtactggagttcccagcaccgtacacggacaccatctgcagcttgcagctgtcagacatgctgtgattacagatatgtacatcctcaaaaggacatatttagcctttactgcaaaatgtcaaagacagatgaaaatgtctattttagctgaatatggtcctacttcccttatagccaggtttacttttttctttttgttaactttatttttgtttaattgatacataggagatctccctagtttcccacgcatgtgtaatttagtacgcctatcatttgtaaaggccaaatcagat

SEQ ID NO: 833909 - DNA, 580 bp, Homo sapiens
agagggatccaccgctgtatgattggtaccagcctgttayggggttgaattttgtcccccacccaaaaagctgcggtaagtcctgaccccaggaccttggaattggccttatttggatggagggtctttccagaagtaacaaagctgaagtgaggtcagtagggtagaccctagtcctcatcagaagggagaacttggacacaaagaaacccacaaagggaaggcgatgtgaagacacagaaagaaacgcccacctacaagccacagagtgaggcctggaacacgtcctccctccccacacagcctcagagggaaccagccctgctgttgctatgatctcagatttgcagcctccagagccatgagataatacgtgtccgtgctttaagccgcccagtctgtggcactttgttatggtagcctgagcagactaacacaggccccaggctggacacaacacaaatgcccgtcaggaggtgcgcaggtaagtaagtggcggtgaatttatacaaggcagccgtgaaaccgaactacctccaactagaggcaacatggaaaattctcagacatgaagtccagc

SEQ ID NO: 833910 - DNA, 591 bp, Homo sapiens; identical to SEQ ID NO: 833173

SEQ ID NO: 833911 - DNA, 529 bp, Homo sapiens
taaaaatacaaaattaaccaggcatgctggcacatgcctgtaattccagctacttgggagactgaggcaggagaatctcttgaacccgggaggcggaggttgtagtgagctgagatcacgccattgcactgyagcctgggtagcaagagcgaaaaactgtttcccctcctccccccgcaaaaaaaagaaaagaaagaaaacattgggaggccaaggcgggtggatcacgaggtcaggaggtcgagaccacggtgaaaccccgtctctactaaaaatacaacaacaacaataaaattagccgtgcgtggtgacgggcgcctgtagtcccagctactcgggaggctgaggcaggagaatggcatgaaccaggaaggcgagcttgcagtcagccgagatcgcgccactgcactccagcctgggcgacagagcgagactctgtctcaaaaaaaaaaaagaaagaaaaaagaaaaagagaagaaattccctgtgttagaggaagacttaagatgaaagtttctgcttttgtcca

SEQ ID NO: 833912 - DNA, 609 bp, Homo sapiens
acaaaaattgatgatatatttggacataaaaaagtctcaacagtacacatggacacaaagaagtgaacaatagatgccgaggcctacttaagggtggaaggtacagggatgttgagaactgatcaactacctattggttactgtgcatattacctgagtattaaagtaatctgtccaccaaactctcatgacacacaatttacctatgcaacaaacctgcacatgtacccaccgaacctaaaataaaagttagaaaaaaagaatttcaacaaatttcaaaaagtaggtgtcatacagacaatatctgccacaatgcaactatggcaaacactagtagaaaacatttctaaagaaaaatccccatatatttgaaggaaaatcttatttttaataatttgtgcattaattaagaaattataataaaattttaagtaaaagtttagaaccaataaggcatgagataagtgaatactatttaaaaaaatatgttgggacttcyggtttccagttctgcagacaaggaagttggagggtgccattttgtcctaacaacaagaaaaaacactaaattgactgaaaagcaacaactcttcctggatccataaaaga

SEQ ID NO: 833913 - DNA, 630 bp, Homo sapiens
cttaattattacacattctatgatgtaacaaaatatcacctgtatccaatacatatgtaaaatattataaatcaaatcaaataaaacgtttttccaaaggaattyaggttaaagttggtgctttgcttttgaaatgaatgtcagttacccaaaatggtatttaagatatgtagcctggtttgggggggcagggtggtatttcccattatagagttctttagccttttgtagtgatagagttattctgtatggactactgcaaagagagaaatgttactgttccacgtgatactcattagacagaaatccttttgtttaaccaataattttaactagctcatccaaatattgttttatataaatgacctcttgaattgcaataaggaaataataatattctcagtcatatctgaagtgatattactaaataataattcaatataaaatataagagaattaactgtgtcattggcttctacatattccttagatattaaaatattttgtgtagaaactccaagtcctcctctatactgatatttttcctatagcatctcagatttaacaaaacttgtagggaataaaatgaatctgtgtttctaagagttactgtaaaattaaaaaagaaag

SEQ ID NO: 833914 - DNA, 626 bp, Homo sapiens
cactttgtataagtatataaagagaaaatgaaaatgagtttgcaaatcatgcttagcataagtctgagaacttgcttactgtttgttattccattaggaattttatttgaattgttgcttcagtctcaccccayctctctgttggttttcaaagatgagttcagaatgattgaacttaatgtttaatggcttcaattgtgagggcagctaagtggctatatacttaaagaacaagagtaataaacatactttccttcatttgctgttctgccatactattagtctaccaaaaaaagtttaagttttaagtgacgagtaacaaattgatgacatgcactcttgactaattaggtgaatccctcattctatatggtacttgagctttaataagaaaaataatatcagcataataacaataacctgatattatccatttaaagtatctacttcactgccattgaatatagcaattaggaggacaggtcctaatgacaatatttagctagtaccgtttcagtgatataaacctttcaaatctgctcatcatcacctcttcttcctgagaataactttttttctcagtattaattaactattccaaaacttagtaagcttctcattcacct

SEQ ID NO: 833915 - DNA, 621 bp, Homo sapiens
tggtggctgggttccgagagcaagtgtcctagaaaagagctgggcaggtgttataatcctttttatgatctctgaagtcatgcagtagtattcagtaacactctatttattagaattaagtcactaaggccagcccatattcaaggggcagggagtttagactccatgtcttgatgagaggagtgtcaagggatttgaagatactacacatataaatgctaattagctgcttgttttaagcatttagtgtattttgaaaaagcctcagaaagaaagagaatgagagtggtacacagtcttacaaggtctgaatagaagtcaggaataatgctaaagagtcaattaaccataaaagatgctacccatggctgcttatttcgcaagtgtttgtgatcttcttttacaatctctttttaggagataaaattgagctattttgtctagaaaggtgtagtaggtcagtgcttctcctactttatgggcacacaaactyctcgggatattgttaaaatgcagattctgattcagtaggtctgaggtgggcatcacattctgcatttctaggaagctacaggggggatactgcagctccatgagccacccattgaacagcaagttagc

SEQ ID NO: 833916 - DNA, 551 bp, Homo sapiens
ggcttggcttgcccaacctctactccacattacttcatgggtgccttcctgggctgcagaaggtagaaagctatctttcccaacttttgcgcaagggttccagatgcacaaaatagatgcattcttctaagacacagaaattgaaaatggggttgaggccatctacctgcctttttctagttgttttttttctactggtaagcaattttgcacagactgttttctataacagagtttctgtgtccattgtctagcctgagtgttaagaggcagttgcagtggcagcatctaggatggcttcctgattcttcattggtggatggcaagatattcttgggctgaataattccaggacagtactatggtcttctgggaatcattcctggtgggccagtctatagccgattcttttggccctttcatgatttttttcctaattacttatggcttttagcctattctttctgtcttaagatgactacattggtttctgttttctgcactgaaccttgactgatacgggccttggwaaatattgctgggacatggaa

SEQ ID NO: 833917 - DNA, 586 bp, Homo sapiens
tacttaattattgtaataaccttataaggtacattattattacctcttttttacatgaggaactgaagcaaagggaagttatataatttgtccaagtttacaaagttagtaagtattggatccaaatactgacccatcttggtataactccaaaaactcagctcttaatcactgtacaataccaaggttaaaaaggcgtatgcctcaatatgtcccaaataaatgatacaatacacaatggagaagacacggcttaacagcccacattttaaaaacgttttttgtttttgagaataagcacaatatgggtcagcagagtgatttgtaacaaagtgactgccaaaaaaacatgctctatctcaagctgcattaatagaaatattgtatcaaggagccatggtcgtgctgttctgcacactgcctcagctcccacctgctctgtatatcacacatcaaggagcacatccacaaagacaataggcagggtttgagagaccaagaatcaacaatggtycctaggaagaaagttttaaggacttgggactattagcttggaaaatggacaactcaattcagggggcagtca

SEQ ID NO: 833918 - DNA, 594 bp, Homo sapiens
aatcgtagaacacatctgtagtcctggctactcaaaaggctgaaaagggaaaggttgcttgagcccaggagtttgaggctgcagtgagctataatcacatcattgcactctgcctgggtgacagagagagagtctatctctaaaaaaaaaaaaaaagtgctgttcaaccaaaaatcctataaactaaggtagtgaagttactgactgggggtagatatttgcaacatatataaacaacctaggatcagtatttcaaatttataaagaattcctacaaattaacacagaaaatgacaataactaatagaaacgtagacaaaagattcaagcaggcaatttccagaagagaccagattggactgaccaatcaagaaattaataagatgctcgacttttctggaaattgttgaaatttatgtaaaaacattgagataatgtttcacacctatcagactgctaaaacattttaaattcttaaaataacaygtgttggcaaatatacttagaaagggaaattcttagaccctattgtctgaatagattactaaaaccaatttgcagagcaattttttagtatctagtaagtaaaaatat

SEQ ID NO: 833919 - DNA, 585 bp, Homo sapiens
gtgctacacacttttaaacaatcagatctcatgatagcttcctcaagagacagcactaaggagatggtgytaaatcattagaaaccacccccataatccaaccacctctcatcagggcctacctccaacactcaggatcacaatccaacatgagacttcaatgaggacacagagccaaactgtatcattccatccctggcccctcccaaatctcatgcccttctcacatttcaaaacacaatcatgccttcccaacagtcccctaacgccttaactcattccagcattaactgaaaagtccaagtccaaagtctcatctgaggcaaggcaagtcctttctgcctatgagcctgtaaaataaaaaaacaagctagttactttcaagatacgaatgacgtacagggattaggttaatagactcattccaagagagagaaatctgccaaaacaaaggatctataggacccatgcaagtcccaaaattagcagggtagtcattaaattttaaagttccaaaataatcttctttgactccatgcttcacatcctggccacagtgatgcaaggggtgtgcttccaaggcct

SEQ ID NO: 833920 - DNA, 573 bp, Homo sapiens
ttgcaggaaaaagttttctttgacaaacctgtcctttcaacataattratgagttggttccagcctggttccttgtgacccatccagcactgagtaggaaatgacacagaaaatgaatgttgtggtctcatttgtcagccagggccactagtttcttgcaggatacctgaattttcttctgtgcttttctcacatgtgcccatccctccttttctttcagtgcctttctctccctttaaccaccagggcgactgcccttttattagtttcttagcgttagttctaaagagtctgatggcctcttgtaacgtacatattgagcttccatagcaaagaatacaaatcatcacaaatcacaatagtccaataagaaagaatattgatctttccaaagtaatttcagtcatatatgactgagctcaattttaaatatgtatttcagtgtcgacttacccaacacactgaacctgcttctctgatctggtattagacttgtactctgcctacagaccagtgcctaggttagttcatccataaagggaccaaaagcagtgaccactcctcctggggtga

SEQ ID NO: 833921 - DNA, 607 bp, Homo sapiens
ttgagggtagtgactacatcctattcttttttctgtttcctgtagcacctagcagaaactctactgtatagaaggtrttcagctagctgttcaatgactagatggacagatgaatgagtgaatattttatttcctgttctgattttggtaggattcttaagtccataattccctaatctgcccactttgctcagagatacaaatttcaaaattccccttaaccttggagagaccctagggaagggcagcattagcttaagcagtgggagacattttttcagtgtaggatcttttttcctgtgtgttttaacctcttagagagaacgtgggttctttattcctgctgtggcacggtcctgtttttattagcgtacccaactagactgcagcacatatgttacaatgagccatgccacatgcaaagataaacaaatgtgatgttaatgagatttgagtgtagaatctgtttttctcttctatagcctccagagttttagagaattttgtcactgtcccatttaactggcatctttcttaaagggctggctttattcataccaattattttctcattctctccctgattcctttcactcaaattcagtaa

SEQ ID NO: 833922 - DNA, 625 bp, Homo sapiens
tcacttttgcaaaactgaaaagtggagatgtttgtatcaaaagcaccttttcaatgtgccctatcccattctcctccataaaggaagataattttgcttcaaaacttattctttgcatttacctacatacacgtacatataaaaaagaagtacattttttcaatgcatttatgaaatgaaaataatcacaatatgcatattgttctatatgctgcttttctcacggacacacacatctcttcataacagaatatactggcctatcttatttttaatggggttataatattctagtacaggtgcggcccataccttttagaacctttcctctactgatagaatattagattattcatgattttttcatattacaaacaaagctacaatgaatatctctgaatacacttcattatatacttgtttaaagtttttaaatgatagagtcttagaccacaaaaaggctaggtgaatatttttttttcttgaagtgtaccacatactggatgcaatgctccatttayttcacaagatgatcaagtctaaagggtggatatgtgagacacttagcattatgattcaattctaattttcatcaggaacttggaagacccatgagctgtttaga

SEQ ID NO: 833923 - DNA, 648 bp, Homo sapiens
tttgggatccttcagcacaggaattctcaagacctgagtattttttataataggaatgtccaccatgaacttgatacgtccgtgtgtcccagatgctgtcattagtctatatggttctccaagaaactgaatgaatccattggagaagcggtggataactagccagacaaaatttgagaatacataaacaacgcattgccacggaaacatacagaggatgccttttctgtgattgggtgggattttttccctttttatgtgggatatagtagttacttgtgacaagaataattttggaataatttctattaatatcaactctgaagctaattgtactaatctgagattgtgtttgttcataataaaagtgaagtgaatctgattgcactgggtctgggagtttcttttggctgtgattcaaagtcttgggatttgtctctggctcatatctatgtctgtacctttaagagtataaaagaagtagaagttacaatggttgactcataccccattaacctgccctgctgtcctaaaggtaacttwaggttaaactctgggaagcaggaagccaggagtctgctgccattaaatcaaacacattaacaccagctggcaacttggccctggggaagtgccagggttctcggg

SEQ ID NO: 833924 - DNA, 621 bp, Homo sapiens
cttctgcctcagcctccgagtagctgagactacaggyatgcatcatcacgcctggctaattttttttagttttatttttgaagaggccggtctcactatgttggtcagggtggtctcaaactcctgggctcaagcgatcctcccaaagtgctcggattacaggcatgagccaccacacccagcctagcttttactatattttatctgataatccttttatggaaaaaagaagggcagactcttttacagtttgaagaagctccatattccatcaggagccatcttgagcaatacttgggtttctaagagctccccagagccagttctccagctcaccttgctttctaatctaaggttgccctcaccttggacaagaagcacgagtccctcagagtaattcagagtatccaaactcaaaagtctatgtacatggaggccttgctagaccttaatggtgacattttcatcaatatccggttttctgccatgagtccctatccctctttttcttaacatattcaagccagaatattttttcagccattctgtaactgcacagtttcttccaagtctctactttgtctcccattaactaggatccaatatatttatgtatttatt

SEQ ID NO: 833925 - DNA, 619 bp, Homo sapiens
cagcaacatggatgcaactggtggccattatcctaagcaaattagcacaggaacagaaaaccaaatactgcatgttctcacttataagtgcaagctaaacattgggtagataaggacataaagatgggaaaaatagacactgggagctacttagagaaaggagagagggaggaaggaaaggtcttaaaaattacctgtcctgtccggtacaatgtttactacctgggtgatgggattattcacaccccaaacctcagtgttttatagatatagatatagatatagatatagatatagatatagatatagatatagatatagatatagatatacacatatagatatgatcaatgtttgaggtggtgaataggctaattgccctgatctgattattatacattatatgtatcaaaacatcactatgtaccccatgaatatgtacaagtattatttgttgatttttaaaaagtacattttttaaaaaagcagagacaattaaaaaagcatcaacattgaagtcagatgaaagaaaataaatgttgaaaagtgtatgtgtatatatatatatatatatatakagagagagagagagagagagagaggaacttagggttagggg

SEQ ID NO: 833926 - DNA, 631 bp, Homo sapiens
gttgcccagtggccttctagatacttgcatgcttccccttttgtcaccctatcctctttctccactagcagtgagaatgaggrtgttaaaatccgagtcaaatcatttcactctcccactcaagatcctccaatagtgtcccatctcacttgaataaaatccaaaatacttatggtgatttccagagccttatattctcgaaactgtggctgcctctctgatctcatttccttccattcctatcatatttagccctctggctaagctggcactgcccttcgtgcagttcttcctgctacgcctggaatttgcacttgcctttacctggaactttcaactctcacatcttcatagacttctccccaacgctttccagttccccgtgcctgtatcattgccctagaaggctttttgctgggtaagaacagccggtgcctcatgactcaggcattttgcactgtcaaatgtttcttcacagcacttattattatctgacatatattatgtttttcttatttatttattgtctgtctctctcatcccctgtcccaacccacgcccccacaccatattctccccctgtagaagggaagctccaggagagcaaaagctttgtcatttttgttcctgg

SEQ ID NO: 833927 - DNA, 502 bp, Homo sapiens
tctaatgacacaaaaagattcttgagtgctttccaaatcaagcactattaaaaattaacatgaatattaattttaatatgaatcactaaaacattaatatagactaattttaatatagaataatatattttcataacatatataaatatattaatatagaataatatattaatatattcataacatatataaatatattaatatagaataatatattaataacatatataaatatattaatatagaataatatattattaatgtagaatgatatacttagtctatattaataaatattctgtattaatatgttccatattgttttagtgattattgaaatggggcaatccatgtatagtgactctttatggagaagacaacttgtctatgatggttacaatgataatattagtwagtagagaaaagagaggaagaaattgagaggataaaagaaaggaaggttgattctttgttagcttcaaagaggaacttagtctaggtt

SEQ ID NO: 833928 - DNA, 463 bp, Homo sapiens
  misc_feature 1, 2, 3, 4: n = A,T,C or G
nnnnaccttccagccccgggtgaagatctatccattcatcatccatccattatcacccatccatccattatccacccactcactcacccatcatctactcacccatccatctatctacccatcatccatccatccaaccatccagtaattactgagtggccatgatgggctagaccctgtgcaacacactgaggataaagtagaaaacatgatagtctgtgtacccgagcagattgctggatatcagagcagggagatgtcagggagtggggaagaaatcccaccagttcatcagtttcttgaaataggcccagattcagaatgaaatcctccctgaagtctttgattcgatgggratggtagagaagcacaggaaagcaaagcacagcccagctgagaagctgcaagagatgtcatcccttccagcctgtccctctcctagtccttgtgtgctgacccatga

SEQ ID NO: 833929 - DNA, 623 bp, Homo sapiens
gcactttgcagcctccgtctgggatcctcttggctttgttctgcctcctcctgcttggatggtgcagcctctgcttgaagaggtgttctgggagattatgaaccaacatttatagaccgcacctctcctgagatgctcctttggcattttgtaaaacttttaagtgagaaagcgtagggtacagttctcagcacagactgaaggaatctgaggtgggaagaatgcagatggttgtccgaggcagcatcttgccagcctgccagcacagaaatggagagtctgggtgttggtggcaccgcatgtgtctctgtctaagacctctttctcaattgtgcatctgctgaacggtcagtctttaggtacttgatcaaggttggctgtgtgacaaattggagtttttcttatgctttaaattatttgttaacattcagaaggttcttaaaggtggctaaatgtacaataaaactaccctcttacaactgagatgccagttggggtgaattttcaaagtattgtctgatgatgtagagtgcacagggagtctttccactttaaggcaagtcatctagttaayttttcttagtctcatgcttgattcttctccctccttttcttcaccgtct

SEQ ID NO: 833930 - DNA, 576 bp, Homo sapiens
tttgacagatttgttgttgttgttgttgagaaagagcctcactctgttgcccaggctggagtgcagtggtgtgatcttggtcactgcagcctctgccgcctggattcaagtgattctcctgcctcagcctcccgagtagctgggattactggcacctgccactgcgcctggctaatttctgtagttttagtcgagactgggtttcaccatcttgcccaggctggtcttgaactcctgacctcgtgatccacccgcctcggcctcccaaagtgttgggattacaggcgtgagccactgcgcctggccgtgtgacagattgaaacccacacatgaacagcccattttaccaactggcttgactctgcctgactgagacacttagccgctagtggagggaagaatggtctaccttgagatttccttctttctcttaagaataaacaatgacaaaagatgggtgtaagaagaaaaagaggacggtaaaggctaagcccatcttcccaggaataactggtcccctgcacttataaaatgccctgtrttttataagtgtggtataagtaaaaaatactctaa

SEQ ID NO: 833931 - DNA, 631 bp, Homo sapiens
tactgctaacacggcattagtgagagagtaaaaaaaaaaartattttctcaaaaagtgctatcattttagaataaacttatactaaaaacttctttataaaccctttacacactttttattctgagacaattcaaaaaaactaaaagaaaaaggattattgtttattcatcttataagccaccctcttgaaaagttacggcctttatagccagtataatctgtattacactgaggtaacagaataaaaagcaaattccttctgttgggccttgccttatccagtaatagtgttcagctttgactttttttgtaggtcacataattgagtccagtattcttaaataacaccttgtctttatatcgataagcatttaaaatattcgatttattgttactcttgtaccttcattgtactggaagaagaattttctctcaaagaagaattttctctctcattccataaaacccaagttgcagagaaaaatatgtagacattcaattgcagagaaatgtgtcattttctgtaactttaaactgtatattgaatgaattcagcaatgttttcattttcattttggctttttggcaaatattaacaggctcaagtttgtccatgtactatcatctatg

SEQ ID NO: 833932 - DNA, 566 bp, Homo sapiens
atataaaatttctattaacctagaaagttctcttctggtcttttaaggaggtatagaagctaagatcactactgatcttatttccactagtgkggatcaatttttgacagattttaaatatcctattaaaggagtaatatatatgtagttttatcgtttctcccctttcacacacacatacacacaaataaaaataaagaaaaattttcaaaatgtattaattttgctgcacatatgcattttacccccaacccccgagttggattccctttaatggatatgtgaccataagtttatctatttatctcttgataggaatttggattctgcccagtttttaactattctcaataaagtcactaaaatatttagtcagaagttttcatgtggacatatgtttacatatatctggtgtaaatacctaggagtggaatagctaggccatatggtatgtgtatatacactgccaaactgttttccaaaatagttccttccagacatatgagagttccaattgctccagtacttaccaacatttggcctgtgtctttatttttgttatttta

SEQ ID NO: 833933 - DNA, 465 bp, Homo sapiens
ttcatgaggcagcgtgagtacaacatcatgaaaaaattggagccagaatcatccagmaaatttactcttgaattcctgatcagataattgtgaaacaaatgtcttgttttaaagttctaaatttaggaaaaattttaattgttatgggcatcacatagttctgtaaagagaaaaatgggtgacagaaacatttgtgatacctttttattcatcacaatccacaaactccctgtttgctagaggtaaattacagtaactctcaaattacaaatttttgtttgaagagtaggatatttcctattagaactactcaagcaaaaacactttcttgtttctctgtctatgaggtatgctcttaatattgccactttatttaattttcagaatcgacttaatacatttatgaaagaaaaatgcctgtttggattccctactattccgtaaaaaccccaagcttcctgtcct

SEQ ID NO: 833934 - DNA, 465 bp, Homo sapiens
ttcatgaggcagcgtgagtacaacatcatgaaaaaattggagccagaatcatccagcaaatttactcttgaattcctgatcagataattgtgaaacaaatgtcttgttttaaagtyctaaatttaggaaaaattttaattgttatgggcatcacatagttctgtaaagagaaaaatgggtgacagaaacatttgtgatacctttttattcatcacaatccacaaactccctgtttgctagaggtaaattacagtaactctcaaattacaaatttttgtttgaagagtaggatatttcctattagaactactcaagcaaaaacactttcttgtttctctgtctatgaggtatgctcttaatattgccactttatttaattttcagaatcgacttaatacatttatgaaagaaaaatgcctgtttggattccctactattccgtaaaaaccccaagcttcctgtcct

SEQ ID NO: 833935 - DNA, 591 bp, Homo sapiens
ttaggttttcaaagtcctctttctgaatatttggacaatttactatgatgtgatcaagttccttttgctttactttctaaagtataacaagtctacctttctagacatgaaacttatcagatataccattaattgaacatattggactgaagttatttttgtactagaacctcagttataattataaaaaaaatctgtaattcacaaatttttacacgtcaaagattttctgcgtagctttgtgtttcagtgattggagttccagataagaaaagtatttttagtattgctcagagacaggtggaacactgaggtatcaaagtagagaaaagtaagagacaatttggccttctaagagaagctccattagcaacatattacacattggtataggaacatgcagttatacttaatgacccaaaagactgattacatgcagcattactgaaaatgatgtatataaaatacataatatgcaattgagattaaggcttggccaaggctagatttggacgaatktgacattatcaaaaaaaaaattgacaacgccgtttccagaattaacttcaaatcagatgcctttcaaatgga

SEQ ID NO: 833936 - DNA, 521 bp, Homo sapiens
gttaggccttggagagataataacaacatataataagaaataataatgtccagcattactgggcatttcccatgarccaggcactaagcactttatgtgacttatctcatacaacccttactgcaaccctatgagatagtcttatccatcacctcattgagaaaacggaggcacacaggatgaggaatatgtcccaggtcacgtgcctagtcaggagcagagccaggactcaagctgatgacgagactgttgggtcagagtgctgaattccttcagtgccctgccctgaggcccaggtgagggactgggttccatgtgctgtgagcctctgagtttagcatccttccagggggaagtaaagagcagatcagagaaccctcaccccattgtaggtttcctgtttggttctgataactttctccttatcagcaagggtgctcagagtttcattgctacatgagtggctcgtataagaaaatcctaaaggaatcaactgtgctgcgggtgtaaaagtaaaggca

SEQ ID NO: 833937 - DNA, 636 bp, Homo sapiens
caaatatgggatgagttagtttgaaagtggtcacaacctcaccctgaaagtactaaaagctataggtacatgttgtttagccaggaagagtgttcccagaaattgcagagctaagtcaaacagccatacacccagcaactttagcacactactgatggaggtgtgttcccaatatggtatgtgtctatctgatctgctagaaagagagctagctggtggtttgatcaaaatagtaaaagtggggaatcattctaaaaaaatacatacataacccctttaacttaaaacacatatttgccaatcttttgaacttgggccaaggccctttcctgagtctctgcggttccttctgcaaaatccacatatgcaatgcgtcaaagctgatttccaggtcgggcttctttacagtgtagttaggttttaagacaccttgaagcaatcagagtacagagtcttctgtatttttgttaactccccagcccgttcccctacaattgtctcacaaccaaccaatttaacaatcatttttaatcaattcaccctagccaagttttccaaagtaatcaaatttattttattatttaaaaatgtatttttcactcataacccgtcttmctcatgtttgtataacatcaa

SEQ ID NO: 833938 - DNA, 241 bp, Homo sapiens
tatttcccccaccccaacctttccatcaagtagttaatgagctgkaaacaaacacttgaatgcaccggggcagtggttttccaagaagccttttgaaccgtgaaccaaggccgggcagtacaaaccacaccctctggtttgctgtgggcgcatttgtgcctctagtttttctcacatgggttccccaggactggtgaagtgagaagagtcccccgcctcctggaggcaaagcaagtaacaa

SEQ ID NO: 833939 - DNA, 632 bp, Homo sapiens
caaacacttgaatgcaccggggcagtggttttccaagaagccttttgaaccgtgaaccaaggccgggcagtacaaaccacaccctctggtttgctgtgggckcatttgtgcctctagtttttctcacatgggttccccaggactggtgaagtgagaagagtcccccgcctcctggaggcaaagcaagtaacaattaactcgccataaaggggagtgcactgaataaaccccaaatctctcccctctgcctcccgccccaagtgtagccacttctctgggtcaagcgctccagaaggttcacccgcacgggaggtggcagaatccaggagcaccgtaggtatccgaccccctcctggcagggcttagatggatagagctgggaaaagtttgaagcctgtgttcctgtgagaggggaggcttgggcccacccacatggcactgcatggccagggtgacgctggaggttcccgaggggcctgaagacttagaaggtcccaaagatgacagtggtagagactccgtgccggaccccacaatctggtttgtgtcagccctgggagtgtcatgcaagacccctcaccgcgggtctcagtttccccatccatcctgcttccgtcgcagcggtattagaa

SEQ ID NO: 833940 - DNA, 593 bp, Homo sapiens
ggagaaaacaactaatatctcctgtgtgttttctagatccaaaccctgctggaggggccctctgggctcaaaagctgctacctgcctrtgctttctgcgggtagagaaggcgctcttcctaccccaaagatagccctttgctcgcttctcatacctccacagacagggaaaacatggatctgaatgagttattttgcagcaacccacagccacccctacttctggcctgacccatttctccaactataatgtgactctaataatccctgctctgctctccatcttgcctagaggctacgagagttcattagattaaaaaaatctataagctactttgagcaccttggaggtaagtgctctataagtacaatgtaataataataatgctacaataattaccttgactaatttatgcataagacagaaaaaaagattcttaattaagaaacatttcaacagtgtgaacacaggccccatatattggaaagtaatactaccatcagggattctaactctggggcagatcgacaaagataatgagccacccatcctcattctgagtgccctctgagtgttgtgggttatggggagga

SEQ ID NO: 833941 - DNA, 593 bp, Homo sapiens
ggagaaaacaactaatatctcctgtgtgttttctagatccaaaccctgctggaggggccctctgggctcaaaagctgctacctgcctgtgctttctgcgggtagagaaggmgctcttcctaccccaaagatagccctttgctcgcttctcatacctccacagacagggaaaacatggatctgaatgagttattttgcagcaacccacagccacccctacttctggcctgacccatttctccaactataatgtgactctaataatccctgctctgctctccatcttgcctagaggctacgagagttcattagattaaaaaaatctataagctactttgagcaccttggaggtaagtgctctataagtacaatgtaataataataatgctacaataattaccttgactaatttatgcataagacagaaaaaaagattcttaattaagaaacatttcaacagtgtgaacacaggccccatatattggaaagtaatactaccatcagggattctaactctggggcagatcgacaaagataatgagccacccatcctcattctgagtgccctctgagtgttgtgggttatggggagga

SEQ ID NO: 833942 - DNA, 603 bp, Homo sapiens
atacctttatgagtcatatttacctacactaatgactgttaacaatattaaagctgaaactttaaaaacgagtcaacttgcaataatctaatggaagccagaacatacctaactcattcccattttagatttgactttgggatacattgagtattttgaaaatgacagactcctctattttcttggctccgggtgattagactgagtttgccttctgtgggttcccctgagtcaaaggaaagagaggtagctcagaagcatattgcatcaccaagaaaagttggtctgagagtgaacatctataacagaaagcccagaatgtgaattattcaaaattagacaatatagattgcacatgcttcttgttaaatagatttcaggtgaggaacttgttgcttctctgtgcagttgagttcctcatccatgcccaaaaatataggtagaatttatgttctgacagatgcttatttatcccgttttgtacccataatctacacttgtcttaatttcctctcaattatgctcaggcattaactaataatgactaactacaaccccarataattattgctatctgttccctttgtaaatataactccagca

SEQ ID NO: 833943 - DNA, 611 bp, Homo sapiens
cattatctgcagaggaaaattgggtctgaaatgtccccctggggagcatgctccctcctcgtcttctggctagacgttcctcctgcagggaggcgaggctgaggactgggacaaaaataytgcagttcagtgctgtttcccactagaaaggtcatgggtgcaaaacaatgagtccaatttaagtttgctggtctttaagtatatatattgttattatcattattattgtattgccatagattgtactggtagtatagattgcttaaaagaaaatgaactttgataatcttctgtaatgacaataatacctacctaatactactaataataattaattataagggttaattgagggatgtataataagctcaggcactgagtatggcatgaactgaacacatataaaaatgttagcttgaataataaacactatgcatatttattagaagtaaatattaatgtcttttagcaatcttcataattaattttaatgttttgttaataaattaccaataattcaattttctaataaaatattcatattaataataaaacaataatgtgattaaatacgagttaaatattagtagtattttgttattccataaatg

SEQ ID NO: 833944 - DNA, 611 bp, Homo sapiens
cattatctgcagaggaaaattgggtctgaaatgtccccctggggagcatgctccctcctcgtcttctggctagacgttcctcctgcagggaggcgaggctgaggactgggacaaaaatattgcagttcagtgctgtttcccactagaaaggtcatgggtgcaaaacaatgagtccaatttaagtttgctggtctttaagtatatatattgttattatcattattattgtattgccatagattgtactggtagtatagattgcttaaaagaaaatgaactttgataatcttctgtaatgacaataatacctacctaatactactaataataattaattataagggttaattgagggatgtataataagctcaggcactgagtatggcatgaactgaacacatataaaaatgttagcttgaataataaacactatgcatatttattagaagtaaatattaatgtcttttagcaatcttcataattaattttaatgttttgttaataaattacyaataattcaattttctaataaaatattcatattaataataaaacaataatgtgattaaatacgagttaaatattagtagtattttgttattccataaatg

SEQ ID NO: 833945 - DNA, 555 bp, Homo sapiens
ttcttcttctttgtgctttcttgtattttctaagcttttcttcggggggtcagaaataactttgtaattagtgttgataaatgtgtttgatgttcactgcgaaagagaacttggaaacaaggcaaagttgatcaaactctcccagagactcagtggaggtgggggtagcaagagggttctggacagctggacagagaatcaacccagcaataagagactggttagttatttggtcatatgctagcccacttagagttagaaccactgtgggactcttctgtagtacggtgttgcctgggaaccatccctcctaaatttcagcacacggcagaggccatgccaaatgatcttggaaccctcggtccacctgctccagagcccgggatcacagtgctgtaaatgagtctctgtgactaaaaaaaaagccaactgacattccaagacagaaagcatttcatagcgagcatgtacaatgattttttccttcagaaaccaycaaaagtaaagactccattagaagtgttgtcacccaatccgattctctctcccctttct

SEQ ID NO: 833946 - DNA, 528 bp, Homo sapiens
agaagaaagacttcaaataaacattacacctcaagaaaccaggaaaaaaacaacaaaataaatccaaagttcactgaaaaaaggaaacaaaaatcaatgcagaagtaaatcaactgaagaacagaaatactacagaaaaataataaaagtgagttgttggttttttgttttgttttgttttgttttttttccttttcctttctctttctttttctctttttaggagagacaacgtcttactattctttccaggctgattgggaactactggcctccagtggtgatgcaacgtaggcctctcgcacccgagttgtttttctggaaaaagtaaaattaacaaacacttggctaaactaactaagaaaaaaatagagaagactcaaataaataacatscgaaatgaaagtggaggcattacaacagaagcctcacaagtaaaaaggatcataagaaactattattaggccgggcgcggtggctcctacgcctgcaatcccagcactttgggaggccgaggcgggcggatca

SEQ ID NO: 833947 - DNA, 528 bp, Homo sapiens
agaagaaagacttcaaataaacattacacctcaagaaaccaggaaaaaaacaacaaaataaatccaaagttcactgaaaaaaggaaacaaaaatcaatgcagaagtaaatcaactgaagaacagaaatactacagaaaaataataaaagtgagttgttggttttttgttttgttttgttttgttttttttccttttcctttctctttctttttctctttttaggagagacaacgtcttactattctttccaggctgattgggaactactggcctccagtggtgatgcaacgtaggcctctcgcacccgagttgtttttctggaaaaagtaaaattaacaaacacttggctaaactaactaagaaaaaaatagagaagactcaaataaataacatgcgaaatgaaagtggaggcattacaacagaagcctcacaagtaaaaagkatcataagaaactattattaggccgggcgcggtggctcctacgcctgcaatcccagcactttgggaggccgaggcgggcggatca

SEQ ID NO: 833948 - DNA, 528 bp, Homo sapiens
agaagaaagacttcaaataaacattacacctcaagaaaccaggaaaaaaacaacaaaataaatccaaagttcactgaaaaaaggaaacaaaaatcaatgcagaagtaaatcaactgaagaacagaaatactacagaaaaataataaaagtgagttgttggttttttgttttgttttgttttgttttttttccttttcctttctctttctttttctctttttaggagagacaacgtcttactattctttccaggctgattgggaactactggcctccagtggtgatgcaacgtaggcctctcgcacccgagttgtttttctggaaaaagtaaaattaacaaacacttggctaaactaactaagaaaaaaatagagaagactcaaataaataacatgcgaaatgaaagtggaggcattacaacagaagcctcacaagtaaaaaggatcataagaaactattattaggccgggcgcggtggctcctacgyctgcaatcccagcactttgggaggccgaggcgggcggatca

SEQ ID NO: 833949 - DNA, 611 bp, Homo sapiens
aataaacattacacctcaagaaaccaggaaaaaaacaacaaaataaatccaaagttcactgaaaaaaggaaacaaaaatcaatgcagaagtaaatcaactgaagaacagaaatactacagaaaaataataaaagtgagttgttggttttttgttttgttttgttttgttttttttccttttcctttctctttctttttctctttttaggagagacaacgtcttactattctttccaggctgattgggaactactggcctccagtggtgatgcaacgtaggcctctcgcacccgagttgtttttctggaaaaagtaaaattaacaaacacttggctaaactaactaagaaaaaaatagagaagactcaaataaataacatgcgaaatgaaagtggaggcattacaacagaagcctcacaagtaaaaaggatcataagaaactattattaggccgggcgcggtggctcctacgcctgcaatcccagcactttgggaggccraggcgggcggatcacgaggtcacgagatcgagaccatcctggctaacacggtgaaaccccgtctctactaaaaatacaaaaaaattagccgggcgtggtggcgggtgcctgc

SEQ ID NO: 833950 - DNA, 668 bp, Homo sapiens
ctacccagtagcgtgtagtcccagctactcgggaggctgaggcaggagaatgacaggaacccgggaggcggagcttgcagtgagccgagatcctgccactgcactccagcctgggcgacagagcgagactccgtctcaaaaaaaaaaaaaaaaagaaaaaagaaactgttattaacagctctataccaacaaattggataacctagagtaaatggataaattcttagaaacacacaacctaccaggattgaatcaagaagaaaccgaaagcctgaacgaccaataacaaataaaaggactgaagaacctcccaacaaagagaagctcaggaccaaatggcctcacagctcaactcttccaaacattcaaaaaagaaccgggcgcggtggctcacgcttgtaatcccagcacttcgggagtccaaggtgggcagattacctgaggtcaggagttggagaccaccctgatcaacatagtaaaaccctgtctctactaaaaaaatacaaaaattaaccgggggtggcggtgcgtccgtgtaatcccagctacttkggacgctgaggcaggagaatcgccttgcagtgagccgagatggcgccactgcactccagcctgggagacggagcgagagtctgtctggggaaaaaaaaaaaaaaaagaaagaaaaa

SEQ ID NO: 833951 - DNA, 668 bp, Homo sapiens
ctacccagtagcgtgtagtcccagctactcgggaggctgaggcaggagaatgacaggaacccgggaggcggagcttgcagtgagccgagatcctgccactgcactccagcctgggcgacagagcgagactccgtctcaaaaaaaaaaaaaaaaagaaaaaagaaactgttattaacagctctataccaacaaattggataacctagagtaaatggataaattcttagaaacacacaacctaccaggattgaatcaagaagaaaccgaaagcctgaacgaccaataacaaataaaaggactgaagaacctcccaacaaagagaagctcaggaccaaatggcctcacagctcaactcttccaaacattcaaaaaagaaccgggcgcggtggctcacgcttgtaatcccagcacttcgggagtccaaggtgggcagattacctgaggtcaggagttggagaccaccctgatcaacatagtaaaaccctgtctctactaaaaaaatacaaaaattaaccgggggtggcggtgcgtccgtgtaatcccagctactttggasgctgaggcaggagaatcgccttgcagtgagccgagatggcgccactgcactccagcctgggagacggagcgagagtctgtctggggaaaaaaaaaaaaaaaagaaagaaaaa

SEQ ID NO: 833952 - DNA, 539 bp, Homo sapiens
gccaagttatttatggtgttggcatttacatctcagtcctgtcatctgagagacctgaaaaataatatctacattccatcattgtygataacattaattatgataatttccaaagggctaattcagtaaaaattgcttaataaatctatgaatagatgttatctaattctgttatctttctggtaagttagcactcaggaaatgacttcacgtgcattgtttcaactgaggaagagtaactgttaggatctctactttctagagactcccttcctgtgtttacttagaaagtatcttttgccagttttctttctcttcctcagcatccctttttaagtcaatttcccccggtcatgcacttcagtaacaacctattaggcacattagtaaaagtgcaaatcctgggcccacaagtcagtctcctgacatacccagcttcttgctctgttttctcccctcgttttgaaataaaagaatgaaagggcaaccttctcatggaaagggtataaatctgtctcttttatgaaactccatttagt

SEQ ID NO: 833953 - DNA, 536 bp, Homo sapiens
cctactagcctggagtcaggtgtgtcttcatctctagatgggcaaccttatgccagcgtggatgaagtttccagggactgtgtctgctcctcatggastcacttagctgacattaactggagaacatttatgacattccaaagggacctcagccaaagaaagatgcagagggcagggcaggactttgaacctgcatagaccacaaagtgcattctcacctctgtcctttttattcacatatttacttctacaagctcagagtctaaaacacaactcaggtgaatcttgaggacagagaaataagagagcatttaatgaattaactttgagaaaagtgagtccaggggccagctttatgtctacacaagatgatagacaagaacctatctacaggacagactttgcctcagaccagcccaagtgagagatttaattgaaatagtcagaagaaagactaaaatccacagagccacagagaatgaaggcaatcacgagagaaatgaggataggaaagaaaatgatgggaaatcaggttg

SEQ ID NO: 833954 - DNA, 548 bp, Homo sapiens
ctttggttagagaagccacagtccttcagcctccacttgataccaatacttaggaagaccaaagccagatggacaaacagcattgagaggctttagccctactcctctcagcttccatcctgtagagaacaggagtcaggagctgctggcaggagacagcatgtcacttgggactctgccagtgcagaatacgaacaatgccatgttcttgctaaaaatgcttagcttgagtttcataggaggtaatcaccagatagacaactgcagaatgtagaatactgagcaggacaataacctgtctccttcagacagtccatgtcaccacgaatcacacaataaaaaggagaaaagacattttgggttcaaaaaaactaaaaagataatgtagctatatttctttagttattttgaacccaaagtatctcctcatctttttgttgttgtcattgatggtagggrcatggacttgtttgtagaggacaggtcagctgtctggctcaatgtcctacaagagacaggggggacatggaagcgtacagctatatttg

SEQ ID NO: 833955 - DNA, 295 bp, Homo sapiens
ctacttcattcttaagctatctatgcaatacagatacgaatttgaacatgcccaacctctcttgcctcagttatytcatttgtccaattcctttcatctagcatgcagtcaccaggatttgcctgtgctgtaaaccccactgtagctcaaggctccattcagattcaccctcctccatcaagcctactcttgacggttacatttaatccttcctgatagattaagtccttatcttcatggtggaccttctgttctgggtgctgttattcaccttgtggtttctgggctgtcttgg

SEQ ID NO: 833956 - DNA, 697 bp, Homo sapiens
  misc_feature 1, 2: n = A,T,C or G
nnacccccccatgttggccaggctggcctccaactcctgtcctcaagggatcctgtaatctccccattttgggaggccgaggcgggcagatcacttggggccaggggtttgagaccagattgggcgacatggcaaagccccatctctacaaaacatataagaatcagccaggcgtggtggcatgcactgcctgtggtcctggctacttgggaggctgaggctggaggatagcttgggccgggaagcttgaggttgcagtgagcagagatcataccattgtactccagcctgggtgacagagcgagactttgtctttaaaaaaaaaaatagaggctgggcacagtggctgacgcctgtaatcccagcactttgggaggccgaggcgggcggatcacgaggtcatgagatcgagaccatcctggctaacatggtgaaaccccgtctccactaaaaaatacaaaaaattagccgggcgaggtggcgggcgcctgtagtcccagctgctcgggaggctgaggcaggagaatggcgtgaacccggaaagcggagcttgcagtgagctaagatcgcgccactgcactccagcctgggccwtggagtgagactctgtctcaaaaaaaaaaaaaaaaaaaaaaaagaattgacttgaaggagtcaggccggaaggccaaataggagatgaatggggatagcggct

SEQ ID NO: 833957 - DNA, 604 bp, Homo sapiens
ttgagtttcacagattatgggttttggcaattatgtaatgtcctaaatccccaatacagcatcatgcaaaatagtttcactgctgaaaattccctgtacttcaccatttcgtgcctcctcctctcctccacccctgacaaccactcatcattttactacttctatctttttgactttccaagaatgtcctagagttggaattacagtatgtaggtttccagactggcttctttctagcattatgtacttttaagttcctccacgtcttttcatgacttgacagcttgttttgtaaaatcactgaatcagatttcattgtatggctacaacacagtttgtttattcattcacttggtgaaagacgtcttgggtacttccaagttttgacaattatgataaaattgctgcaagtacttatgtgcaggattttgaatgaacttaagttttccaaagtgactgtacacttttgatttccactagctatggagagttctggttgttcctcatcttygacagcatttggtgtgttcaccgttttgtgttttagccattctgataggtttacagtgatatctcgttgttttaatgtgcaattccctcacaa

SEQ ID NO: 833958 - DNA, 567 bp, Homo sapiens
tgtgtgtcctgagggcactaactcagagtgtcctgttactccctcatcagtgygtcacctggacaattcactgagctcgttctctctctctctctctctctctgtgtgtgtgtgtgtgtgtgtgtgtgtgtgtgtgtgtgtgtgtgtgtgtctatctgtctttctctttcattcttttccatttggccctgttctgtcccaacatgaaggcaataatttgttacctcattaatggatctatccttttagttttttaaccacttccctatgctacccatgaaacctagttggggctctgttgtgtctgatttcccctggcttattctttactttttcctccttttccaggctcagcagggagctgctggaggtagtagagcctgaagtcttgcaggactcactggatagatgttattcaactccttccagttgtcttgaacagcctgactcctgccagccctatggaagttccttttatgcattggaggaaaaacatgttggcttttctcttgacgtgggaggtgagtacctttctatgaaggtgataaggatccactgagtcttcca

SEQ ID NO: 833959 - DNA, 565 bp, Homo sapiens
aacatgactcgatcagagttgccctaatgttaacaaaagttattttgaacttaaggtgatcagaaattttacctatctgtactttttctgtattggtggtatggtctatgctaagcgtgtataattwaaaaaaaagagagtaacttcaaaatgatttggaagaaaaaatatgtacatatgtgaatagtacttaattccaggtgatgggaatatggatgactggttatcttcttctttctgtatcttttatatttttaaatggaaaaactcaacgacctggaagtgaaagaacagatttggaatacgtgtggggcaggtgataggaaaatgcagagtgaaactctgtctcaaaaaaaaaaaaagttacttgtaataaaactcaccaattttaaatctacgatgtaaccatttaaggaggtttgtagaattgtgcagtcatcagcagagtcacgtttttagaatatttttgtcatttccccaaataccctaaagcctctgcacagtcatttcctaatctctggtgcccatgactgggccccaacaaaataaaaatttggaaatccga

SEQ ID NO: 833960 - DNA, 600 bp, Homo sapiens
gcatctatgtatatatacatgtactttttttctttggggttgaagtcatggtgattcagggaaaaaaataagtctataagcaaacatacgaacaaagatttagttggctcacaaataactgagatatccttcatcttaatcagagaaatggttggtctagagtatgaagaaacaaaagaagtttgtgtgccagaggcaaaacgaagaaaatgttttagaggaaaagcaatcaattatgagaaatattgctgataaggaaaataaaaggaaattgaaattgaccctatattgtggcaagttggaggccattggtgaccctcacaagcactgtttcataaaatggtaaatagcttggctggagagcaagatagaatgagaaaagagaaattagaaacagtgaatatatcccaacctttggaagaattttattgtaaattggagcatagaagttgggctgtagctggaaaaggatgtgggattaagagatttgtttctgtarggtgaggaaaagtaatagcacctttaatactgatgaggatactcaaactgagagggagatgagtcaggagagtaaagggagatctgcagtagcagtaacct

SEQ ID NO: 833961 - DNA, 625 bp, Homo sapiens
ctcttgcttgccaccatgtaagacatgactttgctcctcctttgccttccaccatgattgtaaggcctctccagccatgtggatctgtgagtcaattaaatgtcttccctttataaattacccaatctcgggtatgtctttatcagcagcatgaaaacagactaatacagttattttataaaaatgtatttctatgacatcccaagagttcatccagctctgctgttaaacagatttagtaagagaagagaagacttgctatcctccaggtcaatccaccctgtaattaaaggattctaagttttttaaaaaactattttggctgggcgtggtggctcacgcctgtaatcccagcactttgggaggccgaggtgcgtggatcacgaggtcaggagatcgagaccattctggctaacacggtgaaacctcgtctctactaaaaatacaaaaagttagccaggtgtggtggcggctaactttttgcagtgcactgcactgcagcctgggtgacagagtgagactccgtctcaaaaaaaaaaaaawatatatatatatatatatatatttcttatgttgatacaaaatatactttcttacaactttacaactaatcctgatttttcca

SEQ ID NO: 833962 - DNA, 617 bp, Homo sapiens
atggatagataaatagatggatgggtgcatagatgaatggatggatagatagatagatagatagatagatagatagatatcaaatagatccatggatggatggatggatggctagatgaatgaatggatggatagatagaaaatagatgcatggatgatgggtagatagatggatagatgaataaatagatgggagcctgaatagatagataaatgatagataaatagatagacaatagattcacagatagatggctagatagatgaatgaatggatagatagaaaatagatgcatggataaatggatagatgcatggatggatagatagatgataggtagatagatagatagaaaatagatagatgaatggactgatggatggataaataggtacatagagaaatggaagaggatatttactaagggagttggctcatgtgattataggtgctaaagagccccaaaatatgctctatgctagctgggggaccagggaagccagcagtgtgtctggtttaaatccaaagacctgagaacctggagttcttaygttcaagggcaggagaacatcagaactccaggtgtcccagctccaggaaacagagagcaaatttg

SEQ ID NO: 833963 - DNA, 641 bp, Homo sapiens
ctagtcacactctggagacctctcattcacagtccattaaagacaaccaaaaagtgtatccaggcagacttcagagtgtctgtttgcatgatgacaaatttccagtttaaaaaacaatttttatttcatctgctatgaactaaattatgccccctcccaccattcatatgttgaaatcctaactccagatgtgaggatatttggatatggagcctttgggaggtgattagacaaagatgaggtcatgaaggtgtagcctttatgatgcgatttgtgtccttgtcagaagagacatgagagagctgtctctctgattagtgctctctctctctctttgtctctttctggctggctctctggctctctgtttctcagccacatgaggacgtgaggaaaggacagcatctacaagccaggaaggacattcgtgttgagaaacaaatgacctggaaggtgattcagagatcatcagggcacctggctcagtgctttcacctgtagctgtgggtgtgggattccccagcagagccttgrgggcaggacctcacctgcagtgctagtggacctagaggacagaatattgaaccagggaggatcaccctcaagtcttaaaatctgacagaatttgccttattgtttta

SEQ ID NO: 833964 - DNA, 588 bp, Homo sapiens
ggtttcaccgtgttagccaggatggtctcgatctcctgatctcgtgatccgccgcctcggcctctcaaagtgctgggattacaggygtgagccaccgcgcccggccctctctgcagcacatttaagatcagcagcatttcagatccacggtggtcagaggtcctggcatgccttggaacacacatccttctgatcaggaggttcagctccatctctttacaggcttacaaggtgagtccagggacagggcgatcagtcaccagtcacattgctatgcagaggcagaagcagcactgaagctcaggtctcctagtttattatcacatcccctgtgtgtctccagaagccacgacagttcatgggctgagattcctgtctgtatttctgtgtggcgaacactttgttgctctcctcactccctgcaggtcggggccgcagatctgccttgtggagaagtccgctggagtctcacccttacatgtgcctccagatagtttctagtatgcaccagttttgtctggagaataatgtcttgctgttcttatttaagtggaaaataattaacttcctaaatgtttatttaacttc

SEQ ID NO: 833965 - DNA, 642 bp, Homo sapiens
aaatcatacaagtcaccaccattgaatgtgaacaggttaaaataagagttataaagtgaggggtggggtagaagttgctccttggatactctgcaatctcagagtcttggtggcagcacaaattagcaagtattatgtagagagatttgcagaaatctccatgcctccataaaataagtttcggaaggttttatatcaaaaagaaatatagaaaaatgttaacgtagattttgctggtgagtatgggaatattcattttctgttgtttcgtgtatgttatacttaaagcattctcaaattgaaaagagaaatcttcatgagctggattttgaagcctgacaggggtgcccagctgctggaagccggtcctgtccttgcacgaaggtcaaaaggccactgagttggagacacgtctcctatcatggtcaataatcgcctaagtgatcccaagcagtggttttgggttggggatcacagagttccttgttttctagccaagaaacagcaamcagccccatccacagcagaggtggagctccacaagcatctgtggccagagccgcttctgtgaattccgacagtcgtcagcatcaaggacagactggtgtggtcggcaagaacacacactcctcctcctcaatc

SEQ ID NO: 833966 - DNA, 457 bp, Homo sapiens
aactccagttagtacaggtatagtacagtcattgtacacagagcgagtggatgtcactgtccactcaccctggggttgcaagttcagwgggtggtgatctctgtctgatcacagggtgagctgtgtgagctggggacactgttcctcatgtgcttggcatggccacttgtgcttttgttctctctttgctcgtcccacacaggcccagactcactgcctgtgcccctcctatggcgtgctcattctctgcctctgcaccttcagagctgtgttctgtgacactttggaaagcccagtttccccattcacctcctggccccttctgacagtcactaactagtctctgtcctcgttcattttcaaacactttgcaggactctgcttctccagatgctcttctgtttaacctctctaggctctagttgaacccagctctgtgagccacccactgctgtcc

SEQ ID NO: 833967 - DNA, 571 bp, Homo sapiens
taagctttttgatgtgctgctggattcaatttgaaagtattttattgaggatttttgcatcaatgttcatcagggatattggtctaaaattctctttttttgttgtgtctctgccaggctttcgtatcaggatgatgctggcctcataaaataagttaaggaggagtccctctttttctattgcttggaatagtttcagaaggaatggtatcagctcctctttgtacctctggtagaatttggctgtgaatccgtctggtccttgactttttttggttggtaggctattaattattgcctcaatttcagaacttgttattggcctatttacagattcaacttcttcctggtttagtctttggagggtgtatgtgtccaggaatttatcaatttcttctagattttctagtttatttgcctagaggtgtttatagtattctctgatggtagtttgtatttctgtgagatcygtgatgatatctcctttatcattttttattgcgtctgtttgattcttctctcttttcttctttattagtcttgctagcagtctatcaatttttttgatcat

SEQ ID NO: 833968 - DNA, 600 bp, Homo sapiens
ttcttacagcctgtcgtaaagcttattttgtcttagaagtcaaagcagacatatacagtaacccatgggataacttctataaccaatatcagcgkgaaatttaaagatgttgataaagctaagctttcagttaattagcttactcttgctttaaacagagagagtaccaagctttcctagagttcttctgccagccttaaactcttaactagcaactttaggctttattacctttaattaatataactgcattacttacaccttcaggttgttttttaaactaaatgtggttatcatcactgtgggcacagaacttctctttcttcattccctgtgttgtcttgacttataaaatgaaataataaagtaaaagtatttttctaagtaatgggtttttttaaggaagcattcttttttattgatacgtatttgtacgtatttatggggtgggtgtgatattttgttacatgcatagaatgaatagtaagcaagtcagggtatttagggtatttcattcattacctttagcatttatcatttctatgtgctgggaacatttcaagtccactcttctggttattttgaaatatacaataaatt

SEQ ID NO: 833969 - DNA, 564 bp, Homo sapiens
cccccttagtaaatttgttttactgatttgtttacagtattgtaacaaaatgtgtgcacactgttgtacaacagatctgtagacatttytcattttacatgactgaaattctatatttattgaacagcagcttctcattgccctcctccccacagcccctggcaattagcatcctattttttgcttctatgagtttagctactttacataccgcctatagatggaattatgcatttgttcttttatgactggcttatttgacttatttcacataatgtcatcaaggttcatccatctggtaacatgacaggatttccttctttttatggctgaataatattccattgtttgtatataccacattttctttactcattcatctgtcaatgaacatttgggttgttgacacctcttggctattgtgaataaagctgcaatgaacctagcagtgcaaatatcctgtttatatcaacaagatataaatatccagtttttatcctgttaacattgatgtaaacaggatacttgcactcctgcgagatcctgttttcagttgctttgatg

SEQ ID NO: 833970 - DNA, 490 bp, Homo sapiens
cttgttctgaagtctgctttctctgaaatataaatatttccagctttcctttgaatagcgttagcatggtatactttccttcatatttcacatggatttcttgaagacaacatacaattgggttttgctttcctattcactttggcaatctcttatttcttaagtggtatacttaaaccattgacatttaagtgactatgatatcattgagttagtatatatcaactgtggactgcgttagttttcatttgttgtctttattctttattgcttcttcttctttcgtcttcttcttcttctttttaatgtttttggcttctcattttattttattttaatttttatgtctatttcttttttgagatagagtctcactctgtcatccaggctggagtgtagtggcatgatctcggtgcactgcaaactctgcctccygggttcaagagattctcccacttcagccccctgagtagctgggactacaggagag

SEQ ID NO: 833971 - DNA, 523 bp, Homo sapiens
taagtgattgttttaaaatttttaatagagtaagattgaccccaactgaccaagaaaatcaaatttytacagctcagtggagcaattcttttttccatataaagaaagcagctcaacattaaaatgggcaaatacttaaggaagaagaaggaggattgaaaaactccaatgctccttttaaaaagctccctagaagaatgtgtattgcaagctgctcacttgaaaactgacaaggttccgctgtttctcttttgtgtgggtggatagacaatagacaggcagagtcaggaaatttcaagtcggggctctggaattaatttattctcacatcaaagtcagtgtggttggggctcaaaatgaaacacttgaataaaaactgacagaaggcattgttccccctcctgcagtgacacagaggtttctaatccccatgagccttagaaattcctcccagcttctggcagccaagagttttctttttgccttgtacagtcattgctaccaggtcattatgaggtgatcc

SEQ ID NO: 833972 - DNA, 607 bp, Homo sapiens
aagccaaggtgacatcttttccttggggccagtagggatatgggtctctgaaaacctgaaatgttctctaataaaaagcatggtctgtctgctatcaagacagtacagaaactgaatgtgtacatttcytggaaatatggattgccattttatggaagtgtctatcacagaatgagacagatatcagaaaccaaggcagcatttctccatgatgtactagttatggtatgagaagacaaagttagaactgaaacccaatctgacaggtattttcaagtgtagagcagttgcttagtgatgagaagacagttcaaatcacgtgctaccttgtccactctacaccagtcagtggtcctcagccttggctgtacattgaagccattcgaaaagccttaaaatgtgacgatacctgcaccccaccccagaatctctgatttaactctctggtgtgcatcctggaaattagaattctttatcctgctaggtatccagggttgagacccagtgttaaatcatgagagatggctcagatgcaatggctaaggtcctatgcagcatctatttaagccccaaacacctcacgggaagctgtaaagacagaaaaatt

SEQ ID NO: 833973 - DNA, 596 bp, Homo sapiens
aggctgaggagcaaggagagccagtccgagttccaaaactgaagaacatggagtccgatgttcragggcaggaaggattcaacatgggagaaagatgtaggctggaatgctaggccagtctctcttttcatgttttcctgtctgctttatatttgctggcagctgattagatggtgcccacccagactaagggtgggtctgcctttcccagcccactgactcaaatgttaatctcctttagcaacactctcacagatacacccaggattaatactttgtatccttcagcccaatcaagttgacactcagtattaaccatcacaacccctaatcagtcaatcaaaaggcatttactcaggtctcatcatgcaactggaattcatgtttttcaataaggttaggaaatctttcctccatatcaaatgaggattttgcaattttaaaagtttagtttgatgttccagtggaaagatcaacatctgttggagttagagctatattaagtagaaattaatgattttagagtttgccttctaaaatccctctctgttagaattgtctttagtgagccattatcatctagaatggatccagtg

SEQ ID NO: 833974 - DNA, 596 bp, Homo sapiens
aggctgaggagcaaggagagccagtccgagttccaaaactgaagaacatggagtccgatgttcgagggcaggaaggattcaacatgggagaaagatgtaggctggaatgctaggccagtctctcttttcatgttttcctgtctgctttatatttgctggcagctgattagatggtgcccacccagactaagggtgggtctgcctttcccagcccactgactcaaatgttaatctcctttagcaacactctcacagatacacccaggattaatactttgtatccttcagcccaatcaagttgacactcagtattaaccatcacaacccctaatcagtcaatcaaaaggcatttactcaggtctcatcatgcaactggaattcatgtttttcaataaggttaggaaatctttcctccatatcaaatgaggattttgcaattttaaaagtttagtttgatgttccagtggaaagatcaacatctgttggagttagagctatattaagtagaaattaatgattttagagtttgccttctaaaatccctytctgttagaattgtctttagtgagccattatcatctagaatggatccagtg

SEQ ID NO: 833975 - DNA, 619 bp, Homo sapiens
ctattaaagggtcataataaacactactttgaaaacaccgattatgtgacagctaccrctgtaaagtgccttatgtatattgattcacttaattctcatgacagctctgcaaggtaagtattataagcttacgtatgaatgagaaaattgaggtatacagaatcgtaaaccgaaattaaaattctaagccccctgaccatctgaatggattcctcctcttggccaagggcattccaaagttaacctaagaaaactagtttaggctatgataggaagggggagtcagacatgcctcattataccctcctcccttttgggattcaggcccagctgaccagcattaacatcaacatagactttaagactcttcaagtctgataagaaacatttgccatcttttctttgacgcctgctgcctggatgcttcatctgcatgataaaatcttggtctcaccaaccccgtatcttaatccaggcattcgtttctattgattccaagtctttagacaataacttaactgtttcaacccactgccaaccagaaaatttttgaatctatctatgatcccaatgccccccaccccacttctagttgtctcacctttccagactgaaccga

SEQ ID NO: 833976 - DNA, 539 bp, Homo sapiens
gtacattgatcttgtgttctgagaccttgctgaacttattagttctcatgatggatttttatagtggattccttaggacatttttgtatgcaatgtcatgccatccgcgaattgtagttttgccccttctccaaactggctgcttttctttctattttcttcataattgccttagctagaacttccagtacaaggttgaataaaagtgataatagcatttttgtcttgttcctgatgttaggggagaatcattcagtgttcactattaagtataatgttagctgtggctttttcattgatggcctttatcaggttggggaagttcccttctttttcttgtttgttgagtggttttattatgaaaaggttttggattttgtccagtgattttttcttgcatctattgatgtggtcacttttttttattccaytaatatattgcattacacaaattgcttttgaatggttaaactaactttggattcttggaataaatcccacgtggtcatggaataataccatttatatgttgcccaatt

SEQ ID NO: 833977 - DNA, 553 bp, Homo sapiens
caccacctgtgattcagatttggacagtgttgtaccaggtgtcagcatcgatggtgcccatatttatattcaatgttgaatgttcctctttctgtaccctactttaaaacaaaagcccctaacacattgaagaaatcaaagtttgtctacttgccctttccaaagacatggctctgctcactcaatatcaactttgatttcgaagccaatccagatattaaatagaaggaatgtttggacatatcttcttcatttggaatttcaaattgatatgctttttgacatgtcaagtcctgacacagacaaatcaactagaaagagcaggagattctacatttagaggcttctgatctagtctgtggaagaaattaaggattctttatatatttccactcaaaatagttctttctgtcttcccaatgaaaatattttytattattaaatgattgtaatagattaacaatagtgtagggttgacatctttataataatgaaccatgattccatcctctgattattcattatattaatgggaaccataattttatatttc

SEQ ID NO: 833978 - DNA, 610 bp, Homo sapiens
agatgagagggatgggtctcctgtggtgcacattcrcagcttgagtttaacaagcctacactctgctttcttgctccagctctcacactgtaaacaaatgtcctttttgcagtatttcatgacatgttttaaacatttttgagctcttctgggggcaattcactatttaaaatggccccaagctttcatgctgaagggctgtctagtgttcttaagttcaggaaggccatgatgtgctttacaaaaaatatatgtgtgataggatttcttcaagctgagctatagtgctgttggctgttcaatgttaatgtattggtaatagatatatatacacaaacatatattaaacaagatatctttaaacagaaacatacataagacgaggttttatgttgatatgttaataaaaatattttggttattgtggtcacctctgtggaatcagatgttctcaggaaactagccttgtctttcccctaagagcaatggttcagtgttcactaattcaatgtttgtggcaagtttataaagcataactactcaaatttatctaggttcaatgcaatcccaatcaaaatcccagaaagattttgtaaataatgacaaggtg

SEQ ID NO: 833979 - DNA, 581 bp, Homo sapiens
ttttgcatttattattattactgcttttcattgtgagtagtatcaattcttccatgccagttctttttgtgaggaagcaattgaaggtaacaaaagactcttggctttattttttcagcttcaccatcagagaaaaactgactctctttccttgattccaggaaggacttggtatactggtttgggttgtttgtgagccgtgtggctacggagtgaggatggtgattggcagtctcaaacataaaacaggaaagaacacctaaggaatcttgatgtttttcctaaaaaagataggcctactatacacatcaaacctagctaaattaactacagggggtaaattgagtagtaatgtagtgactagaaaattttatcatatttcacgtcaccctattataataacacttgcatatctgattgtttgtgttatgttacaaacataaggagagtgtattagattaagaatagaaagagatatcagaacttctgtaattyagcaatttatccttgtatctcaagccccagcaccaaacatgataagacaacctatattttctatttaacaagttaacatacctatt

SEQ ID NO: 833980 - DNA, 612 bp, Homo sapiens
tgacagagtgagacactgtccctaaaaaaaggaaggggcaaaagatctgaagaggccaggcaaggtggctcatgcctgtaatcctagcactttgggaggctgagrtgggcagatcacttgagctgaggagttcaagaccagcctggctaacatggtgaaaccccatctctactcaaaatacaaaaattagccaggtgtgtcagtgcaagcctgtaataccagctactcaagaggctgaggtgggagaatcacttgaacccaggaggcagaggtttcagggaaccgagagagtaccatcgtgccatggcattgcagcctgggtgacagagtgagacactgtctcaaaaaaaaaaaatctgaagagatatttctcaaaagaagatatataaatggccaacaggtatatgaaaaatgctgaatgtcactaatcagggaaataaaatcaaaaccacagtgagatatcatctcatccccattaaaatgactattatcaataagacagaaaataaggatgacaagaaaggggaacactcatacactgttgctggaaatgtaaattatcatagcaactatgaaaaatagtatggagttttctcaaaaacaaaaaaatat

SEQ ID NO: 833981 - DNA, 691 bp, Homo sapiens
acatattcattatttaagttgaccattcctacattcttacaaaacaactagaaaagcaattcttccttcttcttgacagacgtccaaactatagaaagagaagaaattacttataaaaggtcattaagcttgtatcataacctctcccttagccacagtttcactttaagtggtttcagttacctatagccaacctctttccaaaactattaaatggaaacttccagaaataaacagttcgtaagttttaaaccatatgctgtttttgtttttgtttggttggttttttgtttttcattttttttagacggagtctcgctctgtcacccagggtgtagtgcagtggcgtgatcttggctcactgcaacctctgcctcctgagattaagcaattctcctacctcagtttcctgagtagctgggattacaggcatgcgccaccacgcctggctaattttgtattttttaatagagatggggtttcaccatgttggtcaggctggtctagaactccttgacctcgtgatctgcctgcctcggcctcccaaagtgctggaattacaggcatgrgccaccaatgcccggccctgccgtgtgctgttttgagtagcatgatgaaatctcacaacatccactccagcctgcctttgcccatctttgctgtgcaaagattattccctttgtttagcata

SEQ ID NO: 833982 - DNA, 597 bp, Homo sapiens
attgagattccaattatgtgttataaaacattgcatgacatccttattctttgctaaagttgcaatggccaaaaaaaaaaaagcgttcagaagcatttttaaaggtatattayatattagtattaaactctgatatttgtgaataaagttacatttgttttatgaatatttcattattgggtcatgaaatttagctacaattaattaaagattcttttttattttttaaataagcctttcattattaaatgagtggtgttcattcttattgctggtgccttagaatagcaaagatactgtatggtatatatctggctgtagcatttgtcctttctgtactgcattcaatatttactgtggcatctagataagttattgattattggtatcagagatctattgtttttcatgctatttgtgtaatgggtccttgcaattaaattattcctagtgatgaagtctcctgaaaatacttgaactaatctttttagtcagtagtaatttcttccaaaataatgtagcttacaacattataaagtcatatctctaaaagttataattttttcataaggacaatatctaattttgatataacaa

SEQ ID NO: 833983 - DNA, 519 bp, Homo sapiens
cccattgtctgaatatagtgctgtttgtctgtctgttattctgtggaaccactaataaatggtttccagtttgggctattcagaaaatgctgctgcagatatcactrtacgtgtttcatggtgtacttgtgcaactttttggttaagccctatacctaggaatggaatttctgggattagggacaatgatatgttagcctttaatgggcagtgtcaaactgttttccaaagtggccataccagtttatttcaacttatactttaaccagcaatgtataataattttcctgattccaccttcatgccaacacttacatggttcagattttacgatttgacaatctgaaggggtatgaaatagtttctgttgtaattttaatttgcattttcctaattactagtgaagctgagcatcttttcatgtgtttatgagccattggtgtttcctctactatgaaatgtctgtctattgtatcccctgtttttcaataggacttcctttctttttgatttatagga

SEQ ID NO: 833984 - DNA, 572 bp, Homo sapiens
tgatttttgcatatagtgtaaggaagggacccagcttcaatcatctgcatatggctagccagttatctgagcaccatttattgaatagggaatctttccccaatttttgtwtttgtcagctttgtcaaagatcagatggtcatagatgtgtggccttatttctaggatctctattctgtcacccaaaacagcaaagatggtggcccaccccttcctctgggagtgccatctcaaggggatttcagatctctgtcatctggagagcttggaccgcagtagctggaggccctagttgggaggtcccacccagtgaggaagaacaggatcaggcacccacttaaagctgcagtctggccacattttggtagagcagctgtgctatgccgatggatcccttccaccccagcttggctcagacactccaaagcctgaaggctggaacactaaggcttctgaacagcaaagatggcaccccacccctccacccgggagctccttcttagggaggtgaaatgctgctgctggtagctagctggaattctaagccattgggtctcatcttgtgaggtgcc

SEQ ID NO: 833985 - DNA, 624 bp, Homo sapiens
tatgaaggtataatcatcagaaattttgatggattagatgcaaggtgtgaaagaatgagaagaatcaaggctgattcatgaatttagcctgaacatctggaaggatgaagaygctatttcaatgaagtagggaaggctgcagggaaagcaaatttgagatggaatgattgttcatttgcaagtgaagtagctcattacaatataattagcctcagctagcagctccatcagcaaggaaattaggagggatgcatgcatagttcagtctctgttgtactcaagggtatgcttggctcaccccataatggtaatggcaaagatccaagcattctgtagtatacttctttttcatctgactcagtatgagatcctgttgatgtgcatatggtctcttgaaattactgattatatcttgcaatttcttctaactattctttgttcccttcctcccacaatgtgatagattctctttctaattactaatacttgcctgtcacatttttctttatggcatcccaatttttttttcaaggaatcctcttccccactatttcccacattattagtcatcatcttggtgaaagctagaatctgcttcttcagcctcccattcattctttgggc

SEQ ID NO: 833986 - DNA, 616 bp, Homo sapiens
ttactgtggtatgtagggaaagggtcatattttaattaaggccattagtagctattgattaactttcattggtatttcaagagtatgtttaactttttgtatttgtgtgcttcttattaagaagcttaactcaatgaacatgtttttatttagaatatagccagttataaaccctccatttgctattcatacaaacattgtggtcagaagttcgaatcttctatcacttgcaattaaggcattagttactgtttgatggaaagaagcaaactgaccaatccaaatctttgcttattgtatatttaacattcctatgtgtacaccttctctgaagtgccaaggaggaccctgaaaaacatctctggacatagttcagggttgtagggaaactcgttcctagcatttacagcaatagtgagcaaattgccaatacttgggcagaagaacatagagaagtcctataaaatttaaaatttaaactttaagtaaaagcttattattattgtttttactcaaattataaaatacaatacttttctattttaaaagtacataataaagatacttaacrctttttgaacaactatatcaagaattttaagtatgaatgtattct

SEQ ID NO: 833987 - DNA, 551 bp, Homo sapiens
ctgaggggtttttaaattatagaatcagaatctctgaaggggaagtaggtattctgcaatttaaaaaaatgagttcctgtcacactgatatatattttatattgtagttgggaagccactgattaagattgtrtattattaataagctattcatagtctatcatattctggatctagcaccaaacaatgagcacgcaattatttaatttaccctaagaagtatcccattcttttaaaagatactgaaagaaaaactcaaaataacacaaaaacatgtcttagaaattttattcaattgccaacttacctgacttcagatacaaaaatgtatatacatttccactagaggcgcaccagaactaattcagattatatcattatgcaataaaatataaatggttatattttattctatttgttcttgcttgtaatttttgttctataatttctattatgctaatcagaaatgatagaacagggggacaaatgtggaaatctatttattactgatctgccagatactaatatcaaatattttctttgaaaaaaat

SEQ ID NO: 833988 - DNA, 650 bp, Homo sapiens
gacttgagtatgcatgaatttcgttatatgctgagggycctggtcccaatcccccacatttactgaagcacaactgtagagctagctatccagtcctgccttagatcctggtgctcatttttcattcttactaataaatttccattattacatcttttcttctaaactgggcagttttgtcttcaataaaaacctgctcaggcagacatcctttctcctcaatgattttcatactgatgtctgggaacttgtctgcttcttctccatcagaagaagctgcttctcctgatattgtgaaattttcttaagccaaacctctttctaaaattattaaactatcctttgctggcattaaactcaccagctttagatccctcaccttccttttgctttaaattgtcatgtaactatttcacgtcttctcaaatcattttaaagttcataggtatgtatttcttgtagaactccttcactcacataaaagctatattttcaataggatattaaaagctatttcacaaaaagtagaaggttgttgaacctgctggtatagctgcagcatgggcttcacaaattgtttttatttatttacaatggcccttacgctaaatttctttatcttgaaacgataagtaacaacaactgcagag

SEQ ID NO: 833989 - DNA, 700 bp, Homo sapiens
ctcatgaatagaaagaatcaatattgttaaattgcccatctgcttaaaccaatttatcgactcaatgctatttccactaaactaccatttacattcttcacagaattggaaacaaaactattctaaaattcacatgaaaacaaaaaagggcctgaatggccaagacaatcctaagccaaatgaacaaagctggaggtatcacactaccaacttcaaactatactacaaggctacagtaatcaaaacggcatggtactggtacaacaacagacacatagaccaatggaacaaagtaaagcatcgagaaataagactgcacacctacaaccatcttatctttgacaaacctgacaaaaacaagcaatggggaaataattccctatttaataagtggtgctgggataactggctagtcatatgctgaaaattaaaactgaaccgtttccttacaccatatacaaaagcaacacaagatgaattaaaaacttaaatgtaaaaccgaaaactctaaaaaccctagaagaaaacctagataacacagtcaggacataggcacaggcaaagatttcatgaaaaaaaaggccaaaagcaattgcaacaaaagcaaaacttsactaatggggtctaattaaactaaagagcttctgcatagcaaaagaaactatcaacagagtaaacagacaacctacagattgagaga

SEQ ID NO: 833990 - DNA, 644 bp, Homo sapiens
taatttttttaatttaaccaaaagtaagttttttccaaaagtcatttaattctacttaagatcattcagcaacttcccacttttctcagaatagaaacataaaatccttaacttaatctaaaggaaattcagctgttgtctagcattctagtcttatttcatttgtattttcccttttacctctctattttaccaccatactgcacttttgtgtgtgtgttctttaataaattatgcttatttttaaaaaagaggaagcggcaaggccatccaccactcactgcatgtcctttatctgcacttgagattccttctaataggtacttttccctgggagatttcattttgtctcagacttagtgaggtccaactgtcactcacatttgtagcacctcccactttataatccctttataatgacctggtcagtgcttatcatcccccttacactgcatgttctgtaagagtagagaataaatcagagaagctcactgtacgaccaacccacagatatcatggaagctggacaactataggtggagagttaatgaatagttggaagctaaatatttgaatgrattcttttctgtttgatttagcattaagtagactccattttatattgcattttattattaaaacct

SEQ ID NO: 833991 - DNA, 616 bp, Homo sapiens
tttctctcatgattagactggtattatgcatttttgagaggaagactacaaagattaaatgccatttcatcacatcatttcaaaggtactatcaacatgacttatcactactgatgttcacttttattacctracctcagtagtgtttttcaagcttctccactgtagttaatatttttacccaattatccatactgtactttttggatggatgttactatgcaaatacaggaaataaaatttaaaagtagataagttgagtttcataaaaatttaaaactttttcttgctataaatggcacttcaaaaaagtaaaaatgcaactcagaacaggagaaagtatttgcaaatcatatacctgataagagactaatatacctaatatgtaaagaacatgtacaatgcaataataaaaagacaaccaattaaaaataggagatagaaattaaaaccactataagatatgatttttacataaacttgaaaagctaaaataaaaaagagataacaagttttgatgagtatgtgaaaaattggaaccctcattcattgctagttggaatataaaatggtacagtaaatttggaaaacttgtactatttctgaaaatgttaaa

SEQ ID NO: 833992 - DNA, 551 bp, Homo sapiens
gggtggaagccccaagccttggcagctttcacatgatgttgagcctgtgggtacacagaagtcaagaattgaggtttgagaacctctgcctagatttcagaagatgtatggaaatgcttggatgcccaggcaaaagttttctgcagtggtggggccctcatggagaacctctgctagggcagtgcagaagggaaatacggggtcggatccccacatagagtcctttctggggcactgcctaatggagctgtaagaagaagatgccactatccttcagaccctagagtggtagatacacagacagcttgcaccgtgcacgtggaaaagcctcagacactcaatgccagcccatgaaagcagccaggagggaggctgtaccttgtaaagacacaggggcagagctgcccaagactatgggaacccacctcttgcwtcagcatgacctggatgtgagacctggagtcaaaggagatcattttggagctctaagatttgactgccctgctggatttcagactagcatgggccctcttacccctttgctttggcca

SEQ ID NO: 833993 - DNA, 555 bp, Homo sapiens
caacttcaagttcatttaactgtcttctaacacattcgtttaatcagctatggtagcaatcttatttaagtaaggttagtagattcatgttgataatgaacttgataaatgagttggtaaaaggatactgttgcaactgaagacatttttgaagtggttatttgtatgttttaatggataaaaagtaattgttactataggatcctttttggggcctcagtgctcagggcagatggaatcctgtcaatcaaactttcagataataacaatttagccaccagagataaaggagcaatgcccatattgatatatagtagtttatagggccactgaacagaagctattatggctgcttgtaggaccaccgagtgggaaagcctgccatgttgctgttatggcagatatgattatctggaggctgtctgcaaggagaatccasctgtaagtgattcagaagctatcatattctatcaaggaaaaaaaaatgtggctggagtcatttgggcctcttgaacaaagaggtcagaacatggtcacccattttcaatttcttag

SEQ ID NO: 833994 - DNA, 510 bp, Homo sapiens
ggttcagaggccaaatgcctatttttatgtgactctttcactatctgtatcataagagctgcatgttctttgtagtttaaaacaaaataatggtcttaccaraagtcccacaattaaatcttgttgcaggcagcttttcttgctgcccctccataagaagtgaaacggttctcagacgtggattttaaactgtttgaagaaatgactgaagctgacctctactgggagccatctcagttcccaacctgcagcatgcacagctgcctctctctctccttctgcccacctcggcttgcctccccatccctaagtctccctggtattaattagtcatttcttgctgccctaacaaagtaccacagactggtggcttaaaccaggggtccccccacccccagggccacaaaccggtaccagtccctgcatggcctgttaggaactgagtcacacaatgagctgcacgcaagtacgctaagcttcatctgtatttgcagccactccccactgcat

SEQ ID NO: 833995 - DNA, 612 bp, Homo sapiens
tgaatagaattgccttcaatacagacaccaattagttttgttccrtaacactgttatagaaatgtgacattgaaaaactacttgcaaactactaaagcattcatctaccatgagttcatgtcatggagggaaaaatgttaattctacttatgtgagaaagcataaaagggttttttacaaagagcagccacaaggtcagaatacgactctgaggtaataaagtgaagacttctctgaaacctttagttgcttatacattctattagaactgcaaaattctgctgattcttgtttctcaacaccactgggatcgcagctcggtcacattatagattaagtggagagcgatgccagcctttaatgtttcttcttgaactgcatctggacctgctgctgatgctcttggctggcctcggttctcctctttggctccagcatcctctgactcttcctgtaatcactggtcagttcactacttagatcatttatggcaaagccttgaaatgtaccttcacattcattataagaataaaaaggcccagctagagtactctagaagttaaaaaaactgaagtgtagctaacattttcccattcatctgtagacaagcac

SEQ ID NO: 833996 - DNA, 575 bp, Homo sapiens
tcactgaattacaagtggtattggtgtgtcaatggaataactaaggataaaagaaaatgttattttatttacccattcaayaaatatgtatttaatggctattgtatgccaagttcagtctaagagattgttctggagataatggctgttgtattctgtgtaaggtagttggtatttgtcaagaagagtgttggagaacattaaatgtagagtcctttgtatgagaatgagatgtagtgcttgaagagatgtcagaatacactgggttcctagaaattacaatgaacagatcttgatggaataaccagatttaaccttttgcacattttcattaatggatacattctctttgagagaggttaatatagaggtgcttgaaagtaaggatttgaaatgtcaacattttccagttatctcttagtatacagtgatgtattcttaatctttctaaatgctttttttggaccaaatgaattaccaagtaaatcaagaaacaatctttcgatacctaacaaaactgacatcatgaaagaaactagatttttttcagctaatgaaatagcgtacataaaatt

SEQ ID NO: 833997 - DNA, 599 bp, Homo sapiens
cataatgtggtaatcgtacattttcaactaattacttggatccttttataagattttcacagcagtcaaggcaaaggtatacagaaaaatattgctcaacactgaattcattaattgactcagcaacaaatatttattttttaagccacaaatatgtgccaggggcaattaaaatagagggttacagcaatgaaaaaatcaagcacaaattcatgaggagcttgcatttctgtgaagacaacatagcaaataaaacatgtaagtaaaatatagaatgtgctacagtgaacaagaaaacaagaagaaatagaagaggtattaaatttagaatagggtgatcagagaaaccttctggaggtgatatttcagcaaaatccgaaggaaatgaggaaacaaaccgttttataactaagcagagcgagttcatgacagagaacactaaaagtatagaagcctgggggttagaacatcctggtttgacagaattcagcaaggaaaccagtgtggctggamaaaaggtatgtaagggagagagtgatacaaaatgaggtaaaagacatataggctgtaaactgtgaaagccgtgtaaaattccttgt

SEQ ID NO: 833998 - DNA, 599 bp, Homo sapiens
cataatgtggtaatcgtacattttcaactaattacttggatccttttataagattttcacagcagtcaaggcaaaggtatacagaaaaatattgctcaacactgaattcattaattgactcagcaacaaatatttattttttaagccacaaatatgtgccaggggcaattaaaatagagggttacagcaatgaaaaaatcaagcacaaattcatgaggagcttgcatttctgtgaagacaacatagcaaataaaacatgtaagtaaaatatagaatgtgctacagtgaacaagaaaacaagaagaaatagaagaggtattaaatttagaatagggtgatcagagaaaccttctggaggtgatatttcagcaaaatccgaaggaaatgaggaaacaaaccgttttataactaagcagagcgagttcatgacagagaacactaaaagtatagaagcctgggggttagaacatcctggtttgacagaattcagcaaggaaaccagtgtggctggaaaaamggtatgtaagggagagagtgatacaaaatgaggtaaaagacatataggctgtaaactgtgaaagccgtgtaaaattccttgt

SEQ ID NO: 833999 - DNA, 603 bp, Homo sapiens
ctaggaagccacacatacccatcacgtgatgtatgctcagaaaagacctgataagatcctaagcttttccatctggctcatctttaggctcatggaaaataggaagcaaaagataaggcagtgttgtaaacagactagctaagcgtaaaagaagctattcaacgtagaaccaattagcacagtccaggaaagtgctttattttatttactttgctccaggtgttcaaggaaatttatcaggccactagcttatcactaagctaaaaggagagagatttcagagatcacaggcaacacagaatgtatttttaacaaaagtcatttggaaaagtcagtgaacaacaacaacacaatctaacaaccacaaaaagcagcaacaacaaacactggagagggagagaatctgatctccataattactatgttataacattgaaaatttacggttttcaacaacaaaattatgggacatgcaaaaaaataacctaaataaatacacacacacacgaaagtatggcccaaacgacgggaaaaaataaattaatgcaaactgtccctaaggaagctcacacattgarctcagtagacaaatactttaaatca

SEQ ID NO: 834000 - DNA, 607 bp, Homo sapiens
ccggacacccagctttaaaatttctctcttttgtactctttccctttatttctcagaccagccaacacttagggaaaatakgaaagaacctaccttgaaatattgggggctggttcccctgataacaaggaaaagttgaaagaaactgagtggagttttattctttttatcttttagttttttaaatttaaatgaaattgtatatatttaaaatgtacagtgtgatattttgatatacatatacatggtgaactcattactacagtacagttaatgtgaattaacattcgtggttgtattttttttcttgtgttgagaatacttgggacatgcaatcttagcaattttttttctaaagaagacatatatatatggccaataggtataagaaacagtgccaggcacagtggctcacacctacaattccagcactttgggagaccaaagtgagagaatcacttgagcccaggagttcaagaccagcctgggcaacatggtgagactctgtctctacaaaaattagaaaactagtcaggcatggtggcacatgcctatagtctcagatactcaggaagttacggcaagaggatcccttgagcccaggaat

SEQ ID NO: 834001 - DNA, 595 bp, Homo sapiens
attgagtgctagctaaaaatagtagccctgcattcttaccataacatatgaacagtttttgagcagacaaatatgagagggagtttcccaggcattttaaatttttctggtaaagagtggkaaagatctagagataaaggacactgatttacattaaactatgttgataacttaatagtcatgtgtttaaaatttgaatattatttattaagctgaaaattgacatccatcaaattttttagcgaagtatatgtgagatactatgtcaaccagtaatataaatatattaattattattattatattcattaaagattctatcaagaatacatttataaaataatagtaagattccctattgggttttgtttttattatttcattaatcaaattttgtctttgttacctattaatatttcactctaataaataagtttagtttacacaatttatgaagctgttgacctgataagactattatgaacttagcatacacactgcatataaacctaggaaatctttcaatcacaaaacatatttgaaatttgtacattaagacaataacttggtacagagttcagcacactctttctct

SEQ ID NO: 834002 - DNA, 670 bp, Homo sapiens
atcaactccgcatgaatcattcctactccatacagcatatattaaaacactttttcatcaccttcttctgagcgcaatctctttgtcatcaaactcttagtagtttactacaaagataaagcattttcaaactcattgaggctcatatatttttctctgaaatgtcaataacattttcttcacattcattaaccgacggctgatgattcatttgtcaacttaccaatatcttaacaccaccctcaagcattttaatcttctattgtataaatctgaaaaaaaaaagaaagaaagaagttgtggattaatcagcttctgtgtttccgtacttagtaagctgaatactgttgaaaaaaaattgcattcattttaaattcattgatttattcattcattcatccactcattcatttaaaatgtgtgtgtatgtgtgtgtgtgtgtgtgtgtgtgtgtttaattgagtggctactagatccaggtgctgcacttgtgttaaggcaaggaaatggcagtgaagaaagccaaggccctactgtgatagagtctatattctagtaggaatggatggcaattaaaaaaagaaacagctaaatcaataggtgccagtcagaaataaatgaaaaaaatcaaagtawattaagaggcacagagtagctatggtgtgtgtac

SEQ ID NO: 834003 - DNA, 636 bp, Homo sapiens
gaagaaggaaagctaagtgatatctgaacacacagctgaatgcagyagtgaatggagccataggatgtctaaaggaacgcatcactggcagtaggtaggctctgtggtagaagtatgcttggtatgttggaagaagattaaattgcagagcaaatgaagttgatctacaacaataaaagctaaaataagaatgagagtttgtggagagatttgcaggccatagcagggaatttttattttcttctgaaagaaatgggagccattggaggccctggagtgaaggagtgatatactatggcttccatctgtgtgaagaacacggtaggagactgagagggaaaggctgttatgataatatagagggaaggcattagaaacttagattacgctggtggctgtgtagattataaaatgtggtcaatgtgcagacacatttgaaagttataaccaatagaacttgttgattgattaaatataaaatgtgagacaaagataggagtcaaagataactccaagcttttggcttaagtgagtagactaattatataatcacgaatatcattttagatatatatcgcaagtgtatggtttccaaccttaactgggcacaaattcttcttcacatccattcctatt

SEQ ID NO: 834004 - DNA, 207 bp, Homo sapiens
attttatatttgcctatttcaatagccgcttagcagttttcctttaccttcaatgcaacacacgtcmcttttacctggatacccatatagcatccccacaatcttcccatatcacacaatctttgcaggcaagatctcgatcacatccacctttatccaagattacctgagtaagatagattgatggcatcaatgggaatgatacat

SEQ ID NO: 834005 - DNA, 640 bp, Homo sapiens
tagctgtgaatgttaactttttcccaagtcaatatagtgattgctcaatgggctyatgacaaaatgatcatggtagctgggttgaagattatatatgtaatcaacaacatgggttttcccctcatcattgttaatcgtgctcctgtcaccatggagcacctaacctgccagtaataaatcccaatgttgagtcacctctacagcatttttgatggggggagagatgaagccaacctcttaggagaataatgaggtatgagaatttctgtaaatgtaggtgtgataagaataaatggataagaataaaatattagagtcaaattttaagaattttaaatagtgtattatttgctagtgctgccctactaaaatgccacaggctgggtggtttaaacaacagaaatttattttctcacagctctggaggctggaagtccaaaactagggtgctggtggagttggtttcctctgaggcctccgaccttgaccatagaaggccaccttctggctgtctcttcaaatggtgtccttccctgcatgcataccctggtgtctctctgtgtgttctaatcccctcttattaaaaaacaaaaacaaacaaacgaaaaaaaccagtcagattggagcacggcccagccta

SEQ ID NO: 834006 - DNA, 343 bp, Homo sapiens
atgttttttgatatatagaaaataaaataactgcaaaaactgtgatttaaaaaatatatctttatgcaaaataactgcaaatgaaactactactactatgctgatagcagtggagtagtattattgatgatatattgattactatcttgatagtagtggtatgctagtattgctcagatattgattactgcattgatagtactagtatattattattgattatatattgrttactatagtagtgatagtattttgttattattgatcacacattgattactgaattgatagtagtagtatgttactattggttatatattgattactatgctagtagtagtat

SEQ ID NO: 834007 - DNA, 343 bp, Homo sapiens
atgttttttgatatatagaaaataaaataactgcaaaaactgtgatttaaaaaatatatctttatgcaaaataactgcaaatgaaactactactactatgctgatagcagtggagtagtattattgatgatatattgattactatcttgatagtagtggtatgctagtattgctcagatattgattactgcattgatagtactagtatattattattgattatatattgattactatagtagtgatagtattttgttattattgatcacayattgattactgaattgatagtagtagtatgttactattggttatatattgattactatgctagtagtagtat

SEQ ID NO: 834008 - DNA, 646 bp, Homo sapiens
tcaatttcataatttaataataatcataaaggacatgaattccttctttcttcccactctgcctttgtgacagacattactagtgctcaccaacatttctggaatacataggctattacattctgctagcctaytcacaatttggtgggaccacgtggttaaatctagacctgcactgtccacatgtggctactgaactcctgaaaggtggttagtgcaaattgagatatgctgcaagtgtaaataaaatacacaccagatttcaaaaacttgacatacaaaaaagaacataaaatatctcattaattttttatattaattacatgttgaaaatattttgcatgtattatgctaagtaaaatatattattaaaactaatttcacttgtttatttttactttttaaaataaaaatggctaccagaaaactggttaatatatgtccatacacacctaggagaatggttcaaaaaaaaaatactgataatatcaagcactggcaagggtgtggagcacctggaaccctcatatatttctggtattaatacaaaattatacagtcactttggaaaactatttggcagtttcttataaagttaaacatgaacttaccatatggtttagctattccactcttaaatagttac

SEQ ID NO: 834009 - DNA, 608 bp, Homo sapiens
gacttcctctttattgatttggatgccttttctttctcttgtctaattgctctggctaggacttccagtgcaatgtcaaatagaagtggtgagagtgggcatcctccttgtcttgttccagttctcagggttcaagttttcaacttttccccattcagtattttgttgactgtgggtttgtcatcgtggcttttattacattaaggtgtgtcccatctatgctgattttgctgagggtttcaatcattaagggatgctgacttatgttaaatgcttttttctgcatctattgaaatgatcatgtgatttttgtttttaattctgtttatgtggtgtatcacatttattaacttgcatatgttaaactatgcctgcatcctgatatgaaccccaggtcatagtggattatctttttgatatactgttggatttggtcagctagtattttgttaaggatttttgcatctataggctgggtgcagtggctcaatcctagcggtgcctgtaatcctagcactttgggagacygaggtgggtggatcacctgatgtcaggagttcaagaccaccctggccaccatagtgaaaccacatgtctactaaaaatac

SEQ ID NO: 834010 - DNA, 673 bp, Homo sapiens
tcccttccatctgattgttcctgagttgtgtcttctataatcaaccagtaatctaggaagtaaacttttttcctgtgttttgtgtgctagtctagcaaacgattcacctagrgaggggttgtggagagcctgatttatagttggctggtcagaaccatgagtgacaacctggacttgggattggcatctgaattgggagcaattttgtgggattaaatccttgacctgtgaaatctgatgctaactctggttagtgtccgaactgtaggagctgatgctaagtctgatgagtgtccgaattgaattgaatgctaggatacctggttggtgtctgcagagaattggagaactacttggcgtgggaaactttacacacaggcacacacacacacacacacacacacagtatcagaagtgaagtattgagagtgcaaataaagagaaaaacagtgagttttttctacacagacagtctcacatcaaacattaccatgggtcttttcattttctgccccggggccttctttgaaatctgaagccacaggtaccacttggcccataggcaaacaaagccaggaagtgtagtaggtgttcgatcaatacatgctgaatgattgaatggtagaatataacagattaccattaaactgccttgtcagtagatgagcacagc

SEQ ID NO: 834011 - DNA, 594 bp, Homo sapiens
aattcagcctgcaagctgccatctgtaagtctggtcttccagctgcacaactgaaaacagcaggaaatactgaatttgaaccagagggagtgatctgaaactaggttgcaaagggatttaaaggtaaagrtcttagaaaataccccgtcagcagtgaaaagccatttgatgtttctaagcagataaatggtatatctgatctatgttttagaaagaattctagaagagtatgaaacaggagttggcatactttctttgtaaatggtaaggcagtaaatattttaggttttgcaggccaaatggcctctgtcacaattcttccatttctgctgttctggtgtaaaagaaatcatagacaatacataaatgagcacagttatattctaacaaaactttctttacaaaaacaggtggagagctggatttggtttgctgactcctgggacagaagacagactgaaggatgtctgaggaaatgaatgagtaaaagccaccatttttgttttgtaagtttttgctatagcagaagtattttttgttttgtttttttaaagaaagctttgttggatcctgacagacttctggtttcctact

SEQ ID NO: 834012 - DNA, 600 bp, Homo sapiens
ttttaagtggatcgtagacctaagtgtaaaatttatagaaaaggagaaaatcttcatgctgttgtggtagcacaaaaagcattaaccataaaagaaatatttatcaattgtatccattgagattctttctgctcttcaaattgttccatcaagtaaataaaaagcaagccacatgctgggaaaaatattgacaagatacattgggcaaaggacttggatccagaagatataaggaactcttacaactgaataaggaggcaaacaacctagttaaggagttgacagagtacttttgggagaccaggtgggagggtcacttgagcccaggagttcaagatcagcctggacaacacagtgataccccatcttaaacaaacaaacaaaaaaatgaacaacaaaaagaaactgacaaaggacttgaacagatatttcatacaaaaaaaattacaaatgactgataagcaccttgctatggtttgaatgttcttgtcccttccagaaattcttgtgttagaaactcartccccagtgcaacagtgttgggagatgggaccctttgggaagtgattgggtcatgagtgctctgccctcataaatgaa

SEQ ID NO: 834013 - DNA, 509 bp, Homo sapiens
agtacattcacactgttgtacatccattaccaccatgcagccctagaactcttttcatcttataaactgaaactctgaacccattgaactctccgctcccctctgttccagtctccggcagccatgttttactttctgtctctatgaattgactactctaggaacctcgtataagaggaatcttacagtatttgtccttttgttactggcttacgcatttaacatgatgccttcaaggtccacccatgctgcagcatgtgtcaaaatttccttccttctttgggactgactaaatattttttagtattccattttatttcttctgatagcttctcagatatagtcatgcatcacttaacgacagggatatattctaagaactgcgctgttaggcaatttcgtcrttgtgcaaatatcatagagtgtatttagaaatgtgattgtactgaaatactgtaggcaattgtaacacaatggtatttgcgtatcaaaacatatctaggtcaggc

SEQ ID NO: 834014 - DNA, 586 bp, Homo sapiens
  misc_feature 572: n = A,T,C or G
atgtacaaatatctgtttgggtcctttcaattatttcaagttgataccaaaaagtggaattactgagtcacatgmtaattctatatataattttttgaagaactgtgatagcattttccacagtggctgcaccatttcacatacccaccagcaatgcacaagggttccaatttcttcacgttctcaccaacatttgttattttctggggatttaaaaaataataataatagctacaatggctcacacctgtaatcccagcactttgggaggccaaggcaggcagatcacttgagccctggagtttaagacctgagcaacatgaaaaaatcccatctctatttaaaaaaaaatagaccagatgcagtggctcaagcctataatcctagtactttgggaggccaagtcaggcagattacttgaggtcaggaattcaagaccagcctggccaacatggtgaaaccccgtctctactaaaaaaaatacaaaaattagccaggcgtggtgacacatgcctgtagtcccaactacttgggaggctgagggaggagaattgcttgaacctgagaggcanaggttgcaatgagc

SEQ ID NO: 834015 - DNA, 601 bp, Homo sapiens
atttagactgtttattactcatggcataataggtatcatgagcttcacattaacatcggccccactatctccctaagtcctataggggcaatgsagaggaactcaggttagtactgtgcacaccagggtctgtgttacatttgaggaattcagacactacaagatcctgaccatatataggggctattgccaaaaatgctcttcctcacccctagaaataggcattgtcttttatgtgtgtgtggcaaaatacacataaggtttgccatttaaccgttttaaagatccaattcagggacactaagtatattcacagtgctatccacctatcatctctgtctagttccagaatttttcatcagtccagacagaaacctcataccaattttaagcagttattccccattcctcccttgccccagtcactggcaactactaatctgcatttttgtctctatgaatttacttattctggatttttcatataaatggaatcacacaatatgtgaccctttgcattttgcttttttcacttagcataatgttttcaagattcatacattttgtagcattgtttcttttcatgaattatattctactg

SEQ ID NO: 834016 - DNA, 525 bp, Homo sapiens
aaaagcttttgtgtgtcaagggccactaaaagcaacctgtgcctcctgggttcaaggtgattctcctgcctcagtctcccaggtagatgggactacaggcgtgcactaccaaacctgactaattttgtatttttagtagagatggggtttcaccatgttggccaggctggtctcaaactactgacaagtaatccacccgcctcagcctcccaaagggctgagattacaggcatgagccaacgcaccaggccaagaccaattttattttaatttgcatttccctaatgactgaatatcatcttattgtttgcccattgatgctgaatatcatcttatttgtttgctggcccattgtttatctttggagatgtctattcaagtcctttgcccgtgattaattgggctgtctttttattgttcagttgtaatagtttttaaatatatatagtacacaagtttttttatcagatatatgatytgcaaacattttctattattttgtggtttgtcttttaacccttttag

SEQ ID NO: 834017 - DNA, 525 bp, Homo sapiens
aaaagcttttgtgtgtcaagggccactaaaagcaacctgtgcctcctgggttcaaggtgattctcctgcctcagtctcccaggtagatgggactacaggcgtgcactaccaaacctgactaattttgtatttttagtagagatggggtttcaccatgttggccaggctggtctcaaactactgacaagtaatccacccgcctcagcctcccaaagggctgagattacaggcatgagccaacgcaccaggccaagaccaattttattttaatttgcatttccctaatgactgaatatcatcttattgtttgcccattgatgctgaatatcatcttatttgtttgctggcccattgtttatctttggagatgtctattcaagtcctttgcccgtgattaattgggctgtctttttattgttcagttgtaatagtttttaaatatatatagtacacaagtttttttatcagatatatgatttgcraacattttctattattttgtggtttgtcttttaacccttttag

SEQ ID NO: 834018 - DNA, 625 bp, Homo sapiens
ttatgcaggtgaatatatagggaaaacaatgtattcaactaaaccccaccagccagcaaaagtaactgataaatggcaagacctaaaaggtgagagatggyagatacattttgactggctgacggcaggagttcaacatttatagcaataatatcctacaagcaagagaatgattggttacagaatttaaaaacaaagttcaatgcagagagggaagcagaatccataatccagatttcattccttcattgttgtggttgttaaaatgttgtcaagagttccctcatactgctatctcaaaaccaattaattcccttttctttcttgtaactaaccatattctaatagtgtggtagctaatggcagtaagcacaaagccacatgtatttatgtaattattacttgctcagaaatatttcctgtattgctatagtgctatagcactatgataatagtctgattttcttggaagacatctgtaatcatctatggagtatttcttcttatctgataagttgtaatagataatacagatctattagaacaaaactaaaattcttattagttcttagaatagaataatagtaagaatcatgattattattattgaaatccaggactactg

SEQ ID NO: 834019 - DNA, 577 bp, Homo sapiens
actctgctgagaaactttacgtggattatctcatggtatcatctaatttgatcttcataagagctttakgagtagagtgaacgtataatttatcatacaaactaagacacttctgtgagtaaaagggcactctattaataattacacagagacaacaggcagaaactgggacgtctcaggcaagccaggacagatggacaccctgtctacaaggcccatattcaagaatctggttttagaaatgagaaaatggagtcatgaggaagttaagcaccacacccaaatttccaccactcttcagagcagggcttcaaaccagcccatctgactccaatcacacggacacaagtaatgacaattcaaggtgaaacaaggttttctacaagaaaagggtgagacctggttcaggctggaagttgaagcaggaagagagggcagcaacagggcaagggaggccagccaggacagaggcacctgagctgagagcaggtgggaaagggtgcctcggggacacaggatgtgcagcaggtggaggcagaagagggagggagttgtttggagaagagggaggagctgg

SEQ ID NO: 834020 - DNA, 567 bp, Homo sapiens
gtaggctcctttccaggcctggagctgtgagactcaggcctagtggtccttgggcattattcccaagcggaataatggggaagctagatcagtcttgctgccctggggcttataytgagatctagtgccttctatcggggaggtggagagacaagggcaaggccatggagtagggaggatgccctctgaggcccctttcagcctggactttctggaattctgagtccatgaatcaccataacgacattttgtctgcaggatcaggaatagaatgttccattctccagcatgggacagagggagtaggaggcagccttcatggtctcaactaagctgggccagaaaggctgtgtccccatcagcctcaaattcctccacatttgctgctaagggatccacagagcatccttcctccggagacataagagaggatgtgaatgtgagagagaaagtttgcccaggggaagagaaagaaagcaaaagacactggggcttcagcagtcagaaggtagaccacagacttatgctgataataaataattgattcttccatagtgtttgccatca

SEQ ID NO: 834021 - DNA, 567 bp, Homo sapiens
gtaggctcctttccaggcctggagctgtgagactcaggcctagtggtccttgggcattattcccaagcggaataatggggaagctagatcagtcttgctgccctggggcttatactgagatctagtgccttctatcggggaggtggagagacaagggcaaggccatggagtagggaggatgccctctgaggcccctttcagcctggactttctggaattctgagtccatgaatcaccataacgacattttgtctgcaggatcaggaatagaatgttccattctccagcatgggacagagggagtaggaggcagccttcatggtctcaactaagctgggccagaaaggctgtgtccccatcagcctcaaattcctccacatttgctgctaagggatccacagagcatccttcctccggagacataagagaggatgtgaatgtgagagagaaagtttgcccaggggaagagaaagaaagcaaaagacactggggcttcagcagtcagaaggtrgaccacagacttatgctgataataaataattgattcttccatagtgtttgccatca

SEQ ID NO: 834022 - DNA, 540 bp, Homo sapiens
aaacaataattccctatttgcccctctctccaagccctggcaacccacattctacttttggtctctatgattttcagtactctaagttactcatataagtggaattatagaaatatttgcctttttataacaggcttatttcactcagcataacgtcctcaatgctcatccatactatagcgcattgcagaattccattcctttttagactaatgttccattttacaaatatagcacattttgcttctccattcatccgtcgattgggatttgtgttgcttccatatctcagctattatgtataatgctactataaataaaagtgtacaaatatctcctcaagattttgcttttaattccttttgggtatatacccagagtggaactgatggctcatatggtaattctattctgaattttttgaggaaccaccatatggttttccccagtggctgkaccctttcacattcctactaaaagtgcacaggggttttcatttctttatacatttgccaatgcttgcaggtatgtatgtatgtg

SEQ ID NO: 834023 - DNA, 569 bp, Homo sapiens
ctgttaatttttgaatatggtattatataagggtccaacttcattcttcatgtggatatccagtttttccagaatcatttattgaaatgactctccttttcccagtgaacgctcttaacacccatgtcaaagattctttaaccattttgtaaaggtttatttctgggctctattatattccaatggtctatgtttctttttctatgtcagtatcacactgttttgattactgtagctttgtagtaggtctggaattagaaagtgtgagtcttctggctttgttcttcttttactttttaaaaattgaatccaatatattacgtttttatggggtacatgtggtattttgtgtgtaataatcaagtcagggtttgtgacaggtccatcactttgagtatttatcatttgtatctgttgagaacaatttatctcttctagctaytttaaaacatataatacattgttattgaccctactctgtagttgagcaatagaacttatatttttatttacgagcacgtgcgtgcccattaagctacctctcttaattcccccttgaatcccctcat

SEQ ID NO: 834024 - DNA, 638 bp, Homo sapiens
atgactctggggatgaagaaattaatatatcccagggataggagcttataatgtcaagaatgataatagcaactcacatgtgaatatcattctcataaawcttgaaataaaacactttcaagaaaattaatttatttctaacatcgatcccgtgaggtcaataacctcatcccacttttacagaaggggaaggcagggcttcaagtcacatgcatctgtccactctaagtccagcgccactcctcaagcacacacactccggataatgagctcttggacaatggcgagtgtacaaacagaacctgtacttctgccctgggtgggagtctagaccagctgctctttgagtctgatctaactttgagatggtaaaattctgcaagtcagtggcaggactggctgcctcatggggctgacaggctgagctgtgggtggtcaggaatgtttcaggacttcctgtgcccagtgttccaagtcggagtgtctagattaatgatccatctccaagcagaccaagccgaggccctgacgccaagtgtggggcattgattagactttacactctgagcttgctttcatcttaagccctccatgtgggctgggccctaataattaacattctctgagccccacaatat

SEQ ID NO: 834025 - DNA, 570 bp, Homo sapiens
gggatcctgggaaacaccattatcagacagtgcctgctcaccaaaagtcctcctgcccaacagcttcctgagccatattgaaacccaggtttgcctgactccaaagcctgtgcttgaaaccactgtgccccacagcctccagcaccgtcagcaatgagaatccccagataagatgaaaacagcgcttccagccaggagagcaaggcccacggctgcagcaggaagagccacaggaggaactgggctcggtttcatgaggaggcaattatggttgtcagaggcacctcagaggctggatgatacatgtgtgaacattccttcattcattcctagaaatgagacattacagaatatggttgaagcaaagggtctagcatcagacagagctgggtttaaatcttggctctgccactcaaatgccaggtaaccttagtcaagccatctgaactgcctcactttcactcaactgtaaattgagaatgatcgtatccctattttaaaggttgttgtgaagattaaatgagataatgtrtataacagttattagaccctcacaaaagtcttacaagg

SEQ ID NO: 834026 - DNA, 509 bp, Homo sapiens
ctgagaggaaaatttataacactaaatgcttaccttagaatggagaaaggtctcaattcaataattaaagtttctacctcaagtwtaatattcaaatacaaactttaattattgaattgagatctttctctatctcaaggtaagcaggaagtgtttttaatgttacttgaatgttgcttcctgggttaatgtacttattattatcttaagaaaaattatctttcttctgtaactattttattctatataaacacttttactcaagagcttgaaagcatgcctactgagagtaagtgactcagagtgagatgacctcaccctgttggggctgctcctggattggctggacaggcagttgttggtgaattgagcatttcactcaacaacttatttctcaggtgatagtgtctgatgaatttttactctcactacaaattctactttgaagaataagaaccaaatccaaaggagcatatttgatttgcacaagaaatacaccagtcttgaga

SEQ ID NO: 834027 - DNA, 539 bp, Homo sapiens
agcagtaatattttgaaaggcatcttcctgagcagtaggtctcaacagtgggcttaaaatattcagtaaacccatgctatasacagatgtgctgtcatccaggctttgttgttttatttacagagcccaggcagactagatttagtgtaattcttaagggccttgggattttcagaatggtaaatgagcattggcttcaatttcaagtcaccagttgcattagcccctaacaagagagtcagcctgccttttgaagctttgaagccagacattggcttcatctctctagctttcaaagtgctaggtggcatcttcttccaagagaaagctgtttcatctacattgaaaatttgtttagtgtaggctccttcatcaaggatcttagctagatctggataacttactacagctcctccatcagcacttgctagctcaccttgcacttttatgttatgaagacaccttctcatcttaaacctcatgaaccagtctctgttaacttcagacttttcttctgtagctccctcacctctcttggc

SEQ ID NO: 834028 - DNA, 616 bp, Homo sapiens
tgatgccctaatccatggaaactgtgactatgtcagattacaagaccaaggggaatgaagactgcggatggaattaagattactggtcatctgactttgagaaggcaaagattatcctggattatccatgtgagcccacagtaatcacaaaggtcctttaaatgtggaagagtatggccagagtcagagaaagatgtgcagatgcagcaacgctgccagatctgaagatggaagaagaggccatgagccaagcaatgcaggtggcctccacaagctggaaacggcaaagacatggatatttccctagaacccccaaaaggaggcagccctgacaacaccttgactgtagcccagtgggacgcatcccgtgcttctgacctccagaactgcaggataatgaatctgtgctgtgttgggccactgcatttggtaatttgctacagtaataacagcagattcatgcagatgcaaaagcagctcccacttctctcctgctcaaagcgcagcaggtcgcagggctctgcagaagaatctaaaggcaaaaccccatcccaaaaccctcccttgctccctgtgtggaygtcctcctgaggcccacctgggctttgtctggcta

SEQ ID NO: 834029 - DNA, 612 bp, Homo sapiens
gcctcttcttaacctcattgtaccttgaggtatcttaacattactctccctggcaggaaggmttgattgattgtctcttggcattcagaaacccccattaatgtaaaactaaccagtcgttctgaactctggagaattaatcacttaaatgtgagaattactcaataaaccattcaaacatgcaataaaccaagccattaaaaattaatcgctcgacatcccggctgtgtaaacagggctaataagatcctggcagcctagaaagaggaggaaaaggaggaagcaggaagatgatgcctttaatcagccactcccaaggaccggaatggatacaccaatgtccaggacacatatcacaaatcatcagggtaggtgacatcttgtccctacggcctcccagcctgtccctaggacaagagtggataggtaggtgagagagaggagaccctcagtgggctgttaggaagaggcagtggggttagagttacagctctcaacaaatacttactgagcaccttctatgtaccatacactgcacagggctctgcagatatagccatgaacaagacaacagtggctgccctaaggaagctgacattggagtggagggtg

SEQ ID NO: 834030 - DNA, 333 bp, Homo sapiens
cagacaccaaaagcataactgtttgcccatgcaattatacaaatgtggtttatagcactaccataatccttgattgattgattgattgattgagacaggrtcttactctgtcacccaggctggagtatttctttattttcagtttttcctactgtcacttctttaatccccttttgcctaaatggcacaaatccctctccttttagatatctgagatcagtgtggaaggtctactggaaatctgcattcagttataatgatacaaacctatactattcaagtctctagagaatgttctaaaatgtaatgatatttctaaaacattccttatac

SEQ ID NO: 834031 - DNA, 606 bp, Homo sapiens
gctcttcagaaatcttgtatctactgaactccaagaacatcatttattcagtacccaaggatgggacatagccaatgatgatgatgggaacattttcaggaactgtgctcactcacatagatttttgttsatggaataagtttctgaaggtctgtttatcagggtaaaacttcagtcctgtatcaactaacaatcccatacagaagggtcactgtttatatttctccaaagcctggtcaaaagtaactttgactaatttgattaaattgattgataaagtaaatcatatcaccaaaacacttctcattccaatgcttgatagttatggaatttgctgagaccacccactgaatacccgttcaaatgaatggaatctcacagagcacacataatcatctctgacttttgtagccatagggatacattaatacctgtgcctcatacttaactgaaaatcaccagttgtctgctgagtagtttactgcatgtcaaatctgaggtccagtgtaatagactgttttaccacttctattcagaattttctaattcatagacattctaattttatttgtctttttctctcaaataccatgatagggtgaaagt

SEQ ID NO: 834032 - DNA, 606 bp, Homo sapiens
gctcttcagaaatcttgtatctactgaactccaagaacatcatttattcagtacccaaggatgggacatagccaatgatgatgatgggaacattttcaggaactgtgctcactcacatagatttttgttcatggaataagtttctgaaggtctgtttatcagggtaaaacttcagtcctgtatcaactaacaatcccatacagaagggtcactgtttatatttctccaaagcctggtcaaaagtaactttgactaatttgattaaattgattgataaagtaaatcatatcaccaaaacacttctcattccaatgcttgatagttatggaatttgctgagaccacccactgaatacccgttcaaatgaatggaatctcacagagcacacataatcatctctgacttttgtagccatagggatacattaatacctgtgcctcatacttaactgaaaatcaccagttgtctgctgagtagtttactgcatgtcaaatctgaggtccagtgtaatagactgttttacyacttctattcagaattttctaattcatagacattctaattttatttgtctttttctctcaaataccatgatagggtgaaagt

SEQ ID NO: 834033 - DNA, 470 bp, Homo sapiens
actacaaacttaaatgtcttttcaatggaagaggtgtttttcaataaaattatagtatacccacaaaagtcaatattttgcatactctggagttatgtgatagatttatttgtattgacatggactattttgggaaatagttttagcaaaacaaagaaaggtacaaactttcagttataagatgaataagttctggagacctaatgtacagcaaggtgactacagttaacaataatattgtgtatgcttgaaatttgctgagacattgaatctgctggcaccttggtcatggatttcccagcctccagaaaagtgcaggagtggataaaatgttattaatgtaagctaaaatatcttatatatatagcagaatattatttttgctatattagtcaatgagtccctctccactatatttctcttttattcaatttaaamtggacattgacacccaagacctcagggctgtt

SEQ ID NO: 834034 - DNA, 493 bp, Homo sapiens
ggtctcatgagacttattcactactatgagaacagaatggggaaaactgcctccatrattcaattatctccacctggccccgcctttgacaggtggcgatttttacagttcaaggtgagatttgggtagggacacagccaaaccatatcagtggctgaacctctctgtgctctggtttcctcttctgttgaatggacacattccagcacctaccccaaggctgaggatcaagtgaggggatgcacagagtgtgcttagaaggaacctggcattctgcaagcatccaacacatgtggctatgacgagtagctgttgtcattattgttattcctcgatattcttccgtgtgctttcccttaaggccagttttgttgcaccggcctgtgataccagggtgcagagggcacctgacattgctcagggaaagctagctgccacacagtagtcaacctcaaatatgtccttgatggcaaatctacctgacccagatgcc

SEQ ID NO: 834035 - DNA, 614 bp, Homo sapiens
cccagcactttgggaggccaaggcaggcggatcacgaggtcaggagatcgagaccatcctggctaacacggtgaaaccccgtctctactaaaaatacaaaaaaaaaaaaattagccrggcgtggtggcgggtgcctgtagtcccagctactggggaggctgaggcaggaaaatggcgtgaacttgggaggcggagcttgcagtccagcctgggcaacagagcgagactctgtctcaaaaaaataaaaaaaaaaagaatgaaagacagcataaataaaacagaatattatgaagaactttttaaaaaaaagaaaaatattatgttgaggttacaaaaagtgtttatgccaaaaaacaattcaatttctagagccattgttataattgttatggatgctattattgtttaaaattccatgatttaattttagttataatagtatggataggctctcttttttaaaagatgaaggagttggcagtcttcccacttcttttaccctatgtcttcattagttgcattaattgtttaagatttggaatatttgcctgctgtggtggaatcccagcttttgcagtcatttagttttatgtctatatttatcttatacaaag

SEQ ID NO: 834036 - DNA, 614 bp, Homo sapiens
cccagcactttgggaggccaaggcaggcggatcacgaggtcaggagatcgagaccatcctggctaacacggtgaaaccccgtctctactaaaaatacaaaaaaaaaaaaattagccgggcgtggtggcgggtgcctgtagtcccagctactggggaggctgaggcaggaaaatggcgtgaacttgggaggcggagcttgcagtccagcctgggcaacagagcgagactctgtctcaaaaaaataaaaaaaaaaagaatgaaagacagcataaataaaacagaatattatgaagaactttttaaaaaaaagaaaaatattatgttgaggttacaaaaagtgtttatgccaaaaaacaattcaatttctagagccattgttataattgttatggatgctattattgtttaaaattccatgatttaattttagttataatagtatggataggctctcttttttaaaagatgaaggagttggcagtcttcccacttcttttaccctatgtcttcattagttgcattaatygtttaagatttggaatatttgcctgctgtggtggaatcccagcttttgcagtcatttagttttatgtctatatttatcttatacaaag

SEQ ID NO: 834037 - DNA, 581 bp, Homo sapiens
aggtgattccaatgtgcagccaagattgagaacatctgtcatatattccactcaaaaaaaawttcacaactttgaattttgtcctttacataaaattgccacaaagtatctgtggttctcatgttctactattttgataaatgaaaaaatacttgtattaaaaatatattccaaatacccttctaaccattctcaaaactgaaatactcctagaaagacttaatctaaatgtttgtttgccactagcatttttttctaagttcattaatttttacttcatgaattagaatatttcaatagcatgtaaatgtacaattctctgtagtgtgatggttaagcattggggatttgatgctggcatgtctaggtttgaatcctggctctataattacattagagcaacttaaattctttgtgcttcagttttatcatgtgtagaataaggtcaacattagtacctaacttgtagaccttagaattatgtcagaattaagttacatataaagaagacttagaataatgcctgttacatagtaaaaacccaatgaattttaggtatttctattgttattttgtgtgta

SEQ ID NO: 834038 - DNA, 496 bp, Homo sapiens
cattacagacttaaatctaagacctcaaactatggaactactaaaagaaaacaytggggaagctctccagtatattggtctgggcaaaaatgtgttgagcaatatcccacaggcataggcaaccaaaacaaacatgaacaaatgggaccacatcatgtaaaaaagtttatgcacagcaaaggacacaatcagcaaagtgaagagacaacccacacaatgggagaaaatacttgcaaattatccatctaacaagggattaataaccaaaatatataagaagttcaaacaactcaataggaaaaaaatctaataatccattttaaaaatgggcaaaagatctgaatagacatttcttaaaagaaaatatacaaatggtaagcagacattaggtgctcaatatcattgatcatcagagaaatgcaaatcaaaactgcaatgggatatcatttcaccccaatcaaaatggattttatcctaaggacaggcaataaaaaat

SEQ ID NO: 834039 - DNA, 367 bp, Homo sapiens
aattcaaacatcttttaaaacaaaacttatcaaattgatgtccaactttaaaaaaaattcaatmtgagccagaaaagatttgaagagaaaaatgagaaagaatttgctataccaaaatttaaaacaggctataaaataataaaatttacacaatagtctggttttggtgaatatcagacaaatatcaatgaaatgggataaaggtgaagaaatatatttatatatttgaatttaattaataataaaaattacattttacatcagtgtgtaaaataaagactagtcagtcacaattgtttgataacctatctatttgaagaaaaataaagttagactgttattttattttcaaaaacttaactctcca

SEQ ID NO: 834040 - DNA, 627 bp, Homo sapiens
cttggtctgtacagcttttatttccttttcctgtctcattgcatttsctcaaacttccaacatggtaagagtgttttgcttctgatatgaggggaaattgtccagtttctcaccatgaagtatgagtttagctacagggttttttgtaaatattccttatcaagttgaggaagttccccctgtattcttattttgtagagagttttattatgaatgggtgctgggttttggcaaatgcttttgctgtactatagacatgatgtaattttttcttccttagcctgtgaatgattacaattttcagatgttgagccagccttgcatacctggataaatccagcttggtcatggtgtaaaattatttttatacgttgttagatttgattccctcatactttgctgaggatctccacatctatgtttatgagaaatactggtctgcagtgatcctttctttaaatgtctttttctggttttgatttgaggggaatgctaaataattttatagaattatttagcatttattccctctatttctgtcttctggaataggttgtggagtactgaaataattatcttccttaaatatttgatagaattcaccaatgaacccatgcgggcttggtg

SEQ ID NO: 834041 - DNA, 640 bp, Homo sapiens
gtattaagctttatatgtactctacagatgatttaaagtatgcaggaggatgtgtgtaggttataggcaaaaatagcctttkgccatcagggacttgagcatccgtggatctgcgtatctgtgggggtcctggcacctgccccaccctggatattgaggactgactgtgctgatacaggaggcaggggtggaggacagagagggtgcctaaatagtgcagggcttcaattttgggtgaggagagtgttctgaaattgactgtggtgatagttgcatgtacctctttgaatataataaaagccagcggattgtacactttgaatgggtgagtagtatggggtatatgaattatatctcaataaaactgcttttaagaagtgagagaaggccgggcgcagtggctcacgcctgtaatcccagcactttgggaggccaaggtgggtggatcacctgaggtcagtttgagaccagcctggccaacatggagaaaccccatctctactaaaatacaaaattagccgggcgtggtggcacatgcctgtaatcccagctactgaggaggctgaggcaggacagttgcttgaacccgggaggcagaggttgctgtgagccgagatcgcgccgttgtactccagcctgg

SEQ ID NO: 834042 - DNA, 534 bp, Homo sapiens
atggctgagtcatatccactgtgtaccatattttctttatccattcacctgttgatggacacacaggctgattccrtttctgggctgtggggaagggtgccgcaatggacctgggggccgattctcttccacacaccaacctcatttccttggggttgtagccagtagtgggattgctggatcacagcattttgagaaacctccacactgttttccatagcggctgtactaatttacatttccatcaacagcgtgtaagagttcccctccctccacatccgcactggcatctgctgtctttgtctttttggtgaaagccagtcgaacaggggccaggggacagctcgttgtggttttgatttgtatctccccgatgatccgcggtgctgaggattctatcaaactggagcttctgcacagcaaaggaaacaatcaacagagtgaagagaaaacccacagatgggagaaaatactagcaaagcatgcatctgacagcggttaatatccagcatcctgaaattttaattccaagtg

SEQ ID NO: 834043 - DNA, 570 bp, Homo sapiens
ccctgtgttgtagaaataaactaagccacagagttagaagaatggagatcagctcacacgtgccgctaaccagctctcaggcaaggcaccctctcttccctaaactccagtcacctaaactccaattagaagactaagacagggccaggtgtgctggctcacacctgtaatcccagccctttgggaggccaaggcagatggatcagctgcggtcaggagtttcagaccagcctggccaacatggtgaaaccctgcctatattaaaagcacaaaaattagccaggcttcgtggcgtgcgcctgtgatcccagctacttgggaggctgaggcaggagaatcacttgaacccaggaggtggaggttgcagtgagctgagattgcgccactgcactccagcctgggcaatagagcgagactccatctcaaaaaaaaaaaaaaagaagactaaggtggggctggtctatgtctcaggttgttagtgacaataaaataagaatgtygatgtattttttaattaaaatactattttttataggcttacagaaaagttgagcacaaagttcacagagt

SEQ ID NO: 834044 - DNA, 631 bp, Homo sapiens
ccatggaatattttaaaggctgaaaactactgaacagacaaaaccttctgcaaagatccttttatattcataaggttgataacgaaacttgtctctccatcatgagagaactgagaacaaacagcctcactcacggaaggactttcattaatgtagccacatcccatcgacaggcacaaacctgagcctccggccactccaccctaacacaatgttccttcagcacgggagccagcagcctccagaacggcctttgctttgctcaaagcacacacgctgaggacacgggatccacaccctgctcagacgccatttcttccctgttcccatggtgacactggggccctcggagaagagctctgtagtctctaaacgacaggaatgacccccccagaaagaaacctgagtgattctggggaagtaactcacagcctccatctcacaatcaaagaaaagttactataagtaaagaaggctttggtctagccagagagttcctgccttctgtgagtcctctstcagctctggagtggagaggaacagaggggagtggtccctggagccagaagaacacagcatactggtctgaggaactactttaaacggtgttgtggttggatttctcctgagt

SEQ ID NO: 834045 - DNA, 416 bp, Homo sapiens
agaactagcacttcaggaaaaaacaagtggccaaagagtgatggggcttgtgtgatgagcactgggacaatttgagcctcaaactactaattatagtaacaggtgattatttattaaataggtgatgattcttaagaaaaatgcatatgtttgtattaaaagaaagaaatggatgaatagagaaataaatgggggagaagggaaagtgctttcttatagtggagtgtcagctaataaatgtaggagaaaggaaggaaatagtcaccatttgatgaccaccaagtgctaattgttgcaaacagaaatttcattccatgctaaaaccaatggcggagaaattyaatgagaaacaatatttacaaagagtatatctctgcaagatacaaacacaaaaatagtaactatttaggggtggg

SEQ ID NO: 834046 - DNA, 577 bp, Homo sapiens
aaaatacttaaactaaatgaactgatcaatagcacaccagcaaatgtccagctgaatgccastaatgctgtttttcaaaaatgtgtgctgacagaatttggaaaagtccttcacaagcttatttattagctttgcataagggctgttttatggcccgtagatttttgcggctcattgtttttattgaagaataatgtacatacagaaaaatgcacatcaaatgtacaacttcatgaattataaaaaaatgtaaatatgcctttttattaaataatcactgcccagctcaaaaactagaacatgagatgcaggcatctgcccccttgagccttctccctattctttctcctttattcagtctttccattctcctgacctctcacctgcagttttgcctatttttaaactcagtgtgatgaatggaatgaaataatgtttgctgtgtgtaccaccagttcattcattcatactacgctattcatgtactatttgtccgtgtgtgagtatactgtagtttatccatatattccaattgtccagtggatccattggttatcatttgggctgcttctagttc

SEQ ID NO: 834047 - DNA, 563 bp, Homo sapiens
gcagtttctcaatatgaggaaattagagaaaggtattcatgaggtttgacaggctcggctgagtggttctgggattaaacttgtagggtgaagtttatctatgggtggagtttagtttatcacatcctagcttggattgggaggcacagaacaatgtcttgaaagaaatcttgaagaattcacttgatttatgtaagtaaatagttgtttcatagtcttagcttccagaagcaaatatttgttggggcaagcagcaaattcttttaatttaatcttaatatacttgtatgtgtgtgtttagtataacatcattattaaattaggtgataagtttacattttaacctaaaatattaactattttagtgtattcaataactatgagtctctttgaatttacacctttaatatactgtaatgctttccttaagaatccaaccacattaattttcttgtatacatattaatagttcagtaactgttgtatctaattgaaggsagagttcacttatgttaaacaaagtgatctctctttgatgtgcattttaaatgaactacataatt

SEQ ID NO: 834048 - DNA, 591 bp, Homo sapiens
ttttttcagttctgtcagttttttcctcatgtagtttggtgctctgtccttaagtgtgtacacattaagaattgtcaagtctcctggactttttatcattatgcaatgccsttctctatccctaataacctttccttgctttaaattcagctctgtctgaaattaatatagctttttctgttttcctttgactactgttaacatgttatgtttttctccttcaatttacatttaatgtatatgcatctttatatttaaagtggttttctttgtttgacaacatatagttggtcttctaatacactctgacaatctctgttttttaattgatgtatttataccattgatactcaaagtgactattgatatagttgaattaacatttactgtatctgttactctttccatttgttacccttgtttttgttcctatttttgtcttctgctatttttctacattttatggctttcattttgtatttttatttttctccttatttattatatcaattacttcttttttaaaaagaaaaacttttttagtggtggccctagaattgtcaatatacatttacaactaatttaatccaa

SEQ ID NO: 834049 - DNA, 469 bp, Homo sapiens
tttatatttttcaaacttttcagtgtctcatttcatattagttttaattttcttttcatgagatttaatttttatggagattttyatttgttcctttataaattccgtgtcttcctgagaaagcctctaacatttcagttagaaataaatttatccaaattacttcttgtgttttgaaggttttatttcatttaatcatttaatatttgactggtattaacattattccactgtaaaatgaacttgtataatttatgattatttatatagaaaagctgtattagtttttctgttgctataaaaaatttattatttttttctgttgctatatttaaaaatcaagctaaagcagccactcctaccatcacaaacacacacacacacacacaagcatgattctatacacacacacacacaaattaggacctttttctccttaaatcccagcaatcattgtcactacagatat

SEQ ID NO: 834050 - DNA, 573 bp, Homo sapiens
gtactaaaatttcattatcattatatagctgacattggaccttcttcaaatcatttgagaaatgactggtgaagctatcataggacttggcatgtcttccaattcatcaaggtatcagacaaacccctcaaacyttagacaggaatgtttaggatatcatgggagtcttttgttgtgtgctacacccttgattatatcttctgtaaacatggcctggattgttttcatcaaaattattaaaaggatagtgtgagggtgagaatgctttatctccaaggaaatatgactcaagtaaattttaagtggaaaataatatgatttcatctttgaaaagtagacaagagtagttttagagaaaactagagaagagagttgcagaatctttaaagtgacccaaattctgaagctgatctcagtgttgtttggggaaaacactgagtaacatgaacctaaaccaaacaaatgaaaactcaagtaatgataataacttatatttagttgaaatcatcatttataccaatgaaaatctgaaaaacttgaaaagcttctttccaaatccccttgttcacctca

SEQ ID NO: 834051 - DNA, 546 bp, Homo sapiens
gacacctctgagcctgcatggatgctgtaaagggggtagggccttcccagcccccgagggtgcaggcggcagagacggtcaggtcctgagcctgggcrggctgccacagtagagctcccccctgccctgccaactcagaagggcggggttccttcttgtccctggtgcctgcttgctccatggagtaggaggcctaggtctgcagccacatgttgggtgattgcagctgcactcacccaggagggcagatcctacctgctcctggcccgctggaagagcacaaggaggcttggatccacagccgcagtctgcgtagtagccccgcccaggaggctgggtcttctggagtctgtaatcccagccatgcctccctgctgcagccggcatgatgacggcagccactgccagcaggaatgggaaaatgatgtcgccgctataggaaacagtatgagggtctctcaaaaagtaaaagtggaactaccctatgatccgacaatcccacttatgggaataaacccaaaataattgaaatcagggtctcaaaga

SEQ ID NO: 834052 - DNA, 611 bp, Homo sapiens
cacacacacacattctaaaacccatagcaatgtagtaacctacatttatataagagataacaccgcattactctaaaagaccatttttatgggttttgcgtctcagacttctgcacatcctttagtgggacacccctccctctgtttcagactatcttttccagatgcctgtgtcatgagcagccttggaagaaaggaatagcatcttcctgatgtgcaaaggttgggtcttgtctgcagtgatggaagacagagatagtatgctaccttagcagctaaggcaagcatgctgactgcccaatatagcagagcctccctctggagcaagggtcggcagatcactgccctttacgaaagattcaggtccctaaagcttaggttccccttcccgtaactgagcccactgcatatgcagctgtcaccgaggtctgctcatactgctctgtggcagtgttttgctcaaggcactggcacaaaggtgatggcattctggctgccactgttggagctcgtgataaaccacctgtgtctctaagccaggagtcttgtgtctcctccagcayccctgaaactgtggcaggctaacaggttggtgtccaagcagggaaact

SEQ ID NO: 834053 - DNA, 473 bp, Homo sapiens
gtagagacggggccttactatgttgcccaggctggtctcaaactcctgggctcaagcaattctcccgccttggcctcccaaagtgttgggattaaaggcatgagccaccatgcctggctgcttatgcttttttctgttgtggcccagatattatatcatctctcgtctataaatcttcaaaacttgaatttgtgtgtaaaacctagttctggggagggtcagaaaagacactcttaccgggaacatcctgatcagtcaactggggccttgaataccaggtaacctttgacctctgcaggtgcaagggctctgggggtgtgggttcccattgctgttgagggtcattctgctttgggggtgccctggtcatatgatgtggagacaccatgtaggacacttttcacggaggttcrgaggaactggttcttaccagggcattcctgcagaattgcctccccttgagggccgtctta

SEQ ID NO: 834054 - DNA, 473 bp, Homo sapiens
gtagagacggggccttactatgttgcccaggctggtctcaaactcctgggctcaagcaattctcccgccttggcctcccaaagtgttgggattaaaggcatgagccaccatgcctggctgcttatgcttttttctgttgtggcccagatattatatcatctctcgtctataaatcttcaaaacttgaatttgtgtgtaaaacctagttctggggagggtcagaaaagacactcttaccgggaacatcctgatcagtcaactggggccttgaataccaggtaacctttgacctctgcaggtgcaagggctctgggggtgtgggttcccattgctgttgagggtcattctgctttgggggtgccctggtcatatgatgtggagacaccatgtaggacacttttcacggaggttcagaggaactggtkcttaccagggcattcctgcagaattgcctccccttgagggccgtctta

SEQ ID NO: 834055 - DNA, 554 bp, Homo sapiens
atcccttttctccatatcctcaccaacacttgttatctttcatctttttattaagagacattctaacatgaataaggtgatatctcattgkggtttaaatttttatttcatttcactaatgattagtgatgttgagcattttttcttatacctgttagctctttatatgctttcttttgaaaaacgtctattcaggtcctttggctatttttaaagtgagttgttttattactattgagtttcttgtatattttggatattaaccccttatcaaatatctggtttgcatatattttcttccattctactggtgttgtctttattctgttgactgtttccttttctgtgcagaattgtcaacaaatcttgttccagtctgaccccttccctgtgtccaggcctatgttaagtagttgaactatatgcagttgagtcttgagatgatgatagagaggactcaaggacactgaaaagcccatgggcatcaaactgtaaattaggcatctaatgagtacttactttgtacttatttattactatttagtactatgtac

SEQ ID NO: 834056 - DNA, 642 bp, Homo sapiens
ctcttgccagttttattcaatgtagtactggaargcctagtcagataaaaggcatccaaattggacaagaagaagttacattggctctctttgaggatgacatgatcttataatagaaatccataaagactcagcaaaaaaataaaaactgttagaactaataaatgaattcagtgaagttgaagaaaatcaaatcagttgcaaaaatcagttgcatttctacatactgacaacaaattatccaaaaatgaaattaagaaagcaatcccacttagaatagcatcaaaaaaaataaaatacataggattaaatttaatcaaaaaggtgaaagacctatatactaaaaactataaaacactgatgaaaaaaattgaagaagacatacataaatggaaagctatcccatgttcatgtatcagaagaattaataatgtcaaaatgtccctactacccaaagcaatctacagattcaacacaatccctgtcattccaatggcatttttcacagaaatgaaaaaacaattttaaaatttatgttgaaaaacaggagatcctcaaatagctaaagtgatattgaacaggaacaaaaaagccagaaggatcacactttccgatttcaacctatatttcaaagctgggcat

SEQ ID NO: 834057 - DNA, 558 bp, Homo sapiens
aatcagagggcaatggtgatggtctccatgctrcttgcagctcatcctccagtgggggctggagcccaggcccttcccagcctctcctcccctcacccaccgactccaggatgtctgggaaaaggcattatgttggtgttgcctatgcctgtcccctgagcagaaggatagctgcctctggacctcaatacaaataattctccaggagtgagagccgtggttttgtggcttcctcaacctagccttcctcactgtctctgaagcctatctataaatgagtgtacaaagccagcccctctgtaagaacaggaacactctcacttctacttgtggactgacaacattttgcttggcttctactgaattcaacaaacagaggctagggtttggacatggcattgggcacagtacaaacgtagtcttactatgctgtcacagaaggggacagggtttcaatgactgaggtctcgtcatgaattacacaataaggtagattatttagatggtagattggctctatcccttggtctgcctctttgtggccactttcctgctcat

SEQ ID NO: 834058 - DNA, 533 bp, Homo sapiens
ctccccagtagctgggattacaggcatgcgccactacacccrgctaattttgtatttttagtagagacaggtttctccatgttgatcaggctggtctcgaactcctgatctcaggttatccacctgccttggcctctgaaagtgctgggattacaggcttgagccactgtacctggccccaaagacattttataaggacagcaccctaacatcaaaaccagacaaggacacacacacacacacaagaaaactacaggccaatatccctgatgaacatagaagcaaaaatccccagcaacatgttagaaaatcaaattcaacaagaaattaaaaagatcactcatcatggttaagtgtgatttatcccagggatataaggatggttcaataaatgtaatacatcacattaatagagtgaaggacaaaaactataagatcatttcaatagatgcagaaaaagcatgtgacaaaattcaaccatctcttcacgacaaaaattctcaacaagttaggtataggaatgtacctcaatg

SEQ ID NO: 834059 - DNA, 474 bp, Homo sapiens
aatattgaaatttaataattaaaacgtgaaaatacatttttttaggttcaagagactctaaaatcccattaggaaactttctattgtctgactaatgatgtataagaacagtaagagtcacgggtggtggttcctcctggaagaaatcaattactgtctcattcactctctccctacgggaatagaatgaatggcaatacaattccagttggcataacaccttgcaaaatgcctccttttcctggctaacatttgaaaatgtttcaaataaaagaaggtacttactctgtttatatattcctttctctcttcttccatttttttcactggatcacagaagcaatgcaaattatgcaggattcmtataattcagctatgtactttgaaatatttaatttaccttcaggataagaatgtcagaaacatttaaattattttttctatctaatttaaaatccaacaaaataactctga

SEQ ID NO: 834060 - DNA, 600 bp, Homo sapiens
aaatccagaagaaatggatacatttctaaacaaatacaatctaccaagattgaatcacgamgatctccaaaacctgaacagaacaataacaagtaacaagatcaaattcacaataaagtctcccagtaaagaaacacttgagacctgacagcttcactgctgaattctgtgaaacacttaaagaagaattaataccaatcctactcaaactcttctgaaaagtagagagagagtgaatatttgcaaactcattcaatgaagccagtattaccctcatacctaaactagacaaagacacaacaaaaaagaaaactacagaccaatatatctgatcaacgttgatgcaaaaatcctcaacaaaatactagcaaaccaaattcgacaatacattaaagaaaatcattaatcatgaccaagtgggatttctcccaaggatgcaaggatggttcaacatatgcaaatcaatccgtgtgacccatcatatcaacagaatgaaggacgaaaaccatatgatcattttaattgatgctgaaaaagtacttaataaagttcaacatcccttcataataaaaatcttgaaaaaactgggtatagaaggaa

SEQ ID NO: 834061 - DNA, 600 bp, Homo sapiens
aaatccagaagaaatggatacatttctaaacaaatacaatctaccaagattgaatcacgaagatctccaaaacctgaacagaacaataacaagtaacaagatcaaattcacaataaagtctcccagtaaagaaacacttgagacctgacagcttcactgctgaattctgtgaaacacttaaagaagaattaataccaatcctactcaaactcttctgaaaagtagagagagagtgaatatttgcaaactcattcaatgaagccagtattaccctcatacctaaactagacaaagacacaacaaaaaagaaaactacagaccaatatatctgatcaacgttgatgcaaaaatcctcaacaaaatactagcaaaccaaattcgacaatacattaaagaaaatcattaatcatgaccaagtgggatttctcccaaggatgcaaggatggttcaacatatgcaaatcaatcmgtgtgacccatcatatcaacagaatgaaggacgaaaaccatatgatcattttaattgatgctgaaaaagtacttaataaagttcaacatcccttcataataaaaatcttgaaaaaactgggtatagaaggaa

SEQ ID NO: 834062 - DNA, 538 bp, Homo sapiens
gtcttgaatgccagcttctgcagatgtgaaaagttagacatgtgagaaagcatgaaattcttttatttgctttattaatttttctggtatttatctccataactaaagcattatggttgccagtgaatttaaggtcttcagaaccatgttagatcacaaagtctcacatcgatttacatctctgtttgccttttagtttcaatttttgtttaagtatattcttcagtggaaagtggatttcatctgtttctggtgatgaaagagctcaacaatatgtctcatacaaatacttcttaaaacctaatgaatattcttatctctgaactacatatctgaccataaatatgaactgaattattctgcctgtaaatatgaactggattttcctttacacgtgcagctcacaacatgtagagctgaaatgggctttggattcmgctaaatatatatcctctagtgtgtaacctccatgttagccaggcaggttgttactaaatgaacagctgttgacagaaagcatttccttatcgtccaaaca

SEQ ID NO: 834063 - DNA, 577 bp, Homo sapiens
ttatgctatttctgttaaatagagcaacaaagagtcagctttcttcattgtctacttgtcagcccttcaaatacttgaggacaattagtatgtctgcttttagtgtgtatttttctacagttcattcagctattccttgaaatatgtaacttccagatcctttaacatcccagttctcttagtctaaatatactctgatttgtcaacatctcttttaaaatatgttattcctcccatccaccccatccctgaactcacctttggggtgatctgaaaagcccagaggactgtgtgcaggtcactttcaatgggctaaacattgaatttgtgatgacaaatcctaagatgttattggctctttttcttttagcaaacacaccacatggttgattgatagttttagtacaattcttgacacatagtaggcttccagaatgtggcactgaagctccaggtgatccaaaacctccagagtctgtttacaagaacctactgcattgayggtccctcttttcctttcctaccttggaaaatggatagtttgtttttttaacacaagcttcaagctaggatccca

SEQ ID NO: 834064 - DNA, 650 bp, Homo sapiens
tccagactccctcagggcctcagagctgatccaaatgccctaagaggagaggcgtgccaaggctgccaccctcatgccatgggccacagctgtcactgcagaatggcaggtggacattcagcagctctgctctccttaaccaaccagtgatgctttggtctcaccccagaggttctgatgtaattggtcaggattgaggcctcggcactgggactttttctttttcttctttttttaattctcttagcattccagtataacattgggattttaaaagctcccctgatgattccaatgtacagccagggttgggaacccagccccatacaagcagctcatgggccaattatatatcacagaggtattctgttgggttctgagacgtgagtttagatttcgtttagttgttaacatttaaaagcatggaattttcacataaaaacctgaattcctagctggacatggtggctcacgcctgtaagcccagcattttgggaggctgaggctggaggatctcttgagcccagsaattcgagacaggcctgggcaacatggcgagaccccatctctgttttttaaattaaaaacaaaactgaccaaacaaaacacccctgaattcccggcttctcttgaggactgaaaaactctgg

SEQ ID NO: 834065 - DNA, 610 bp, Homo sapiens
acttagttttttaaaaaacatacaaaaggtatctgcagaaataaatcttctcttaggtttctggtttcatgacaatgcttacaagtgtaggacagacatcatatactactacataacatggctgcaaaaaagycacccattggccaagcgcagtggctcatgtctgtaatcccagcactttgggaagctgaggcaggcagatcatttgagctcaggagtttgagactagcctagccaacctggcaaaaccctgtctctactaaaaatacaaaaattagctgggcttgttggtgcatgtctgtaatcccagctactccggaggctgagacactagaatcacttgaacctaggagtcagaggttgcagtgagccgagacagcgtcactgcactctagcttgggtgacaagagtgaggatctgtctcaaaaaaaaaaaaaaaaaaaaaaccctaagaaaataaaaaagtggatgtactaaacatatttgatacttaaaattttttctttaagaaaatgtgatgatagagtgattacttgaacattttcaatcatcagtatcttacggctactctaaatcaaatgagttcccactgcaagatacttacatcatg

SEQ ID NO: 834066 - DNA, 519 bp, Homo sapiens
cacgtactcccctctgaataagaaggctgaatctcagtggtcagcaatgagggagattcattttggtatttttttcttttttcttttataggcaatctttcttctcttccttctagattaacaggattctttcagtcagctttcaaaactcattcagtgtagatctggtttgttttcttccttgaaaaaaattattaatataataccacagtctctgcaccgaacatcatgatgcatgcctataatcgcagctactcaggaggctgaggtgggagaatcacttgacaccaagagtttgagcattttttagagatgggaccccatttcttaaaataaataaataaataaataaataaaaaggtgtctgtgtgtgtgaaaccacaatctccacgttctgaatgtaattatgccaaatatattttcttcttayattctttgcatttcttttaaacatgttttaaaatttaattttcttttaaaataggttttgttttcccattttcttcacaatttccttaa

SEQ ID NO: 834067 - DNA, 519 bp, Homo sapiens
cacgtactcccctctgaataagaaggctgaatctcagtggtcagcaatgagggagattcattttggtatttttttcttttttcttttataggcaatctttcttctcttccttctagattaacaggattctttcagtcagctttcaaaactcattcagtgtagatctggtttgttttcttccttgaaaaaaattattaatataataccacagtctctgcaccgaacatcatgatgcatgcctataatcgcagctactcaggaggctgaggtgggagaatcacttgacaccaagagtttgagcattttttagagatgggaccccatttcttaaaataaataaataaataaataaataaaaaggtgtctgtgtgtgtgaaaccacaatctccacgttctgaatgtaattatgccaaatatattttcttcttacattcttygcatttcttttaaacatgttttaaaatttaattttcttttaaaataggttttgttttcccattttcttcacaatttccttaa

SEQ ID NO: 834068 - DNA, 469 bp, Homo sapiens
cggccaagctttttaaaattcaacttccaaccagtgtaataccacatgatgggaaggcgagagatgagatatcacactttttccacactccctaatgatactaataatamttgttagctcctcacatggtgtaaaagtctactcatttgaccccgacagccacctatgagctaggtaggaccgtggtctctacttcatggaagaggagcaggctgagactagcaagtgaattattcaggcatatgaagctgctccgtggcagagcccagttcattccttgccctcctactctgaaacctgtgtgctttcccgagtccctgctggctggccaggccaggtggcagcaggggaaggcaaaggggctgggctggagccagcagaggctcaggtcctctggtgcagtgtcaagtgtgacatcagagccggatgggtgtgacacattgtcctctatctggcccagcagcggccg

SEQ ID NO: 834069 - DNA, 688 bp, Homo sapiens
aaggatcaagggctgtatagatgcgaggccgttctttcttaagagacagggtggctgtgcccacttgtggagctagcatgcggtttggtttaatgacctgcatactggtcaggggacccgtactgcacacagccctttcaattgaactggtcacttggtctccaccctttaagctgccagagaacctggagcggataatcatgggctcgggtatggtggactgggctctaggactgtgcaaagagatcttcaagttgggctgcagtttctggatttcaaggggaatactggttcgtttcacatctataggaggattgctcaatctcaaccgatcaactgcacgttggattgattttcctttgaaattcaagaccttccttgggtatgaaattgaaggtccccagacatcagtaatttctgtttggggcctacagggataggcaaattccccggaattacgggcgtgctgcagggcgctaacagtcaggaggaattggtcaggtgacatagggattttccaagactttttctttgggtgactgggcagttttccaggagtttccaattgtccttgtttttgtgctttctccrcatcatctgctttttcaaaaaaaagaaaattttaaaaaatcggcgttctatgaaaaatattaagtacgtatgcattaagtacttgggcattcaaact

SEQ ID NO: 834070 - DNA, 556 bp, Homo sapiens
acctcattgtggggtaagactggataaatggtctatcaaagagaatcttgttcttatcctagtagaataagaggaggctttcattttcctatcaggcattctattgttaaattgatcatttatattaagatgtaaagacataagaaaaaatttaaggccttggcagtggctcacacttgtaatcccagcactttgggaagctgaggcaggtggatggcttgagctcagaagttcaagcccatcttgggaaacatggcaaaagcctgtttttaaaaaatgcaaaaattagctgggcatggtggtgtgcacttgtagtctcagctacttgggaggctgaggtgggaggattttttgagcctaggaggcggaggttccagtgagccgagatggcactgctgcactctagcctgggcaacagaatgagmccttgtctcaaaaaaaaaaaaaaaaaaaaaatctagtagcattattggggtgtttcaataaagctaacagaataataacccaagtagtagtaaacattggagatagtattgttgactgtaacatttactgg

SEQ ID NO: 834071 - DNA, 610 bp, Homo sapiens
caccccaaagtcactcccatgaagatcttgggacaggtgttttccatggctctcagctacattgtggcctggagatagcagtgtctttctgaactgagagtctcgagtcctaggacagggatgtgacagagaaacagttcacattcctgcctgcccaggacagggagctggtgcagccccttttcataaatgacaaaattaaagcggaaacttacaagccagagacctcagcccatttcaccaggagctcaaccacccacccctatcagggctggtgcctgtgcttgtcactggggtatttatgagtgagcttggtagttggtggcccaactctacccagcttggtcctccccaccctctccactccctgctgaccaaggaacttaaggcaaggggcactccacagagaagcccatcacctgaaataccagagaacacctctcaataagcaaagactaagcacacactcaactgctgttgcagccarttcttacatgtaagtgccacctactggcctggaggttgaactgctcatcacaacacaaaaactactgacagaagtgtaccaggctaaaaaagtaaagtcaaaaaaaccctaaacaacagacac

SEQ ID NO: 834072 - DNA, 616 bp, Homo sapiens
ctactgacagaagtgtaccaggctaaaaaagtaaagtcaaaaaaaccctaaacaacagacactacagtcatactttcaatrgttagaaaaaaaatcctatccaaataaaagtaaattcaaaaataagaagtaacagtttctccaggtgaaaaggacccaaaactctggcaccatgaaaaatacagtatcgtaacacccttcaagaatcacactacctatctagcaatggatcctaaccaacatgaaacttctgaaatgatagattaaaaaattcaaaatatagattgtaaggaagctcaatgagatctaagagaaaattgaaaaccagcacaaataaatcagaaaagcagtgttggatgtgaatgcagataggtatcggaaaaacaaacaaaccaaacaaatggagcttctggaaatgaaaaatttactgaaggagttacaaaatacagctgaatgctttgaggatagtctagaccgaacagaagaaagaatttcagagcttaaagacaggtctttcgagcaaacccagtcagacaaaaataaagaaaaaattttaaaaaatgaaaacaatctttaagaaatatgggattatttatagtgacaaaacctacaagtt

SEQ ID NO: 834073 - DNA, 562 bp, Homo sapiens
tcaaaacaaactttccaataatctgattctacttcaaatatatatagtaaaatttacaaaattttcagttccttccttacaatctttgtattgttatacattttatttatgaatgtaataagccctatatttgtattaattatccctttgactataaagtatctcaatgtcattaaaaataaagataaaaagtatttttaaaaactgatttttatttttttattatgtctggagcataaactaatttctgcttggtatcacttttcttctgtgtgaagaacttcctttaacattgcccacatcataagtctcctggcaaggaacttccagcttttgttggtctataaaagtctttacttggctgggcgtggtggctcaggcctgtaatcccagcactttgggaagccaaggcgggtggattgcctgaggtcagaagttcgagaccagcctggccaacatggtgaaatcccatctctactaaaaatacaaaaattagtcgggtgtsgtggcacatgcccgtaagcccagctactcgggaggctgaggcaggagaattgcttca

SEQ ID NO: 834074 - DNA, 562 bp, Homo sapiens
tcaaaacaaactttccaataatctgattctacttcaaatatatatagtaaaatttacaaaattttcagttccttccttacaatctttgtattgttatacattttatttatgaatgtaataagccctatatttgtattaattatccctttgactataaagtatctcaatgtcattaaaaataaagataaaaagtatttttaaaaactgatttttatttttttattatgtctggagcataaactaatttctgcttggtatcacttttcttctgtgtgaagaacttcctttaacattgcccacatcataagtctcctggcaaggaacttccagcttttgttggtctataaaagtctttacttggctgggcgtggtggctcaggcctgtaatcccagcactttgggaagccaaggcgggtggattgcctgaggtcagaagttcgagaccagcctggccaacatggtgaaatcccatctctactaaaaatacaaaaattagtcgggtgtcgtggcacatgccygtaagcccagctactcgggaggctgaggcaggagaattgcttca

SEQ ID NO: 834075 - DNA, 622 bp, Homo sapiens
aagtcatttcagattattgccaagaattctcagaatatcctctgaatgtatacttctgtgctgaaaacaaaaccacatgctcataggaaatgtcacaattaagaatcttgtttacctagctgtttaaaaaaacatgccagggtaggcaatgaaggttacatcctcactgtgcaggtcagtgcttatcaaatcaaaatggttcaaccacctaaaaaaaaaaatcttcatacaaaggacgaaatagcaggcataccagcctagctttgcacgctggctatgtgcacactgtacctccaaaaacagcctctggtcataatagttctggaaatatgttgtggcttttttcaagataaataaaacatgaaaagtgaatttgtttataaaaataaacccatcttaacttttcatttatactagcatgcttttatatgatggcttgcccttcaaaaaattggagcttaccttgaagatctctgcaatatcaaggtcttaagttcctaagagtaagttttatctttgttattattatcatttaaaagctattcagtgtattagcaactagagatgtaattatcttacatctctagttgcayacacaaactttcagtataagtttatagtc

SEQ ID NO: 834076 - DNA, 585 bp, Homo sapiens
ccaagcttaattgaacgagttgaaactgatcaggacaagacatcaccttgtattacgtttagatatgaacattaggaaagatgagtacagtcacaacactggtagagcaatctagactaatgttatgccatatgcaactggctcatgacaagacatttataacacagtcgggaagaaacatttccctaattcatctatgaccaagaagtttcaaaatggagtcatactattaaaggaagtaaaaaatcttgattgtggatttaatgatgaagatctgtgtaaagccattactaaatacaaggaagagaataggaaaactattatttttgttaaaaagggaaaaatcaaggtaaaaacatggttcctccaaaatttgagataagtaagagtgagatattgaaaaccttaagggactcaaaaataaatttcctgtcctggaaagggaactcaggaatggtcattaaaggagatcatttcagagagctaatagatctcttataagtcaaaaaaaaaattaccactgttctarccgatcaggacctctgtgaggatgaaaccaagttaatggctaaatatgttgttgga

SEQ ID NO: 834077 - DNA, 598 bp, Homo sapiens
aattttaaggctgttctgagttgaaatttagaaattaagtggtttgtgattttccacaggaagcccataattgtgaaaaataatatttctcataatttaagcttattcgcacatttaacwttagcaaatgggccaataacgttgggaagaatataataatggggatataattgatggaaagactataattttaactcagtggaaatgtataatgaatttttctagaaaaatgaagatttcacagtcttactctgtcgtataaccttaaagaatggtccatgaaccttcctgccaagatgccttttcatcatcttgttaaagttcagtgactcctttcagaatcccactgaactctcacccttttcacttcttggcacctcattaattgttaacttctgctgcttgtccaccagtctgtggtttttccatttcactttctaacttgtatctgaatcagaagttaaaccactaactctcctggagctatgacatgagcttggaaaactgtgaaaacaaaattactttggaaataacttcatgctgaaattataaagagatgtttgaaaatatggcctaatttcaaaactaaaactgagcc

SEQ ID NO: 834078 - DNA, 514 bp, Homo sapiens
ttttaaaggtttttctcatgatcaggatcagaaaaaccatagaaatgttttgatcattgtgcttttctgtggatgaaataattcccaaggatatcccttgccatggaatcaggtccagagagggaaggggaacagaaacgaattcttcaggcttggcttcccagccaccttgtctgtgaaatgaactttcttttctaagaaaagcctaaaggatttcatccttccagctactccgtagttgaagcaggattactaatctggctgatttacacccaccactaaattatctataagagagaaatttttcccctttgcagtagtctcaaatttatacatatatagacacacactcacgtaaacttataaacatatatatatatgcatgtgtgtgtatatatataattagttaagactaaaatttgtaaygtgcttcagtttgcaaagcaatttcatcgtatgctcttccttctgattatcatacagggcagattattatccctaaatttaaggagat

SEQ ID NO: 834079 - DNA, 589 bp, Homo sapiens
ccttggcctcgctcctgagccacagtcaccagggtgccaggtaaagggaaaccacatgggggcgaggccagcgcacagccccagcagcctggcccctgctggctgcaggggctccagagcctgtgctacaagcccgggtggccggagcctcctgcgggattccccatcccacccctggaacttgctttccctgcttcccacacacagatcctccccaccagagcagggtcatggggtcagaggcagggtccgtgtggtgtggagcaggggttcctccccactcgctcgctcggctgccttcagcccctgcagacacgcaggcaccgtccaccttctccactcttagcgcgagccctgccccagccaggagcactcactgagtggccacattataccctcccgtttgtctatagttcacttaaacattatttcctgggagatccggcagctcttcactcttccgaatcaggctgtgggaaacrtttgtgtgcatctcgctttatttcctctcttgaactattaggataaagtcacagaggtaggattcctggaccccaagctctggacctctactacccaatttcaaaaa

SEQ ID NO: 834080 - DNA, 539 bp, Homo sapiens
gggcacctccatgcagggcccagccacatggagcctcccgcaggctgatggcccaacagagggaggacagggtccccccaggaaggaaggctggcttggctgkagaagagaatgctaattaaagatcccccattctcagctccctgcagagacaggaccctatgggcagagggaaaaggcctgctgaggcaaggccgggtcacttctgtccacatcccatcggccacacccgcaagccgcaggtggacacccctcccatagcgacactgccagtcagatggcgttgggcaggaggggcagcagatgatcagggacagtcctgcagcgcaccacaggggacctgctgcacccagctcttacctggtcagctcaatgcaccttcatggaggagaccaaggcacagagaggcttcagaagcaggaaacagcccagccctgcgccctgagcagggcgagtggttagagagggtgggatggagccaggagaggatgggcctgcaggccccagagaggatccttgcctgcgtcctaccctctgaa

SEQ ID NO: 834081 - DNA, 633 bp, Homo sapiens
ggtaatgactcgttaataggaggattattccaagtttaagtcatagagcggaagaccagcctcggctctccttacctctttgtgccttatgggggcggtctctgtgctcagctggtgacctgtgctttgccccccagctggggtgttggggtatgggctcatcaccactcctgatgcctggggatgcgcattccctgttgattagcaaactcagtcagtgtcttcatctctgtctactgtgctacggcattccttctttctttctttttattagacaaagttgcactctgctgcccaggctggagtgcggtggcgtgatctcggcttactgcaacctctgcttcccaggctcaagtgatcctcctgtctcagcctcctaagtagctgggaccacaggtgtgcaccaccatgcctggctaatttttgtatttttcatagggatggtgtttggctatgttgccaggtgatcttgaactcctgagctcaagtgatcctcctgccttgacctcccaaaagtgctgggattacaggtgcgagccacsaccccaggccccttaattattttaaataaaaacaactgcattgaatttaacgcaatagaaaagcagcagcagagtgaaggtgctttcattc

SEQ ID NO: 834082 - DNA, 525 bp, Homo sapiens
ctaccttggcctcccaaagtgctgggatcacagtcgtgagccaccgtgcccagcctccaacttgcttttgactagcaggtgggagataygcacacacagacacgcacccttggcatcagaccaaggtgcccaggatgaacatgagggctgtggggaccgtgggggcaggggctgctggcctggcctcttggggtctccctggaggagaagctggtgctgagctttacggggtgagaatgggttgggggtgggaaagtgcattccaggcaaggagccagcccaggccagcaaattcattcagcgaagcttcctggggacaccgtgtggggctccaggggtcccatgggaaggaaacggcaggccctgtcacccacagggtgcccactgcccagcacagccaagccagccatgtccaggcccagagaaggggttggagacccagggcccttgggcggggggctgtccttgagcagggagggcagtttccccggggactgggtcccctgaatcctggtggtgcagggg

SEQ ID NO: 834083 - DNA, 606 bp, Homo sapiens
cactctttgacatatagttatattttaaaaataaaatacctatcaacctttgagaaacataattatgaaaaacggaggaccttagattataaattgggtatattttgtaattaaatacraacatgattagagttatccctcggtatccgtgggggactggttccacatgctcaagtcccttatataaaatggtgtggtatttgcctgtaatctacgcacatcctcctctgtactttaaatcatctttaggctacttacaatacctaatacagtgcaaatgctatgtaaatcattgtactgtttagggaataatgacaagaaaaaaagagtctgtacgtgttcagtgcagatacaaccatccattttttaaaaaatattttcaatccaaggctggttgaattcatggatgcagaacccatggatccactctgtactctgatttttgattaagttacttagaagtacagtagtaatacataataaacatagtttgcccatgtctgtagaaatgcctgaacagagaatgaacctgtatagctagctttcaggaaaaatatgactaccttctctggaaagaaattttcatgtgtttaaattatgatacag

SEQ ID NO: 834084 - DNA, 595 bp, Homo sapiens
cggcttccccacgggtatcctgggatcctcttcattttaggttttctgctaagtggtttctttcccaaggtactaaagggctattttgacatccttatgagagctttatgagtgtgtttttattttttctactagcagatcagctccttgatcatctgaatttaaattttaaaaaggcacgaagcaaagttaataaagtggatggtaattaaggcacttattaattaccattatgtaaaggataaggcaataattgtgttatgaccagttaggaaaccggataaaatctcctgtagaatctaattgttgagatccatgtaaaatcaggaagctaatgatcttctctttggcagtgaacagaatagtgaattccgattggtatagaacatgaacagatgcgttctgggagggactggccgtcactcgctgcgtgtattagtcacagatttaggggccaggctggggtcggcagagcactgtgtgccctgatgtgctgcacatctggttggcagggccccggggarccacgggacatatttctgaaggtggccagtggtccaagcccggagatcaaagacttctttgtcatcattta

SEQ ID NO: 834085 - DNA, 571 bp, Homo sapiens
cttgagctgtggtgggctccacccaattcgagcttcccggctgctttgtttacctaagcaagcctgggcaatggtgggcacccctcccccagcctcgctgctgccttgcagtttgatctcagactgctgtgctagcaatcagcgagactccgtgggcgtaggaccctccgagccaggtgcgggatataatctcctggtgcaccgttttttaagcccgtcagaaaagcacagtattagggtgggagtgacccgattttccaggtgccgtctgtcacccctttctttgactcggaaagggaactccctgaccccttgtgcttcctgagtgaggcaatgcctcgccctgcttcagctcgtgcacggtgtgctgcatccactgtcttgcgcccactgtctggcactccctagtgagatgaacccagtacctcagatggaaatgcagaaatcacccgtcttctgygtcactcacgctgggagctgtagactggagctgttcctattcagccatctaaagtgtggaaagtaatagcctcaatgtccaacaatagcagtgtagttaagtagattgtta

SEQ ID NO: 834086 - DNA, 442 bp, Homo sapiens; identical to SEQ ID NO: 831661

SEQ ID NO: 834087 - DNA, 612 bp, Homo sapiens
gcttatataatgacagcatttatgagagccactaaacaaaaattagtaacraagtttttatttctgtttatattttatttaaatattttattaacttcttgtcaacttacttgacatatgggtttgaaaatttaggacacgtacactttgtacatgaattcaatgactagcttttagtttgttttattttgtaagcctcagtgattttccccaaaacatatccttagttcttctgctaacattttcacaggaataaagcacaaatagggaatatctgatcacagaggatactatgaatactgtcacactcacactagccactcatgtcctcaaacttagtacatatttgttttagaaaaatattctcagggaccttctcagtaacatcaagaaaaacgacttattgaaaagtggagatatgaaagcgtttgctacttctgttataaaacctcttccctggctagctgtgtgacacttattataaaggacccctaatcatggttcatagctgttacagttttttgtttattttcttatttaatgtctttaaggagttaaataagcaattttgaaaataataatataattattatagcctcaacataaaggaaa

SEQ ID NO: 834088 - DNA, 526 bp, Homo sapiens
ctactaataatataataacaataatgagataaccacaccacaaaatgaagaactaaagaagctacaggccgggcamggtggctcacgtctgtaatcccagcactttgggaggccgaggcaggcggatcacaaggtcaggagatcgagaccatcctggctaacatggtgaaaccctgtctctactaaaaatacaaaaaaattagccaggcatggtggcatgtgcctgtagtcccagctactcaggaggctgaggcaggagaatagcttcaacccgggaggcagaggttgcagtgagctgagattgtgccactgcactccagcctaggagacagagaaaactccgtctcaaaaaacaaaaacaaaaacaaacaaacaaaaagctgcagaagctgacagaaatacagttagacaatataaggaaataattccaaagatgacagaactgaggaaaaagatgaaagtgtaaaataaaaacatcagtaatgaaggctacatttaaagcagtgtaggagaatagacactgttg

SEQ ID NO: 834089 - DNA, 531 bp, Homo sapiens
gagacaaaatacaattagcatttcatatttatgtgcttaaagactcatttctaatcttgtttttttaattttattacttttataatcaatttttatgatagttttcagagaaatgacacattttacttttctatttgtttgaaagtttttttttaatcatatgtgatggttgctactgagtgtcaacttgattggattgaagtatagaaagtattaattctgggtgcatctgtgatggtgttgccaaagcagattaacatttgagtcagtgggctgggaaagatagagccacccttaactgggtgtgcaccatctaatcagctgccagcaaatataaagcaggcagaaaaacgtgaaaaggagagatgggcctagcctctcagcctacatctttctcctgtgctggatgcttcctgccctcaaacatcagacgtcaagttcttcagttttgagactctggctggctctccttgctcctcaagcaygcagacagcatgttgtgggatcttgtgatcatgtaagttaataatt

SEQ ID NO: 834090 - DNA, 531 bp, Homo sapiens
gagacaaaatacaattagcatttcatatttatgtgcttaaagactcatttctaatcttgtttttttaattttattacttttataatcaatttttatgatagttttcagagaaatgacacattttacttttctatttgtttgaaagtttttttttaatcatatgtgatggttgctactgagtgtcaacttgattggattgaagtatagaaagtattaattctgggtgcatctgtgatggtgttgccaaagcagattaacatttgagtcagtgggctgggaaagatagagccacccttaactgggtgtgcaccatctaatcagctgccagcaaatataaagcaggcagaaaaacgtgaaaaggagagatgggcctagcctctcagcctacatctttctcctgtgctggatgcttcctgccctcaaacatcagacgtcaagttcttcagttttgagactctggctggctctccttgctcctcaagcacgyagacagcatgttgtgggatcttgtgatcatgtaagttaataatt

SEQ ID NO: 834091 - DNA, 552 bp, Homo sapiens
caaagttgcttccacattttcgggtatcttttcagctatgccccactctactggtaccaatttactgtattactccattttcacactgctgacaaagacatacctgagactgggaagaaaaggaagtttaattggacttacaattccacatggctggggaggcctcagaatcatggcgggagatgaaaagcacttcttacatggcagctgcaagagaaaaaatgaggaggaagcaaaagcagaaacccctgataaacctatcagatcttgtgagacttgttcactatcatgagaatagcacaggatgaccagcccccatgattcagttatctccctcttggtcccttccacaacacatggaaattctgggagatactattaaagttgagattagggtgggaacacagtcaaccacattatcatctttacttttttcttagacagaggctcactctgttgaccaggctrgagtgcagtggtgtgatcttggctcatcacaacctccgcctctcaagttcaagcaattttcctgcctcagtctcccaagtagct

SEQ ID NO: 834092 - DNA, 522 bp, Homo sapiens
tatttacccagtagtcattcaggagcacattgttcagtttccaagtagttgtgtggttttgagtgtgtttcttaatcctgagttctaatttgattgcactgtggtctgagagactgtttcttattatttccgttattttgcatttgctgaagagtgttttacttccaattatgtggtaaattttagaataagtgttatgtggtcctgagaagaatgtatattctggtgatttggggtggagggttctgcagaggtctcttaggtccccttggtccagagctgagttcaagcccttaagaccatcaacactatgaataaactgcatcaactaacaggcaaaacaactggctagcatcataatgacaggatcaaatttacacgtaacaatattaaccttaagtggaaataggctaaatgcctcaattaaaagacacagactggtaaattggataaygagttgagatccatcggtgtgctgtgttcaggagacccatctcacgtgcaaagacacacataggctca

SEQ ID NO: 834093 - DNA, 574 bp, Homo sapiens
tgggaggaatccgcccacacccagcttcatacagcaccctgaggacaatgtggcttccctgattcacacctactgagccaaggccccctctgaagttaggtcaagagggcccaccctagccgggccaactcattcctttgaggacctgatactcaatgaactgcttactaccaaaaaaatgcaaaggattcagcaaaaagtgcaatttccatttgagaagtaagattctccccaaaacatgacaccaccttttcatcctttcagtacctcaaagggaaagggaaataaaaggcatacagcactaaccctccgaaccacagccggggctttaaaagtgtggttcaccctttagaaccctaaaagacccattaacacgtccagtcagttatcgaagtgccagtgaggtgaggggcgtggcagagtcaggagggaccaggaggctggaagagcccgctcacattctcaacaggacacacctgtcctgtttacagcaggacrcattactgtggcaacagccacaggactccagggacttggttattccttcataaaaccttgtcaacttcattgccta

SEQ ID NO: 834094 - DNA, 597 bp, Homo sapiens
tttttatgacatcttcaggaagaaaacctctgctgtctatttaatggagatgaattgttaaacttttaccatttgcaactayacgtctctatgagtcagacttttattgatcgtgtacaactaaatgaaacccggaaatgaaggaaatgtaacaagcgattttatgtattttttgtttgctcaaattgcctttataaaatagattgatactctataataagcaaatgttgtgaatttggaattttcaaattgaggcttactaataatgttaactattttatccgagtttatttgggtttcttataaaatgtatttctcaagaagattttgctgccctaaaaaaaaaaaaaagaaaaagaaaaagacaaaaagggaagccactggttgctaatggctcctgcggctctgacgatcctcgatgaagtgttctttgattaagtgtcaagatgagtggtgcagacctttgacagacacatgattgtggttggagaaagcccagcattaactgctgaccttgccatctgtgagcaggtgttgaatgagctcagttccctcccagcccttctttttccctggtgggtcattggctcctgagta

SEQ ID NO: 834095 - DNA, 616 bp, Homo sapiens
gtgtctaataaaaacatttttcctcctcttctatggcaaatactgctaatgcctttactggctttattcttttctaatcctgcccagaggaaaatagtcacmtttccagactcccttgaagctagatgtggcaatgtgatccaagtccggccaataaaacgcaagcaaaggtcacttgataagcatctggaaactttctaaagagttcagacttaattggtttgtttagtcagcactttgctcttcatccttgacttttctgccttccttcttcttcctgctgacagtaaggatgggacactagaggagcaggagctatatcactcttgcaaagtaaataaataaataaataaatatataaatacataaataaataaataaatttaaaaaatcaaaaccatgcccataggaaaaaaaggaggaaaactatatccaaacaaaagtcttgtgaaaagacatgaaaatgtgaataaaagcactcagctaataaagcgatgtaaattcttttttaaaatgcaactgcaaagctgaagaaatctgcaacacagtactcaaaactgaattaaatatcctcaaacaaaaatttatatataaaaataacactttgaggaacata

SEQ ID NO: 834096 - DNA, 474 bp, Homo sapiens
aattatacaagtcaactatcaagattgctaaagagatataacactatcataatgatacattgtgttattattattattaktactattgagtcaaagtgctcagtgcttgacatgcattagttcatttaattctaccaatacaacttttttgtccattttctatcaaagtatgcatttcctcaggtgcacaatgatatggaaatactttggactagaaaaaaaacagactgaacatatttcatggctcaaagtggggaaatacacacacagacattttttaaagcactgctgctctgagaagagcacccggaagttatagaagagcaactaaaacacacacacacacagtgtcttccttgaagaataactggtcagtcgagagacgcaggtggcctgaggccaatgacctcagtggctcaataaatcccaggaaaagatcccatggaaggtcactgctgtcatcctgggctaggg

SEQ ID NO: 834097 - DNA, 652 bp, Homo sapiens
caagcactgcttttgcagtatatcaagtctttgataaaatttcttttcatttttacttagctcgaaatattttaaaatgtttcctgagacttttggacccatgttttayaactgatagatgatctgtcagttgacaggattttatgaggtctacaaatatttacttttattttatttatttttttagatggagtcttgctctgttacccaggctggaatgcagtggtgcaatctcggttcactgcaacctctgcctcccaggttcaagagattctcctgcctcagcctccctagtagctgggattacaggcacgtgccaccacacctggatacattttgtatttttagtagagatggggtttcgtcatgttggccaggctggtgtcaaactcctgacctcaagttatccgtccaccttggtgctgggattacaggcatgagccaccaggtccagccaagcaaatataatagtgaattgtctatttctatttgtgttctatcagttttgctgcacgtattttgatgctttattatcaggtgaatatacattaaaggtgttatgtcttcttggataattgacccctgtatcatatgcaatgcccatctttatccctaataactttccttgtcttgaaatatgctttgtctgaaa

SEQ ID NO: 834098 - DNA, 543 bp, Homo sapiens
aaacatgaataaacaaataggggatttcagtacacatgttaactattaaagagtcaggtagaaatgctagaaatgaaaaacagtaatatagttgaagaatgtccttgactctctcataagtagacttgaaacagctgagaaaggaatcaatgaaagtgaagatagaaaaaaaattgatcaaaactgaaacacaaagagaaaaaaaagaatgaaacacacacagacacactccaaaacagaacatttaagaactgagggataatatcaaaaggcctaacacatatgaaattggatttccaaaagaagaagaaagcaaatagagtagaaaaaatatttgaaaagataaaggccaaaaatttctcccaaataatgaaatatgtcaaacaacatgtccaggaagctaagagaaccccaaagatctctaaccattatctcagataaatatcctttcaacacacacacacacacacacacacacacacctscagacatttcatatttaaactgctgaaaaacaaagacaaagagaaaaatcttaaagga

SEQ ID NO: 834099 - DNA, 405 bp, Homo sapiens
ggatccaatgatgaaggcayacccatggcttagttctatggagaatgtggcagccagcctccaagatggcaccctgtggagagtggcagccggcctccaagacggcaccctccaaggagaccctcttaccttttggttttgtctgtggtgtgtgtgtgtgtgtgtgtgtgtgtgtgtgtgtgtgtgtagccccctctcccgctgaatagggccaacctgtgtaatcaataagatatatggaaatgatactctgtgtgtgtgtgtgtgactctgaaactaggttataaaagacaatgcatgtccgccttgctctctcttggatacttgttctggggaaagccaaccctatggaggcatccaccttgcaaggaactgaggcctcctgccaacagccgtgttgagtct

SEQ ID NO: 834100 - DNA, 565 bp, Homo sapiens
  misc_feature 1, 2, 3, 4, 5, 6, 7, 8, 9, 10, 11, 12, 13, 14, 15, 16, 17,18, 19, 20: n = A,T,C or G
nnnnnnnnnnnnnnnnnnnntggcaatgacattcatggtgttaaatctgctctcagctactatgaaataacactaacattttagatattttgtctttgtaattttgtttggatttttcaaaattttgatttccaattgtcacagtatacagaaatacaatagttttgggctgggcatggtggctcacacctgtaatcccaggactttgggaggccaaggtgggtggatcacttgaggtcaggagtttgagaccaaccagcctggccaacatggcaaaaccccgtctctactaaaaatacaaaaattagccgggcatggtggtggcctgtagtcccagctactggggaggctgaggcaggagaatggcatgaacccaggaggcggagcttgcagtgagccgaggtagcgccactgcactccagcctgggtgactgagcgagactccatctmgaaaagaaaagaaaagaaaggtgtaaatgtttgtgcaagaatgcttatgtaaaaatattaaggctgggcgtggtggctcacacctgtaatcccagcactttgggaggccaaggct

SEQ ID NO: 834101 - DNA, 628 bp, Homo sapiens
ttactagctgctaatctgtctgcagctccttcaagcactccagttcctggyattaatgtcaggtgtgcctgggatgctttaaatatttgttcttttaattttgtgatatccaaagacaagtttgtacagtgtccttctagatgcttttttattctttcccaaattttgatcttattaagagctattaattgtttccacaaatccttatgtttagctcctacagtgggacgtatcatttgaggttgaggtgccactataccaccatggttccagataataggaactcttgccatacttcttaccgtttctaccatctgactgttttgttcagaccagctgaatatagtgtggccatggcatgcagactgagaggtgcaattcaagctaaacatccccttggggacgaattaataatgattccataggaatcgttgcacagcacctctgcctgttctgcaatgcaatcttcccaaacaagtacgtccattaattctggccaggtccaattctgtttacaaataggtttttgagggtggtatgcctcagttataggagcagatttattatggtaaatactgaggtcagaaagcatgtgtaactgtgtcatagactgattacatccaggcat

SEQ ID NO: 834102 - DNA, 628 bp, Homo sapiens
ttactagctgctaatctgtctgcagctccttcaagcactccagttcctggcattaatgtcaggtgtgcctgggatgctttaaatatttgttcttttaattttgtgatatccaaagacaagtttgtacagtgtccttctagatgcttttttattctttcccaaattttgatcttattaagagctattaattgtttccacaaatccttatgtttagctcctacagtgggacgtatcatttgaggttgaggtgccactataccaccatggttccagataataggaactcttgccatacttcttaccgtttctaccatctgactgttttgttcagaccagctgaatatagtgtggccatggcatgcagactgagaggtgcaattcaagctaaacatccccttggggacgaattaataatgattccataggaatcgttgcacagcacctctgcctgttctgcaatgcaatcttcccaaacaagtacgtccattaattctrgccaggtccaattctgtttacaaataggtttttgagggtggtatgcctcagttataggagcagatttattatggtaaatactgaggtcagaaagcatgtgtaactgtgtcatagactgattacatccaggcat

SEQ ID NO: 834103 - DNA, 534 bp, Homo sapiens
ttacgaaaactggaaaatattggagctatgcgcccgttttctaattgttcagtaacgaattcctctaaagcctcaagtttctctacttagcggccattgttttatccaaattggctactctgttaaccattttaaatgtacagattctggaggcttaacaatggccaccatcaaaaatgatatcctaaaccttggtgggaactttgtctttccacttgaagcggttcctttaaaccttgcaaactttttcctagtcccataccagggacataccccatttcatgcattatatgttgactttgagggctatataattgttcaggaattagaacttgtgctccccattgctgtaacaaatctattccccatacacttataggtacagaagttataattggttgaatagtcccaggttgtccatcgggcccttcwcaatgcaaaatataactactttgatatacttcaggggctttaccaactccaactatgttaaattgagtgggttgaattggccacgcggatggccagtgtgta

SEQ ID NO: 834104 - DNA, 602 bp, Homo sapiens
tttatgatgcaggaaaccatgttgagggcaagagacaggcaggctggttatgaagtttaccaagagccctcaagaatacttctaaaaagaaagcctaagtctagtaatgaaactgaatcaaaaaccaaaaatacagacagatgtcagactcaggaacacattctgctagttcctttagatgtttaataaacaaagggtgctgtaatcaaaaacatttgggtagttgttgggctaaacagattttttgttttgttgtttaaccacatcttactcttttaatattctggtgtccatcatgaatctccaagaggcctgggtagtaaatggtgttaccaaattcattccacagggtgccattgttcactaaagcatctattgggccttgtggtataagaaagagcttttgggaatcctaagcctagtcaaaacgtctgattttaaaaataagaacactgagtcccaggaagttaacagatttagccagtgtggcatgaccacatagacagagctggaacaagaacaccaactccctggcacgcctactatgtggttcaacacaacataccaygtgcccacatttttcttttctccttgctgaagtc

SEQ ID NO: 834105 - DNA, 513 bp, Homo sapiens
ggtatgaattttaatcaaatgcttctactgttccaccctcaagtatgacatttgctatgtctttttaatcaagttaacacattttgtttactaatatagtgagttgcagtaacaaaaggtctaaatttgaacctttgttgtactcctagaataaaccctagttgacaatttcaagaatggtttattagtaaataaaggcctgactttaaaataataataaatgcaggaaaaagaatttcaaatgttttcaataaacacaggagggagcaaaggaaaactggaattgaagcatgataagcattttgtcttgtttcaagaagagcttattaatacaaatgtttttcaacatttaattaaaatattttaagcacatgtatttagcataaattcaatcttgagaaaagtggraatagaacatgtgatttccaaaccactagcacaaaaaaggaaacagaaaatttctttaatcagtaaaaataagagaagaaaaaagaaacatgcaaagattttaaa

SEQ ID NO: 834106 - DNA, 629 bp, Homo sapiens
gcaggggttggaggtgtctacggatccctcaacaccacaagaaataatcagatgttgatacagttttctggtaaggactttgatcagaatgtcagagaagcttacgactraaacacggtttttaaaatacatcttttaaaaaaaacttaaaaaaatctttagaaatctacaataaaatacagataacagaaaaccgtcactaaacgaaagtctggcttagtgaattattattgaggcaggagaatagggtctggagggagggaacctaaggtcaattcacactgacttcctataactcagtcaaaaggaaaaccccaactttccatgcccaagtaacaaaagaccagaggctactccctttgcaagccccctgcttttttctggatggcagacgaaaaattaaaagtacctttgattggtccccttctgcaaccaaacgggctggtcacaggccaagtcttcagttgcataggagtataacgttgtaacttcacttcagcctctgataggtcaccttccgcaaccaatcagacatttgcatagggtgtaactttgtaacttcacttcagcctctgattggtcccttcccacagccaatcagactgataacagtccactaccttatttac

SEQ ID NO: 834107 - DNA, 592 bp, Homo sapiens
tcgtcagcgacagcagtaacctgccccaatttaatacggttccttaagggctaaagacttgtttgttttcatttaaaatagccatatttacctttaaraatacaaagtacttattaaattcatcataatattgattaaaattgaaagcagaagagaaattgttacaattttcttgaaaatttcaaaaatgcttaaccatttttattaaaataaaaagaaatttaaaaagcaatacatgttcactggaaaaattagaaaattcaaataagcaaaaataataccaaatattaaattcccaggatcacattgttaaagacgatcactttttctgtgtggccttttagacttctttctgtgcacacatataaatgtaggtaaacaaacacaaatacttgttatatattcatggcaataggaacataaggtatcattttgcaacttgcttttttgccaccaacttattatgtatatctttttctattaataaataatcttctgtaacatcatttttaatagattgcctaatttatttaaccagtattttattggtagacatttagattgtatcacctttttccccaccttatgcagt

SEQ ID NO: 834108 - DNA, 609 bp, Homo sapiens
tacagttcacagaagaaaagcagataaatgcttgatttttctcttttatcaacccagttttcaaagcaacaaattggtccttgttatatamacacgcatagcagcttgctctctaaaatatcctggctcagtgctctcaacccacccacctttgcctgaatcttttcttctcatctctctggtgtgggtctctaccttagaagagagcctgggacatcagtttaaagagctcacaagggatatgctgctccagtcatttaagcctcaccatgggcctcctacatcaccagcaaccgggtaggcaaacacttgacagtttcagcagttgttatcaaattgatctagtgtaatttctactttcatctattttggggtccttctattctcaaacccatccaattcaacctcattccttgcctgttttctcttatacagatgccagaaaggcacagtcttgtggctaatattttagggtttctaggttcactttatcctctggctttgtcatacatgttgtccatgagtttttggttttatgatctagttggtctggtttttttccttatagtttaggatcctgagctttcacatatatatacatatatattt

SEQ ID NO: 834109 - DNA, 548 bp, Homo sapiens
attggtccttgttatataaacacgcatagcagcttgctctctaaaatrtcctggctcagtgctctcaacccacccacctttgcctgaatcttttcttctcatctctctggtgtgggtctctaccttagaagagagcctgggacatcagtttaaagagctcacaagggatatgctgctccagtcatttaagcctcaccatgggcctcctacatcaccagcaaccgggtaggcaaacacttgacagtttcagcagttgttatcaaattgatctagtgtaatttctactttcatctattttggggtccttctattctcaaacccatccaattcaacctcattccttgcctgttttctcttatacagatgccagaaaggcacagtcttgtggctaatattttagggtttctaggttcactttatcctctggctttgtcatacatgttgtccatgagtttttggttttatgatctagttggtctggtttttttccttatagtttaggatcctgagctttcacatatatatacatatatatttcacatatatat

SEQ ID NO: 834110 - DNA, 647 bp, Homo sapiens
acccccatctgctgccctaataaagaagccgcctgtttcccctttgccttacaccgtgattgtaagtttcctgaggcctgctagccatgyttcctgttaagcctgtggaattgtgagttggctaaacctctttcctttgtaattacccggtctcaggtagtattctttatagcagtgtgagaatggactaatacatacactttttaacattatattttgtacctctgcttcttctttaggttgacatatttaagatgaagaataatcacacgagagctggagtggctgtgtaatatcagtaaaaatagtcttcagaataaggattatttctagtgataaagaggaaaattttataatgataaaagagttaattatctacaagacaacaatccaaagtgtgtatgtacaataacagtgtttcaaaatacataaagcaaaatttagcattactgaaagaagtaaaatccataattatgattgagatttcaaaacactactctaatatttggtttaatacttaataattgtcaaggagaaacggtaataatagagaaggtttgaatagcgtggtcaaccaacttgaactagttgacccttgtagagcacaacactcaactggagcagaaaataaccctttcaaatgcaaa

SEQ ID NO: 834111 - DNA, 595 bp, Homo sapiens
tttcgagggggggcattcttggagattaattaccactggcacattacatttgagatgtctattaggcatttcaagaatgatgtcggccgggcgcggtggctcacgcctgtaatcccagcactttgggaggccgaggcgggcggatcacgaggtcaggagatcgagaccatcccagctaaaacggtgaaaccccgtctctactaaaaatacaaaaaattagccgggcgtagtggcgggcgcctgtagtcccagctacttgggaggctgaggcgggagaatggcgtgaacccgggaggcggagcttgcagtgagccgagatcccgccactgcactccagcctgggcgacagagcgagactccgtctcaaaaaaaaaaaaaaaaaaaaaaaaaagaatgatgtcaagtaggcagtgaaatgtatgagttaaaatattcatagtattttctgtcttaaagctataaattctaraaattttgttattttattcaaagaacatcaccaaaaatagatttacaggagaatcagagggtaaaattgttttctacaagtttttaataaatcttggtatacttgagacatttcttgatagatcag

SEQ ID NO: 834112 - DNA, 556 bp, Homo sapiens
ataaaaaaaaaattacattatttctaaagaagacgtcacttgttaatattggtgcaaatgtaattgtagtttttgtcattacttttgccttttcacaaacctaataactggcaactcaagagccaataataataagatgatgaacatggatgtatatggaggtgatatcttttttgaacattccaaaaaattttcgtattcacagttcttatgtttctattatttttttttttagctgactgagtttatacattcacttctgggacctaagctgtaagagaaactagggtctcaaaatatatttattctgggtgaaatgacaaatgactgtcatttggttgataggcagatgcttctttttttcttttctttttttttttttttttttttttttgagacagtcttactctgttgcccaggctggagtccaatggtgagaacttggctcactgcaacctctgtgtcccgggttcaagygattctcctgtctcagcctcctgagtagctgggactataggcatgccccaccacacttagctaatttttgtatttttag

SEQ ID NO: 834113 - DNA, 645 bp, Homo sapiens
gaataattgaaaatgaaggatgaaggtgctgatcaccagatgaagccagatgaacaaaataggaataaaaatttactattctagaatttctgtttttcaagtaataaaaatacacacatatttgttttttaaataagcatatacactgatttttaataaaaactctatgtatttgtgtttgcctgtcaggaggaggatattcaagtaaccctcagctaactaggaaattctgaaacctggaaaatcccacgtctggccaattgctatagattcgtaaccccttttatcaacaggattgagaagcaaataaataggaaaaaaaaagtggagaaataattcagattactttcgtcacctacaacgttctaatcaaataccaaatagccaacatgtcaagaaaaaaatctgcatatctagattcattaaaagaaataatcttcatcaatacagttttgcataaattaattgctttattttcctgctacttctagaccacagtctggaagcaggatagcaaagtgagtagaaatatagactcttggaatagatcctgttttagatggaatctcagcaacatcaattatctgtgtgacttcctgtgagttgctrgaagtacctgtttacctaattgtggataataatcgt

SEQ ID NO: 834114 - DNA, 619 bp, Homo sapiens
tgccaccacacccagataatgattttattttacttttgtagagacaggggtctcactatgttgaccagcctggttccaagtccctgggctcaagcaatcctcctgtcccagcmtcccaaagcgccaccatgcttgtcctattttatcattagtcattgttgtgaatctcttactgtgtctagcctgtcaattaaactttatcaggagtatgtacgcatagagaaagcataatacatatggcttggtttcaggcatccactgggggacttagagcttatctccttgggacaagggaaactcctgtatgttgaaaatgccctgtcccagctgggcaaggtggctcacgcctgtaatcccagcactttgggaggctgaggtgcgtggatcacgaggtcaagagatccagaccatcgtggccaacatggtgaaaccctgtctctactaaaaatacaaaaattagctgggcgtggtggcacctgcctgtaatctcagctacttgggaggctgaggcaggagaaccgcttgaacccaggaggtggaggttgcagtgatctgagattgcgccactgcactctggcctgggagagagagcaagattcggtctcaaaaaaaaaaaaaa

SEQ ID NO: 834115 - DNA, 524 bp, Homo sapiens
tcaaagtgactgagtgagtcagagtcttatgacgcttaagctgctccctgagagccaagtcaggcactcagaaascgggttagctcttcgaggatcagataggcccacttagaaaattatctccgtgcctggagtggtacctacattgcatcacaggggagccaagtggctgcaactttatatatatatataaaatctcaggctagattctcgggaagcataagaaaacttaagcagtttttggaagctgttgtaactttctcaagttattaaagtatcctttcatgtctgaaatggcaacatacccatggttgttctaatgtcttgaaagagttattgcaatttaaaaaggcacaggattttttttttcaggaaaggtgtttaaactcatcacacatttttaatgatcttctttgtttaagagatgatttcactctagtgcacccattttaagatgtctataattatgttaaatagggaatggtaaaaatagtttaaaaatatataattgagttttttctatt

SEQ ID NO: 834116 - DNA, 580 bp, Homo sapiens
agtattatggacattacagttattaagctaggcaataaatctccttgacccataaattctcatttttgaattcatatgtcacctactttgtgtaataattgtccttatatgttttctcttgcatcatcaactgttattttttttcagagagtttcactttgttgtccaggctggagtgcagtggcatgatcgcagctcactgcaacccctgcctcctgggttcaagcgattctcctgcctcagcctcccgagtacctgggattacaggtgtgtgccaccacatctggctaatttttgtgtttttagataaaatggggtttcaccatgttggccaggctagtctcgaactcctggcctcaagtgatctgcctgccttgacctgccaaagtgctggaattacaggcatgagccaccgtgccaggccttgcttcatccactgttacagttgtattctaattcccctatgtatatatsgatacattgggtctttgtttatctcagatgaattcaaagagccttataatcagttattggaaagagaatattactggtctatagtaaatgttcatttttggtaata

SEQ ID NO: 834117 - DNA, 569 bp, Homo sapiens
atatagagagagagagagtttagtgatatatatatatcactaaactgtatataattctatgtagttatttaattttgggttaaaaaattgaaacaaygttctaagctaaaatgttagtttctgttgcttcttaaaagctaatccaataacggcactaaattgtaaaaataaaggtttataggataatgaatgggctaaaaatagtaccattttgtgaaattcttaaatattcttcgtgagtaaatatggaattgcatattttgattaatatagacttctattacgggcaagatttacttatttgttgcgtagaacacaatgaacttggtttaaaggagaaaggtagactttctgtttctgtttcttagttgagctgttttctatttctgtgcttttaaaataaagcttctaaaacatagagatctgcatattaatagttttcccaatttcacagtgccctcaaaagccccacaacaatttctacattttaataaccagagccatacacctttacttccagccattatgttaagaaacatctctgttaaatgtgaggcattgtataggct

SEQ ID NO: 834118 - DNA, 477 bp, Homo sapiens
gacgatttgtgctagtattgaatactgtacaggaaatgaaaaacagatggttgcatgggtgcccaaagtatactttstactgaacgtgtattacttttacatcattataaagttgaaaaattgtaagtgaaccatcataagttgtgggctgtgttcattttgacaataaattatgttctgattgtacagaagcgtttatcaatcataagagattttcttcactggagacatgtgtaataacattcattttcctgtgggacttacaaattgtttcagtagtttatagccataagctctacaagtagtttatagctattaatgctttaaacgttatccagaatatgcctctatgttcagaaatcatggcttttaaagacttcaatcaaaaaaggttaacaaagttctaaaatccaaaaataggcttattttaaaattagtttaagaagaaacattttcctctaccctaaaacttgcatt

SEQ ID NO: 834119 - DNA, 574 bp, Homo sapiens
tataactgaactatgagaaaaggaataaaaaggtagataatgaaacctggaaatgtaaagaaatatttatttaattttaaatgaacacagaaagagctcttaaagtaatgaatataaaatgatctgaacaagaatggaatcttttgcctccagtgttaatggtaaagataaaatttaaagaacaaatatgatttagctctaagtccttcatttatctttctgtaaactatatgcctttttaagtattgtttaaaactgcatctttgaagatttggattgtttattaccattgctaacataagaatccagtgaaggcatagagggactcatgctgtgaattttcatcaggtatatgatggaaaagacagttcctcacgtccactgggcacgttcactaaaaatgaacttctggggctgatcctaaacagcacatccaatcacctrtggctagagttcaacaccaatggatctgacaccgaccaaggttttcaactcacctataccagtaagtaacatacgacttaatcacgttcttttttcattttgtcaggacatatctgatacttggcttata

SEQ ID NO: 834120 - DNA, 641 bp, Homo sapiens; identical to SEQ ID NO: 833100

SEQ ID NO: 834121 - DNA, 468 bp, Homo sapiens
ctaatttttttaaaaggcgtgtctcaaatgtcatctccaaattttgaaagcaatcaacaaattcatctccaatttctaacaaagggctcacagccttcaatgatgtatctcatatctaaaactaaggaatctatgaactcgttagaaggccatatgactccagagaatgccataataatccagaaattttaaaactaaacaggttatgaacatgtatggttacagcagtttattaatgataattccaagctggaaacaacccaaatgtccaccaaatggtgactggataaactgtggttcatccatacaatggaacacaacacagcaatgcactgatactgataacctgccacaacatagatgaatctcaaaagcatttcactamgtgaaagaagtcagacacaaaagtgtacttactatataatttcatttatgtgacattctggaaaaagaaaatcatagggataa

SEQ ID NO: 834122 - DNA, 608 bp, Homo sapiens
ttctaaatattgacactaggtcttggagtaaatcttgatctctttctggaagtaagacagttcatgcaaatttgctttttttttttttttacatacattgctctatggcttacccactggawggtcatttcttcacacaaacacaagaatcttttttcccacttttctgcatttttatttagtctatttttatgataggttgagaaaaactgtactacaacctttctggttattattattctttgtaaaagacttcccttttggcacaaatcaaagtccggagtcctttctctttggttaatacctcacactgcacagccataaaacaacatggcctcagcgaaataaacttcccaaaatttaaaaactcactgactctctgaaacttgacttaatatattgatttctatttcttcttttcatagtcttagagaccttaaacaatgggaagaatatttaaagataattttactcactctaaaacaagcacaaaattgaagatctatgaaatattcctctcaatattatttgtaatgttttacagctttagaagtttcatagtgtcagtaacacatattgctattaaatgcatgatgtttaatattaat

SEQ ID NO: 834123 - DNA, 603 bp, Homo sapiens
tttaactggaatgctgggtgacttccataagccacaaagttaggaggtccccacacctcaaagtctggtttgatcctttgctccagtcttgtcagctttccaatcgtctagtgatcatggctttgttytacccttttgtctttattgaggtggtttgctagtgctccctgtcctctaatccttctttttttttttttttttttgagatggagtcttgctctgttgtccaggctggagtgcagtggcacaatctgagctcactgcaacctccacctcccaggttcaagcagttctctgcctcagcctcccaagtagctgggattacaggcgcccaccaccacacccagctaatttttgtatttttagtagagacagggttttgccatcttggccacgctggtcttgaactcctgacctcgtgatccacccacctcagcctcccaaagtgctgggattacaagtgtgagccactgcacccggtctagtccttgtattttctaagttcaactcaatgtccttcatgctaccactcttaatactatgatgtgctctagaatttcaggtaagtgagcattccacatcaaattcttagatggcaatata

SEQ ID NO: 834124 - DNA, 607 bp, Homo sapiens
tgtctaaatctaaaaccaatttctttttttctatgatagggtttctagataatgcaatatatccttctaagtacagaaccatgtgcaaattgttaatataatatttgtttgcttcactggaagwgttactacaatacagctatgtttgctagttgacattcggtaggcaggacaatgagtgaagtgggcctcagtgcagattatagggagtggtgcagatggttgagagctggaaagcacttgcctgcctagtcctaaggcagaatccttcatacagtctcagcctatgtcggcacctggaattatgggctcaatattgctgcccttctgatttttcaagggaagcaagaaattaagatcttaatagtaaaagtattatttctccatttttgaaaaccaattcaaattattttaaaatgctatgtaagcgaaagaaatcatgttggttggtcacatatgattggctcttttctgtcctttgtgaataatatgaaaaaaaatgccttactctaaatcactataaaatctaattcattataagaaagattattaagatcagcagtcaagcctatattaatttagcacagcatattttctggtgaaaata

SEQ ID NO: 834125 - DNA, 644 bp, Homo sapiens
tcatataattctcattctgctctcctctgtccttctgctttttctcctccttctccctcaccttcttctgttactcatatctcctaaaagtcatctgaagacaaattagacttagaacattcaccataatgcttygggaaggttgtcacagatatcccctcaccagacatttcaacaagttgattgtatcacataccatttagccacagtttttaaaatttattcacttatttttggatgcataataaatgtacatagttttggggtagacatattgagttttaagtgtctgtaaaatattgatgggaatatctgacagagagtggtagaaatttctgaggcttaagagaaacaaatactaagaagaacatagggtaagaatgttgctgttcaaatcaagggagaaatgcatcttaaggataattgagtactcaacagcttgaacaccaaaatgaggtccttatctcaacaccagcccattggctggtgggcttttccaccactacccaactcaggtcttctctgctcattttatttttaagagctgactcttatatctgtattttcagacacttattaatgcatggcactataagtatatatccaaagataataactatttacatcattcccaaatattgcct

SEQ ID NO: 834126 - DNA, 626 bp, Homo sapiens
ggcaggctagatcactcgtaacatttgcaaggcctagggcaagagtaaaaatgaaggcttacttatcaaatgaccacatatttagaagctataagtcaagttaataaactgttaagtaaaatgttttatcttcttaccttgacaattttatctttataataaccagaaaggccaggttcaaatgtagaattcttgtatccctcagagctctgtaccataagtaatggtatgggaaaagctagtacctggcccaaggtctgccctccttatcttctcatctgccatgacctgaatgttgtggccactcagaatttgatcatgggtctttgagatgtgactggatcatgaggatggagccctcatgaatgggagtactgcttttatagaaagaggtcctggggagctgccttgttccttccagcatgtgaggattcagtaagaaggcaccatctatgaaccaggaagcaggccctaaccagacaccaaatctgccagcactttgatcttagacttgctagactccagaactatgagagataaatttctgttgtttttaagccatcctgtttataatatttttttctagttgtacagactgagrtatcacttcttactagtgcacatgt

SEQ ID NO: 834127 - DNA, 591 bp, Homo sapiens
gttttttaaaatgtgcatttgttatattttctatcttcatagaattgtattgagaggtttgaggaggttgtgttaggggttactagccagccaccttttaaaccagaacacttgtatctaattttaaaaataacctgcttcaatgtggtccaagttaggtagagattgatgttataattcaattgctatgtagaaataactattaatgcactttttagtcctggctgggcactttcttaatggcctcaaaagacgtgggtgaaatatttcagagaacctttttgtacatagcaggagtacactggagaattttggtccctttttttcacatgtagtgaatttcaacactatctttctgaatcatatctgatttattccctaaaactaatcacagaatcatctctaaaatagcatttctgctccaatcagagcttccttttaaaaataataagtcaacaggcatcacacattttaaattgaatacagactgcaaagcagccctcatccattagttcaactgacytttgaataacccagaccagaaaagaatagggccataaatcgaagaagactctaagcctagctggggct

SEQ ID NO: 834128 - DNA, 473 bp, Homo sapiens
gggaaggacaagaggacacgcattaattgggggatcttggtgctgtttggcttgcatgaagactatggacaggtagagaatctaggwcaggggtgcaatgctcacctttagatcaaggctgctaagacttgccccgaggcctcagaggtgagagaaaaggcagaggcttgaggtgagcatggaaagctggcctgggagggaataaatttgccaagcaggcctgagcaaggcccagccttcttacctgtaagctctgcttctaaatctctaggacgataaaaggaagcaatcacctttcatcttcagaagtacatttcattaattgataatggctaccaggatttattatattacaaaatgttctgacactgggttcaagctcagtgggaaagattggtacaattgattagtaatatctgtcctaggtctggttgtgaagggttgggactatcagaacgtacgcccctctctgc

SEQ ID NO: 834129 - DNA, 541 bp, Homo sapiens
taaattttaaaaatgcattaaatacacctaacctactgaacattgtagcttagccaagcctacattaagtatactcagaacacttacattagcctatggttgggcaaaagcacctaacacaaagccttttttataataaagtattgaatatctcatgtaatttattgaatactgcacactatagagtacagtatctactgtttaccctcatggttgcatggctgcctgggctggcactgtccagcattgcaagagatgattataacatgtacagttaacccaggaaaatatcaaaattgaaaattcaaagtacagtttctactgaatgcatatcacttttgcaccattgtaatgttgaaaaatcttaagttgaatcaccagaagttggggactgtgtgtgtattctttaatgaagaaagaggcccacgaagggraaaattgcctagggcccatgatagtcataatgtgaccctgaggcttctggttttaaataccttctagatacatttacaatgctactcacaaatttctttctccagtt

SEQ ID NO: 834130 - DNA, 541 bp, Homo sapiens
taaattttaaaaatgcattaaatacacctaacctactgaacattgtagcttagccaagcctacattaagtatactcagaacacttacattagcctatggttgggcaaaagcacctaacacaaagccttttttataataaagtattgaatatctcatgtaatttattgaatactgcacactatagagtacagtatctactgtttaccctcatggttgcatggctgcctgggctggcactgtccagcattgcaagagatgattataacatgtacagttaacccaggaaaatatcaaaattgaaaattcaaagtacagtttctactgaatgcatatcacttttgcaccattgtaatgttgaaaaatcttaagttgaatcaccagaagttggggactgtgtgtgtattctttaatgaagaaagaggcccacgaagggaaaawttgcctagggcccatgatagtcataatgtgaccctgaggcttctggttttaaataccttctagatacatttacaatgctactcacaaatttctttctccagtt

SEQ ID NO: 834131 - DNA, 476 bp, Homo sapiens
ctgaagcttatacaattcaggggtccctctttaaagagagaaaaaaaaaaacaaaaaattaggcacaaaagtaaatatttgaggaggagaaaaagaatcacactaaacctgaattttaaaaagccaacamgaggctggccatggtggctcatgcctataatcccagcacttttggaggctgagatgggaagattgcttgagcccaggagtatgagaccagactgggcaacaacataatgagatcctgcctctacaaaaaaaaatttgttttaattagccaggtgtggttttgtgcacctatagtcccaattacgcaggaggctgaggctggaggatcacatgagcccaggaggtcaaggctgcagtgaaccattatcataccactgcagcccagcctggatgacaaagtgagaccctgtctcaaaaaaataaaataaaaatataaagccaataagaactgcgaatatcacaacatc

SEQ ID NO: 834132 - DNA, 640 bp, Homo sapiens
gcaagtcgagcaggaatttgatgactaactgagtggattttattttattttttaagaattagaaggagaaaaaagaaaagaaaaagargagaaggagaaaatgaatggaaattgcacattactatgagtcaatcatggtactgggtattaaggatatcgtctaatttaactgtctcaaatcttgagaagggtgtttatacaccttttacagaaaagtggttgaagctgaaatatgttcagcgtatgctaattggtaataaacaactttttgaactccactgatgcttgaattttcactctgctggaagttgtcaggtccaaattttaaagcagacctgtcagcttcaaaccatgagcttctgccgttgtactgttctgcagaaaagtaatatgacttcagttcctctggcattagtgtgtagcaagatcagagtgtgagagatcagaagaaggagcactctggtgatgatgataatatgtaccatttatggtgcacacagatgtcccagttgctacctctagcatctctcattttttcaataatgtgcaagctcagtaacatacatttttaagaagtgagaattagagatgtcaagaatgtaaaactatcaagggcgaaggttgaaattcaaaataggac

SEQ ID NO: 834133 - DNA, 640 bp, Homo sapiens
gcaagtcgagcaggaatttgatgactaactgagtggattttattttattttttaagaattagaaggagaaaaaagaaaagaaaaagaggagaaggagaaaatgaatggaaattgcacattactatgagtcaaycatggtactgggtattaaggatatcgtctaatttaactgtctcaaatcttgagaagggtgtttatacaccttttacagaaaagtggttgaagctgaaatatgttcagcgtatgctaattggtaataaacaactttttgaactccactgatgcttgaattttcactctgctggaagttgtcaggtccaaattttaaagcagacctgtcagcttcaaaccatgagcttctgccgttgtactgttctgcagaaaagtaatatgacttcagttcctctggcattagtgtgtagcaagatcagagtgtgagagatcagaagaaggagcactctggtgatgatgataatatgtaccatttatggtgcacacagatgtcccagttgctacctctagcatctctcattttttcaataatgtgcaagctcagtaacatacatttttaagaagtgagaattagagatgtcaagaatgtaaaactatcaagggcgaaggttgaaattcaaaataggac

SEQ ID NO: 834134 - DNA, 378 bp, Homo sapiens
agtgcttttgaaagtatttcctgtagctctattttttggaagtaggagtattgttattaattattctttgaatatttggtagaatttagcatgaagccatctgstctagggattttctttgttggaaagtctttgattatttctttagtctctttatttattatttatcatttcaggcttcctatttcttcctgatttttttggtaagtgatattttcctagggatttattcattttctctaggttatttaacttgttggcatagacttgttcataacaatcccttataatcctttttatttttgaggcatctgttgcaatgtttccatttctatcttattatctgagtattttttctctttgtcttagtctggctaa

SEQ ID NO: 834135 - DNA, 378 bp, Homo sapiens
agtgcttttgaaagtatttcctgtagctctattttttggaagtaggagtattgttattaattattctttgaatatttggtagaatttagcatgaagccatctgctctagggattttctttgttggraagtctttgattatttctttagtctctttatttattatttatcatttcaggcttcctatttcttcctgatttttttggtaagtgatattttcctagggatttattcattttctctaggttatttaacttgttggcatagacttgttcataacaatcccttataatcctttttatttttgaggcatctgttgcaatgtttccatttctatcttattatctgagtattttttctctttgtcttagtctggctaa

SEQ ID NO: 834136 - DNA, 640 bp, Homo sapiens
aggtcaactggaactgccaactaatttcagagtttcacagacctatccacccagtcgtkagtcatgaccaactgggacaggcctctggacaacagccacctgcccaggtaagacgaagcctaaaccagcagagcagaaccgcactccctgcaggcaagttcacaccccagagcaaaagagggaagcgcacagtcaacagcgacattcttcattaattatcaatgcagtaatttcataaatcttagtacagagagaggaaagggggacagaggtcagcgtgttacacttattaggctcttcccacacagaaggaaacgtctgggcaggaaagaacagttccgctctaacatcagctttcaaggacaaacccagtttctcctatttccaaggtaactgaccctccagacagaagcagtcactcattcctctgtcttccttaaagttgtggactctccagtggaacttgtcctgtttcccttttatcatacacatctgtttacatatttagtatccctaaatagactgtgcccttatgaaaaaagctcttcatttcttagcattttgcattattttcagtagctaacactttgtccttatatacactaaaatcttaacgatgaataaatacatgattcaaagg

SEQ ID NO: 834137 - DNA, 594 bp, Homo sapiens
cattcctggggggtggggaggggtgggcagagggtgtgatgtgaaaaccagctcccagatggcctccaatacttgctaccttctaggatttatgtcctgtatatttccctcacacatagaatcagggctaccccgtgtggagaattctgtgaacaggaaagtacataatttttgaggctacatcataaaagtcactatagcttctgccttgggctttttaattgcttagtctagaagaaattaacatccatgatatgaggctactcaaatagctctgtggcaggtcctcagtggagaggaactaaggctgcctgttagccatgtgagtggacttccaagaaagcaaattctccagcttggccaagcctcccatgactatgacctggtaaaatgttatactacaataatacaatagaattgccctatagcaaatatgtacagaataatcatctgatgatggagagttattaaaataaaaaaaacagctcaacagacrtctattaagcacctgtttgtggcaggtgatattatagaataggacaagttacttgccttcaagagtccattggcagtgtctgggagacagatctagtc

SEQ ID NO: 834138 - DNA, 620 bp, Homo sapiens
tgaggatcaagactccaatatatgaattttaagaaacacaattcagtccataacaaagaccaatatacaaaaatctattatatctctgcatacaacaaacaattagaaaataaaattttaaaaatattgcttataataatacaaaaccctgaaattgcaaggaataattataacaagagttttgtaaggcctctgtgtagaaaattatttaacataattaagagaaatttaagatgacaaataaatgtatagatataccatgtaaatgaattgaaatgcttgatagtttaaagatctctattttattcaaattgatatatgtaatctcaattaaaattccagcaggtctctatagagatttaaattatgaagcaaaaatccatttggaaatgcaaatagccaagataagcttgaagaagaatagcaaagttgaaagaatttttagaaagatgtcaactgacagagataaatagagcatggactattataggatctagaaacagacccacacataaatggacatgtaatttattccraagctggtactgcagtgttgtaaagaatatcatgatttatttatgattttgaataaattataatagctaaagtggatattcaca

SEQ ID NO: 834139 - DNA, 577 bp, Homo sapiens
attcaattttactatagtttattttcagaaatttgatataaaaacatcaggaataaaaacctgctctctcctgaaaatatggttcatgtagaaaagtggcttagagattaatagaaacttaatttagagactgatatcaactgcacagttactagtaaatgtcatttcatatagtctgttctaaagatcatattagctcatccactaaaaaatcaagcttattactcatgataagagttgatatcagatctagctcagataaacttattgtactatgttgacaagataaagctagctagtcaagaacactttcacgaaaaaagagaaaagtagtacaaattcttttcgcaatgctagtggcaaaaaaccactctatgatatttattaaactaaaatgtaggtcagacaagaaattgtattccacctcttatttaattagtaatcagaggtcagcagttcaaatgtgctccctttccttctcaactgtttggcaatttaatgctatgtaacrtgaaacacgtaaaatgtctcagtgttagataaagagtcacaagatagaagggagatctggattctg

SEQ ID NO: 834140 - DNA, 505 bp, Homo sapiens
aattgaactccaccccctttgttggggtgggtgggtggacggcaggtggggaygggaaggtcttggggaagcgatggcggaggaagcccaggacagtgtgggaccacgtccaaaccagagggtgggagaacacgtgaacacgtgaacatgagtgcagatggagccagtttcaaacaggattgaacaaatccgagagtagactcctagaaatacaactgcagagccaggggacgctggccggggacggtgggtttgtttatttgggttttgccagtttctgatgttccgtggagggacaggccctcacagttccccgctgcaccatttcctctgacgtcggtattcacaggcacaattagggaccatctttggagggcatttctcagtatctctaagaattttaaatccatgaacactctgcaccagcaatgccacttttaggaatttaggcaaaaatgtacctgagtgtggaaaggtatatggtagaaacacccacagaggtgtt

SEQ ID NO: 834141 - DNA, 505 bp, Homo sapiens
aattgaactccaccccctttgttggggtgggtgggtggacggcaggtggggacgggaaggtcttggggaagygatggcggaggaagcccaggacagtgtgggaccacgtccaaaccagagggtgggagaacacgtgaacacgtgaacatgagtgcagatggagccagtttcaaacaggattgaacaaatccgagagtagactcctagaaatacaactgcagagccaggggacgctggccggggacggtgggtttgtttatttgggttttgccagtttctgatgttccgtggagggacaggccctcacagttccccgctgcaccatttcctctgacgtcggtattcacaggcacaattagggaccatctttggagggcatttctcagtatctctaagaattttaaatccatgaacactctgcaccagcaatgccacttttaggaatttaggcaaaaatgtacctgagtgtggaaaggtatatggtagaaacacccacagaggtgtt

SEQ ID NO: 834142 - DNA, 610 bp, Homo sapiens
ttctcaaataaagataacagcgatgtattttcacaaaagcaagagcttagaaagtactccacccaggtatccctcttggaaaaaatgcttaaggaaatatgacaaatggcaaagtgattgttatggatggaatgtttgtatcctcccaaaattcacatgttgagaccctaattccaatatgatggtattaagaggtggggcctttgggaggtaattaggtcaggagggtggagccctcaaaaatgggatttgtgccctttaaagaagaaaccgtggagagattatctgggccacgtgaggacagcaagaaggtggctgtctgtagaccaggaagagagccctctccagaccaccaccatgtggcaccctgactgatcctggacttccagcttccagaactgggagaaagaaatgcctgctgctcaagaccctccagtccacggcaatttgttatagcagccccaactgactgtgacagagaagaagcaaagacaagagttccagaaygtggaagctggggtatcaaagggctggcccagatacaaagacaggaagacactgacctaggtccagataaccaatgtgctcagttataactgcaaatgcaaat

SEQ ID NO: 834143 - DNA, 610 bp, Homo sapiens
ttctcaaataaagataacagcgatgtattttcacaaaagcaagagcttagaaagtactccacccaggtatccctcttggaaaaaatgcttaaggaaatatgacaaatggcaaagtgattgttatggatggaatgtttgtatcctcccaaaattcacatgttgagaccctaattccaatatgatggtattaagaggtggggcctttgggaggtaattaggtcaggagggtggagccctcaaaaatgggatttgtgccctttaaagaagaaaccgtggagagattatctgggccacgtgaggacagcaagaaggtggctgtctgtagaccaggaagagagccctctccagaccaccaccatgtggcaccctgactgatcctggacttccagcttccagaactgggagaaagaaatgcctgctgctcaagaccctccagtccacggcaatttgttatagcagccccaactgactgtgacagagaagaagcaaagacaagagttccagaatgtrgaagctggggtatcaaagggctggcccagatacaaagacaggaagacactgacctaggtccagataaccaatgtgctcagttataactgcaaatgcaaat

SEQ ID NO: 834144 - DNA, 538 bp, Homo sapiens
ctcatctgttgatgatcacttatgttgcttccgtatctttgctgttgtgaatagtgctgcagttagcatggcagtgcaggtatctctgagctctggctttaatttgtcttgtttaaatacacagaagtgggattgctcatcacatggtagttccatttttaatttttaagtttttaattttttttttttgagatagagtctcgctctgttgcccaggctggagtgcagtggcacaatctcggctcactgcaagctctgcctcccaggttcacgccattctcctgcctcagcctcccaggtagctgggactacaggcgcctgccaccacacctggccaatttttgtatttttagtagagacggggtttcaccgtgttagccaggatggtctcgatctcctgacctcgtgatctgccygcctcggcctctcaaagtgctgggattacaggcatgagccactgcgcccggccccatttttaattttttgaggaacttccgtactatttcccataatggctatacatagtggcttagttttc

SEQ ID NO: 834145 - DNA, 444 bp, Homo sapiens
cacttaatataagagaaagtagtgaagaaagaatataaggacagtggtgacaaaaaaaacccataaacccacagaaccatataaaacatatgggaaataaaaagtaaactagtagacataaattcaagtacagttgattttcattgttagtagtaattacataaagtcattgcaaatactgaattaggaaataatataccattgttcctaggggaaatacagagtttggttcttgtaatcctctggtcgcagtttcaactatcaacatatagtcgagtgttatatgtgtttaataattattgtttattcattaacattgaactcagccaacagtactacaacttakgccttaacaaagcttctctaacatacatattttctctgtaaggcacatcacagcctttttgcacttaggaacactgaacagccccttcaccaccatgc

SEQ ID NO: 834146 - DNA, 672 bp, Homo sapiens
atgcacccagcactgtcctaggacagcattgtcgttgcttgggaagggcagcttggggtctgtgtcagggtccccaagacggcgattctccaggaggatacaggccacgcaggttgtggtactcayggctgtgatttcccacagagaggacactgagcaaaatcgaccaagggaaaggttcctggggccgagtccaggggcaccaggctcagctttggaggcctctcctggggtgggggtcacgcaggatgcgcctcactcccctgcaagcagctgggacgccacgcctgcgatgttggggatgccctgcccggtgatgtacccggggactggtcacgtgagcagcttctgcctgggctacgccagaattccagactcccagcagggatgtgggtgttcggcctaaagcacatggtacaaacagctcaggcccagtgaggcggggccggggggagcccctcggaaatcccagttcccagacgccagccaagggccagcccggccctcaggatggccgtccccgcccaccgtgtggacccgttctgcacacggccatggggtttcctttctggagccaggggctggacacaacccagtttctggggaggccccaaagcagccccatccagggcaggcgctgctgttggatccctcgcctctcccatccctcag

SEQ ID NO: 834147 - DNA, 615 bp, Homo sapiens
aaaaagagaaaaatgcctgtaaccacaccaaatcaaatgcttactacatacagggtttctctaaagctcaaattccattaaagagcctgcttacactacagatgggaaaaatttaaatctggggacacctaccctttgagacggaatccactctgtcttgagtgaggtggattctgatgcacgagtgtcagtaaaaccagagatgaatcaaagagtccaagttaccaatgacagggaccacctttccctgggaagctgagagactatcaacattcctggatctcatgttataagagaagaattcacacatttgaggtgaacatcctttttctggcaaataggaagaccagttacctgcctttttaaagatgaacaagaaaaaaataaaaggtaaaggaggaaagcaaaagaagacaaattggcatgtttccgatacgaacattttgtctcctagtcaaccctccaagccccactaaaagaaaagaatayagcataaacagtgagagagggtgggctgggcagaagagggaaagaaagagggggagatcatttcttttaatttaatttttaaaatgacaactaaattcacaaataaattataaatcacatggatga

SEQ ID NO: 834148 - DNA, 585 bp, Homo sapiens
agaacatggtggcatcttgcctctgtttattgcttatatctctatatttttcccttgaccttatcaccccagaatgttcacatggggtctggcaaggaagccagctaccctagctgcatgtgatactttcatttatgactattacagatccttctgtgctaatggggtgccctctgacataaacaggccaaaccagagcagtatctgtaggggttctaggcaagggtacaggtcaggatacaaattaagaggggtgtgtagtgacaatctagaatcgatctgattatatcttgtattctagaatgtctatttatatatcttggcctaacagacctagagagataatcaaactatttctactgggtatttcagaaaatggttggaaaatggcttggtaagtgaagctgagtcccagctcactatgttaaagagctgttctgcatgatttatgacctgggaaaaatttattgagtatctactatatgtcaggcattgtgtgcagggtaggagacccttgtcttcttcctaactcccttctsaagtcccacagtcatgcctatttctgttgcagtggtaaagatttaa

SEQ ID NO: 834149 - DNA, 543 bp, Homo sapiens
tgtagtatattttgtgtgtggtgcctacagctttgttctttttgctcaaaatcctttgtctatttggggtctcttctgatttcatataaattttaggattgttttttctatttctgtgaagaatattattgttattttgacagggattgcattaaatacgtagttttctttgggtagtatggacattttaacaatattaattcttccaatccatgaccataggatggctttcaatttctggcgtcctcttcaatttctttcatcagtgacttatagttttcactaaacagatctttcacctcttcggttaaatttatacttaggtaatttttttgcacctgttgtaaatgggattgctttcttgatttttttttcagatggtttgcaattggtgtatagaaatgctactgacttttgtgtgttgattttctattctgcagctttactgaatttgtttattsggtcaaacagattttggtggagtctttaggtttttctaaacataagattatgttgtctgcaaacagggacaagttgacttcc

SEQ ID NO: 834150 - DNA, 624 bp, Homo sapiens
cctgcattcgtccttcaagttcrtgtgcaacctgattcttcctatatgcttggtacctcagtaccaagaggacactgagctggttaacacttaagctgtctgtggatggcaaggctaaaagagctcaccgtagcacaagcctacacaggctttgggagttacaggcgcccactcctagatgctaccatggggccagagccccaaagcacttgccccagctccttcacctgcccatctgcatgctccccctcccataaggggtttgagcaggtgcagtgtctgaacagacaagccacacccctgtcgcacatcctgcgaggggtgtcagggaactctcgcatttcacaaccatcttcctggcacacctttttgccacctgccctcagaccagctggtattattcttcttcttgctggtgagaggaaccaaaacctccgactcacaaacactgatggggagcagtgatatgcattgctcttagcctaggtctactgagtggtctcactcctttggagctacctttgcctgggctatgtggcatccacgtgcttttctgcttacacaaggcctcatggactacatgttagaggtttttcatcatttattatttgttacttactgatt

SEQ ID NO: 834151 - DNA, 624 bp, Homo sapiens
cctgcattcgtccttcaagttcgtgtgcaacctgattcttcctatatgcttggtacctcagtaccaagaggacactgagctggttaacacttaagctgtctgtggatggcaaggctaaaagagctcaccgtagcacaagcctacacaggctttgggagttacaggcgcccactcctagatgctaccatggggccagagccccaaagcacttgccccagctccttcacctgcccatctgcatgctccccctcccataaggggtttgagcaggtgcagtgtctgaacagacaagccacacccctgtcgcacatcctgcgaggggtgtcagggaactctcgcatttcacaaccatcttcctggcacacctttttgccacctgccctcagaccagctggtattattcttcttcttgctggtgagaggaaccaaaacctccgactcacaaacactgatggggagcagtgatatgcattgctcttagcctaggtctactgagtggtctcactcctttggagctacctttgcctgggctatgtggcatccacgtgcttttctgcttacrcaaggcctcatggactacatgttagaggtttttcatcatttattatttgttacttactgatt

SEQ ID NO: 834152 - DNA, 556 bp, Homo sapiens
accatccaatctccctaagcctttggatcccttcctctgcattaaaccaagggagatcaggcatttccagctcactcacagtgggccatcttttaatccatatttcagcttaccaaacaaataaactattagaaccttttttaactccccaagctgcaacattaaatgtagagtccctactcattgggcccaaatcaataaattcagcctgatccaactctttgttccttccaccgttatcccacacccttaatatccatcccatgtctgttctccagatttatgtttatataaattagaaaactcaagcagttcttttcgagtgtagtgcacctcctcatgggtcatgctgtcaatgtcacctctagggacctgccaggactttagttataggtctagaagcaaacaggggtgtttgggtggctcttaaggagaatcaacattatcttgccyggcaactgcctcaggggagaccatcactattgcctcaggcaacacagggtttatctcctcagacaaagatggaaaggtggatggcagcgtgggttggggaggg

SEQ ID NO: 834153 - DNA, 556 bp, Homo sapiens
accatccaatctccctaagcctttggatcccttcctctgcattaaaccaagggagatcaggcatttccagctcactcacagtgggccatcttttaatccatatttcagcttaccaaacaaataaactattagaaccttttttaactccccaagctgcaacattaaatgtagagtccctactcattgggcccaaatcaataaattcagcctgatccaactctttgttccttccaccgttatcccacacccttaatatccatcccatgtctgttctccagatttatgtttatataaattagaaaactcaagcagttcttttcgagtgtagtgcacctcctcatgggtcatgctgtcaatgtcacctctagggacctgccaggactttagttataggtctagaagcaaacaggggtgtttgggtggctcttaaggagaatcaacattatcttgcccggcaactgcctcaggggagaccatcactattgcctcaggcaacacagggtttatytcctcagacaaagatggaaaggtggatggcagcgtgggttggggaggg

SEQ ID NO: 834154 - DNA, 583 bp, Homo sapiens; identical to SEQ ID NO: 811999

SEQ ID NO: 834155 - DNA, 508 bp, Homo sapiens
ttcaggccccctcccttccctacacatcaagctccaggatttgccccacccaggactggcaaattagctttactcaacatgccctgagtcagaaaactaaaatacctcttagtctaggtagacactttcactggataggtagaggcctttcctacagggtctgagaaggccaccacagtcatttcttctgttctgtcagacataattcctcagtttagccttcccacctcaatacagtctgataacagatgagcctttattagtcaaatcagccaagcagtttttcaggctcttagtattcagtgaaacctttatatcccttacagtcctccattttcaagaaaggtagaatggactgaaggtcttttaaaaacacatctcaccaagctttcaggcctgtcctcggaawgctacaaagtacagcccatttaagctcctgtatagatgctcctttttattaggccctagtctcattccagacaccagaccaacttagactgtgccccaa

SEQ ID NO: 834156 - DNA, 508 bp, Homo sapiens
ttcaggccccctcccttccctacacatcaagctccaggatttgccccacccaggactggcaaattagctttactcaacatgccctgagtcagaaaactaaaatacctcttagtctaggtagacactttcactggataggtagaggcctttcctacagggtctgagaaggccaccacagtcatttcttctgttctgtcagacataattcctcagtttagccttcccacctcaatacagtctgataacagatgagcctttattagtcaaatcagccaagcagtttttcaggctcttagtattcagtgaaacctttatatcccttacagtcctccattttcaagaaaggtagaatggactgaaggtcttttaaaaacacatctcaccaagctttcaggcctgtcctcggaaagctacaaagtacagcccatttaagctcctgtatagatgctcctttttattaggccctagtctcattccagacaccrgaccaacttagactgtgccccaa

SEQ ID NO: 834157 - DNA, 534 bp, Homo sapiens
aagaacaaaattgacaaattatagtttaktaagttcagaccttttgctcttcaaagtacactgctatgaaaatggaaaggcaaatcataggctggggaaaatatatttgcaaatacatatctggtaaaagacatattctgtgtgtatttaaaaagctcttaaaactcaataaatggaaaacaaaatccctaatgaaaattggacaaaagatttgaactgaaactttactgatgttttgtctataccaaagaagagacagggatagcacatatgcacatgaaaagttgctcaagattattattagtaatcaaaaaacagattaaatccatgctaaactaccattacacatgtattggaatgattaaaactaaaacaacaacaaaaactctgacaataaatactaagtgttggcaaggagctaaacaatgacactctcataaatgttttatttgtattatcatcgtaatgcaattttcttagatactgccttttccaccaccattgctggtgaaaaaggcagttccttaaaaagtt

SEQ ID NO: 834158 - DNA, 583 bp, Homo sapiens
cacgcagcaatttggctatatctccaaaacattatggtgagtaaaaggtatcagacttacgcatattgtatgattctacttatatgaagatttagaacacacaataatatttcaagtgatatataacagattattggttgcatgggctagggatctttggagggaaactcatcaaaaagtggtataaggtgctttgtggggtgatgaatactttctgttgtaattggggtttggtgttaaatacacaagtatattcctttgttaaaacacatcaagcttgatatgtgcctttcactgaatgcaagttatatttaagtaaagttgattaacaataaagttgaagacaaatgcagaaaaactttcaccaaagaacttttaaatatactgagatgtatcaaaattaagaactatgtaaattatttcctaaactaaaagcacccagataacacactgaagaaacattcactgaccaggtactttgaaccattcaytgtgctaggcaccataaagtcaaaacctaattgtcagatgatcagtgtttcttatcagttcacacagtctagataaaatgcatacaatgaat

SEQ ID NO: 834159 - DNA, 632 bp, Homo sapiens
gaagggtctgaagatgtaagaggtactgatgcaagagacatttggatttgagatctctggggacctctaagcagtattccctgatgggcacattaaaatatgaactccagagaaaggcaggtgcttcacacaaagatgtgatcctggtatataattagggattagagcagatctcattttgagtgaaggtacacttcatactagaaggtgttactagattttaatttgctcctttactaaaaaagaaaaagctggaatttcattaattaaaatatcttcaattctgtccagaagcagcagcaactgagggaaagttaagaaaaaagaggatgatgatgaagctatactaaataaaacactctactgtagtgatcactaaacagctaaattagcgttctattgctcaaatcctacaaagaccttgagaatttctgtatgaccttcaacaaataaaatagctctttaagtcagttaatgtctatttcaatgtagaataagtccttttaactttttaatgtaagacaaggtaaacatatgggaaracaaaaatgtcagttcaatataaactaaggaagacaggtataaaccaaagtacgaagattgtccactacatgattagtttcctaagggca

SEQ ID NO: 834160 - DNA, 594 bp, Homo sapiens
gtgtcatcctagcatagcttctgcaaagaagcaagagagaatgcaggtaaaaacattttgcatctgcaccatttgataagcagcagccctcagggtcctgactgggggtgggtaagcaaaattygagcttccggcctctgtcctgacagggcctcttactgagaggctggggagcggagcagccattacaggttggggcacttgttaggctagagtgccctggaccttgttttggatatcaccctctaggcaaaaaagcacaacttgaccgtgaacctgaccacgttccgactgtggtgttacgcctgtgagaaggaggtattcctggagcagcggctggcagcccctctgctgggctcctcttccaagttctctgaacaggtaacctgtgtggtgggctctgtttggttgttggtgacactgtgttgaggatgaggcagtgtgacctgagcatccgtggagcatggggcagtaggtcccagaggtgtctgtttctgggtcagtatgttttcaggtgactttgaggagctcacatcagcacatgctcactgagcccaactctgtgccgaggcatgtgtgagaccatgagggtgc

SEQ ID NO: 834161 - DNA, 594 bp, Homo sapiens
gtgtcatcctagcatagcttctgcaaagaagcaagagagaatgcaggtaaaaacattttgcatctgcaccatttgataagcagcagccctcagggtcctgactgggggtgggtaagcaaaatttgagcttccggcctctgtcctgacagggcctcttactgagaggctggggagcggagcagccattacaggttggggcacttgttaggctagagtgccctggaccttgttttggatatcaccctctaggcaaaaaagcacaacttgaccgtgaacctgaccacgttccgactgtggtgttacgcctgtgagaaggaggtattcctggagcagcggctggcagcccctctgctgggctcctcttccaagttctctgaacaggtaacctgtgtggtgggctctgtttggttgttggtgacactgtgttgaggatgaggcagtgtgacctgagcatccgtggagcatggggcagtaggtcccagaggtgtctgttyctgggtcagtatgttttcaggtgactttgaggagctcacatcagcacatgctcactgagcccaactctgtgccgaggcatgtgtgagaccatgagggtgc

SEQ ID NO: 834162 - DNA, 646 bp, Homo sapiens
gaaacatttagacactgtttatgggaatgtaaattaatacaaccactatgaaaagctgtatggagacatctcaaagaactagaaatagaactaccattcaatccagcaatcccactactaggtatctacccaaaagaaaagaaattatcatataaaaaagacacctacacttgtatggttattgcagcactattcataataggacagatatgtaatcaacctaagtgtccatcagtgatgaataaataaagaaaataatgtacatattttctttatccaatggaatgctatggaatactattcagccataaagaatgaaattgtgtctcttgtagcaacatggatatgtaatactgtatacttatgataccatatcattaaaaggatatgatgtcattgtcttaagtgaattgcaggtcattatcttaggtgaaacaatgcagaaacagaaagtcaaatgctgtatggtctcacttataagtgagtgctaaaaaatgtatgcacacgtacatagtgtggaataatagacattggagcctgggaaaggtgggtgagtggaagcaggggtgagggacaagaaattacttaatgggtacaatgtacattattcaattrctggttacgctgaaaggcccgacttcacctt

SEQ ID NO: 834163 - DNA, 638 bp, Homo sapiens
agagacaagggggtttgttgcaagattcagtaagcaatggcaggggccagaacatcccagtccctgttcaccttgttaataattattgtcctcatctcaacaacaatgggaagtcastaaaagatctgacataaaaatagttatattttaattagatcactctgtttcctgagtgggtataccttgtagagaatattattgtaatactcccaacaaaggaggaatgtgatttgactagggttagttccagcagtagaaatggcaaagcatggatataatatattagagagttgagaaaagaaaaataaagaatctgatgataaattggatatagagtgagggatgtagaggagcaacaaggatggctttgagttttctggtttgcctaacaggatgggtgatgatgacaatcactgaaatacgtaccaaggtagtgttacaggagatagaaagaaatcatttaggtagttagggtaaagagagtccctggcagaaaactttctttctaacaaaaagcagctcagaaattgctcccattctaacctcacgcagttcaaagaaatcacctctcttctaacaaagagcagcctggaagatcaggctgaaaaacacagacaagcaacttgggcacagagctg

SEQ ID NO: 834164 - DNA, 586 bp, Homo sapiens
caataatacatgttatatacaaatggctttcaaagcttggtttatactaccaatatagctattaaaataacagctttctcataaggtatgaatgagttttcaaaagctatagctgagttttcatttttgcccatttattttaattccttttgatctttagaaattatatggccaggcgcggtgactcatgcctgtaatcccagcactttgggaggccaaggtgggtggatcacgaaatcaggagttcaagaccagcctgaccaatatggtgaaaccccgtctctactaaaaatacaaaaattagctgggcatggtggcacgtgcctgtaattccagctacttgggaggctgaggcaggagaataacttgaacccaggaggtggaggttgcagtgagctgagatggcgccactgcactccaacctgggcgatggagcgagactccgtttcaaaaaaataaataaataaatgatayataatattttgttaagggaaaaaaatattttagcttataacttatccttgtgtaaattaactatcataatcaattttttgtttaccttagcatctgttagcaaattgtatta

SEQ ID NO: 834165 - DNA, 597 bp, Homo sapiens
gaaattcttgaaaaaaaaaactcagcaaaaaaaagggctacagactttccttactcttttaggttcgattttcatttgagcagccagatggtagagcgcagatgcccaccactgaaagagtgactttgacaagatgtttctacctcttcccaggacattaaaataaggaaactgtatgaatgtctgtgggcaggtacatgtgtatggtcgggagtgtgggaaggttgaggaaagggtactgaaagtccattttagtcaagaactccaggtttacaggctgagaatccttaatccaaaaatttgaattttgaaatgctctaaaatccaacactgtgtgagcgcccacatgatattcaaaggaaatgtttattgaaacatttcaaattataggtttttggattagggatgctaaaccagtaagtatacagctgaattccaatatacaaaaatatctgaaatttgaaatacttctggtagcatgcattttggataagggataatcaagccatatacagaaaatactgaagtaatgyctttcttctggtcagtgcagagcacgttgctcttctcccaaagtttttcatttagacccctttt

SEQ ID NO: 834166 - DNA, 579 bp, Homo sapiens
aaagaccctacaaaaatcccatccaaaggtcaacagcttcaggattaaaggtagataaatcygcaaagatgatgaaaaaccaatgcaagaccgctgaaaattccaaaagctggaatgccttttctccttaaatgatttcaacacttctccagcaagggcacacaacagggctgaagctgagatggatgaactgacaaaagtaggtatcagaaactgagtaatgacaaactttgctgagctaaaggattatgttctaacccaatgcaaataagctgagaaccatgataaaagattacaggaactgttaattagaataaccagtttagagaggaatacaaatgatctgatggagctgagaaacacagcatgagagcttcatgatgcaaacacaagtattaataggcgaatctatcaggcagaaggaagaatatcagagcttgaacactatcttgctgaaataaggcaggcagacaagattagagaaaaaaaataaaaggcaatgaacaatattccagaactattagactatgtaaaaagaccaaacctacgactgattgaagtacctgaaagagatgggga

SEQ ID NO: 834167 - DNA, 664 bp, Homo sapiens
aaagagaattttatttaattaactgtaaaattaacgtcatcattaaaataataaaacccaamttctcttctctaggaggtcatggccttcctagccacttttatgtttcaaataagaaaaatgttgagttaacaatttatttatatggtccgttcagtataagaactaggaagacaatttattcatgccttagacttctaatagctccattcccatatataaaggagtacatatcccaattaatacaactttttgccacattaattattctagcagaacactctaatttttgtgtttaaagaattcacaagcctctttaaaatatcaggaacgatattaatatttagtgaggaacagtatatatatatagagagagagagaaagggttacattaatcatttctcatatatatatatatatgagaaatgaaatgaaatatatatatatttcaaagcttacagagtttaaggaatcttcctgaggtcacaaaggtcacagctgagttttaaaaccaagtctgcacggtaccaaaatccttcttctttctaacacactaaattgccttaagaaaggcagctccccttactgaatcccacaccattcccatcccacgaatatattctttcttttttcataccacaaatttttatttaccacctatcag

SEQ ID NO: 834168 - DNA, 638 bp, Homo sapiens; identical to SEQ ID NO: 823767

SEQ ID NO: 834169 - DNA, 555 bp, Homo sapiens
agctgtgcctaatgtgttgccatcacagcactattatttttaatgtagttctgaattttaattatattttactttgtaactttttaccctccaattctatatagttttaaactttctttcatgtgcataggcaaaagtagaagctacacatttcagctagaagatttattgctcttagtttctctttatttctgcttataaatgtttgtgttctgtataagcacctatgttatttccttattattaaagtatacacatctttatggaacactatattctagaatgatggatctaggaatctctggttggtcttacaacatcccaactcttctagcccacccacaacattcccagtttcacaactaccacctgtcctacaccatcaagactatcctcatgacactctctcccctgtgtaagtcagtggccgcaggtgtcacttagactctaaaccaggcacgaktccatcagagtgagtcacatttcctaccccttgctctctgccactaggattcattctgtcccttttctgatatttttcatagtatacattta

SEQ ID NO: 834170 - DNA, 668 bp, Homo sapiens
aactatactccattttatatatgagactagagcatccatgaatttttgtatctggcgggggtgggggatcttggaaatcaatccttcatggataycaacggacaagggcatacagaagagaaagaaacttcagtcattccttgtgcatgtggcttacgtgtaaaagtgcagtcaaaatgcttttttcaattttatcattgactcacatttattagtttgatgcaacttgagatcaactaagagttcattgtcaagatttgtcttgtatttaaaagcaggcaaaggtaaagttaaaatgcattatcctttcgttttcaataccattcttaaaccaaattaaggaaagtccaaatttaaaaatcaggtctagttgtaacttcattttaaagatggaacctgggtgttcagatagctttcattggtagtgctgatgaaaactaattaacaatagcatcaaaagtatgctgttactgccagagactttctcatttaacctttcaaagctgtatgaaaactacacaaaatttagccacatggctaaagagttatgtcttctaaagcttccccgcattctaagaatgttaatttttcatatcaacaaacaagaacataagattatatatttaaaaatgtaataaaatccaggatatccctgccactacatacat

SEQ ID NO: 834171 - DNA, 596 bp, Homo sapiens
aaagtcctttctaacctaaatgagtttgtgactatgtgtgtttatacgtgtgaggatgaaacacactgtgaacaccgtttctcctagtgtctaagctgttatcagagaatgaagcacttcaggaggctaattgagcactggaggctgtctatactggcagagcagaggggagagggagagttggagcccccccatacacacacacacacacacacacacacacacacactcaagaaaaactgctcaattctctaggcaggccaatctcatctgatagaatcaaattaaacttcatgttgcctctacagacaaaatacatttgttttcagatgcccagacaagactcagcttccctagtctgtgcaatggtcctcgcaggacttctgagtaaacctctcattctgcgcattcagctcagacttagctgccacgatgttccggcattgtctttccgagccatactcttccagsccctgccattctgttatttaacagagagcacgcaaaagaaaaaaaaattaaggtgaaaaagaatcatactaaaggtcaatcccatattttgtataaagatattattttttcgttgtttattattg

SEQ ID NO: 834172 - DNA, 464 bp, Homo sapiens
agcctggccaacatggtgaaaccccacctctactaaaaattcaaaaattagctgggtgtggtggcggcacgtctgtaatcccagctactcaggaggctgaggcacaagaaacatttgaacccaggaggcagaggttgcagtgagctgagattgcaccactgcgctccagcctgggcgacagagcaagactccatctcaaaaaacaaaaaacaagacaaacaaacaaacaaacaaaaaactagtattttgagaaggagtccatggccaaaataatggttaagaaccttggtccagagcaatgaattattaatttagatcaattatacttataaaatatttcttacaaaaagaaaacacaccattttgggtaaaaatgtggcaaagaattagtttcttacacagtttatgaaaatatgaattgttacagscttttaaaaagtaatggaacaaatatttattaaaat

SEQ ID NO: 834173 - DNA, 390 bp, Homo sapiens
tcacatcaacaggccatatgggtgtaggatgcagctgcttgcaccattgtttcaaggctgtctaaaagagtcaaggagaaggaatcycaactatggagttcagaaaagggaggaagatcaacttgttaatctgtggtttagagactcatttttagcatgaattacagagtttagggtgaaatggttaagacagacatattacctgtgctccattaagaaagggagctgagaaattctggaaaaactttaaaaggtgggttattcaaaaatgtattttctatgtgtgttttataaacaaaaagcttgcctacttgtgtacattttgctgttattacagtcagcttttatttccccaatataaaataacagaatagtgttaggttataggag

SEQ ID NO: 834174 - DNA, 390 bp, Homo sapiens
tcacatcaacaggccatatgggtgtaggatgcagctgcttgcaccattgtttcaaggctgtctaaaagagtcaaggagaaggaatcccaactatggagttcagaaaagggaggaagatcaacttgttaatctgtggtttagagactcatttttagcatgaattacagagtttagggtgaaatggttaagacagacatattacctgtgctccattaagaaagggagctgagaaattctggaaaaactttaaaaggtgggttattmaaaaatgtattttctatgtgtgttttataaacaaaaagcttgcctacttgtgtacattttgctgttattacagtcagcttttatttccccaatataaaataacagaatagtgttaggttataggag

SEQ ID NO: 834175 - DNA, 612 bp, Homo sapiens
tggttcaacacatgcaaatcaataaatgtgatatatcacataaatagaaggaaggagaaaaataaatcttctcaacagatgcagaaaaaacatttgctaaaatttaatatctttttattataaaaactcttaacaaagtaggtattgaaagaaacatacttcaaaacaatgaagatcatatatgattccatcaataaactcttataactgagaaaaaatcagtaacattgcagggtacaagatcaacattcaaaaatcagtaacatttctagaaaccactaacaagctagttaaaaaaaacaagaaagcaatttcatttataatagctacaaaaatatctagcaatgaatttaatcaaggaccaaaaaaatctctgataaaaactatgaaacactgacgaaagaaattgatgaagaccccaaaatggaaaaacatcttgtgtttatggattgttaaaatgatcatgtcccccaagagacctgcagattcaatgtgatccctcttaaaataccaataacatgattcacagawataaaaaaatattctaaaattcatatggaaaccacaaaagacttcaaatggctaacgggatcctgagcaaaagaacaaagc

SEQ ID NO: 834176 - DNA, 596 bp, Homo sapiens
catgcaacaatatgaaactcacaacccagatgttcttcagtaataaaatgaataaatraactgtggtatggtcatatcatacaatactacacaagaagtagaagcactaactactactgcatgcaacaatatgaaactcactatcataatgttgagcaaaagaagccaagcacaatagaatgcatacacattataccacattattccatttttcaaataccagtaagctaatctagattgatggaagttagtatagtggttacattttgtggagaggttggagtgataatgttttggaggagacatagggatacttattattttgactgctcatagtgtcctacagcctgatctgaggggtggtttataatatctttccttcataaaaattcacaaaagctgtgcagtgatgaattatgtattcttcaatatagttttgttcttcaatgaaagtatttgtccaggactggtatggtggctcacacctattaccccaactacttgggaggctgaggtgggaggatagcttgacgccaggagtttgaaactagcctgagcaacatagcaaaaccctgtctctgaaaaaaaaaattaaa

SEQ ID NO: 834177 - DNA, 439 bp, Homo sapiens
gctctaaacagacagcgccagagtctttagaaatccaggcttctacatttctgctatattcctccattcacgactttattttcaagktctctcagttggtctaagaactgctgatgctccagccattacactggcatgcaggtctttagcgggagaaagaggaaaatgacaaaagagtgtactatccagttttctttaagcatactccatggtcttttattcttcttatttgattaatacatattaaccgattaacagattaatctattcttaatacagactaactacaatctgtaccatatttcctgccaaaattctatcctatgttgtctataataattttctatattaaatattcttttaactgtttaaatatctaatcttatcccttcttattcttcatatacatattgatattactctcctaagtataccttct

SEQ ID NO: 834178 - DNA, 590 bp, Homo sapiens
aaccataaccattccctggccttttagctagttatacatttcatattyctggatgtgaataagcaagtcctattcatcgtaccgggtgtggggcagagtagtaagggtctactaggataggaacagtcttgggagaaagttaacatagcagacacaatgtattagctaaacggttggacaattgacatcaataactatactccattatagaaaaaaaactagaatctgttctttaactccacttgttgtctatgggtcttattgaggtctagctgcctatgcctctaagtaccacttaccctagatttttttttcctttctctgctttatgaaactctttaatatcctgttttatgtatttcttctataaggtcaaaaggcagacatggcagccagtggtttcacaaattgctacaaaaggccatgttcataaccagaattaaggaaaagataaaggctatggaaaaaaaaaaaccataaaaacctaaaggaaaacccttgagaactggaatgactagtagaccaagtaaaataatattttttttaaattgaaattctaatcatttatttttattttcatagaatctttt

SEQ ID NO: 834179 - DNA, 565 bp, Homo sapiens
tgaacttacctcaattacttgcctacttgtaggtattttctgctctatctttctttatggactaaatcgttctgtgccccataaggctactactatactttaggttaatatatggactagatagaaaatatctctagaattccgcacagaggaaacataatccactttaagtctcacacaaatactcctgagtagcttgctctagaaatttcttgaaaccaacaggaaatattgtcattggaacaagaaatcactgaggatcatcagtgccatctgtcctgtggacttgtttgaaaaggaggattatttgaggttgtatcaactatatacagccacaagaatgctacaggtttaaccaccccaaaacttagtggcttaaaacaataagcatgtatttagcttatgcatctgtaggtcagctggacatttctctggttttagttgagttyactaacatatcttgtggttggccttggctgggacaactggtataattcaactctgctccatatgtctcatcctccaacaggctagtccaggattgttcttctatagtgacagaaaa

SEQ ID NO: 834180 - DNA, 488 bp, Homo sapiens
tcatttttatccttgcttctcaatgccagccagtcatgaagctccatcagctattctttaatgtttcttatgctcatctctcttaccatacttataatcaccttagcacagggctttttcacacctcatacctaaactcttacaacagaccctaaactactttctctattttagtatctcctccaccaaatcaatcttaactgctactcccttcatcaagccactctcctgatcaaaaaacatcagtggctctcccctgatgacaaaataaagtccaaactcctgaccctggcacttgaggccctccatccagatacaaccaatctttatacatttatcttcaccagtcaaacttcacttattgttgcctcctagcctttgctctgcctgtctctccctattttcctcactttcctttcttagtgttaggaaaccaactgagactattccagttaactaygatctacccctcttctaaacacctctaa

SEQ ID NO: 834181 - DNA, 551 bp, Homo sapiens
tatgtaaccctttataatgcccattatctcaattaaacatcttcagaaatagccgtagtaatgatgaagagaattcaatgatattgtacaaaagaaaacaagctgcactatctttgacttgatttgttttgacttcaattaggaactatgactgttcttgttcttttcagagattgagtttaaagaaagaatagtttttagttatcttaggtcacatttcaagtaaaaactgtgaatgaaggaactttacaaaggcactgttaagtattggagtgaaagcactgtaagaatcagtttactgttagagtcagtttagtcattgcccaacttactttccaaccatctgcattaaatatgcttcattaaaacagaaccatttggaaaataagctagcaattaacacagcttttgcacatgcctctaacacaatagatttcaaacttttggtgaaactgactcaactacttccatgctgctgctrtgtaggacttggcagcagtccctaggcgtgcttcatccataccatgtcatttcaagatactgctgcatta

SEQ ID NO: 834182 - DNA, 633 bp, Homo sapiens
agaatggtcttctttgtcttctttttaacccattcttgactttaagtctattttatttsatataagtgtagttacttctgctctctttttattcccatttgcatggtatatgtccagaatactttaaagtcatgattttgaagatagtgattgatttaacaaaggaggcaaatgtaacagcaagaatcagaaaccttttgatatatattgtttgtaaagaacctcttaaaattattaaatgaattgatacagtgatttttaaatgtattggctaatttattaactaatttggtaattccacaaaaatatactggatgacttctttgttcaaagtattgtgatccagataaatgagaaagttgatagaatataaacaaaaatgtaaaggaaatcacagagttgccatagaaatgtatagagaagaggcattcacttctcttgttgaaagtgttcttctggtacagtacaaatgttaatttggagctactgtatcatgttattaaaagttctagtgtgataatacaatctctcctttctgcctcaagtggctaagtgtatttgttctaagatttgtgtttgtttaattttaaaatttcattcgctatgctagtcactctggaatgcttgatttcc

SEQ ID NO: 834183 - DNA, 588 bp, Homo sapiens
acaataacattctaaaattaatgaattttcccagaaaagtgattccaatcatttgaaactttttacttatgtacacgataaatttaatgcaaacataagccattccacaaatacatctaaatattatatcacaggatatagcatgtaatatatttctatagatcagtaggaaattcatgaaaattcaaaccaagtataagttttgtaaatcacactgtacttttccattgcttgtgttagtatttaacttttcaagtattttaatgctgttttccccagccagtctataaattcttcaagaattacttattgtaccacctacagcaaaatcagaaacatgaacaatataagtaatctatagtctgtatggatagaatgaatcaataattctaacaacctatgaaagtgagttcctagaaatatttacatatgtatatatttaattatatatatatttaattatakatatatatatttttttaataaagataggttctcactctgttgtcccagctagtctcaaactcctggatccaggcaatcctcctgcttcagccaaagtgctaagattacaggtgtgagtcacca

SEQ ID NO: 834184 - DNA, 630 bp, Homo sapiens; identical to SEQ ID NO: 828594

SEQ ID NO: 834185 - DNA, 649 bp, Homo sapiens
tcaacaaaaacttatgagacatggaaagaaacaaaaaattatgcactatacacaggaaatatagcaattattgcaagtgtttctgagaaagcctagatagtggacttattagagkctttaagtcaactattttaaatatgttcaaagaactggagaaaaacatgcttaagatctaaaggaaagcatgaaaacagtgtctcaccaaatcaagaacatcaataaagtaattgaaactataaattataacaaagaaccaaatagaagttctagggttgaaaactacaatgactgaaatcaaaatttcatgagagaggctcaatagcatatttgagcaggcataagaaagagtcagcagtgtgaggaacagcaaaataaaagagaatgaagaaaaatagtcttagagacttgaataccaacatacacataatgggaattccagaaggagagaagagaataaataggaccccaaaaatgtgaagaaataaatggccgaaaatttccctgaattctgaatctgcatatccaaaaagctaaacaaactcccagtatgatacatttaaagagaactacatctacatatgtcataatcaacttgtcaaaagccaaaaagaaagaatcttgaaggcagcaagagtggaacaactcatca

SEQ ID NO: 834186 - DNA, 636 bp, Homo sapiens
gggagattggctagtaacaactctgacgaatataggactagcaggtataagaagcagtcacacctctgggatattgagcacccaaggaagaggctccccacaggctgacatgcagaccctcttgaaaggagtctttatggtaccagcggaacttgctggaaaccagccctctggaacttgccataaatctgccctgtagggttctgggagagctgctcattagcaggtatctccctggaggcacgctgccacaacacccccaagggaggtgctgaaatctgctggcagctgggggttgctggagcccttcactgtgtgccccagatctcaaaagcaaaaccctttcctcccaccatgttgctacatgaccctcttctgacaaagcttcctgaccagctggcaaagggaaaatatgtaaagggattggatccattttccccaagcaggcaaaaaggatgaatttggagttgagaggcattaacttgacaactggcccaagcttcaagaaagaagccctgtaagaagagcaaagactcatgatgctcctctccagggcatgtaacagagcattaatggaaacccaggctcccagtggacttaygatgctcctctctagggcatgtaacagagcattaa

SEQ ID NO: 834187 - DNA, 488 bp, Homo sapiens
tcctgcctctaaaataacaataataaaataaaataaagatccttagggattgtgaggtctgcaaggaatggcactcccttttgcccacaccaaccccttcctgggagctgaggcttgaatgaggagggcagtcccagagtgggggaagagcattccaggcagagggagctatagtgcaaaggcctggggtagaaatgagctcaatctatgggagaacagcaagaaggccattgtggctgcatgggaccatgtgagagaagggtagtaggagatgaggttgagaggactttgggggacaggtgagatttggtgagatgggagggaatgaatgagtgaagcctccaatacgataagcgaaaaaacatgatattccaagagataggcgtggtcctcccccaaattttggttgctgggaagactggcagtccctccccagctggatccmctaggccttttgccagcatcacctacagagaggaaagagccgt

SEQ ID NO: 834188 - DNA, 610 bp, Homo sapiens
gggctgttttgctgcaattcacttgatgtcaaagcaggaaagacctcggacaaagcttcaagtctaaccttttttgttctcgggtgagtaaaccaagaccagaggatgagtcttgcccagaagagtttctaaccattcttcccccaggtatttgtttcccggtgaaatttgcttaaagttggaattggctgagtgtgggccagagctatgggcattgttgtgaacacttgcttttaactgcccagtatctacttgctctttatctgtaacagctccctgatttttccctggcaccatccctcttctgatccccaggaaatggctccaggtatgggcatgtggttcatgaccacagtggttggctcagagatggccatatgatgcaatccaggccaatgcatgtcaaccacagagctcttaggaactactggtacccactggagctgctgggctggttagatacaagcctggggctgctgagagccatttttgctatgacttggggagctgcctgmgaggatgccaacacaaaggaaaaaaggtccaggtgatggaggaaaacagaaaccttagaacataatttgagcaccttgattcagctgagcctgaa

SEQ ID NO: 834189 - DNA, 626 bp, Homo sapiens
tattttattttctgttcctatgttacttcgcttaggttaatggtgtctagctccattcatgctgccgcaaaggatatgatttcattctttattatggttrtatagtatttcatatatggtgtatatgtactacatcttctttatccagtctactgttgatgggcgttgaggttgattccatatctttgttattgtgaatagtgctggaatgaacatatgtgtgcatgggcctttatggtagaatgatttatattcctttgggtgtatacccaataatgggattgctgggtcaactggtaattctgttttaagttctttgagaaattgccaatctgctttccacaaaggctgaaacaatttacattcctaccagtagtgtactagtgctcccttttctctacaacctcatcagcatctgttattctttgatttttttaatcatagccattctaactggtgtgagatggcatctcactgtggttttgatttgcagttctgtagtgatttgtgatgttaagcattttttcatatatttgttggctaaatgaacatcttattttgaaaattatctgttcatatccactttttaatggggtggtttgtcttttgcttgttaatttgcttaa

SEQ ID NO: 834190 - DNA, 618 bp, Homo sapiens
tttcttgaaacctctaagtaataaataaaattgtgaagcactcattttttcattttaacatttgaaacacatttgggaagatttaatagacttgctactgatcctttattttatttatttatttwttttttgagacagggtcttgctctgtcatccaggctggagttcaggggtacaatcatggctcactgcagccttgaactcctgggctcaagctatcctcccacctcagcttcccaagtagctgggactacaggcatgtgccaccacactgagccaattttttatttttatttttttgtagagacagggtctcattatgttgcctagattctggtccctttcaatcaaaaatagtttaggctgagatcagcaatttgctttccagaaaattgtgaacattttgtgtaatggacagagttatatactagaaaactgatcaggctggtattgttatccttatagtccttccatcatgtgctataatggcagaagtgtctgtccctccagaagctccacacctccccatccacacacagtaaaactgagcaagctctaaatatttacattcttagaaacatattcttatgaaatccatacctcttgctcaaaaatgat

SEQ ID NO: 834191 - DNA, 476 bp, Homo sapiens
gtagcattacatctaaaaatactacataccttatttataatcctctattgctaaaaaatgctaacaatcatctgagcctttaatgagttgtaaacattttgctgatggagagtcttgyctcaatgttgatggctgctgactaatcagtctaatggttggtgaagattagagtagcagggcaatttcttaaaagaagacaacaatgaggcttgccacattgattgactattcctttcacaataggaaaagtatgcaatgctgtttgatagtattttacccacatgagccactctcaaaaattgcagttaatcttctcaaaccctgccactgctttatccgctaagtttatgaaatattctaagtcctttgttgtcctttcaacaatgtttacaggatcttcaccaaaagtagatttcatctcaagaaactactttctttgctcatccacaaaaagcaacttctcatccattcaaatg

SEQ ID NO: 834192 - DNA, 666 bp, Homo sapiens
tattgctttacttccttctctgctttgtaattgcatcactatttcagttccatraagaaaagaaaagtatattaggttgaaatgtaataaaaaatataaaaatatatggaagactttataactcatttcaagttattttctccaaactactcaggaattcaaaatggattgatgaaacataagcagaaaaaaaaaagaaagaaatatcccaccttacttgtgcttacttggaagaactaagacaggtcaagctaagggtccagggtttgtcatgaagtgctcagtctgtctttttttactactgggaagtaatctaggggaaaattaaacattcagagaccactcagaggcaggcatttttccatagtcctgtttttattcaggtattcaacatacgtaattaagcagctgttgtgtagtagccactgggatagttgatggttatcaaagttaataagaaactagtcatatccctgttaaaataagtaagtgttctcagaaagctgacaagtctattacagcaattaagctccatgtggtaagtgaaatatgagagaaatgaataaggttggatcatagcacagggagacctcagcctgcttggaggtagaaggagaaattaggccttagcttagtctttcagaagaggaattggccagttcaaga

SEQ ID NO: 834193 - DNA, 640 bp, Homo sapiens
gtcccattaggccctatctcccaacactattgcactaggaattaagttttagatacatgaattttggaggacacattcagaccatagcacccctggacaatgtatgtgtggcatagattcaaagcagatcagcaaaaatcaagaaatataactgatgctagagtttccactcaagaaacagacttcacatttcaatcccagccaagatactagcccaataaaacaaaagaaacaatgattattggagaaaaatagcaaaatccccacaacttaatagttagagtgttcagaatataattcaaaatttcttgacatataaaaaaatggaagacatttcaatcaaaaacaaaatcaaacaagatcagtcccaagatgaaagagatcttggaactagcaggcaatgattttaaaaacagctcctataattattctaaagaaagtaaaacaaaatatgctcgtgatgagtaaagagatataaaatcttagcagacacagaaagtaaaatgaacaaaatggcaattttataactgaaatatacaatattggaactaaaagtttcagagrgtagacttaatgacacaaatccagaagaaagagataacagaggaaagaataagtaaacttaatatcagttaataag

SEQ ID NO: 834194 - DNA, 571 bp, Homo sapiens
gtcactgcactccagcctggatgacagagtgaaactctgtctccaaaaaagtggttaacttaataaatgttgtatattccaactactccattcccycatctatctcctcttcagaccttcctcttcactcagacacaacagtattaaaattaggccaaataataaccctacagcagcccctaagtgttcaagtgaaagacagttgcatacctctcactttaaatcaaaagctagaaatgactaagcttagtgagaaaggcatgttgaaacgtgagacaggctgaaagctaggcctcctgtgacaaagttaccaagtagtgaatgcaaaagaaaaattcttcaagaaaattaaatgtgctaccagtgaatggactaatgataagaaagataagtggccttactgatgatacagagaaagtactagtggtctggatagacgaccaaaacagctacaaaattcgcttatgccaaagcctaatcgagagcaaggcctcaactttcttcaattctatgaaggctgagaaaggttaggaagctatagaggaaaagtttaatccagcaaaggttgatt

SEQ ID NO: 834195 - DNA, 646 bp, Homo sapiens
tataacacggtttactgaatattttaagcccactgttgagacatactgctcagaaaaaagaagattcctttcaaaatattactgcttattcacaatgtacttggccaccmaagagctcttacagacaaggagattactgttgttttcgtgcctgctaacacaatagtcactctgttgtccctgaatcaagagtaatttcaactttcaaagtcttattatttaagaaataacatttgaagtggatatagctgccataaatagtgattcctcaaagtaaattgaaaaccttctggaaaggattcatcattctagatgccattaagaacatacctggccaggtgcggtgcctcacgcctgtaatcccagcactttgggaggccaatcacctgaggtcagcagttcgagaccagcctggccaacatggtgaaaccctgtctctactaaaagtacaaaaattagccaggtgtggtggcgggtgcctgtaatcccagctacttgggaggctgaggcaggagaatcacttgaacacaggaggcagaggctgcagtgagccaagatcacaccactgcactccagcctgggcaacaaagcgaaactctgtcaaaaaaaaaaaaaaaaaaaagaaagaaagaaagaaagaacattt

SEQ ID NO: 834196 - DNA, 577 bp, Homo sapiens
ggatccccaggtataatttaggttctaccagttacaagtttttggctagcacactatcccaaaactccgctgacctttacatgcctgcagaaacacttttttctgattgctttacctatagctacctcatctgaggtagttgccttgaaagattgtgtgtattttccattcattcacttctaccaattttcttggcctctaagtctatagcatgagtaaaatttcagcagcccgaggaggttggggagcagggggaaattacaaagtcaacccaaaggaaattctgcatgcttacagaatagcaatatttatctgtttttaaattgtatttgcatgaagcatgagaatatggaatatgtgtatgtgaatggattcgagtttgctaaaccaaggaagaaagaggagcataatttattaatgtggggtcactcatcagagagtctgtctttaatatactagcagttggaaaaagttctagcaatttgttcacttggttaacttaatcctgrtcttaatgtaaatgtaaaatatgcagtgaactgtgataaatgaagatgttaaaaattcctagctgtga

SEQ ID NO: 834197 - DNA, 621 bp, Homo sapiens
tttttttttttttttttgagacgaggtctcactcttgtcccccaggctggagtgcaatggtgtgatctcggctcactgaaatctctgcctcccaagttcaagcgattctcctgcctcagccscccactgagtagctgggattacaggtgcgcctgccaccatgcccggctagttttggtattttcaatagagatggggtttcaccatggggggcaggctggtcttgaactcttgacctcaggtgatccacccgcctcagcctcccaaagtgttgggattacaggcgtgagacactgcacccggcctggtcttttattattacaattataatgcttcaatgaatattcttctatatatatcattttacatagtgcaaataaatctgtaaaataaattcctagaaagggaaatgtgggccatagtacaaatgcactgtaattttgataactattgccaaattacatcccatagaagttgtaagaatttatattccctccatctttaacataattttattaaatgttttgatatcactagtcttatatattaaaaaataggatctcagattggctgtaatttgcatttctctcattatgagtgagattatcttttcatatgtat

SEQ ID NO: 834198 - DNA, 621 bp, Homo sapiens
tttttttttttttttttgagacgaggtctcactcttgtcccccaggctggagtgcaatggtgtgatctcggctcactgaaatctctgcctcccaagttcaagcgattctcctgcctcagccgcccactgagtagctgggattacaggtgcgcctgccaccatgcccggctagttttggtattttcaatagagatggggtttcaccatggggggcaggctggtcttgaactcttgacctcaggtgatccacccgcctcagcctcccaaagtgttgggattacaggcgtgagacactgcacccggcctggtcttttattattacaattataatgcttcaatgaatattcttctatatatatcattttacatagtgcaaataaatctgtaaaataaattcctagaaagggaaatgtgggccatagtacaaatgcactgtaattttgataactattgccaaattacatcccatagaagttgtaagaatttrtattccctccatctttaacataattttattaaatgttttgatatcactagtcttatatattaaaaaataggatctcagattggctgtaatttgcatttctctcattatgagtgagattatcttttcatatgtat

SEQ ID NO: 834199 - DNA, 642 bp, Homo sapiens
gttttatttactaagggcttaaatatcctatcataatggtatacacatttgcctaacaaattttgaattagctcagtatctaaatgactctaggtaatgccataagccatgggtttatgtcaacattttcaggttattaaagagccattatgatccagtgtttatgacatgaagtaccaggaagttttgtcaacctgccacagggcccaaaattctcctatttggtattaatctaagatggctttaagagttcaccaaaaatgaaatatcttcagaagagaaagctgaagtcaatatctggggcttgccagtgtcccttccccaaagtaataaaagatttagtgggtagagggggcaagacactccacctgatgttagttaaagacgggtaacataatttgattccaattcatcagtttgaatgtaggcacaagtctatatttgaaatgtgaaagtgaggtagcaatatgttacaaagggattggtgggtttgttatgcaaaagcaaatgaatcccttaatgactagagtcagatctactgcttcaatagggagtgattcataagactatcatccagggtaccytgatggaacacaatcaagtctctgaatctgtcattggaattgctgaatctctacaata

SEQ ID NO: 834200 - DNA, 648 bp, Homo sapiens
atgtcttcacatattcaaaatatactctagtttcttgaacatatggaataaagttataaaactattttagtgtttctgtctaaaattttgtcatgtgtatcatttcttgatcagtttcaatgattgttrtttctcctcattatggaattatgaggcttttactttctagctggtggaaactggcagtatttccatttatctgtgacactgtttcctccaatttttaaaaaatattttttatcttatctcatagttttctcacatccatgcactgaacagcactcaaccaattacttgaggagaacatttttaagatctataaatttttctctatagttctttcttatctggatctctgtcagcaaaaaaactcttccctctctcttggagggaacactattttttaatgctccaatgttgtttgctatacaaatacatgaagagataatatagaacaaaagcaaatacaaggtatttaaaaatatgatgtttcagggagaattgtccactaataaatcttatctacttttttacatctggccatcattctgggcaaggccattgttgtctcttacacagtttgccctaacagccttgtaaattatctctatttatatatccacgtaaagtaatttgtgcatacagaag

SEQ ID NO: 834201 - DNA, 599 bp, Homo sapiens
ttgtaaaacattactgaaactaactaaagaagataaaatttgataatgatatcgaacagagtcatggattggaagtgtttctattgttatttgggctaaattctctccatatatatccatgtattcaacacaatgctattaacttcctgccagtctttttgtagaaattgaaattgattctaaatttttaatggaaatttaaaaatctaggatgtttacattttttaaaggagaacaaagttagaagacttacactgattgatttaaaaactactataaaaccatagtaatcaagacattatatacaaagatagatcaatggatcagaacaaatattcaaaaataaacccttgcctgtgtggtcaattgatttttttaaaaggtggctagcaaattcaatgggatagacaatagccttatttgcatatagtgcttaggtaattggatgtccatatgcaaaaaaaatactaaaatctgccacttwcttcccagcatatcctaaaattaactcaaaatagatcatagatctaaatgtaaaatgtaaaactataaaacttttagaaaaaacatagaaaaaaaatcttggcaatactgagtta

SEQ ID NO: 834202 - DNA, 642 bp, Homo sapiens
tcatttatatttgtattacaccagatatcttggctgtttctaggtatacagaagaaatgtattattgttacagaagaagtgtatttttgcttccaggtatatagaagaactgtattattattgtattattgttagaaaaaatatataatgtaagaatgaattcacgtgttttataaccagactgctgtaaccaggcatatatttgtgagatggttgatcagaagtattgtcaatggaaatataacagaacaatgctactttataaacaaaatgtcaaaacctatgtccttggctttattagcccaatgatctgaacaaatgtaataaataacaagtacaaattctattgtggaaaatttgtggactaataaattttaattctatgtctattttcaggagaagttaggtaactgtgaaggtagtgaaaatcatagtttaaagaatcgttagttaacacagaaacaaaaaaaatgctgcatattctaacttataagtgggagctaaacagtgagtacatattgayacaaataagggaacaacagacactaggcttacctgagggtagagagtggaaaaaggataaggattttaaaagggtacctatcaggtactatgcttactatctgggtgacaaaatgtctg

SEQ ID NO: 834203 - DNA, 630 bp, Homo sapiens
cagtttatgagcatttatttacacaagggaaaatgaattttgatactccaggtatgccatctatcccagcctgtctgcatcaaaatgccagattgtcatctccagtttaggccccctctttttctgctgtaagttgtatttcagtctgaggatgaattcagcactttaatcagtgcatttgttttctgctttgtcatccacgtaactggcaagtctggccagggcactgtttgcagatgaaatctgcctgtgtctggaatgcagagtggccagtttctccgatttttcttctctttctcagtcaacacagccactctttccatttgttcccagttctatgcacactataattatgtatatttcctttcatgccacttacacttgtacatttctgcactagggtgaatgcaattattccattttctccttttttcccctttgtggctcaaactgttgccttgttctttctcattgattcctgcactgcaaaacagtcaaatggaaatacaatatgttgcacctgacattcatttaaatcacctgccatgatggtaatacatgctggtgatttcttagygtactagtcaatggaaaactgtattagtattgcaataatatgcctatatttgc

SEQ ID NO: 834204 - DNA, 507 bp, Homo sapiens
tgacatgatcagatgtactcttaaagagggtctttggggcttcscccatgactctctttggttcttcttccttacagtctgcaacagtgaaagactgtttcctacatgaagtctgtgagagagagaacaggtttgcatgttgccaagttatcaaagaaaatacatttccttcaaaaccaacttatcccctgaagctgctagtaagaaaaatatgagcaaaatataccacagaataaacttaagctgcattttaaaaagactattatcttgtatgaaaataattcataagttaaaatgttaaaaggccagggaccacacctgtaataccagcactttgggaggaaggggtgggcagatcacttgaggtcaggggtttgagaccagtctggctaacatggcaaaaccccatctccacaaaaaataaaaaaaaaattagccaggcatgtgacggtgcacgcctataattccgcactcctacttaggaaggtgaggtgggaggatcgctgg

SEQ ID NO: 834205 - DNA, 644 bp, Homo sapiens
cttgataggaatagcattgaatctgtagattgctctgggcagaatggccattttaacaatattgattcttccagtccgtgagcrtggaatgctttttcatttgtttgtgtcctctatgatttatttcagcagtagttcgtagttctccttgtagaaatctttcagttccttgattggatgcattcctgttgtgggaagtcagggaccctgaacggagggaccggctggagctgaagaagaggaacataaattatgaagatttcatggacatttatcagttcccaaataatacttttataattttttatgcctatctttactttaatctcttaatcctgttatcttcataagctgaggatgtacgtcacctcaggaccactgtgataattgtgttaactgtacaaattgattgtaaaacatgtgtgttcaaacagtatgaaatcagtgcaccttgaaaaagaacagaataacagcgatttttagggaacaagggaagacaatcataaggtctgacagcctgcacgtgcatgcaaaaagagccatatttttcttcttgcagagagactataaatgaacgtgcaagtagggaagtatcactaaattcttttcctcacaaagactattgatattaatactctgggaaa

SEQ ID NO: 834206 - DNA, 642 bp, Homo sapiens
ttatatagaaaagtcaaatgaacaataattagactttttgttttgttttactgcgggaaatagatcagtcaaggtcagtacccacttgtgatataaggatcttgagaaatgaagcaattaataaacaagcttcctttagtgattggtgatgttgtgactggtgctatgtctacactatcagggtttgtgcaccaagcacagatgcaaccctgtgtcactgattgctatttgaatcatatttggcagagggccgaggaccatgggactccattacattgtttggtgactggtcagcaacatcctgtaaaaatcaaaacccatttggaaagatcccttactgggctgagactgggaagtcagactaaagtggagaagaagaaatcagtgacactttaattctttattcatatcatccccttgttttagtgcctgttgtagacattgctaaaaggggttccatttaggagatttctcattttaaaagaaggtctagaagccattaaaactatctcaaaaataattctgaaatgcttagtttatatttaataagcacaaaacacttarggtatatctgccattggtctaagtgattatgaaatactcattcacttacagcagtgagggaagggtttcacttctttt

SEQ ID NO: 834207 - DNA, 588 bp, Homo sapiens
acaatcctacaagttatatggagccacaaaagacctggaataccaaagctatactgagcaaagagaacaaaactgaaggaatcacattacctgatttcaaattaaactcagagctataggaaacaaaacagtatgatgctggcataaaatcagatacttagaccaatggaacagaatagagaactcagaaaacaatctgtacatctacagcgaacttattttcaacaaatatgctaagaatgtatatttgggaaaagtgtctcttcaataaatggtgctgggaaaactggatayccatatgcataagaatgaaaccaaacttctatctctcaccatatacaaacatcaaatcaaaatagattaaagaattaaatcgaagaccacaacctataaaactgctgcaagaaaacattggaaaaactgtccataactttggattgggcaaagatttcttaagtaataccccacaagcccagacaaacaaagcaaaatggacaaatgagatcacatcaagttaaaaagctgctgcacagcaaaggaaagaattaccaaagttaacagacaagaaacagaatgggaggaaatatt

SEQ ID NO: 834208 - DNA, 645 bp, Homo sapiens
aagaagtgaaagatctctacaatgaaaactataaaacattgctgaaagaaactgaagataacacagaataatggaaagtcattccatgttcatggattggaagaatcagttttgtttaaaatgtttgtactacccaaagcaatctacggattcaactcaatatctatcaaaatgccagtggcatttttcacaaacatagaaagaacaatcctacaagttatatggagccacaaaagacctggaataccaaagctatactgagcaaagagaacaaaactgaaggaatcacattacctgatttcaaattaaactcagagctataggaaacaaaacagtatgatgctggcataaaatcagatacttagaccaatggaacagaatagagaactcagaaaacaatctgtacatctacagcgaacttattttcaacaaatatgctaagaatgtatatttgggaaaagtgtctcttcaataaatggtgctgggaaaactggatatccatatgcataagaatgaaaccaaacttctatctctcaccatatacaaacatcaaatcamaatagattaaagaattaaatcgaagaccacaacctataaaactgctgcaagaaaacattggaaaaactgtccataactttggattgg

SEQ ID NO: 834209 - DNA, 565 bp, Homo sapiens
actttcaactagtagtaaattaacaaaatatagtgagagtagaatagagatcagaaaaaatctaagatatagtaaatggtttctagatctaggcactacgctaagcttttaaaataatcttagccttaaatcttcttgatatagtgagaaaactaaaaacaatgggagtagagcttaaattgtgcctaggctgtgtcagactgcaaaagcctatacccagctacacagcttcacaaactgaactctggtgaatgaatcaactgtggttcatttcataatggaccaaattgttgctaccaatcagtcaatcctaggcacatttaccttcccagttgaacaatcaattatttacacttcctacttcactgtatctttagattatcaatattttcttcaatcttttagttatttaatgtcatatgactaccctcaataatagtatatatgaatgtttgttttggtgatgggaggtcaatcagatkgttccagataaccactgccttcctaccttgcctaaataggtatttcacatattctttcccttaaaaactgacataggtcaggc

SEQ ID NO: 834210 - DNA, 640 bp, Homo sapiens
cagattttgacacaagtaattgcattctcatcaagaataacatcaggtatttaaataatgattatttcttcttttgctgaagaatattaatataaaagtaattaccccctcacacattaaaaacaactttatgtattaaatccagtaaacccaaagcaataaattttaattagtttttctcctttgaatgcatcattcattgaatattatgttttactaatattcagcgaggacatttttatttcttcttgcttctttcatacccaacgccataaaattcatctgcttcattaaaaaaaaaaactggtcctttctctgtattatattattccactcttcacgagtacattatagagatcatttttcttcagtgatacagaaggcataaacagtgcatttcagtttgggttatccccacatcttgggtgatttttgacatttacaccagtaaaatgcacacattttggtatatagttctacagccttcagcaaatggcatagagttgggtatccaycaccacagtgatgatacggaacatttccattattccaaaattccttcatgccacacttttataatcaacctgggagtgttttatgaactcctataccatcccagtcttataggtggtctaatatc

SEQ ID NO: 834211 - DNA, 484 bp, Homo sapiens
atacattctcacatcttgatgctaacagtaactctgcaattgtgttgctctcaccmtaaagaattttcgacagcatttgtgttaacaaaacaaaacattcttccatctctatcctttcccactccttaatggatggatggatggatggatggatggatggatggatggataggcagatagacagatatataggtggatggatagataaatagatagatgatagatagatagatagatagatagatagatagatgttagatagacgataggtagaacccaggtcctctcttgtcctcccatccatatctttgggtaaaagcacctgtttgttgccgaatgagtcctggatgccaaaatgggtgttgttcagaatgtttccacttacctttcccttgggcccaggaagaatcttcagtctaaagaatgaaaagaaaagacccataagaacaggtcttccaaggaaacgaggcagctctgggaacac

SEQ ID NO: 834212 - DNA, 629 bp, Homo sapiens
gtgctcctttggctaatattgtaaattgaaaaattaaaagaagtgcatggaaatgataaacaccaaatgaagggtaatggttacctatagggtggagaaaagaaaagaaatggagatgaaactcaggagctgggggcacaggaattatcctgtgtattattctattttattttattattagtgcttcctttcttaacccggatgacacatataaggatgttaattgtatttgtgtacatttctgtgtaccttaaatatttcataataattattgaaaacaacaaggactatgagatttctgggaaaatcttaaccaaatgatcatattaaatctaaaaaatgacacttctggactgagacaatgtggaaatgcttctatcaataaataaaaacatagaaatgctgggcaaaacagaacaacagctcaaatgctcagaaattttcaaaaaaaaaataaagaaaatttccaggtgctataagtgaaaggggtactcaaagccatggtgcaagccaaagctgatactcttgtggttcatggagatagtgargtggctagaagctctaggaactggccattggagttttattgcccactaggtcaaaagatgttgccttaggcacacacaaaa

SEQ ID NO: 834213 - DNA, 537 bp, Homo sapiens
aaataaatagcattaataaaaatgaaacaatgctaaatgtctgccttaccccaatgtgtcctctgccattagttgcaccatcagaagtgtaaaaacgtcaatgggagaatctatcaataattgtgtaaaaagaaatgctcccactttattagtagtagaagtggaaagaaaacgttgctacgagttcagtattggtagtcagggattctttggcagttatattgtagtcgtaaagggcatggactctgggatcagactgcctaggttcaaattctgactctaccatttattggctaaatgaccttgctatgtcttagttttgttaatcttaaaatgaagataacaatggtatttccacttcataggtttatcaggattaaagaaataatacatgtaaaacaagtggaatatgcctggcactaataactgctcatagatttagctattaayatctccttatgcaagaggctatactcagttcacaactatagattaatggagatataaacaagttcctttcataacaggatttttgct

SEQ ID NO: 834214 - DNA, 582 bp, Homo sapiens
acataattggaagtaaaacactcctcagaaaatgtaaaagaacgaaaatcataacagtctctcagaccacggtgcaatcaaattagaactcaagatttagaaactcactgaacaccgcaaactacatggaaactgaacatcctgctccttcatgactactgggtaaataacaaaatgaaagcagaaatgaagatgttctttgaaaccaatgagaatgaagacacaatgtaccagaatctccaggaaacatataaagcaatgtgtagagggaaatttatagcactaaatgcccacaagagaaagcaagaatgatctaaaattggcaccctaacatcaaaattaaaagaactagagaagcaacagcaaacacattcaaaagctagcagaagacatgaaataactaagaacagagtacaactaaaggagaaagagttatggaaaacccttcaaaaaaatcaatgaatccaggagctggttttttggaaaaataaacaaaatagactgctagccagaataataaagaagaaaagagagaagtatcaaatagacgyaataaaatctcatataggggatatcaccacc

SEQ ID NO: 834215 - DNA, 513 bp, Homo sapiens
tcccaaacatatcatgcacacagttagtgctgtctaaatgctgtctgagtaacagtggaaatccttgacatgccctgggcatatgtcaagccctgggaaggacctgtacaaatacagacctcagtgtatgcatgacaatacacacattgatgtcttccatgcatacacatggtatagctggtatgatacctttaacggaacatctctaattaaacaacaaaaatgctattctgcctgtgcctgcttggcagttgtggattggtggccagagcactttgcttccacatttctgcagtgtgccgttccctgctcttcaactgtcctccttacagcccaggctctgcacctcctgtcgttcagtatctggtcttccttgacctctctggctggatgcaagatccatttgcttggagctgtgagctcascttctctcatgcaaaccttcctatctcttcctagctttggggcattcacccacaatcttggagacccagctccacagatggtcccagt

SEQ ID NO: 834216 - DNA, 604 bp, Homo sapiens
gtatagtttgaagtcagttaacgtgatgcctccagatttgttctttttgcttagtcttgctttggctatgtggacccctttttggttctgtataaattttagaatttttttctagttctttgaagaatgatggtagtattttgatgagaattgcattgattttgcagattgcttttggcagtatggtcatttttacaatatctattcctcccatttatgagcatgggatgtgtttccatttgtttgtgtcatctatgatttctttgagcaatgttttgtagttttccttgtagaggtctttcaactccttggttaggtatattcctaagtatttaattttttctggcagctattgtaaaaggggttgagttcttggtttgattcttagcttggttgctgttggtgtatagcagtgctactgatttgtgtacattgattttatattgtgaaactttactgaattcacttatcagatytaggagctttttggataagtctttaagattttctagatatatgattacatcattgacaaacagcaacagtttgacttcccctttaccaatctggatgccctttatttctttgtcttatctgattgctc

SEQ ID NO: 834217 - DNA, 546 bp, Homo sapiens
ttgtagaagaaactatcaagcatttaataagaccaatmatttaaaacctagtggagctcagaaataaaagtgaaggaactctgagccagggaaagaacgtccacaaaacttaaacctgaactacacatggactttggctagaccctcattcagagcatgttgccttttaatcaaccctcagctgtaaggtgtgagattatctgtggcatggttttagcaagtctgaaatgctacatgagtggggagaatgctaactgaagcagacacactcacagtgaaagcagtgacttggagcctgaatggaaaactggtgtaatacaatacagagcaatcggtgaagttcatcatcaagttccctctactgggagaggattaagtaaactactatcatttaacggcttatgcttcaacattttttttagtactcagaaaaatcctctgtggtcagtatgattaccagcattttacagatcacccagtgttacttggagagttcatgccacttctcaaaaatcatacacagtaaatctttaagttactcttttg

SEQ ID NO: 834218 - DNA, 575 bp, Homo sapiens
acctatagccttgcagtataatttgaagttcgttaatgcgatgcctccaggttttaattttgcttargattgctttggctatttgggctctttttggttccatatgaattttaaaattgttttttttaattctgtgaaaaatgatgttggtattttgataggaattgcattgaacatgtagattgctttgggcaatatagtcatttccatgatattggttcttccaatctatgagcatgggatgtgtttccatttgcttgtgtcatctatgatttctttcaacagtgttttgtagttctccttatagagatcctccacctccttggttaagtgtattcctaggtattttattttatttttgctgccattgtaaaagagatgtcccttttatacctggtttgttgagagtttttatcataaagggatgctggattttgaatactttttctccatctattgagatgatcatatgggttttgtttcttaattctgtttacttgatgtgtcacatttgttgacttgagtatgtcaaacaatgtctgcattcctggaatgaaacacacttgatcatgatg

SEQ ID NO: 834219 - DNA, 489 bp, Homo sapiens
taacctataattatgctgagtatctgactgcctttgatattcctaaacttatattkcactccaagaaacattttcctttcagaagcacacagtcatgatgcattaaaatagttgtgccagccagtcagaccctttaagtggcaaccagctatggggaaagtcatcatggcaacagagaagaaagacatcgatctccatagaagtatagcaatggaactctacggtcaaggactccaaatgcatagactagacttttcttagtattagagatccaggtttaaactaactatctgattatcatagtgaaacataaatttaaatatgcatttaacaataagaagcattcagagatatctatggaaatagagttaatggctgggataaaggaatgataccatttactgtgtacctattctgttctagtcattgtgctatgtacattataaaagttagctcatttatttctcctaccactgaaaacttgtagaa

SEQ ID NO: 834220 - DNA, 597 bp, Homo sapiens
caggcttatctacctgttccctgatggcagacctattgatcttcttcctcaaacatcagcgttgaggaagaatcaagtgggtggccaccaagcatgcagaggtgtgccaaggcatggagctgggaaacctccttggccccaagttctctgcacagggggagggtgaagagagtgggtgctccagatgtctggagatctgtctgagcatgaaatagggaggaacccacttcatcacaatctgcactagaaggatatagtggcttaggctgctaatccacatgcgaaggtgtccaactctctagagatatacctaagtgtggggcagccaggacctcgcttcaccgcagtctctgtacaggaagagtgggcaggcccaggctgctgatttaggtgagcaaatgcttcaaatgcctgaaaatctgcctgggctggagcagagaggggcctcatatactcagatctctgcacagtaagggtggagcaactcaggctgctgktctatgtgagcaggtgctttgaatgcctggagatctgatctgccttggtgcagaacagaggtggtccccctgtaccatgatttatgcccaggaagggtgg

SEQ ID NO: 834221 - DNA, 556 bp, Homo sapiens
cattctgcctttgggatcaggtagtttggggtaaatcctgcattgagtgaatgagccatatctatagctcctctgaacctgactcatcttacagccttcatctcccttggaagattgcataaactgccagtgcsgcaaatgcaacacagcagtctctcttgaataaaggttacaacaaggttacatctaataaacgtatcatacattgttgggtttttcaggatgtaaccccaccataagttgagaagcatactgaatgtttatcactttcacaccatcattgtgttgaaaaattgtaagtcgaatcttatgttgaaccatcctaagttggagatcatgtgtattactcaatgatagggtattcacagagtcgtgcaaccatcaccataacctaatgttagaacattttcttcattgcaaacataaaccttgtatccattagcagtcactccccatcccctaccctgctactatttacccccatcccttaatcttgggtaaccactaatcaactttctgcctctatgaatttgcctattctggaggtttcacataa

SEQ ID NO: 834222 - DNA, 570 bp, Homo sapiens
aaacattaaaaaatggagagagaacaatcatcaatattagggatgaaaaagtggacatcactaatatttccatagaaaatataaagataaaataataaagaataaattaaaattttgaaagaaatggaaaaatgactcaaaaagcacaagttgtcaaaactgacagagaaatagaaaattacaatatttttgtatacattaaagagctgaaagtattattaagaacttttccacaaagaaaatcccagtcactaatggcttcacaaagcttaaaagagaaatatcatcaatcttattcacacatttcataggctaggagtagagtaaacactttccaattctctttatgagactcccataaattgatataaaatctaacatgggaaatataagaaaaaaatattatgtattagcctcatgaatgtaaataaaaatatctcaaagatttgtaaattsaatgtaggagtagataaacaggataatccacaacaatcaggtgggttcatttcaaaaatgcaatattgattttacgttactttacaaaaaatagtcattcacctctattaaaaa

SEQ ID NO: 834223 - DNA, 561 bp, Homo sapiens
cctataactcatgtatctaattacagattttatttatttytattttatggaaataatttttctgcaggtgctacatctcagcaagtctcaaggtcttatttttctctaaaaattaatatctctcataatggaaaaataaatgagaataaaattaatgaattttacaaaaattatttccatttaaggcataaatatggcaacaaatctaaatctgggaaatccataatttcacaagaaaagataaacttcaatataatttttaacaatagaaggaaaaatgtattatcagtgaaatacaatcaatctatgtggttttaaagtatacccaaacattatgtttctttttttttttttttttttgaggctttgtcttgctctgtcgccaggctggacagcagtggcgcgatctcggcgcttactgcaacttctgcctgctgggttcaagcgattctcctgcctcaacctcccaagtagctgggactacaggcgcccgccaccatgccaggctaatttttgtctttttagtagctgcggggttgcaccatgttggtcaggatggtc

SEQ ID NO: 834224 - DNA, 595 bp, Homo sapiens
tttggcaagaaccaatggctgagtttttgcaaatcgtccatttaaaggaatagtttttttcccttgataaaccccagagtcgcagctgtgcgcatccacaggcaagtagtttacacgtgcaaaattcattcytgagtcaggcgagccacaggctcagctgcggcgcggtgcggcgcttgcctggggctagagagtccacgacttgttgcctctgcgacccgaaagcggctctccaaaccctggccactcagaatttgagggcctctgggtctatgatgacagggctctaggagaaagcgcctctctgtagaacacccacaaaaacagagcaaagtcgcaggaggaagtcatcctaggagggagcttggagtattatttcatttcttaaaaacaacagaaaaactccccacagtgcattttcactgcgttccaaaaccaaagagaaaacagaagaaaatataacttaccccgacctgccacaatactacattttgagcgtccttttaacactttgagtcttcctttagtgttgcagccttttctttcctcttgtcagaaaccaactttcaaactatctgcgaaaaaataataaatt

SEQ ID NO: 834225 - DNA, 632 bp, Homo sapiens
aatagtgatgttaaagagcaaaatctagaaatttgagcaawtcatgaaatattgcaaaattctggcttatattttctgttttcttttttatctctataaacttgtaaaaactagctaatatttacaaggtctgaaatggttttggagcgtttatatgtaagggatagtttcaaggaaaacaactttaaaattgaaaacaatcttgggagttgatttgtttagcctctcatttcacaggagagggaagagcaacatagggctgtaagtgatttcagcttaacactggatttgtgaatgaactggaaccagaatatgggtttcctgattcctgatgaagcaagaatccccctgatgaaattccagaattttaccctccgtgaatctcccctccgtgaattctttctttaccttctgctctctgactgaactctcttattctactttgttctaacagagacagtatgacgtcatggtgaagagcacagacttgctcagatgggactgggttcaagcccaggcttaatcacttcctaatcaagggccttaggccttgagtaatcaattcattccagtctgcctgagattttcccggctttaaaacttaaggtcctgaatcctgggagctgcacagt

SEQ ID NO: 834226 - DNA, 527 bp, Homo sapiens
gatataggttgcacactctttatgagaatctaatgcctgatgatctgtcactgtctcttatcacccccagatgtgactgtctagttgcakgaaacaagctcagggctcccactgattctacattatggtgagttgtctaattatttcattatatattacaatgtaataataatagaaatgaagtgcacaataaatgtaacgtccttgaagcatcccaaaaccatcccctccatggaagcattccaaaccggggtccatggaaaaattgtcttccatgaaactggcccctggtgccaaaaagggtggggaccactgttccagtctctcttctgttcccttcatcagaagagagagaaattgatgatcctgttgctatagcttccccaacagccagcaattaattttagtttaatgcttcaaacattcttcaggcccagtgtgcttttagctctgtatgttaatgatgagtacttagcaccaaaaataaaatctaaatcccctatctgacctcctcttgacccagggga

SEQ ID NO: 834227 - DNA, 527 bp, Homo sapiens
gatataggttgcacactctttatgagaatctaatgcctgatgatctgtcactgtctcttatcacccccagatgtgactgtctagttgcaggaaacaagctcagggctcccactgattctacattatggwgagttgtctaattatttcattatatattacaatgtaataataatagaaatgaagtgcacaataaatgtaacgtccttgaagcatcccaaaaccatcccctccatggaagcattccaaaccggggtccatggaaaaattgtcttccatgaaactggcccctggtgccaaaaagggtggggaccactgttccagtctctcttctgttcccttcatcagaagagagagaaattgatgatcctgttgctatagcttccccaacagccagcaattaattttagtttaatgcttcaaacattcttcaggcccagtgtgcttttagctctgtatgttaatgatgagtacttagcaccaaaaataaaatctaaatcccctatctgacctcctcttgacccagggga

SEQ ID NO: 834228 - DNA, 586 bp, Homo sapiens
atcctgaattttgccatccttgaaccttgtatgtccaacagatactttattttccttttgattgaaaatattttaagggaatgggggaagkatctctattgtgcaactgaaaaggctttgactaaagcaagagggaaccagattgcttatagtctttgagtaatgatcatttgtaattgcattgataatgactattctctgagctcctgctaggcacttctcacatatggctccttctcttgcaataacttacaagagatacaatgatcaccattatgtagttgtaattatgaagggtctgttacattgagtgatcggaccaaggtcaaattgcttgtaggaagttaagcagaggtcaggcacagtggttcacacctgtaatcccagcactctgggaggccgaggtgggtggactacctgaggtcaggagttcaagaccagcctggccatcatagtgaaaccccgtctctactaagaattcaaaaattagccaggcgtggagttgtgtgcctgtaatcctagctacttaggaggctgaggcagaagaatcgcttgaactcaggaagtggatgttgcagtgagccaa

SEQ ID NO: 834229 - DNA, 586 bp, Homo sapiens
atcctgaattttgccatccttgaaccttgtatgtccaacagatactttattttccttttgattgaaaatattttaagggaatgggggaaggatctctattgtgcaactgaaaaggctttgactaaagcaagagggaaccagattgcttatagtctttgagtaatgatcatttgtaattgcattgataatgactattctctgagctcctgctaggcacttctcacatatggctccttctcttgcaataacttacaagagatacaatgatcaccattatgtagttgtaattatgaagggtctgttacattgagtgatcggaccaaggtcaaattgcttgtaggaagttaagcagaggtcaggcacagtggttcacacctgtaatcccagcactctgggaggccgaggtgggtggactacctgaggtcaggagttcaagaccagcctggccatcatagtgaaaccccgtctctactaagaattcaaaaattagccaggcgtggwgttgtgtgcctgtaatcctagctacttaggaggctgaggcagaagaatcgcttgaactcaggaagtggatgttgcagtgagccaa

SEQ ID NO: 834230 - DNA, 636 bp, Homo sapiens
actgcactccggggctcctacaacccattcaaatatgaacagtaagtcrctcaccaagggctggatcagccactgttcccagctcccacccaaacattcctctacaagtatttcctctcagagaaaaaatcaaaaacacctgtaactggatgaggggaaatgagtgtagatttcagactaaaccaattcagaccctatcatcttcccagactctccaatctggcaaagccctttgagagtatttctgtgaaacccacttttcttaatatttattgtacccagatctcccctttggaataccatcagacctgcagtttctttccttggggaaaggcaggacgcacgcacccagcaatcagacacatcctcagggatgcctggatctcctgaaacctagtgggtcctgaatggagctacctccagatgagaagtacaggccaaggctctgggaaggaaggggcccggccactcacacatctaagtcagcgggaggcttagacatgaagccaggaagcctggtgcctatctcatcagagagagaaagatcagttaattcaccaacaacacaaccattgatatttaatgtggtgtccaggttcagggccaattgtatatatattttttgagacagggtct

SEQ ID NO: 834231 - DNA, 667 bp, Homo sapiens
gatctttgcagacataattaaggtaaggacctcaagatgagatcatcctggattaggcaagccctaaatccaatgacaagtgtctttataagagacaggaaaggagaagacagagacacagggtggagaaggctgtgtgaaggtggaggcggagactggtgtgatgtaaccaggagccaaggagtgttaggagccccaaagctggaagaggcaaggaagcttctcccttagagcctgcagagagagcctggccttgctggcatctggattccagacttcagaaccgtgagagaatacattgctcttgttttaagccaccaagtttgtggccatttgttccagaaatcacaggaaacgaatgcagctggtgaaggagaaggctcctcgaggctcgggtgtgggtctagggaaagatggcagtgccactggagagtgctctgagactctcaccactggcccatgcagcagtttacctgcctccgggatgtgctcaggcccagactgatgatggtctaatgctgcacctgctgagtccgtaacccagtggaccggatgatacccaggccaagatgggctgccygggttgcagtcggttggtgccttgggtcaggcattctgcctctaccagtgtaactgaaaagctgattacttggtagctgcatgtgga

SEQ ID NO: 834232 - DNA, 482 bp, Homo sapiens
gatttcatttgtagacattttggtcccttaatgtcagcaagsgttgcacaatgaattttgacatgcatgcattcagagatgtatagaaattttagttacttacgtatatttttaaaagcctggtaccagatgcctgcttttctccctgttttcttttttttttttttgagatggagacttgctctgttgccaggctggagtgcagtggcacgatcttggctcactgaaacctctgcctcccaggttcaagtgattctcctgcctcagcctcccgagtagctgggactacaggtgcgcaccaccacgaccggctaatttttgtatttttagtagagacagggtttcaccatgttggccaggatggtcttgatctcttgaccacgtgatctgcccgactcagcctcccaaagtgctgggattacaggtgtgagccacctggcctggcccagatacctgctttatataagagggaagtataatta

SEQ ID NO: 834233 - DNA, 598 bp, Homo sapiens
ctttttagttttaaccattttagtgggtttgtgactttaatttctatttgcctaagactcctgatattgagaaactgttacgtgctaatttgctattcatacaagaggacttcaaaaagttcatggaagattttaattaaaagataaaaataaaaacataaactctatctctcaacataagctccatcaaagtcaagacagttttgaagtgataatatcaaccatctagtccatcctttaagagtcctgggaatttaatcatgtcaatgcggtcttttttacattactaactgaagacaaaattaatgccctgatttttttaacatgaagaaacaaaaagaagtaaaaaggagccaaatcagcactcttgcaaaattacctgtttgatgaaaggaatgagtgggagcattgtcatagtgaggaaggactctctgataaagctttcctggctgtttttctgctaaggctttggctaactttctcaaacgctctcataataagcagatgttatcrttctttggccctccagaaagttaacaagcaaaatgcctgagtattccctcccggccaaatgctgaccttctcttaaccagtccac

SEQ ID NO: 834234 - DNA, 667 bp, Homo sapiens
cattttccttcagttcaggtttgattttggttatttcttgtcttctgctagttttggggctgattttttcttgcttctctaatttttttcagttgtgatgttaggttgttaacttgagatctttctgactgttttacatgggcatttagtgcaatgaatttccctttgaacactgccttacttgtctcagagattctggaatatgatatctttgttctctttagtttcaaaagcttattgatttctgcctaagtttcattatttacccaaaagtagttcagaagcatgttgtttaatttccatgtaattcatggttttgaattattttcttagtcttgacttctgtttttattgcactgtggtctgagagtgtgtttggtatgatttggatttttttgcatttgctaaggattgttctgtgtccaattacatggtcgattttagggtatgtgccatgtagcaaagagaagaatgtatactctgttgttttggtgtggagagttctgtagaagtgtatcagatccatttggtccaatgtttagttcaggtcctgaatatctctgttaattttctgcctcaaagttatgtctmatattgtcagtggagtgttgaaatctcccactactattgtatgggagtctgtgtcttgtcgtaggtctctaagaac

SEQ ID NO: 834235 - DNA, 632 bp, Homo sapiens
gtgttcatagattgagagacttgatgctgtaaaaatgagcacacctagtgtccagatcttggtttctagtacagttcttcaataaaggaaaccagagattcttggagaaatgastgattctaagattggagtaaaaatgcacaagatgacctgggagcatcttgcagtgccagataataaggagatgctaaaaaccaaaactaaaaccagaacccaaacaaaacacatttatggggtatgtcaaaggaacggggccaactgaaggaactcccagtggctaaagatagaacaattgttgcaacaaagaaggattcaaccttaacccaaagtataaattaaatatccacaagtccttattgatatagtgattaaataaatcaattggaaattaaagacaaatttcccatgtggaggaattcaaataatttacgtagctactccaccctcaaggaggaggaacataactcctcactccataaatgtgggatgtacatagcatttccttccaaagagtgcactatgaaaaaaagggtgaagaaaaacaattaactttacaatggagaaatctgacaacactgctgagccaggtgatcaaagtcaatgtaaatagagataaatcatgttgatattat

SEQ ID NO: 834236 - DNA, 456 bp, Homo sapiens
ttccctcatggagttaagggagaagggaagaaaagaccatcaaaagtcaaaccataaagaagaagttcaagacaaagaatttggaaactttttctaattaatgtaggcaaaaaatctaaagaatatgcctagaaactggattctaaatatgcttaagcaatgagagaggggaaagttttatgcagaattggaactgataagtttttcaaactttcctgcccctcttgatccacagttacacttcattctgctgatgcttatgacattatgagaaatttcctgtgtccattggactttatagggtaaatttaaaggctccttttaaaatggatgtgcaagactttcygggaaaaaaatcctaattaagcacttttgtgccattacatcattgcacaggatgcccatgaatgaacttggaatggacatatgtatccaatgggaaaaatcagttatata

SEQ ID NO: 834237 - DNA, 591 bp, Homo sapiens
tttattgttattgagtgggtaatatatccaaggaaccaaccaatttacatatttaaagaatttccatgaggtagtttattgctgttagctttattttacaaggmaaaataactctttcttactatgatgactgacaaagtagtagtattttattgtatttgtatagatatacttactgtatgatgataatcctaatgtcaaatcataccttcaaataactaatcaaagtttactatgttaatatatgttagttttattatgaaaattgcaaacatatacaacactagtttgagtagtaatttcacatgtctgagcttcaggaattttcaactcagaggtaatctggtttaatttatgtgactcaccaaagtatttactttttattactttactgagataaaattgatggaaattactaaacagccaaaacaaaaaaacaaaaacagaaacaatcaaagatcaaaatagccttaaaaaaagggaaatggaaagttattgttgaaacaatgttatatctaaaacatccagctttcatcaaaatgtatgaggcctgcaaaaaatattagaaagtgtgacttacaaaagtcacag

SEQ ID NO: 834238 - DNA, 601 bp, Homo sapiens
  misc_feature 5: n = A,T,C or G
taatnatggagtggatttaatatatgctctatataaaataggattaaaactttttgtgtgtgctcctgcctctgatcctggttgaatccccttttccttaatctaactacattaaagtagttaggttgtaagtagtctggctcctgattaaaaatccatgactgattttacaagcccaaccacaggcaatttacaaaggcgttacctggcaggactcacaggggaaagctgtcttccccacaccagacatgttgcacagccagtgcactgcattctttggaaggagttatagtcaaggactcagacaatctgacaggtcatgattttcccatagctgtattcctagcctattagttttcatttccagctctctttatttgagatttggcagaggtcttcttcaggcttctgtactgaagccttcttacagggtaggagggtgtaggtagaagggaaaacctaaaagatstttctcccgactctgacattttcacttctagcactccactacccagtacttttccactccatgaccactcataatccaccaaggtccacgcaactgcctgagcctttttttttttttttttttaatttcagg

SEQ ID NO: 834239 - DNA, 633 bp, Homo sapiens
gcaattgtcctgcctcagccttccgagtagctgggattacaggtgtgtgccaccatgccaggctaatttttatatttttagtagagacagggtttcaccatgttgatcaggctagcctcgaactcctgacctcgtgatccgcccaccttggcctcccgaagtgctgggattacaggcgtgagccaccgcacccggcctcttcaatttatttttatgagaccttgcatgctgattgtagaactttttagaaaatatagataagcaaaagtagaaaataaaaattattcctcatcccattactcagcaccaaccagtattaatattttggagtatctccttcttctcattctctccctgtgagatgtagtcctctattataaacatacaggttatagaaaatgtacaaaatacattaaacatctttttttaaactccttttcttaattgaaatttatgagaaaaacattgttatgttgttactatttcaactgctatgtttattcccttgcctggatgtgccagaatttattcaacagtccctatgtttgaaaatttatgttttctattaaaactaacactgctgtaatgtyaccctcttacagaggctttccctaatgttcctaactaaaatgg

SEQ ID NO: 834240 - DNA, 306 bp, Homo sapiens
tatttccattcttgtcaatgtaatattggtaaatgtaagtttcaccctgaaccagggagttaatagttaatacctatgttgtaatttgtagaggtaatcatagtagcaaagagtatgaaaatgcttatctttgaaatttaatgtttagtaagaaatgaactattttttagtycaaaagttatatttggactacaattctttttttaacttggaaagtgtgtgatacatacaggactatactttttaaaagttggccaggcgtggtggctcgcacctataatcccagcactttgggaggccaaggtg

SEQ ID NO: 834241 - DNA, 630 bp, Homo sapiens
cttttcctagcactattattttacataatttaatttaaaatgtaaaagtttctctatttattaatccagaggatactttagcccatctcgactcagccgtattactaacacttacctctgacacaacttcatccagctgccgcttcagtgttccattttctttcttcagttgctcgttttctgagagggcagcctttaatctcgcctctaaccctagcatatattctttcttcttcttgcgagactgacaagcggattctcgattttttatcatacgttgctgtctccttagcacagcaatctagaaaaagttataatgaatcagaataccctggttttaaaatcagatcaaaatagatcagaatatactcatttttacaattattttaaccaacaattttttcaaagcataggttactagttgtttcaaaagaggtttgaaaacacactgctcaaactaaataagttaaaatcaaatgattaaataaggccttctaaaacccaaatgttaaataatttcttcttatgttttytaaggctcgtttattaatcttccaattttccccttagaaactccctcagaaagtatctttaaatatatatgcatatatacatacatcttaaatctgt

SEQ ID NO: 834242 - DNA, 591 bp, Homo sapiens
atagactgaatggacccccctcacaaccaaraagatttcaaagaaacctgaaaaaccagtttagtccacgaagggaagtgggggattggacatgcctaattataccctcccccttttggagtttagcacaactgaccagcataacattaaaatagagatcctaagactgacagaactgactatgtagcaataagataccaactccaacctgactctgaaaatcaaagtattttaccccaaactatatttctttgacatattttgaaatggccctgcaacgttgtctcttgtgggggaaatttacattccgtagagaatcctcttccctctccaggtcttttcctgatccagaagagatgtaactaagagtctgacatcttttaaggtcagataagagatattcactatctattctctctgaagtctggaggtttcacctacatgagaataaccttggcttccagaaccgctcccttcccttaactcaagctgacttcaattcttcaggcatagcttatctctttcaacgaattgccagtcagaaaatctttgaatccacctattacctagaagtcgccccctcaacccgac

SEQ ID NO: 834243 - DNA, 487 bp, Homo sapiens
cagtctccagccagcccagccaatgatgacatttacttttctccaaactgtccctcctcctttgttccccatcttggtgaatgaaatcatcatccactcaatcactcaaactagaaataaagttatctcttattcctccctctttcctctctcatatccatttggtctctaagcctcctcccttctgcctttttaatcgctcttaaacacattcccttcctctgtgtttcctctaccagcacccttcattccttgactcaattattgccttaattcttaaccagactctgcctctagaattgtcctcccagcctattccacacactgtagtcagggttgttttctaaaatacaaatcaagtggyattattctgctgcttaaacttctttagcatttgcacgatctttaggaaaaatttaaaacttcttagcaaggcatacgttgcccttatgatctggtcatgcctatctttccagtgtcctgaaag

SEQ ID NO: 834244 - DNA, 524 bp, Homo sapiens
ggccaaggggatcctagaaaaccttaaaactgagttctagaccacgatgggacaggttagacacaccttgttatactccctcccttttgtagtttaacacaacaactggccagcattaatgttaaaacagagatgataagactgacagaacagactctggcaataagatgccaaattataaaaaagacctaaagccattccaggcaaggttttagtcccacacccctatacttaaagaataaactgtgttctaactgccacaagattcttctctagcagctaaacaagtactggcctaaagataaacaatattaaaataatgtgcagctccacgagatgctgacttactgacccccagtccccgttccaccagccatagctacagctttcattggacaactttttgttgatttcagtaactttctccagrtaagaagaccactggccatggactggttctggctggtctacagaggtcgcacatttgcatggcttcatgtcctgaaagaccttttgacgtatag

SEQ ID NO: 834245 - DNA, 407 bp, Homo sapiens
acaaaggaagagattgaataccgtgatattactctcaaaagtggctgcagaagcttatacacccaccagcaattcacgtggctcccattccctcttgtcatcaatattcagtgtttcttacctttgtrattttatcaaacaaatttttcttttcctaaataagaacatttaaaattattcttattttattttctgtaacccaggatagggctgataataatatattttttaaaattgctattgctattcttttttttttttttttagacggagtttcactcttcttgcccaggctggagtgcaatggtgcaatctcagctcaccacaacctctgcctcctggattcaagcaattctcctgcctcagcctcccgagtagctgggattacaggcatgcgccaccatgcc

SEQ ID NO: 834246 - DNA, 548 bp, Homo sapiens
aattggaaaaatatttgaacggataactaactggaaaaatccccatatgcatggcaaataacaagatgcawggtattgtcattaaataaatgcaaattaaaaccacaatgagatgtcaacccacacaaattaaaatgtacaaaatttgtaaaattggccataccaaatgttgattgcgatctgcaaaaatagaaaatctcacgcattgctagtgggaatgtaaaatgggacaaccactttgaaaatttttgtgtgagtttcttaaaaatcaaatatacatcttcagtatgatctagcctttccacccctagatactaatccaataaaaataaaagtatatgccaataaagacttttacaaaaatgccatgacagttttatttgtaatagctccaaactttaaacatccaatatgtccatcaagagataaataaagaaattgtggtatgtgcgtaaaatagaagttatggcttggatgtgtgcccttcaaaattctggtatttaaacataatggccaatatgataatattaagaggtagggcctataaa

SEQ ID NO: 834247 - DNA, 548 bp, Homo sapiens
aattggaaaaatatttgaacggataactaactggaaaaatccccatatgcatggcaaataacaagatgcaaggtattgtcattaaataaatgcaaattaaaaccacaatgagatgtcaacccacacaaattaraatgtacaaaatttgtaaaattggccataccaaatgttgattgcgatctgcaaaaatagaaaatctcacgcattgctagtgggaatgtaaaatgggacaaccactttgaaaatttttgtgtgagtttcttaaaaatcaaatatacatcttcagtatgatctagcctttccacccctagatactaatccaataaaaataaaagtatatgccaataaagacttttacaaaaatgccatgacagttttatttgtaatagctccaaactttaaacatccaatatgtccatcaagagataaataaagaaattgtggtatgtgcgtaaaatagaagttatggcttggatgtgtgcccttcaaaattctggtatttaaacataatggccaatatgataatattaagaggtagggcctataaa

SEQ ID NO: 834248 - DNA, 478 bp, Homo sapiens
atccccaccggccagcgcagcaggctggagactgcctaaaaagatcaagttcctgagggggaggggtggccaccatgactgtggctacagtaggcyattttcccctgccactagtgccagcaagactgggcagttacaactgggagtaatttcccacagcacagcatagcagctgggtcagtttgtggccagatagcatttttaagtgggaccctggtgcacccctccttaccagatggggcttccctgcggaaatttcagtatccccagccaggggtttgtggacagaactctgatcttcctgagaagagcccctaggaagaggggcagctgcagtattgtagatcagcggtcttagtcttttctgcctgatggttctgaagagtcagagcagcctggacgagggagattcccctcctccgcccagcccacccactttgccaaggggcagccaactgtttatttaagtgggtccctg

SEQ ID NO: 834249 - DNA, 586 bp, Homo sapiens
ccattgcttgtttgtgtcaggtttttcaaaaaccagatggttgtagatgtgtggtgttttttctgaggcctctcttctgttccattggtctatatatctgttttggtaccagtaccatcctgttttagttactgtagccttgtagtatagtttgaagtcaggtagcaagatgactccagcttttatgcagctaagaaacatatgaaaaaaaactcaccatcactgattattagagaaatgcaaatcaaaaccacaatgagataccatctctcaccagtcagaatggtgatcattaaaaagtcaggaaacaatagatgctggggaggctgtggagaaataggtgttcttttacactattggtgggagttttaattagttcaaccattgtagaagactgtatggctattcctcaagtatctagaaccagaaatagcatttgacccagcaatctcattactgggtatataaccaaaggattataaattattctactgtaaagacacatgcacatgtrtgtttactgcagcactatttgcaatagcgaagagttggaactaacccaaatgcttatcaatgttagactgca

SEQ ID NO: 834250 - DNA, 590 bp, Homo sapiens
ataaattgctttgggcagtatggccattttcacaatattgattcttcctatcgatgagcataaaatgtttttctatttgtttgtgttttctcttatttcctkgtgcagttgtttgtagttctccttgaagaggtccttcacatcctttataagttgtattcctaggtattttattgtatttgtagcaattgtgaatgaaagttcactcatgatttgactctctgtttgtctgttattggtgtataggaatgcctgtgagttttgcacattgattttgtatcctgagacgttgctgaagttgcttagcagcttaaggagtttggggaccgagacgatggggttttctaaacatgcagtcatatcatttgcaaacagagacaatttgacttcctctcttcctatttgaatattctttatttctttttcttgcctgattgccctggccagaacttccaacactatgttgaataggagtggtgagagagggcatccttgtcttgcgtcactttttaaaaggaatgcttctagcttttgcccattcagtattatatttgctgtgggttcatcataaatagctcttattattttga

SEQ ID NO: 834251 - DNA, 595 bp, Homo sapiens
taggctgaatatggtttactataatttattgaatgttttcaaaatgctagaggagaggattttcaatgttcacaacacaaaggacaatgtttgaggtgattaatgtatttactccaatttgattattatacattmtatgttcatatggaattatcactctgtatcccataaatatgtacaattatcacatcaactaaaaaataaaaggaaaaaataaataccttacaaaagcatatgaaaaggtgctcaatatcagttgtcattaggggaaacaataacgagataccacaacatccctattaaaatgaccaaaacccaaagaactgataatagcaattactgacaaggatacagagcaataggaactctcattcatagctggtgggaattgaaaatagcacagccactttggaagacagtttagcagtttcctacaaagctaaacatagtcttgccatatgagccagtaatcatgctcctacacatttacctaactgatgtgaaaacttacgcccacataaaaacctgcacaggaatgattatagcaactttattcataatcaccaaaaactggaagcaaccaagattccttcaa

SEQ ID NO: 834252 - DNA, 575 bp, Homo sapiens
atcacatgaaagaatttttagggtaaagggaaacattttaattttttttctgggagtgatatctgtaagatggctggctagtgatgcctagcgttcatcccctgcacacaaaaggaccaacacaatgaataaacagcaaagatctgaccgaaatgttgaagagagtggagagctggagcgcagtgggcgagtgaagatatacctgtggtgaggggaaatccaggagggcggcatggaggcaccctgcctctgtagcctcacattctgcatctgaatcagatctgtccggagtcaggcaggactttccattataaggaaaagtgaagcagaagatctccaccagcccctgttgctgctgcaaacatttataatccttactacaggagaatcccacagtcctcacaagccctagaccaggtttggagagctgccgggaactcaggcrgctgcatcacccaagattaggagcacaaggtatacacttcccacccctcacccaccaccgtctgtgagacaagctgctgcagcacagtgccatcttgagactgcagccaacttttagagtacatcctcct

SEQ ID NO: 834253 - DNA, 554 bp, Homo sapiens
accaagcagaactaacagacatctacagaactctccacccctaatcaacagaatatacattcttctcagcatcacaccacagctattccaaaattgaccacatagttggaagtaaagcactcctcagcaaatgtaaaagaatagaaattataacaaactgtctctcagaccacagtgcaatcaaactagaactcaggattaagaaactcacttgaaaccactcaactacatggaaactgaacaacctgctcctgaatgactactgggtacataacgaaatgaaggcagaaataaagatgttctttgaaaccaacgagaacaaagacacaacataccagaatctctgggacacatttaaagcagtgtgtaaagaactagagaagcaagagcaaacatattcaaaagctagcagaaggcaagaaataactaagatcagagcagaaytgaaggagatagagacacaaaaaacccttcaacacatcagtgaattcaggagctggttttttgaaaagatcagcaaaattgatagactgctagcaagactaataaagaag

SEQ ID NO: 834254 - DNA, 374 bp, Homo sapiens
ctgccagatctccagttgccaaacgctttgcccatgrctggaacagttctctaatcactactgacaactttatgaaagctgaggtcttctgcaagatttgcagttttactttttcatccatttacattttatttgtcttagtgttgtcaaatgtttcccacaccctgaaattatctgagagccaaagatgtaaaagatattgacccaatgggcagggttaaaactctagtgtgaagcagggagagatgttcgagtagggactgattttataagtggtcacttgttagaatgacttttccttccatgtgcaagtggggactcggataatgaatacttagagaataaaggatccttaagccaacgaaacagtcagc

SEQ ID NO: 834255 - DNA, 633 bp, Homo sapiens
tcactttctccaaagcatatcacacccacggctaggacctgagcccatctttgctaggcctctcccagtggttctcaactctcagstgcatattagaattatctgcaatttgaaaaaacaccagcatgcaggcccctccccagaccaactgaaacagactccctagggatgttattcaggtgattctaatgtgcacccagcagtgagtctaccgactcaatggccaaatccaattgaggaagctagcaggtcctccacctacttttcaatcctgaaacatggctaaaacacaaaatagctcatggcctttcctatgccccatcccctgtaccagagatatcattatggtgttagctttcagattcaagccttggcaccaccgcctacagccatgactgggagaatccccttcctccaggtctaactcttcttctcagtaacctgagcatccttttgtcacacaaaagtaagagactctggatgagattagttagcactaattagttagtggtctctgaggactggttgaccgcatgaattcctcacctacaaaatggagagcctgccactacctatacatttcctaagtcaggtgcttctaaagtgactactgtaaagctttttgggcttttt

SEQ ID NO: 834256 - DNA, 611 bp, Homo sapiens
gcctaaggagacacacagaggattggtgttcttgggtaattgtatggcagagagggttttttttttwaattttcattttaggggtacatgtgcaggtttgttatgtaggtaaactcatgtcacaggagttcgttgtacagattattttgtcactcagatacaaagcctagcactcaatagttgatttttctgctcctctcccttctcccacccttcagtggaccccagtgtctgctgttcccctctttatgtccatgtgttctcctcatttggctcccacttataagagaacatacagtacttggttttctgttagaagaggacctctaggttagaaataaatggaaagtaaatactggggagggtagatgagtactgattgagctggataccaatatctacaatttctttttattttaggagtaaggggtgagagagggatcccctaaagagatgaaatttgcctgtgttaacatctcttttgcatcatttgactaaaacaatcacatctccccacaaatgacacccccttccctgtgcacatatgtaaccacagtgcactgcagctggtagccaggctggggaggccccttaaggccacctttggagct

SEQ ID NO: 834257 - DNA, 614 bp, Homo sapiens
ctctatgggctttagaatatagttggggaaaaggctactggatacctggtattgctgcagaaaacttctttcagttgagcatcacagcaccaaatagcagctaatcaaataataaactctacttttctatagttcattattttgaactataggagtagttggtttttgtactcgctgcctacataagttatgctcccatgattattttccttgtattgaaaaacaaattaatgtccttaaagtctgcatagaggtctgcctaaatttcacttaagggcacatttctatgaacttgcagggctcatcaaaagggaaagaaatttagaataagggaatgccatttacacatttgttcattggatttctctgctctcatttgggacttagcttaatgcatgtgatgagatgatacagaggactaaaaaagaaccaaaaacccaaacaataaaccccactcaaaatcagctccattaatatgaagaaatatgcaagtactggacatcagacaaggtgaaaaggctgccaaagatctggcaagttatattagggatttctgctgttagcactgagcccagtggtatgagatgracattggaaataaaataaaaaactag

SEQ ID NO: 834258 - DNA, 603 bp, Homo sapiens
agttcctgctagagatacacaataaagttgttgactggctggtggggaaggagtgtgagattagatttttagtctgctacttgattatgcattgagggaggtatttttggacactgcaagtgagataaattgtttgttctctgactttttagctaagaatgaaaccttggcattacctgccgaatctaaaacaccagaggttgaaaaaatctcagcacgacccacaacaggtaatgagatcgctatgttgttgaccttgagaaaagaaaaaatgctttttttcaaatactaatctgcagtctttttttcagtaaagagccagtaggaaatacattttgatcataaatgcaaaacagtaggagattctaggtctctaacgtttgggaaaacaatagctgcaaaatggagtattgaatcacataactgatatgtaatacagaagctgtattttttactctaaatgaaaattattagttcaacactgaaatatttttatattaaaaacatcataccwcaagtttggtgctgttctttcatatgatgacattagaccatttttcatttctacacttttacaagtggtcagtgtagcaaaatgccata

SEQ ID NO: 834259 - DNA, 386 bp, Homo sapiens
tgtgccaacggctaaagtcagtagaaaggagctcaactccaaccgcaaccgggcagacgagacctcagaaaaagaatagcaagcagcaattgaacacatttgtgaagtacaaaatgaaacagacttcatgaacaagccagtgaggagaatttgaaagtagaacagaaatagaacaaactctgccaatcattttttcagaagaggtcagaattgatcattgatggcccaaatcccacatttttgggtaacatcatttgtcaaccacccacgagtgtctgcactgcttgtggaggaggatgaagaggcactgcattatwtgaccagagttgaagtgacataatttgaagatactaaattaggttacagaatagatttttattttgatg

SEQ ID NO: 834260 - DNA, 633 bp, Homo sapiens
ggaacaagggcctagcgcagtttaaaggtggagatggcacgtcccagtgcgcagagagcagaagtagagagaacttctcaggagagatccccttaaattagcattaaattactcatttagggcctggcgcrgttgctcacgcctgtaatcccagcactttaggaggccgaggagggcagatcccgaggtcaagagatcaagaccatcctgcccaacatggtgaaacccaacctctactaaaaatacaaaaattagctgggcgtggtggcgcacgcctgttgtcccagctattcaggaggctgaggcaggaaaatcgctagaacctgggaggtggaggttgcagtgagccgagatagcaccactgcactacagcctggtgacaaggcaagactccatctcaagaaaagaaaaaaatactaatttagttgcaagagtggaggcgaggaagatgagaattatgaaaaggggcacctacatacttaaaacacaatttcactgacatttatttactgtttatacttggatagaatataaagaaaacaagattctaccccgctctagcaaggagaaagctaacattatgcatgcactaagctcacatgcatatactatttcatttaatcctcacaacaa

SEQ ID NO: 834261 - DNA, 562 bp, Homo sapiens
ttgtcctgtttccccatttcatctgtctcttacattttcctctgcatttctgattagatcgaggaccaagaattgtgactgatgcttctttgtcccctgttcaggtgtttcttaagtggcagatgaatagttcctccctgtactctcctgtaaacatactttttgcttttacatctcttcagttttgcttttacttttttttttttcgtaagggatacattctttcagtagctttatttaaatgtagtgtgtggaccgtttgttgtgaccttctttgaaattttctctgatcatggcagcccaaaatatcggtacctgcctctgaaccatcttcgttgtctctggctgtgttacttatacaacacctgctattattatttgtatttttgttttatatgtttcatccctccttagattataaactctgaagttagaggtcatcttatagacaattttgaatcttctgtgttaaaaaatataattttggccaggygtggtggctcatgcctataatccctgcactttgggcagcctaggtgggtggatcacttgagtccaggag

SEQ ID NO: 834262 - DNA, 602 bp, Homo sapiens
aacacaccaatcagcaccctgtgtctagcttagagtttgtgagtgcaccaatcgacactctgtatctagctgctctggtggggccttggagaacctttgtgtccatactccatatctaactaatctgatggggacaaggagaacctttgtatctagctcagggattgtaaacgcaccaatcagtgccctgtcaaaacaggccactcggctctacgaatcagcaggatgtgggtggggccagataagagaataaaagcaggctgcccgagccagctgcggcaacccactcaggtcccctttcacgctgtgggagctttgttctttcactctttgcaataaatcttgctgctgctcactctctgggtccacactgcttttatgagctgtaacactcaccgcaaaagtctgcagcttcactcctgaagccagcgagagcatgagcccaccgggagaaacaacaactccagacgcsccgccttaggagctgtaacactcaccgcgaaggtctgcagcttcactcctgagccagtgagaccatgaacccaccagaaagaagaaactccgaacacatcagaacatcagaaggaacaaactccagaggc

SEQ ID NO: 834263 - DNA, 588 bp, Homo sapiens
tctgcagcttcactcctgagccagtgagaccatgaacccaccagaaagaagaaactccgaacacatcagaacatcagaaggaacaaactccagaggcgccaccttaagagcygtaacactcaccgcgagagtccgcggcttcattcttgaagtcagtgagaccaagaacccaccaattccggacacaccggcctgggttcaaccatagaaactcttctctgctccatgtggttgtcatccttctcctagtaaatgcaggcagcctttcatgttttgtgatcatagcagagacaaaatagagcaagcttgctcacgtcattagtacaaaaattccactggcaaaagcaagtcatgtgactaaacccaaaataaaggggcagagaaacatactctgcctctttaatggaataaacggaaaagttacatggcaatgggcatggataaatagagaaatgaaaattcaggcattaatgtattctgccaaaatccactctaggggtacacacctgtatgagtctgttttcatgctgctgataaatacatacccaagactggacagtctacagagaaaaagaggtttaattgact

SEQ ID NO: 834264 - DNA, 594 bp, Homo sapiens
attatttgaatagatgtatttctataattagaagctttgctctctgagcttcttgtrtctactggttgtcttaatctggataacagctcagctcatttaacacatatttttaaaatcctaaaattcacccaaatattcaattttatcctttttattttactattatatcatctcttgacttatttttatctcactgtctttggctcctctctaggtagtgataatcatattagaagaattttaattccaaccaattccagattaatatattattctacaacaaataaattgttccattcagaaacagaactagctactcaatttttccctattattttttcaaaataatttgtatatatatgtaatagttgtacatattgatggggtacatatgacattttgatgcaagcatgtagtatgtaatgatcaaatctggataatggggatatccatcacttcaaacatttgtcatttctttgtgctgtgaacattccaaatctactctttcagttattataaaatatatttttaaataaaataggaatatattacagaataatttaatatctattatcacacagcaatattacctga

SEQ ID NO: 834265 - DNA, 500 bp, Homo sapiens
agattcctatgggagaacgaagcagacttgcatctccttttctatgcttgttccccgcaagtaagacacactctcaggctgtcaaaggggaaatccatctgcaagaggaagtcactacatggaatgcctcagagcatcgctagagagtcctttgcctccaaaagaccctctgctttctccttcctgcaggaaagtgttcttgcatctcatcttgcaaagagacgacaagcatccagcacatctatgtgctccagagatggtccaaactctggtgtcaacaaaaaggataaaaggagcccagggaaagtctttaatgaagacagaaatatccacaagcccttcaactcagatgcccttatgagagttgccacagtgtgttaagtggcctgtggatctttccatgaagcagcctcaagtaggaggaactgagtgccatttcttaagggcactggaagtatgttggkagcatcacaacatactgggaaggagacccagcaaat

SEQ ID NO: 834266 - DNA, 644 bp, Homo sapiens
ataatttcgtgccatgttgaacttggctttctaatattaattttgacatcaaagcaaattgtattatttttcttttaaaggcattcttgttttacagggagcacttgttggtctgatggctggatttgccatttctctatgggttggaattggagctcaaatatatcctccacttcctgagagaacattgccattgcaccttgatatccaaggctgtaacagcacctacaatgagacaaatttgatgacaaccacagaaatgccatttactactagtgtttttcaaatatacaatgttcaaaggtattgaattaagttttattacattatactttaaaaaatttacgcaacaagtagagaaccccacttgctttttgtcttgcttacaacactgtgattttgcctaattctgaaatgagtaaaacccatgtggttagctatagtattttctgcagcggtaacaaaaaatgtcatattttcataatttctctagaaatttctgccttgtctacagatctaagaaracttaaatattaatgagaaacttctgttatgtgtaaactctcctaaacaccagctcttagctgcatgaagaattatctttgtcttggaaaaacttttaaaatggaaagcacaattataga

SEQ ID NO: 834267 - DNA, 614 bp, Homo sapiens
aaacagaaggaaatggtaacaaacaatacctgattctagcagtagagcagaggagctcacactgcccagtttaactcttggctttgccactttctagctactgctgcagtttccttatctgtcatatgaggataagaacagtacctttttaaaagcttgctggagagattaaatgagatgatacatgggcaatgcttaggactgcatttagtacatagtaatccctcggaaatgaatgctattaatataactgttaatattgttgactctttcagatttctgcaaaaggcattatctctatctacaaagaaacacttggggcaactcattctttttctcaaaccagcacatttctgggaataatgtgggatttaagcaataagttgtcatctaagacaaagcaattcagagggtgaattattccaggcatgtcttgcctggaatggccctaaaatgttcctttgtgcccaaagtttattataaaacatccatcagagtcttacaaagtatactccaaaccacaagggctgttaaatctccaatccacccactttcaacctcagaaacttctcaactccatgctccaggcrgccagcaccaatcagctgaggttg

SEQ ID NO: 834268 - DNA, 313 bp, Homo sapiens
ccactcagggttaaatggattaagggcggtgaaagatgtgctttgttaaacagatgcttgaaggcagcatgctcgttaagagtcatcaccactccctaatctcaagtacccagggacacaaacactgcggaaggccgcagggtcctctgcgtaggaaaaccagagacctttgttcacttgtttatctgctgaccttccctccactattgtcctatgaccctgccaaatacccctctgcgagaaacacccaagaatgatcaataaaaaaaaaaaamaaaaaatctaccaactaaaaaaagctcaggaccggatg

SEQ ID NO: 834269 - DNA, 595 bp, Homo sapiens
aatggcactatggggatgcaattagcaaaatccatattgggggaaactataggacaaatgaccaatttcttcagtaaataaacctaaaggggaaaaaaaagaggtwtaaaggaatactttaaattaaaaaaaacttattagtcaaatcaaccaattttaatgtgtgaactttatttaatctcgattcatataaaccctaaattttaaaaattatttcacaattgggaatttgaacattgactagatatttgatgatagtaaaaatcattaaacttttttttttttgagatggagtctccctctgttgcccatgctggagcacagttacatgatctcagctcactgcaacctgtctcctgggtccaagctattctcctgcctcagcctcctgagtggctgggatgacaggcatgcaccaccacacccagctatgttttatatttttagtagagacagggtttcaccatattggccaggctggtcttgaactcctgaccacaaatgatcctcctgccttggcctcccaaagtgctgggattactggcgtgagccactgcacccagccagaaatcattaaacctttatgtgtgatatt

SEQ ID NO: 834270 - DNA, 595 bp, Homo sapiens
aatggcactatggggatgcaattagcaaaatccatattgggggaaactataggacaaatgaccaatttcttcagtaaataaacctaaaggggaaaaaaaagaggtttaaaggaatactttaaattaaaaraaacttattagtcaaatcaaccaattttaatgtgtgaactttatttaatctcgattcatataaaccctaaattttaaaaattatttcacaattgggaatttgaacattgactagatatttgatgatagtaaaaatcattaaacttttttttttttgagatggagtctccctctgttgcccatgctggagcacagttacatgatctcagctcactgcaacctgtctcctgggtccaagctattctcctgcctcagcctcctgagtggctgggatgacaggcatgcaccaccacacccagctatgttttatatttttagtagagacagggtttcaccatattggccaggctggtcttgaactcctgaccacaaatgatcctcctgccttggcctcccaaagtgctgggattactggcgtgagccactgcacccagccagaaatcattaaacctttatgtgtgatatt

SEQ ID NO: 834271 - DNA, 562 bp, Homo sapiens
tatttttataatcaggaggggaaaaggttccctggccaactcagggaggacataaggctggaggtttcggagtaagaggccagaggcagattcacaggggtgaggacacagtggcagtgaacatctcagactggacgggaccttgagaggtcatctagcccatcctcctgccttccggatgtatctgaataagaccaatatctgaaccctctccccccaccatgtcagaactgctccttgccttccttgcccttccactcccagcagaatgccaaaagaggtttgacttcgtgctaattattcttacttctttcctgctttcagtgttctgctaaatagaaaatagggcactaatggctggatggaaaatagggcatgatcttcccacaaagtctttgctcaaccacctgcctatagccagtgtcctcttggaaagcccagtcatccaaggaaagagaagtcaagctgagtcccagggagggggagaccttggggaagaggacctcagggaagaggaagaacaggagagcatwtctacaggaatgtgcaaggagagctgggg

SEQ ID NO: 834272 - DNA, 617 bp, Homo sapiens
agtacaaaagtagtcatagacaatatgtaaatgaataactgtggctgtgttctgataaaattttatggccactgacattttaattttacataactktcatgtttaacaaaatagtcctcttttcaaacatttaaaagtggaaaaaccatgttagctactaaaacaggtatacaaacagaggtggtgagccagatttgatacatgggccacagtttgctaagccctggtctagctacgagattgaaaacctggaatttgggccaggtgtagtggctcatgcttgtaatcccagcactttgggaggctgaggcaggaggatcacttgaggccaggagttcaagaccagcctaggcaacatagtgaaaccctgtctcttaaacaattttttttaaaattagccaggtgtggtggtatgtacctgtaggtctagccacttgggaggctgagcgcaggaggattacttgagcccaggattttgaggttacagtgagtgagaccctttctcaaaaaaaaattttaaaaacatctgggcttagaaagatgctgcaggacagtggagagtgatgatcctgagatcctggactccacccctatgcaagaaaacttttcctacaaag

SEQ ID NO: 834273 - DNA, 667 bp, Homo sapiens
tctaattcaaaaatctgaagtgctccaatgaacatttcctttcagtgtcgtgtcagggctcaaagttttgaattttggagcatttyagatttcagattttcagattagggatactcaacccatacatggattattaaacttacacagcagggtcttgataagttcacatccaaaaccaatgtttacaaaaatctgcaggttaggaaatcaacattttcttccttatttaggaagtatctgtcatgatgtctttgaataattttcaatgagtttatttcagtgtgatgatcaatgagatggcaaggaactcatgtcctttttactgatttcctcatttttataaaatgagcgttttcattcttaaatggccttcaatgtcccattctaagtaatactttaatacatcaaattcctcaccttgcatgaatatgtggcacatttaccattgtttctccatcattagacaatccttcctgggcttgtaactcagctgcatgcctttcaaggtccttagttaacacctaaacaggacagacatttactctgaagttggaaaacaaaacatcctctttatacagaactctatttttatagagaatataaagtttatggacagaaacagaataaaaacagaaaactttaacagccctttaaatatctaatattt

SEQ ID NO: 834274 - DNA, 539 bp, Homo sapiens
gcctatggaagattactttcatctcccaagagggcgtgccatgccacaccaggccacatgaggaaacaccaaagtcagtcaggcagtaaagaagcaagtgaaaagcctaggccagagctttgttgctacagkggttgaaaggtgtggggacacccactattgggcaggaagtgaaatactatatgttggggtttgtggttggagggactgtaatgtgatgtttgcacacccataaaagctggattgtaagggaaagctaaacaacttttgttgttagtttggccctgtgattaatggatgctaaatacataatctaaggaaacatggaacttcttcttctgaaaatgtaggtttatgtctttttaaaaataaatttatataatagccttaacctttgagacttattttcctctttgaacaataaattagtatattttctcttctgtctaccactttattttggttgatattatttatgtgttgacttttgtgaaatgttttaaattctattaatagattttttttcagctttaaatatc

SEQ ID NO: 834275 - DNA, 629 bp, Homo sapiens
tcacatgtgtttgtgctcaaattgaaactatttttgtggtctaaaaacctctaagccagctatttattttaatatggttccagactgacatgccctcatatgtctagtgaaagcaagtgtaaaccttagagggatgtactttcaaccaaacaccaaaagaaaccgtccacacagagttccattgaacatgagctcaaaatgcacagggaaaaaacaaatctacctttaccgagtgggagtaagcaaagtgagccagcaaacaaggcccatagtggcttcagatattggcgttaacacaatcaggatataaggcaaatatgcttaatatgttaaagaaataaaatgggaagttgaaagtttgagttaggaacaagagactacaaaaaatgaacaggtaaatgagaaaaataaacaaaaagcacaatgagaaaatgttaaattacagaaaaagaaaaaatatagtaataggtatttatacctcagcaaataggtaaaacaagactagagtccagtggaragataattagaaaatagaaatcagagttgaagatattacttacaatttagcatagagagagagatagagaaaaaaataagagatatggaagtcaaagtgagatggtccaaca

SEQ ID NO: 834276 - DNA, 644 bp, Homo sapiens
cctacatcaacaaagtttgggaagctatgttggatgcaacagaatgacagttatttagcctctgctttggaaagctgaccattctataagcttttatggtctagggagcttgagactaaagcttgcagtgtattttctgttatctgaacatgtacttccacacatctgtggtatactttggtctgcttttctgtctatctgtctatctatcatctatctatctatctatctatctatctatctttctatctaatttatccattcatccatctcttcatttacccattcatctctctatgacccagatataagaataaaaacattaaactgtatccaaaataaatatatcaatatgtataggctaaagctggagaggagtgagaagggtcagtttcaaatcacaggatagaaatgttgaatattccccacaaaggagaaggtgtcagctattttttaaaagattataattttgagcagaaatccttctaggggcaaagaaaagagaaaatatttcatttgacatgacaagttrtaaaatgcaaatctgccagttttggaagggtaaatatttgctgaagattaagtacatgacaaaggtacgtcattaaatctaaagaaattaaagagctcaatttaatatcaca

SEQ ID NO: 834277 - DNA, 449 bp, Homo sapiens
aagaagttttctattccttccattctcctttccatttcccataatctaccactccaacttactattccttttggcttttaaaatctttatatgtctaattaatatgctcatatatgataatgtatcagttttagacattatgtgttgacatcctattacagcaggtaagcatataagtctcaggcacacacatgcacacaaactcatatatgcacagatacacaggtgcttcccttgccccattctctaaatatgctcatatccaatttttattagagcaatattcagtgtttatactatcataactatacaaagaytgatcgctactaaatgtactacgtttcatttactgtacaatgttattgtttctgtggtaaataggtattttttttccgtctttgcctgctttgttttgtaactacagctgatccttgaacaaggtaggtttg

SEQ ID NO: 834278 - DNA, 449 bp, Homo sapiens
aagaagttttctattccttccattctcctttccatttcccataatctaccactccaacttactattccttttggcttttaaaatctttatatgtctaattaatatgctcatatatgataatgtatcagttttagacattatgtgttgacatcctattacagcaggtaagcatataagtctcaggcacacacatgcacacaaactcatatatgcacagatacacaggtgcttcccttgccccattctctaaatatgctcatatccaatttttattagagcaatattcagtgtttatactatcataactatacaaagattgatcgctactaaatgtactacgtttcatttactgtacaatgttattgyttctgtggtaaataggtattttttttccgtctttgcctgctttgttttgtaactacagctgatccttgaacaaggtaggtttg

SEQ ID NO: 834279 - DNA, 661 bp, Homo sapiens
aatgaaattggacccctcatatgctgttgatgggactataaaatggtgcagccactgtaataaacactttggcagttccttaaaaagttaaacatacaagttagcatatgacctggcaattccactcccaagtatacactcaagagaaatgaaaacatatgttgccccaaaagttgtacacaaacatttataacagcatcattcaaaatagccccaaagtagaaacaacccaaatgtccatcaacagatgaatgggtaaacaaaatgtggtatatccacataatgaaacagtactcagctatgaaaagaaatgaagtactgatacatgctgcaactggcatgaatattgaaaatactattttaagtgaaagaagccagacacaaacagccacatattatatgattatataaaatgtccagaataggcaaatcaatagagacagaaatacatcagcggttgccaggagctgagggagggggaatagggagtaactacttataaatacggagtttcttgctgggatgatgaaaagctttttgaaattagacagtgactatggttgtataactstacatagacactaaagtactgaattttacactttaaagggaagtatttcattgtgtataaattacatgtcaatgaagctgctattgtttt

SEQ ID NO: 834280 - DNA, 661 bp, Homo sapiens
aatgaaattggacccctcatatgctgttgatgggactataaaatggtgcagccactgtaataaacactttggcagttccttaaaaagttaaacatacaagttagcatatgacctggcaattccactcccaagtatacactcaagagaaatgaaaacatatgttgccccaaaagttgtacacaaacatttataacagcatcattcaaaatagccccaaagtagaaacaacccaaatgtccatcaacagatgaatgggtaaacaaaatgtggtatatccacataatgaaacagtactcagctatgaaaagaaatgaagtactgatacatgctgcaactggcatgaatattgaaaatactattttaagtgaaagaagccagacacaaacagccacatattatatgattatataaaatgtccagaataggcaaatcaatagagacagaaatacatcagcggttgccaggagctgagggagggggaatagggagtaactacttataaatacggagtttcttgctgggatgatgaaaagctttttgaaattagacagtgactatggttgtataactgtacatagayactaaagtactgaattttacactttaaagggaagtatttcattgtgtataaattacatgtcaatgaagctgctattgtttt

SEQ ID NO: 834281 - DNA, 566 bp, Homo sapiens
tatatatatatgccacattttstttatccactcattgattgatgggcatttgagctggttccatatttttgtgaattgagttgctataaatatgagtgtgccactaacttttttcctgtagtgacttttttcctctgggtagatacccagtagtgtgattgctggatcaaatgctagatctacttttagttctttaagggatctccacatagtggttgtactagtttacaatcgaccagcagcataaaagtgttcccttttcaccacattcacaccaacaactattatactcctcatttttttattatgaccattcttacacaagtaaggtggtattgcattgtgattttgatttgcacttccctgatcactactgatgttgagcattttttcatatgtttattggccattttctccttttgagaattgtctattcatgcccttagctcaatttttgatgagattgtttgtttgtttgtttgtttttcttgctgatttgagttccttgtagattctgggtattggtcctttgttggatgtatagattgagaagatttttctcccag

SEQ ID NO: 834282 - DNA, 566 bp, Homo sapiens
tatatatatatgccacattttgtttatccactcattgattgatgggcatttgagctggttccatatttttgtgaattgagttgctataaatatgagtgtgccactaacttttttcctgtartgacttttttcctctgggtagatacccagtagtgtgattgctggatcaaatgctagatctacttttagttctttaagggatctccacatagtggttgtactagtttacaatcgaccagcagcataaaagtgttcccttttcaccacattcacaccaacaactattatactcctcatttttttattatgaccattcttacacaagtaaggtggtattgcattgtgattttgatttgcacttccctgatcactactgatgttgagcattttttcatatgtttattggccattttctccttttgagaattgtctattcatgcccttagctcaatttttgatgagattgtttgtttgtttgtttgtttttcttgctgatttgagttccttgtagattctgggtattggtcctttgttggatgtatagattgagaagatttttctcccag

SEQ ID NO: 834283 - DNA, 646 bp, Homo sapiens
aaagatagtttataaccctaaataarcttaggcacattagtttgggtaaaaacaagtaaaattattttagaatctggtattagttttctattcttgtgttataaattaccataaatttagcactttaaaacaacactcagttattgtctctcaataattgtttcttttttattttaattcttgtgggtatacagtatgtgcacatgaaatgttttcatataggtatgcaaaggataatggatgcaatcatataatgcatgcaattccatcatggagaatggggtgtccaacctctcaagagtttaccctttgtattacaaacaatccaattatactcttttagttatttttaaatgcagagttaaattattattgactataatcactctctttctattttcttttgtacctattaaccattcccactcttccctccagaccccactccctttcccagcctctggtaaccatccttctattctctatctccatgagttcaattattttatttttttgttaccgcaaataagtgagaacatgtagtgtttgtctttttgtgcctggcctgtttcacttaacatgatgatctccagttccattcatgttgttgcgaatgacaggatctcattctgttttatggctgaaa

SEQ ID NO: 834284 - DNA, 439 bp, Homo sapiens
gactgtgaccgcctgagagatcttaaataagatcggctcatctgaaccccttcctgatctggaaaagtcacggatataaataaaataattatttttatttcaatccactaagtttggggttatgctgaaggcataaaagaaagcaggtggattgtctggcagcactgtttcctgcaacaatgtgacaaatgggaaatgtgcctaatgaattcattggtctagctaaggaaatttccagacagaatgtagaaactgccagctgacaacaaattgaagataaatttctaacagtcttaaaagaaatgaacaaaattcttagagtgacagtttgtaagcraataatgaaagcaacaaagaaccctaggatgaaaaagataaactctgatgaaatatctgggcttaaagatatcatcagaggacttgaaattacaaaatacat

SEQ ID NO: 834285 - DNA, 595 bp, Homo sapiens
tgctcagcatttctgatcagcatttgataattgcttgggttaacacatcgagtcaatacgtggcagcyagaatcacagaaactttaacgtgtaccctttttgtgccggatattgtataactcccacaagtatgcagacccagcaaccacggcaggcaaccagacagatgctgagtggattccttggcttccaaccttttactcaattacttccttcactgtatctacacctgggctctttctccagtaacgaaactttgtgttccttgtcttgctttcagtctcatctcccgcatcttctggtattcttataaccctacagattttttttttttttttttgaaacagagtctcatcgcccaggctggagtgcagtggcgcgatctcggctcactgcaacctctgccttccgggttaaagcgattctcctgcctcagcctcacaagtagctgggattacaggtgcccatcaccacacccggctaatttttgtgtttttagtagagacggggtttcgccatgttggcaaggctggtatcaaactcctgacctcaagtggtcagcctgcttcagcctcccaaagtgctgggattacag

SEQ ID NO: 834286 - DNA, 627 bp, Homo sapiens
aaaatttaagtctatcttcaaatatcactctgtggttccacaggtaatgcaggtagcttgtaacagagtattttcaatkcttcctttctgatcctgtgatattgctgccatttatttatcctattcatatgttacaatcacccaatacactgttcctattatggctttaaacaaagttattttttgatcatttaagaacaagaaaaataaaatattttattttcccttctcctcctctaagacttttcttttctttatgtagatccaagtttcaaaactacatttttcatctttctaaagaacttcttttaatatttcctatagggaaggtcagctgggaataaattccctcagattttatttatctgagaaggtctttttttctcctttaccttgaatatcaaattctaagaagacttttttttcaaaacttctaaataattcactcctctcttcttgctttcatggattctgatgagaacttagctataattctaatttttttaattttttttttttgtaaatttaagatgacttgttttctctgccatacttccaagctttcctaattgtcttttgttttctgtagtttgaatataaaatgcctggatggttttgttgtttttt

SEQ ID NO: 834287 - DNA, 657 bp, Homo sapiens
aggaggctccagcagtgccctcagccccaccctcctatgaggaagccacctctggggaggggatgaaggcaggggccttccccccagcccccacagcggtgcctctccaccctagctgggcctaygtggaccccagtaagtctttcagctcctggaacctgaagcatcatggggtgggggtggacccagagggaaaacctgagtaggaggaagttgtccagaaagaggtacactgtgtggttgtatgaagctgtgttgttagatgcttaggatttggagaactagtctgagggtaggtcagagacaactccatgaaaacagagagagatacaatgtctgcatcagggtgctctcaatagggaagagggcatttttttttcaagtcaccatgctagagcaaatggaggggacagatgagggagaaaagctaagggctagttaagaaagaactcctagaaaaaagagatacagagaaggagggggcataggaggctgccactggccacagccttcactgggcctggcccctgtgagtgggggtgcagtgtttactcactggctgatctgaaacctcagtggggacaggtctccacggaggccccagggctgttgggggataggggtctggggatccacctcaccaatcactcttctcat

SEQ ID NO: 834288 - DNA, 339 bp, Homo sapiens
tgccttggtgacaccttccactcctcccctctcctcaccccctacatcacgccccacatcaatgctgtggcccccactcctatccagaatctgacaacttatctctgccctcatggctactccctktcccagcccccgtcgcctccagcctggattgattgttgccatggcctcctgcaggctgcccctgtgccctgcatctatgcacagcacagcagctggagttgttaggtcccctcgttcctccgttgagcatcccgcaatcgcttcccacagcctgcaagctctctgacctccccactcccctctgctgtagccacactggactcgtgctgtgtg

SEQ ID NO: 834289 - DNA, 554 bp, Homo sapiens
ttctctcactgcactctgcccctccactacacccctctcatcacaacctgctgtgctccctggaaacgtgcctgccacactctgctcctgctggaaaggactgaccggcaaggacacctgaggcctgggttagaggggggcatcttctgtgcactgcaggcatacctcaaccaaagcctgagcccccgcacccttctggccagctcctctgacttcccacccaggtatagcatctgggggccagcctgcaacttatcagttttctattcccaccatctgacccggagcttggtgcctggtaggtgctcttcaaatatttctggatgaaatgcaaaacaaaacaaaacaaaagacccaaaaaaacgaaacaagagatgcaggagttgagacaagcatattggatttggtgagtaggaccccttcaacttaaccctttcctggtcttcagtgattttcaaataacgaggaactgttktcacagtgactggagggctcttctggtagttggtgccaggggctgctgaacatcctgctccgtgagggacagcagagcc

SEQ ID NO: 834290 - DNA, 633 bp, Homo sapiens
gcggcaagtgaaatgatataaccggctaacggtctcacaaccagttagcgaaagagccggcattttaacttaagctcatctgactataaaagtcaaattttmatttgtcttttaaaagaagaaacatggatgaacctggtagatattatgctaagagaaataagccagactcaggaagacaaatacagcatgatcttatttatatacagaattttaaaaagtagaactcacagaaatatagagtagaagatttccaaggatgacagggaaatgaagacatgttgttcaaagggtgcataagttctggaaccctaatgcacagcacagtaactatagttacagataataacgtattatacagttgaaatttttaagagagtagattttccatattctcatcacacacacacaaagttaactatgtgaagttatacatatgttaattagcttgattgtatgaatcacttcacaatgtctacatgtatcagaacgtcacattgtatactttgaatatatacaattttttgtcaggtatacttagtaaacttgagtaaacaaaaaggagaaacggtattgagagctggtaaagaggaatgaaaatactgaaataatcaggcatctgccaatttctgt

SEQ ID NO: 834291 - DNA, 600 bp, Homo sapiens
gaacccaggaagtagaggctgcagggagcagtattcaccccatcacactacagcctggaggagcctctctcaatcaatcaatcaataaaagagaaacatgcaagtttaggcaacttggaggtatgaggaaaacaggtcaatatgctcttttagaatggcaacttggctttataataggaaacgaagtcaaatggatatatgagtgtgcatgtgtgtgtgtgtgtgtgtgtgtgtacatgcatgaaaagacagtaagaggcgacagtttattttcagcatgtctcaatgttttcagcactcaggtatcagtgcgtttaaactcagttcgatgcatcaaaatcaaatttgtggaatcatactaaaaacagataggatggcagtcacgcagtggtgtatatcactgtctgttccctgattccttagtcacctcttggccaatagcaagtcagacgccttcacaatgatacattrcaataaatccatgaaaagaacatgtcaagccctaatttatttccagttctactgataaaagatagttccaggactacaaaagaacaagcacaaaactgagggctaatagtaacatctgacccttaaaac

SEQ ID NO: 834292 - DNA, 600 bp, Homo sapiens
gaacccaggaagtagaggctgcagggagcagtattcaccccatcacactacagcctggaggagcctctctcaatcaatcaatcaataaaagagaaacatgcaagtttaggcaacttggaggtatgaggaaaacaggtcaatatgctcttttagaatggcaacttggctttataataggaaacgaagtcaaatggatatatgagtgtgcatgtgtgtgtgtgtgtgtgtgtgtgtacatgcatgaaaagacagtaagaggcgacagtttattttcagcatgtctcaatgttttcagcactcaggtatcagtgcgtttaaactcagttcgatgcatcaaaatcaaatttgtggaatcatactaaaaacagataggatggcagtcacgcagtggtgtatatcactgtctgttccctgattccttagtcacctcttggccaatagcaagtcagacgccttcacaatgatacattgcaatmaatccatgaaaagaacatgtcaagccctaatttatttccagttctactgataaaagatagttccaggactacaaaagaacaagcacaaaactgagggctaatagtaacatctgacccttaaaac

SEQ ID NO: 834293 - DNA, 346 bp, Homo sapiens
cctgagctcaaagtgaaatgggttttgagamccaggggcattgccctgactggcaatataaccaaaatcaatcccagtgcactcctgtagaaagctaccacctcttcctgtgttatgagaaccctaataataagttgatttggaagaagactggagaaattaaagctttatcactcccaaaggcctgccctttatctcagtttttagtttccaacaaatattatttttctgtccaatcaaaagatatttttggatgctatggaccattctgtgatatcaaatctgtccctgggttttctgaaaatcttacctaaaagagaggtcttcaataattatgtattgtact

SEQ ID NO: 834294 - DNA, 553 bp, Homo sapiens
aatttaaaaagccatatatgacaaacccacagccaacatcayactaaatcagttaaagttgaaagcattcctcctgagaacaggaacaagacaagggtgtccactttcactactcttattcaacagagttctgaaagtcctagccagagcaattaggcaagagaaagaagtaaagggcatctgaattgaaaaagaggaaatcaaactattgctgtttgcagattatacaactgtatacctaaaaaatcctaaagactcctccaaaggactctcagatttgataaatgaattcaggaaagtctcaggttacaaaatcaatgtactcaaaacagtagcactgctatataccaataacaaccaagccgagactcaaatcaagaactcaatcccttttacaacagctgcaagaaaaataaaatacctaggaatatacttaaccaaagaggtgaaagatctctatgagaactgcagaacactgctcaaagaaatcatagatgacacaaacaagtggaaacacatctcatgctcatggattggaagaatcaatattgtg

SEQ ID NO: 834295 - DNA, 587 bp, Homo sapiens
gatgaatattcaaagatatatctgggtagtggaattataggtgatttttattcttttctttgcaatttttcttatctcagttgggtatctgttacttttaattgatcgtttttaatctctcaattttaaaacttcaaacatatagaaaataatataacagacatccacatacccaccatgaaagtttaacacatgttaacgtcttccctgtttgttgcgaacttttttttttttaaattttctgtggatacgtattccttttctaaatgaagacttcagtactcagagaaagctaattcagggactctctaagtcctggaagtagttcattgcttaacaatgaaatagacagttagcactgccagagaagccgggtacctggctatcaggggaaccaattcaggtttgggggcagtgctgctgttaaacagactcagggagggaagttggagggtgtgtataccggtttaatgcctgggaagatttcccccaattccagagtctagagacatccactccatcccttagagccttgctactsaaggtggggtctgagaccaggatcccttggcagctttttagaaatg

SEQ ID NO: 834296 - DNA, 592 bp, Homo sapiens
tttacatcttggtctgaaagccctttataatacaggcaagagagaaatgatgagtgttgctaactaaaactaaaatcaaagataggagttttgttataagccagagtccaaacttgtgaaaattgtagcttaraaaaactttctggctgagttggctgcagttgaataatgagtcacttgttcatttcaacagggatgggctcagtttcctgtgcctcctgggtagtgctgtggttgtctgggcctagtggccacatgctgatgtgtgctcactttagacagggagaggtcctcaccacttccctgacattttagtcaaactagatcacttctctcacaatttacttgcagtctttctaagtaaggatgttacatgggtttcaccttcagtaggctgtattcacgtaacgatcatttagtgggtgctttctatgtcccaggaaccaggctatgtgctacagacatgaagaggattaggacaagttgttcataatctcgcagaggagacaaatgagaaaccagctagtcataacaaaggcagagttaaataagtgctgtaatagacaaggtactgggaaattcaggaaaagga

SEQ ID NO: 834297 - DNA, 462 bp, Homo sapiens
gttcattatattcatattttctttagaatgattccaatttctttttactcagaacgaactctttggcatcatgcttcacataatcatttatcttttactaataaatggaacttctctttgggrtgtggttttgggaatgaacaatgacatggaatgatagctgattagccagagcaacctgccaatcagcaggatgtcagagtccaatcacatatgcaacccaaagagccaattcactaaccctttatgaacatttttgcaaataccatgaaacttgagtgctgtgtgtgcatcattatgggcagtttccctgttatttgtagatttttttatttgctactcagaagcatctttccttgatgtttgttcataatatttttcttaattgtccaagatttcacctgaatagtttgatatattacacagaatttaaaattctttccctaaataggatcttttatt

SEQ ID NO: 834298 - DNA, 596 bp, Homo sapiens
ttaccatgaggcctacaaatactatcttataacccattattttaagctgataacaacttaacactgtgtgcgtaagtaaacaaataagcaaaaagaaaaccaataaaactctacaccttaacttcatccccctgctttttaactttttgctgtttctatcttatcatactgcctgtttcttgaaaagttgtagttattatcttggatgagttcatcatttagtctttctaattaagagtggtttacgggctgggtacagtggtgctggcctgtaatcccagcactttgggaggctgaggcaggtggatcacgaggtcaggagttcaagatgagcctggccaagatggtgaaaccccgactctactaaaaatacaaaaattagccaggtgcagtggcaggtggctgtaatcccagctactcaggaggctgagtcagaacaactgcttgaacctgggaagtggaggttgcagagagcaaagattgcaccactgcactccagcctgggtgacagaatgagactccatctcaaaaaaaaaaaaaaaaggtgtggagccaagatggccraataggaacagctccggtctacagctcccagc

SEQ ID NO: 834299 - DNA, 536 bp, Homo sapiens
ttaggcactctctaatcagatgtcctaggtcctcccaattcttagacctttaatacctgtttttctccctctcttattccawttagtttctcaattcatataaaactgtatccaggccatcaccaataattctaaatgacaaatgtttcttctaacagtcccataatgtcaccccttaccacaaagtcttccttcagcttaatccctcccactctaagttctcatgacgcccctaatcccgctcgaagcagccctgagaaacatcccccatcatctctccataccatcccccaaaattttcaccgtcccaacactttaccactatttcgttttatttttcttattaatataagaaaggaatgtcaggcctctgagcccaagctaagccatcatatcccctgtgacctgtgtacacatccagatggccagttcctgccttaactgatgacattccaccacaaaagaaatgaaaatagcctgttcctgccttaactgatggcattatcttgtgaaattccttctcctggctcatcctg

SEQ ID NO: 834300 - DNA, 568 bp, Homo sapiens
aagtttgaactggggggagcccaccgcagctcggcaaagctgctgtagccagactgcctctctagattcctcctctctgggcagggcatctctgagagaaaggcagcagccccagtcaggggcttatagataaaactcccatctccctgggacagagcacctgggggaaagggtaactgtgggcacagcttcagcaaacttaaaagttcctgcctgctggctctgaaaacagcagcagatctcccagcacagtgtttgagctctgctaaggaacagactgcctcctcaagtgggtccttgacccccttgcctcctgactgggagacacctctcagcaggggccaacagacatttcatataggagagctctggctggcatctggcgggtgcccctctgggaagaagcttccagaggaaggaagaggcagcaatctttgctgttttgcagcctccgctagtgatacacaggcaaatagggtctggagtggatgtctagcaaactccagcagatctgcarcagagaggtctgactgttacaaggaaaattaacaaacataaaggaatagca

SEQ ID NO: 834301 - DNA, 660 bp, Homo sapiens
acaatacaaaagcacgtagtttaagagctgagacaaacttgtctaattacactcttggggttccaaaaggaaaaacagaggtttctccccaaaagagagtctgaaaacttcttcattttctttaagaaaccttaggctattacaaactattatagaccccccatgcagcagaagatgcaagcgaaaggagagacatcagaattaaatgaagaaaacagatttcagtcaactgggaagaaaaaaaaatttgctcaaaaaagacaaaaatccttggagagggagaaaaaaaaccaccatgaaatccttttaaatataaacacacatacacataaacagacacacacacacacacatatcttggatgtcagcttctaattaagctgagttttaaccattgagctcctttaattttttttaatctcattaccatatttcagctaggacaaattgctactctttcagaagtaccaagtatcaaaccagaaagggcttgatttaggaaacaaactcaggctgttgtggtgaaaaaaasaagacagaaccttaactatggaactgcagcatggggtgacaaccattgctctttcaatttggcctggctagaaaaaaggtgaccttgttatgtaaataaagccccgtacatagtcaaaatcttttttt

SEQ ID NO: 834302 - DNA, 613 bp, Homo sapiens
aattgtaatgtatcatttttcatgtctgactttatgtaattcaaatgtctctattaatttttatttttagytagtctggctaaaagtttttctattttgtttatctttgcttcattgatattttgtattgttttctttgttttaatttcatttatttctgctctgatctttattatttgttttcttctactaattttgggtttagtttgttcttgcttttctaattctttaaaatgcatcataaagttgttcaattgaagtttttctactttttttgatataggcgcttatagctataaactttactcttagttctgccttcactgtatcccataggtgtaggtgtgttttgtttccattatcatttgttcaaaatataatttccttctcagtttttttattgacccactggttattcatgagcctattgtttaatttccatgtgtttgcatattttccaaaattcctcttgttactgatttctaattttattccgttgtagtcagagaagatagctgatattatttgaatcttttgcaggttttaagacttgttttgtggcctaacatatgattcatttggtgaggagacagatgtgtattctgtatgtttt

SEQ ID NO: 834303 - DNA, 613 bp, Homo sapiens
aattgtaatgtatcatttttcatgtctgactttatgtaattcaaatgtctctattaatttttatttttagttagtctggctaaaagtttttctattttgtttatctttgcttcattgatattttgtattgytttctttgttttaatttcatttatttctgctctgatctttattatttgttttcttctactaattttgggtttagtttgttcttgcttttctaattctttaaaatgcatcataaagttgttcaattgaagtttttctactttttttgatataggcgcttatagctataaactttactcttagttctgccttcactgtatcccataggtgtaggtgtgttttgtttccattatcatttgttcaaaatataatttccttctcagtttttttattgacccactggttattcatgagcctattgtttaatttccatgtgtttgcatattttccaaaattcctcttgttactgatttctaattttattccgttgtagtcagagaagatagctgatattatttgaatcttttgcaggttttaagacttgttttgtggcctaacatatgattcatttggtgaggagacagatgtgtattctgtatgtttt

SEQ ID NO: 834304 - DNA, 482 bp, Homo sapiens
cccagtaatgtcgtgactcctgcagagttatagaggtactaccttggataagatcccgaagaattatctgtattaccaaacagagactcttgctttttcctttactttcttccaaacaaatggagtctctctgtgctgagctgcctgaagctgggggagaggagacagaagcaactttgtgaccaccacaactgggagtatgctgggtcagacttgaagccagcacagcactggatctcatccaagtcctgtggtaactactgcccagctacctcaaatgttttgtcaagtccttagggctttacaaccagccgatggtgaaaccagccaggcttatgtccttgtcttcagcgtgatgagattcccytgtccttgccaggtttcaagatgccatccaggaggtatgggctggagtcagaaatcttaggaatctacatggtactctattctcctgtggctgagcttgtgcccaagccacaaag

SEQ ID NO: 834305 - DNA, 526 bp, Homo sapiens
tgagcagcaaaatataacataaaagcgttaagtgctaattgaactaagmcatttgtggataaagtcctgggagcgggatgtatatgagagagatttgcttgttggtatgtttgctttcctaaatggagcacctgcttggaaagactttagaaaaggtgttatatttaaatagaacttcagaaacatcacgtttttggacaaaggaagatggtggaaaaggacatcacttggaaaaaaaagtgaacatatatagcccccccaaaaaaaaggatataaagagaaaaagaaatggtgaatagttgaccttggcttgagggtttgtgttttaaagatgagtgctagagataaagttcaaaatacaggttaaaaatgaactgcaggagctttgttctttcctccagagaaaatagaaatgtattcatcataaaacatatattaaaattgttctcaggaaaattaatatggcaacaaagaggagaagtaagataaaatcctcgtggatctcatctggctccttgcactcgtc

SEQ ID NO: 834306 - DNA, 517 bp, Homo sapiens
taatgctagaatgagctaaggctatggggattgttggcaattcatagatcatcaaggctgccactcctactactgacctggagagcaaggctgttgggatggaatgaacatatttttgcctaaaaraagaacttaaattctgaagcaccagctgagggaagactatggactaaattgtgttctggcaaaattcatgtgttgaagctcaatcccatgtttctgtattagagacacggcctttaaggaattgattaaggttaaatgaggtcattaggatagatcccacatgtaataatactggttcccttataagaaaaagaggaggcaccagagctttctctccaccatgtaaggacatagtgagaaaatggccatttacaaactaggaagagaaccatccccagagctcagccatgttggctccctgatattagtcttccaacctccagaactttgctgtttttaagccatcccttttatgatgttttgttttgaaagactaacctggttaatacac

SEQ ID NO: 834307 - DNA, 517 bp, Homo sapiens
taatgctagaatgagctaaggctatggggattgttggcaattcatagatcatcaaggctgccactcctactactgacctggagagcaaggctgttgggatggaatgaacatatttttgcctaaaagaaraacttaaattctgaagcaccagctgagggaagactatggactaaattgtgttctggcaaaattcatgtgttgaagctcaatcccatgtttctgtattagagacacggcctttaaggaattgattaaggttaaatgaggtcattaggatagatcccacatgtaataatactggttcccttataagaaaaagaggaggcaccagagctttctctccaccatgtaaggacatagtgagaaaatggccatttacaaactaggaagagaaccatccccagagctcagccatgttggctccctgatattagtcttccaacctccagaactttgctgtttttaagccatcccttttatgatgttttgttttgaaagactaacctggttaatacac

SEQ ID NO: 834308 - DNA, 615 bp, Homo sapiens
tgaaggaattttgtatttattagatgaacacagcattatgctgacaaagttattattgtcactttggtggaaatttgagaggcttctgcagttcaacctttgaacacaggttagtagtatgctgataaatacttaacagttagatctctggaagagcaggagccttcatttgcagcatgtgccagttttcctggtatatatagcttcatcatgaccaattccaagctaccaacataatgtcacttaacgtgaagtcaagaagaaatatatacaatgcactctggagctgtggcaagccatctcagcataccactgacagtcaggccaagaaagccacactttaatgaatacaaaacaggtaggtaatggagttatgaagtgttgctacctgattttactcaatagcaagctaatattatttcaaaaggaaaaagccaaattttatcctgtaagtctcttggcattgaacagcattggcattacgttgcattcagtgtagttctgattttgcatcattcaayctcagtttgttctctccgtggccacatttctaagacattttacaatttccttctctataaaattcaagaattggtaccagtgctaaattgaact

SEQ ID NO: 834309 - DNA, 561 bp, Homo sapiens
agtattaccatgacctgtgagtaaggtcaatgggaaactacaacagcctgattcagacaggattacacatggyccagacccctcaggaacgaagatttgggtcactccaccaggaaaaaatttacgaccttctgaggtgcttgctggaggcaaagggaatacaaaatgggtagtagaaggtagtcaacagtaccagctatgaccacgtgaccagctgcagaaacaaggactgtaacagtaatgagtatttcctccttattttgttaaaaacatgtttgtgcatgtatacacttgtactaagaaaatatcttcattgtattcccttttcctttataatgtgatgtaagatttattgacttcatgttagcgtttaagtattgttaactttatttgggttggggattggtgtacttccagttgtacaaaggatagttgtattattttaggtgtaattatgaccttattattgtcttcatttgaagagtatgtatgatctcaggagatgtgtatgggttcaagttgacaaggggtagacttgtgatggtttttactgagtgtcaa

SEQ ID NO: 834310 - DNA, 475 bp, Homo sapiens
atatgcagctttcttataagcacgtgccttacaatgatgttgaattcaatcatggggttggattcaggagttcttggaatacaaacaactatgaacaaaattactgagagctccattctcaagaagccaaagtacctgtttaaattatttgtgcataatagtgatgatcaaccttaacaaaattatccaggtcttttaaaactccaaccaatcaatgataatttctgttttgtctaagaaaacttgtgagaataaaatgagaaattaaaaggtaagtcaatactttctatgatggaatacttaaaataaccaaacgagatatcttatatatgttgtttgttctcttgcattgttacagagaaaaaaatgagacatccatgatccatagttaccaagatggaaacttgtgtcaaagaataaawactcttctcttctccaacaatagccacattctgaggatttcacaaaaaaacag

SEQ ID NO: 834311 - DNA, 664 bp, Homo sapiens
aataaacaacaaaaaacccataattattttaaaaagtttatattccacttttacagacatttgtaaatattctatgttattttargtagtggtaatttttatggagaaaactacaatgcctcccagcttgtgtgggacagtttggatttgtgcctgttttcctgctgtgatgattaagattgcctctttttactctcaaaaatgtcctagttttggtgaccctctctgtaaaagaaatttcaaaacaatgataatatgaaaatatgtatgggaggggttcttttggactggatgatcaggaaatgtctcactaggtgatatctgagctgagaattaaagtaatcacacagctcttaagggtgaatttgaatttgagaggggaaaactgtgtagtcaaacaaagacgtagtttagattctgacaaacctgattttatacctcagccccagcacaccctaggtttggtactttgggcttggctccctgtgagatactcaatagtataccttaagtctaataatgtgattcagaaatgaacacattaaattacatgggcaaagaaacttatatttatttatgatatcctctcacaataccataaagaaataatctatattttaaagcaactactgtgcagtacacactgtgtttgggtacagctggt

SEQ ID NO: 834312 - DNA, 554 bp, Homo sapiens
agtctccagagactgaatttttgtgcttgatgctgttatttttattttttgctccacttattaacttagatgacatgtcacacctgaatagrttgaagaagtcctcatttaggaaactcaaataagtttctattaatactagaaagtactcgagttaatttcaacaaacaaatctcttatttgccattaacctatttatatcctaggatagtagtgcttggaaaaatgttacaacaaagaatagatagctttataatgaaaatcagaagtatttgctcaatcaaatgtggataaactaatactttctgctcattcacacaagaagcagtcaatttacagttaagtatacagaatgaaatgtaataaatttctctagcatacacacttccccaaaccacacagccctcagagtatcatataattagttccttgccacttgctgaccatttacttttgcaattgttacttaactgccttaatcgtgtacctggtgcaagggcatttagtcaagaggatgcaatctaaagtgtattccacacttccactcgcaatgg

SEQ ID NO: 834313 - DNA, 587 bp, Homo sapiens
ttttctaatcagcactaaaggctgatctttgctaacaaataccttgattaaaatgttttttttttttatctaaagayacctaaagttgtttgatacctctagataaaagggctgtgccatcttgttcatcatcacccaagtacctggggaaacactgggctcatagcaagtgttaagtaaatgtttcattagaaaactgggccgggtatggtggctcatgcctgtaatcccagcactttgggacgccgaggcaggcagatcacgaggtcaggagatcgagaccatcctggctaacatggtgaaaccccgtctctactaaaaaatacaaaaaattagtcgggtgtggtggctgacgcctgtagtcccagctacttgggaggctgaggcaggagaatggcgtgaacctgggaggcggagcttgcagtgagcagagatcgcgccactgcactccagcctgggtgacagagcgagactctgtctcaaaaaaaaaaggaaagaaaaagaaaactgtatgactagtctgcaaagggtggaaagaaaaattgctcctcattctttttttctttcctatactctgcatacttaag

SEQ ID NO: 834314 - DNA, 513 bp, Homo sapiens
tatcttggctattgtgaatcatgatgaaatgaacatggaaatgcagatatctttttgacatactaatttaattttttatatatatccccagaagtagttttgacaaaggtgcccagaacacaccatggggagaggacagtgtcttcaataaaaagtgttgggaaaactggataaccatatgtagaagaatgaaactggacctttatctcacatcatatacaaaaatattaactcaaaatagattaaatacttaaatgtaaaacctggaactgtgatactactgaaatataggagaaaagcttcaggacattggtatggacaatgatttatcatataggaccccaaaagcacagacaataaaacaaaaatagagaaatgaaaktgcagcaaactaaaaagcttctgcacagcaaaaaacaaacaaaaaaaaacaacaaaaacacagtgaaaagataacccacaattgggagaaaatatttgcaaaccatacatctgataaggggtaatatccaa

SEQ ID NO: 834315 - DNA, 645 bp, Homo sapiens
gcagatcacacaagtcccctattccctagagtggctttctggcaaagagactgaaatctraatcccttaccccagctataaggcttcacatactgtagccccggactttatccatgaaaatgtctcccagaagtctctcctggctcagcatgtttcagcagccacacccttctctctgttccttaaggatgccaagctcattcgcagcttggcgtatttgcataagctgtttcctccacccaaggtgccctttaccctaaacatctcacggtcagttccttcttgtaatttaaactcctacttaacttcttttcttagagacctctttcctgacctctcaacctactcactttctattctgccagctggttttaatgttctctcctggttcaacagcacttactcatatgggatatgttcttatttattatttgataacctgatgttttctttgtttaggtgtaagctgcatgagaacagaggctttgcctttctcagttaccactgttttcccagcacatagaaccatgtctggaacataataggtgttcagtatagaattgctacatctatgaataaaagtgctgtgcttaaggttgtccattccctatcttattttactctccaacaagtaaataaaatatg

SEQ ID NO: 834316 - DNA, 577 bp, Homo sapiens
ttctggcaaagagactgaaatctaaatcccttaccccagctataaggcttcacatactgtagccccggactttatccatgaaaatgtctcccagaagtctctcctggctcagcatgtttcagcarccacacccttctctctgttccttaaggatgccaagctcattcgcagcttggcgtatttgcataagctgtttcctccacccaaggtgccctttaccctaaacatctcacggtcagttccttcttgtaatttaaactcctacttaacttcttttcttagagacctctttcctgacctctcaacctactcactttctattctgccagctggttttaatgttctctcctggttcaacagcacttactcatatgggatatgttcttatttattatttgataacctgatgttttctttgtttaggtgtaagctgcatgagaacagaggctttgcctttctcagttaccactgttttcccagcacatagaaccatgtctggaacataataggtgttcagtatagaattgctacatctatgaataaaagtgctgtgcttaaggttgtccattccctatct

SEQ ID NO: 834317 - DNA, 610 bp, Homo sapiens
ctctgaatggtctgtgaggttgcaactgcttctggagaggggatgccgagccgaaccagagctgggttactacaagtgtgaaccggcagcctgtctgttgccacagaagaacttggtcaccacactgagaagccgtgttttctcacctccctgttactgttgtagctgtatctggcttctctagcattttaaaggaatttctgattgaggcgctaacagctaattccacaggagttgtaaggcagcctgtgcataaactgagacagaagtttctcctcagagactctctttttattattattattattattattggcaaagacttctggctctcctcagaggaataccttgttgcttaagatgagtggctgtagaaagcggtgtaaacgtgaaatactgaaatttgcccagtaccttctcagactattaacaggttctcttcatacaggtaatgactttttttttttttttttttttttttagtaaaggctattaragcatggtaatgaagttgaaatggaataggaaaggctatttctttgttgggattatttttaatgttgccaataaaatgcaactgtatttgctgaaatttatgtttctaaaaatg

SEQ ID NO: 834318 - DNA, 610 bp, Homo sapiens
ttaatgttcttgagtttctggaatcatgaagctatccacgcaagaaggaagcattgatgaaacattagcaaaatgaaaattattttcataaaactttaagtgtgtttggcttttgaagaaggcattgctagtttgtattgtcttgcatttagagaagtttcagacaagatccggcatgttcagggtggtatggcctggcatacatttatttacctaagtaacaaaattccacgtcctgcacatgtatcctggaacttgaaaaaaaaacaaaaaacaaaaaaaacctttcagtattattttggttgaatacataattgttaatattcataaaatgtttaccaaattttataatatttgtaaaactagcaaccatatacaattcaacataataagcataaatacaaattggctaataaatatttaggtaacatagtgtttcacataactgtgttttgcagaaaatttgagctcatcacttcaggtgttgcaactgctatattaaccagatgagttgaaactatttctaaatayagtatttttttcttcttaaggagagcacacatactcctttattgaaggctcaaaatcattactgcaaatgacacttggt

SEQ ID NO: 834319 - DNA, 480 bp, Homo sapiens
ctaagtgtgcagtgtttataaagtgtacagtggcaccttgtaatttcctagaccttcacattcacacatcattccctctctgcctcacccagagcaactttcaacttttagtcctgaaagctctgttcatggtaagtgccctacacagcgtaaatttttttttctttttctttttttttttttttttttgagacccagtctcactctgttgcccagactggagtgcagtggcaaaatcttggctcactgcaacctctgccttccgggttcaagtgattcttgtgcctcagcctccttagtagctgggattacaggtttgagccacagtgcccagctcatttttgtatcttttrtcttgtatttttactattcctgtttcatatttaggtatgtttagatgtaaaaatatttaccattgtattatagttgcctacagtattcagtacagcaacaggctgtgaattaaaatgtgctgtaaat

SEQ ID NO: 834320 - DNA, 480 bp, Homo sapiens
ctaagtgtgcagtgtttataaagtgtacagtggcaccttgtaatttcctagaccttcacattcacacatcattccctctctgcctcacccagagcaactttcaacttttagtcctgaaagctctgttcatggtaagtgccctacacagcgtaaatttttttttctttttctttttttttttttttttttgagacccagtctcactctgttgcccagactggagtgcagtggcaaaatcttggctcactgcaacctctgccttccgggttcaagtgattcttgtgcctcagcctccttagtagctgggattacaggtttgagccacagtgcccagctcatttttgtatcttttgtcttgtatttttactattcctgtttcatatttaggtatgtttagatgtaaaaatatttaccattrtattatagttgcctacagtattcagtacagcaacaggctgtgaattaaaatgtgctgtaaat

SEQ ID NO: 834321 - DNA, 731 bp, Homo sapiens
ttcctgtagttgtcactcagtccttggatcctggttctctagctatccamccaaacagagaccctgtgtggaaggtcctctaggacaggacttgaaactgctccagtccatctcatttggctcttttttcccctctcctcaacatggctgtcatctggtcccagaagactcttatatcctttgccctggtaaatgtggacagaggagaccatctcagcgcagccacctccactctgctgcactggcctcttaaacttgttcaactactgggcctaaaagaaagcagtagtctggcagatgtcttcacaaattttttttcaacacttcaggtattccctttactcttagtctcagtcagttttttaaaaatgtagggtcctcacgcctgtaaaatttccccctcactttcttagaaaacttcggaatactgctctatgggcacacagaaccatgagagtgtctgcaacagcgaccagggagcagtaggctggaggaacccctccttgcctgtgccttcaggagggcaataacttctccaagcccctatgtcctcgtctctcataaaatgcctctttcataaaatgtaagtgctttctaaataaactttcagtcctaatatgttttgattctgacatacactattttggtagctggatggataaaatctatattcacaatagaaaaggctcaattataataaaagattcaagatcctttttaaatgtagctcc

SEQ ID NO: 834322 - DNA, 514 bp, Homo sapiens
atgcataggaatgcctagttcttgtttttaattcaggttttagtttagttcttttgttgttaatttctctcacttaagaacctgctgagcagattcgttgagtaagaagtrgaataaaatcatacttaacttgcctcaaaattaaatgaagcttactctagttagttgaagcccactccagcttaaaacttcaataatatttaaattatataaaggtgaaagaaaatactctgagtcagtaaagttcacggcacatgcaagggtgtgtttgcagtgagaactttgacaatgaggagtggctttcatctgtcagtatgtaaggatgtggatgacatcctggaattggtatactaagagtggggctgatggcagcacttatgagtgggaggcttgttgttattttagcagattgttaaacacatggaaacatgatcttttgaggccttttaggaaataaatggctaaaggatgacatttcaccgtgtcttccccattttctgtgttaaaatgtacc

SEQ ID NO: 834323 - DNA, 572 bp, Homo sapiens
tgcttacaaaaatttcagtaacatgataaatgcttataataaactaccaaaaagcattcacaaacggtaagcttatttcttataaaagactaacaacaactgacaacgttgagaaagtacttaacaagkgatttcttcttttctctcttttcttttttagacagagtctcactttgtcactcaggctggagtgcagtgttggcatctcagcttactgcaacctccatttcctgggttcaggcgattctcgtgcctcagccacccaagtagttgggaccacaggtgtgcaccaccacacctggctaattttttgtatttttagtaaagatggggtttcaccatgttggccaggctggtctcaaacttctgacctcaagggatcccccccgtctcagcctcccaaagtgctgggattacaggcatgaaccaccgctccctgcctcttcttttctcatataatttgaataaattattcctacgaggttctatgggtcccatggcctccaaagttttaatacttgtcagaattattcaaaacattttaaaaaggaaaaaataatcttttatactca

SEQ ID NO: 834324 - DNA, 572 bp, Homo sapiens
tgcttacaaaaatttcagtaacatgataaatgcttataataaactaccaaaaagcattcacaaacggtaagcttatttcttataaaagactaacaacaactgacaacgttgagaaagtacttaacaagtgattycttcttttctctcttttcttttttagacagagtctcactttgtcactcaggctggagtgcagtgttggcatctcagcttactgcaacctccatttcctgggttcaggcgattctcgtgcctcagccacccaagtagttgggaccacaggtgtgcaccaccacacctggctaattttttgtatttttagtaaagatggggtttcaccatgttggccaggctggtctcaaacttctgacctcaagggatcccccccgtctcagcctcccaaagtgctgggattacaggcatgaaccaccgctccctgcctcttcttttctcatataatttgaataaattattcctacgaggttctatgggtcccatggcctccaaagttttaatacttgtcagaattattcaaaacattttaaaaaggaaaaaataatcttttatactca

SEQ ID NO: 834325 - DNA, 505 bp, Homo sapiens
gtacaagaaaaaagagaaagaataaatgaatgaaagaaaaaactacagaccaaatatctcccatgaaaaaaatcctcaaccaaataracacaaaagtcctcaacaaaatattagcaaatcgaatccagcaatatgttaaaaagataatacatcacaaccaaatggggtttatcctgggaatgcaagactgcctccacagtcaaaaatgcaatttattatattaacagaatacaaaagaaaaaccacacaattatctcaatagatgtagttaaaacatttgtgataatctccattagtggtaaacactcgcaacaaactagaaatagaaggaaactttctaaacttgataaaggacatctaacatcaacaacaacaaaaccctaccatctagcaccatacttaatggtgaaagactgaaagtttttcctctaagattgggaataaagcaaagatgtccactgtcatcacccatactcagcattatgctaggagtcccagccagtgt

SEQ ID NO: 834326 - DNA, 623 bp, Homo sapiens
tgagcagagaggctgtcaaggtattttactagggtttattatacctatagtttttagagattagatttgaccaaagtatttcaaattggtgagtttcattttacttttttatatatcagtttttatgtttataaaaatgaaaataattcatatctcacaaagacattgagatgtatatgaaagtacttcaagttgtttggctaaaagacataaaatatatatagatacatactgtaatcacagccattctttggtttaaacaatatgtttccatatttttaaaatttaggttgtagaatgagaggtggtagtgttgtttctaacttaagacattctacctaaatttatattaaacagctaaaatataacattttaaatttattttccattgcagtggggaaggagctacatttacacagtctcatcatcatttgccttctaggtattcacgtccccaggctcattcttcagcctcaggtaatatatttgaaaaagcctaggaaaatactcttttaagtaggttacctgggaaatgattgacagtaaatataaataaacaaatatccagggtttttttktgtgtgtgtgtgtgtgtttttttgtttgtttgtttgttttctgaa

SEQ ID NO: 834327 - DNA, 637 bp, Homo sapiens
actcttgttgcccaggctggagtgcaatggcctgatctcagctcactgcaacctcctcttcctgggttcaagagattctcctgcctcagcctcccgagtagctgggattacaggtgcccaccaccacgcccagctaatttttttgtatttttagtagagacggggtttcaccatgttggccaggctggtcacaaacacctgacctcaagtgatccacccgcctcggcctcccaaagtgctgggattacaggcgtgagccactgcacctggccttgtcaaggtctttttataagatgcctgggcaatcttgtctccttctttgtagtcacacctaatgctttatgcaaaattttattaccgtaattgattaccatcgtgttcatgaaagtcggtttcaagtgattcttggctgtttccccaactcaactaccctcaggagataacaatttgtcataactaagaatatttgaaacgctctgaagctctaaagacagttaaagaagtacaatgagtctctggtggggaytacattaagggatataagagtagcctgtggttaagcactgaggtcttctttatcacagagcaatggcagatgctgcaaaaggggaaaatactttgaagattaaagtctggc

SEQ ID NO: 834328 - DNA, 609 bp, Homo sapiens
gccaaaactatgctttattcaaaaaaatgaatttgaagtgagtgttttcttagcttcgaattgaggatttgttttcttagttgagcagaaagctattgttctgtgaagaagtacagatgctaaggaatgcaagrgaacactcatttattccatggtttccaaagcaagagaaagcaaggagttatttagctgtatttaatacattctttccaatgcctatttcctgaatcttctgtctattatttcagccattattgctgtaaattacttgagctagtgactgagggtatggggaaggacttagccatgggctacatggcaatgacctctaatcagagctctccacgtggctctgttcgactcactggaagcatttccacctctttgcctgctctgtctgttgcatggtgttatgatatggcttagtgcaaatcaacacctgaggcttgagatgaccagtgtgcagggcccataccagctagcttttctaaaacagaggacaggacactggagagaacttggataaggagtgtcaggtgcaaggagtggtggtttgatgattacactgctcaccactctgcttttgcagttcattgacaaaatttcatt

SEQ ID NO: 834329 - DNA, 652 bp, Homo sapiens
atgtctcaaagcccactggaattattcaaaccagccaatcttagcttgcttttcctgcctcgcccatgcctttccacaggaactacaataaaatctctcacccacacttctcttctttcctctgccccctgactgacacaggagtttccttgtgtgataccctctgcaggatgtgtcatgcctcaagggctaagtcaggtgggtgcccttcctggacttagcttttcccctttgctataaactaaacatatatgtcccctaaaagttcatatgttgaaatcctggcttccaatgtaatagtatttggaggtagtacctccaagagatgatcaagtcataaggtggagacctcatgaatgggattagtgtctgcataaaagaggcttgagagatctcttttgccccttctactatatgaagacacagggagaagatggtcatctatgaaccaggaagcaggctggcaccagaaccaaatcagctggcacttggaccttggactttccagcctccagaactgtcagaaatgaatttctgttgtttgtaagctatccaggctatgatgtttttgtaatagcaacccaaacatactaaggcactttcatttagaaaaatatyattcctggcttccatcatctgtgtctttgttgat

SEQ ID NO: 834330 - DNA, 439 bp, Homo sapiens
atcataactgttgattcccctctagtaaatgctaaactatagtagagtcccacgtcttacttgggtcaataggtgtttatgcaggatttgccctagaaacagattaaattcaagaatctggtaaaggtgactattgaaaggaaatccttgaaacaattattgttaagcaacaggtttaagaggcaagttttaggtttaaacaacggttgaacaatggaagattaaaatgatgaagtcttttgaatattgtgatattatttttcctcaattctcccaagtttcttattacatgcttttggatgggcttttgcttttaaccgagtatgtcaatactaargcaccaatacggcagttccttccaaatgtgaccatacagtcttctgtttttaaaatgcacatattcttcatgtataattgatattcacaccatattatctac

SEQ ID NO: 834331 - DNA, 605 bp, Homo sapiens
ggatgccacttaaaattttgtttggtacttttctgtgatgattggcttgcttcataagtgttggtttagatctacgctgtccaatactgtaagcattagtcacgtggctaaacattttaaatggtttaaaagtaaaaattcagttactcaattgcacttgccacatttcaggtgcccagccgctacataggctagtggctaacatattgactgtgcagatagaaaatatttccatcatcacagaacgctctgttggagaatgctgatttagttgctgtcacaaaataaaatggtttagagaactaggatgagaaatgttaggagaacagaagaaagcacatcaaaaatttaaatgatcttaggaaatgaaccaactaggatatttcactgagggtcagagagattagttaattttgtgattctaaatatgccacaataaatggaagcttgaaagactacctaaactaaaaatacagctttctaaataaggtgactcgaagtaggtaggtctatatcataatagctgaagctgagcytgaatgactcaagaagatgattgatttgaggaaggttgttaaatcagttctaagaatctatggattaat

SEQ ID NO: 834332 - DNA, 521 bp, Homo sapiens
gtcatagtagctaaaaagtggaaaaaatccaaatgtccatcaactgatgaataaagaaaatgtggtattttcacagtggagtacccatttggctataaaaaggaatgaagtgctgatacatgctacaatatggctaaaacttgaaaacattatgctaagtgaaagaaccagtcactaaaggtcacttacattttgtatgattccagttgaaatgtctgctgtaggcaaatctatagagacagaaagtagattagtgtttgctagaggctaagggtcaggggaatggggagtgacagcttaatgagtatggggttggtgaaaatgttctgaaatttggaattatatagtggtaatggttgctcaatattgtgaatatactaaaaatcactaaattatatactttaaaatgattacartgatgaatttcattttatgtgaattttgtctcaacccctctacccacagcttacatttatacttaatcatcaaatattgaatgcttttcccctaacacaaggata

SEQ ID NO: 834333 - DNA, 549 bp, Homo sapiens
atcgtattatcctccactcatagatgagtgaagattctccttgttctcttggagagaacaaagaaaaccagtagaaattgctgaactccacatccccctgaatcaaacacatcttcactcaaagatcatacttgctatgtattctaaccagacctcctaaattggctgccctgggttagaaaattccaaaaggccactgaccactctcagcattacccatggaataactgtgtttgtttatattttagggaaaattcccaaagaatgtattcactatcttctcataactattatctgcagagatcttcatgctgagacctaacgcttccataaataagaggttcagctttgccggagccctacaggaagaggttatgaaatactgggaacttctcgaatttcccaacccaaagccccctccctggatttactccrtgaccccagtgcagatatttctccctccaaataaacgtacctcacatgcataagggagattccgcaggtcctttttaaggatgcagaccttgggaagcagcaaagtatttgtgc

SEQ ID NO: 834334 - DNA, 622 bp, Homo sapiens
cttactaagaggaatattgccctggagtagggggtccataaactttttctgcagtgagctttgtagtgaatattttcagccctccagacctacttagctctgttgttgtagtacagaagcagtcacaggcaatatataaacaaatggaaatggttgtgtttcaatacaactttatttatggagcctgagacctgaattacatataattttcatgtgtcagaaagtattacacttctttttatattatttccaaccatttaaaaatgtcataatcattcttagcaaactggccacacacacaaaataaaataggcccaggctggattttaccttgagttgtctattaccaattctttcaaaagaatattgtattcatgtcaagggcctcatttaatagtttttgcagggaattgatgagcaggtgaagaggagagtactgagaatatcaaaggagttttagaaccttttttcacaaaaaatattatgctcttgacakatgttttttgccagaagtcataatctcatgaggctcacactttaccaaaaccgaaatcttgattttcctcaaacctgcttctcctctaattttctctatatcacaaagcggcagcaccatccatcc

SEQ ID NO: 834335 - DNA, 624 bp, Homo sapiens
attgtgaattgtgcggttacaaacatgcatgtgcaagtgtctttttcatataatgacctcttttcctttgggtagatatacagtactgggattgctgcactgaaatcccagtactactttaaaagttctacttttaattttttaaggaatctccatactattttccatagtggttatactagtttaccttcccactaggaatgtaagtgttcccttttcactacatccataccaaaaatatgtatatattcttaacagttaaggattaaaagtgagaaagagttaaaaataaaatcttaagctaatgtttgtcaccaatatttcaacagtagaattactagataagcaaataaacaaaaaaatcgagaagtttagtcatttcatattggatatttctatgtaaccaggcgtgtcctacatgcttgactggatagttttccacacttaaccattaagttggttatagtataagcacagacagcctaaaatcaagtaagtactaaaccaatacaatttcaactttgaaataactgaaaaaaaatcaaggaggatacrtgccaaagtgttaacgtttagctcaagattgtaaaattacaatacatcttttatcccttagagttcttt

SEQ ID NO: 834336 - DNA, 624 bp, Homo sapiens
attgtgaattgtgcggttacaaacatgcatgtgcaagtgtctttttcatataatgacctcttttcctttgggtagatatacagtactgggattgctgcactgaaatcccagtactactttaaaagttctacttttaattttttaaggaatctccatactattttccatagtggttatactagtttaccttcccactaggaatgtaagtgttcccttttcactacatccataccaaaaatatgtatatattcttaacagttaaggattaaaagtgagaaagagttaaaaataaaatcttaagctaatgtttgtcaccaatatttcaacagtagaattactagataagcaaataaacaaaaaaatcgagaagtttagtcatttcatattggatatttctatgtaaccaggcgtgtcctacatgcttgactggatagttttccacacttaaccattaagttggttatagtataagcacagacagcctaaaatcaagtaagtactaaaccaatacaatttcaactttgaaataactgaaaaaaaatcaaggaggatacatgccaaartgttaacgtttagctcaagattgtaaaattacaatacatcttttatcccttagagttcttt

SEQ ID NO: 834337 - DNA, 483 bp, Homo sapiens
ggtttctaatcaccatagccccagatgaatcttataatcrgacatatttgatttgagaaatgatgtattacttctgccttcttcacacaacatacttatcttgttgtatatttgtattgtgtgttgttaacctactttatggctttataagctccctataggtataagcacagaaggcatgtcagtgtttgcacttttctgggaagagaattcacagcttttgccctatactaaaataataataacaataataatttttttaaaaaatcattgtctcaaactaaattaaaaatgattagaaaatgtgttatatactattttatattttaagcaaccaaataccagaaactgcatttcttactaaaagtatttctgctagcatttgacaactgtcctcccctaaacactgttgcacaaatggattttaaaattgcatgaaactgggcctaattcctcagacccagtatcccacagtaataagtt

SEQ ID NO: 834338 - DNA, 524 bp, Homo sapiens
atgtgtttgatgtgtcccagtgttgatttccattcatctggtggaacagttatctcttccaattttattgtataggttggatagggaaagattttactgatgtatgtgggtcttaggatgttggtttataggagtgtgttgacttttattgtagtttagtgcagcagtgtagtctccgtgtagtttcttcagctgtaatccatgctagtgatgttcgctagtatcttagtggcctaggctgaggatttgtgttgttggtggtgtaactttgccagacatcggcttgtcaggctgtttctcaggttaggagcatgtacatgcgcacggtgagttggccaatttgaggtccggctcacagggatttggaccatggggctgttactctggctgggggcatgggtgcacaatttcctgcccaggctgggggcatgccrgccaggtgtggcccatggggctgtttcttagtcctggtacatggctgcctggcttctcagctggcctgagtgtatgtctgttggaggtgt

SEQ ID NO: 834339 - DNA, 564 bp, Homo sapiens
cactcccttctattcttgtgattttatgcttctgtatctgaagaaagacgatctaatcaagcccaagtgcttaattaacattttctctgcagtaacaaaaataaaatctacactaaagctaattacttagcgatttaacaataacttctgcagactctaaactacattcacagtggctcacaagacagtgctcaatagatacaatttgtagcttaataaaacatcataccatttgatagattttaaaaaatcataaagcacctaacttgctaattaaattcttaatgaaacacttaataatcttaattaaggtacctagtgattttaattatgtgcagctatagcatgagacttacaatgatcatttgccatctttgctcttaatcacacaattgagaaatctcctattactaccagacagtcacagctgtctagtattgtgacctgtagaacaggacacagtcagttacaccacttcatcagatatctgctgcrctattttcttcaatctaccccaagattgtaggctgatattctttacgaacaaagcagccaaatctgcct

SEQ ID NO: 834340 - DNA, 641 bp, Homo sapiens
actaaaaaagcttcgcacagagagacactcaaaaacactacagatgtgtcatactacaattacaaaaacaagttcaagtaactcacagyaagacagaaaaaaatcagatatgcgaaaaaaacagaacaatcagaaaacaataaatacaatgacagacttaagtctcaacacattaaagagaaaagcaaaaactatgaacgacgttacagacataaatttagcaacttaggtgaaatagaccaattcttacaaaacacagactattataactcccctagtataaaatgatcattttaatggccataagagctattaatgaaattaaatatttaatttaaaattccccaaaacagaaacatctaggccaaagtgatttcactgcagaactctaccaaatattaaaagaagatttaacatcaattatacaccatctccaaaaaataagagaggaggaacatattcaatttgttttattcagttagcattactaataccaaaactaggcaaagatagtgcctaaaacaaacaaacaaaacacaaaaacaaaagctggggaccaatatccctcataaatatagatgcaaacatcattaacaaaatattagcaaataaaatttagcaatatattaaaataattacat

SEQ ID NO: 834341 - DNA, 520 bp, Homo sapiens
agtgcttaaatatatttatgaattcatctcaatttctcttyatctctttttaaagagctgtggtatatgtgaaaacgtttgtagcaggtagaggtttttgaaaattggctcatttttaacccagtcgatactgttgtttcatgtcaaaagcaggatatgatgcagtgccctgatagatctgatttactgttctctaggactctggggttgtataccatctatactctcccaaatttgatggtgtcaatatgacctaacgtttaattatttgcatagcctatttaaaattaaaatagcaacaggctctgagttcttttcaagctttaatacactctccctttaaaaatatatttttcataaattactctgctgtctggcaggccatcccattcttcagttcctgtaataaaaggggatggtgtgatgtgggtgtgaaacgcagaggagagcaccatggttaaacaagagcggacactgatcaaatccattaatcaaagtgccttttaaatctctgcaagtt

SEQ ID NO: 834342 - DNA, 579 bp, Homo sapiens
atgtttcttcattggcttagggtaaactcaagtccatttccagaggtcatttatagatcaagactcatattgactacgccattgtaaaaacatggtttccaaggttgctgtcgtcttggctattcagttttgcaggaagaagaaagagtgtagaggagtgtccacgggggattttattgaccatgccagaaagtaggacacatcactatcacttatatgttatgagtgggtagaaataatgtgtctcactcaccagtggaatgcaagtgttcaccccagtggtgagggaagttgggaagtgccattagccatgggtttaacagttttgccacatgggtactttagattttctcttagcttatttgtattttctgattttgcacaatggatctatatttctaatacaatgtaaatataaataaattaataaatagagaacaagcagtaaggaagtaagggtagggagtatagacaatcccttctaagaagttttgcaggtgccattactggagtgagaaactaggttaagaaaaggtttytaaatatgaaggttctggcatatttttgaaagaattatcc

SEQ ID NO: 834343 - DNA, 619 bp, Homo sapiens
ttctttgggataatcatttaccagtgagaaataacacaaatgaaaccaagaaatatcagtgactgatcygtaattcttctagccagctctacatagcaggaatatttgagaggaggagactaggtaatgtgctgagaaaaaaatatgaagttataagcagctgaaaaatacttaaattgagcttgaaatagaaaacataatgaagattggggacccaatgaatatttaaagctacaagaaacttttccagagataagaacatttgaatccatgcattaaaagggcccatagagacatggtggctcacacctgtaattccagcactttggaaggccgaggtgggaggatcacttgaggcccaggagtttgagaacagcctggccagcatggcaaaaccccctctccactaaaaaataaaaaataaaaaaactagctaggcagggtggcaggcacctgtagtcctagctacttgggaggctgaagcgtgagaattccttgaaccagggaagcagaggttgcagtgagcaaagattgtgccactgcactccagcctcggtgatagagactctgtctccaaaaaaaaaaaaaaaaaaaaaaagtccctacagaacacctatta

SEQ ID NO: 834344 - DNA, 574 bp, Homo sapiens
caagtaaacctttctaggcctcacttttcacaattataaaaatgaatgaaagtaaaccacacctttctcatartgtgtatgatatgaataaggcctatgaagtatatgccatagatacactgttaacataggttgggtgggggctgtaggactgtgctggggctctgacctggtggcatcctcagctgcacccagcccaaaggcctattgtggaaagatgactttctctctctcttcctcctccctctccttctctctcttacccttgcacttttttgttggatccttccctctcctcccaccctcacatctaaattttctttccttccctctttcctgaattacagtagatctaagtaccttttcacttaataacaggccccaccaccactggtttccttaaatctcacctttgttaagtatttggttttgatttttattttttctttgttcttttttttgtttgtttgttttgttttgtggtaagaacacttaagctaagatctacacacttagcaaagtttcaagtgtataatcctggcctatgttactttccctgtgttacctaaagaaa

SEQ ID NO: 834345 - DNA, 540 bp, Homo sapiens
ttataaggtgcagcttaacattgggtagtcatggagataaagatgacagtagacactggggcctaatagaagagtgggcaagggttgaaaaamtaaatattaggtactatcttcagtacctgagtgtggaattattcataccccaaacctcagcatcatgcaatatacccatgtaataaacctgcacatgtacccctgaatctaaaagttgaaaaaagaaaacatatgtgtacacacatacaaatatacataagcatatatgcatgtataatttataattataaataataaaacaagaagtctgaataatttcatcaactgcaaaattcactcataagcagagaaacagaaacaaaacctaagatcccataggtttgttgacatccttttcctttttgaactaagccatggtttgcaaatctctcataagtacggtgacagtggtgacaaaaattgtctatgtctataaagccctgtgaccatgtaaagcctttcttgaacagtgtaggctggcaaggtggaatgacattaaaagtctaa

SEQ ID NO: 834346 - DNA, 504 bp, Homo sapiens
cctcacaaaggtgacctacattctagttttaactgggattctcctggcttgggtagtgaaagtccagctttttagtaatcccccaatcctgggcacactgcaatggttggtccccctaacctggacyccttcaattatcccattctgacatattagtttggtgcaaaagtaattgctgcttttgccattacttgtaatgaaagtaatgccattacttttaaagaagccatgaataatgaaagctatagcttttctccacgaaagagaaaaatggcaagagcagcaattacttttgcactaacctaataatagacctttttctttttctcatgaatggaaaaaatttaggataggtcaaaattaagcccagggctttcatatgtgaacaagtttatgtctatgtctctggagagaacttgcagatatgggcataaatttttctcaaagatttcttaatacttctcatttccccatgctcatctatgtgttgtccttctgaaaatt

SEQ ID NO: 834347 - DNA, 607 bp, Homo sapiens
ttttttttgcttctctctaagaataattatagatataaaggcttggaattcattttaaacctgtgatagtgtgactacagttcaacataaagattgataatgtagtgtctgttatgactcatatcttagccagtttttgttccccaatgtcagttttcatgttatacacatttccttttagttgagtatgaagagtagagctagcaacatatatttggagtttttgagtttgtaggcatcattacaattgtaataattttatactcactgagagggccacagttatgttttaggtatattgtaattgcctatgattcctagctttggttggcactgctatttggacattagttgttgatcatcaacctattcacaaattgttattcaacataatggaatattctgaacaagaaattttgcaatgattgtgaaaagttcatacattttggctgtgttgaccatgggcttcagacttgtttccaagaagcatcaaaataattaaaactaaatttcaggcacaataaatagccatgtcaacttccatatctacatgataaagtgagaacggtttgggagtrtacagctgggtgcataaacttacaaggga

SEQ ID NO: 834348 - DNA, 578 bp, Homo sapiens
gaaaagctttaaactgcaggaggaagtgtcttagggaactagggaacagccattgcagctagagataagaagcattaaaaataaaactctactcccttcccagaattacagctgtgggaaacmctggaacacggaggcagccacctttctgaaacctaaggacataattcgcctaaaaccaaggcttaattagaacagcaatgctcctcttaccaccacgctcccgggctgaaaagcctccagtgacatctaacagtgattaagagctttgagagttacaaaagtgtgtgggtagagactccgagattgatatagtttggatgttttgtcatctccaaatctcatgctgaaatataacctttagtgttggaagtgggcctagtgggaatagtttgggtcctgagggcagatccctcatgaatggcttgtgctgtccttgtggtaatgagtaagttctcactcaatgagtttatgcaagatttggttgtttaaaacgagcctgataccttccccctgtcattcttgctccctcttttgccatgtgatgctcctgctcccattttgccttcccctatgag

SEQ ID NO: 834349 - DNA, 538 bp, Homo sapiens
taacacaaaaaagctgctaaatatctgctggcagaatagaattaatagtggaaaaagcaagaggatgctattctatgtcattacttctattcatctctttacttttctgccacacacagaaactgggttctcaacatctccaaggcttgattcataggatgagtaaagcaagctaatgacaacgtgcattcaagtgatggctaaataggaaagaggcccacactggtgaatacaaataaagaattcttcaattaatgttaccagtcattctgcctttgccactgctcttctcctttcttttatcttatttcaaccctcccgttctgccaaagtctgcgattataatggtgtatactcatcaagccacacagaaccgaagagtgtattctttagttgaatgccacctacttcttaaagacttccctgattgccgagctggaaatcatctctttctcttttgaattctgtaatacttgtgctatcacagtagctgcctctgtgcaygaaaatctctactgaatgaataaataaaggaatg

SEQ ID NO: 834350 - DNA, 624 bp, Homo sapiens
tctgtaaatatctgttaagttcatttgttctagaatatagtttaagtccattgtttctttgttgactttctgtcttgatgacttgtctagtgctgtcagtggagtgttaaagtcctccactattattgtgttgccatctatctcatttcttaggtatagtagtaattgttttataaatttgggagcaccagtgttaggtgcatatatatttagaactgtgatattttcctgttggactaatccttttatcattatataatgtccctctttgtttgtttaaactgctgttgctttgaagtatgttttgtctgatagaagaatagctactcctgcttgcttttggtgtccatttgcacggaatatctttttccacccctttactataagtaaatttgagttcttctgtgttagttgagtctcgtgaagacagcagagactttattggagaattctcgtttattctgccattccgtattttttaagtgaagcatttaggccattcactttctatgttagtattgagatgtgaggtactattctattcaccrtgctattttgttgcctgaataccttgtggtttttttttgttttgttttctgttttcttttctttttttttaaacat

SEQ ID NO: 834351 - DNA, 509 bp, Homo sapiens
actaaaatattcactcggatttaacttttttttctttttttcttttktttttgagatggagtctcacgcggttgcccaggctggagtgaagtagcgtgatctcggctcattgcaacctctgcctcccgggttcaagcaattctcctgcctcagcctctcgagtaggtgggattacaggtgtgcaccacaatgcctggctaacttttgtatttttagtagagatagggtttcgccatgttggccaggctggttgcgagctcctgacctcaaggtgatccacccacctcggcctcccaaagttctgggattacaggcatgagccaccgcgcccggcctcggatttaacatttttaaatatttaaaacgttcccaagacttaagttaaaaggcaatgtcatatagtcaagtaatttgacatctggaagtgattcttaaaattatcctactcaaagatattctttacagcattatttacattagtaaaaagcttgggggtggccaataagcaa

SEQ ID NO: 834352 - DNA, 456 bp, Homo sapiens
gggtgggctgcttggtagcaatacctgggggcccagtgaggcaggaaaccrtctcctctgcacctccactttcctgtgctgaacgcaggcacctctgggtccacaggaggggtcaatggttacataaggggcactgtcatcaagtgtttgtctgattgtaactgtaataaaaaccatatccatagaggtggcatcctcatttgattcccccaaaattcagtattgtagggacaattattatccccattgcatagatgaggaaatcaaggatgggaggccagaatttacctagcaaagagtcagtgttctatccaagtggctttggagcaggaagtaagcgagagaaggaaaaacagctttgtatcacatgagaaagagcagacactaagaggctctgtgcagtgggctttcctgctctaaacagaagacagcgagaggggtccggtagagtgcacc

SEQ ID NO: 834353 - DNA, 456 bp, Homo sapiens
gggtgggctgcttggtagcaatacctgggggcccagtgaggcaggaaaccatctcctctgcacctccactttcctgtgctgaacgcaggcacctytgggtccacaggaggggtcaatggttacataaggggcactgtcatcaagtgtttgtctgattgtaactgtaataaaaaccatatccatagaggtggcatcctcatttgattcccccaaaattcagtattgtagggacaattattatccccattgcatagatgaggaaatcaaggatgggaggccagaatttacctagcaaagagtcagtgttctatccaagtggctttggagcaggaagtaagcgagagaaggaaaaacagctttgtatcacatgagaaagagcagacactaagaggctctgtgcagtgggctttcctgctctaaacagaagacagcgagaggggtccggtagagtgcacc

SEQ ID NO: 834354 - DNA, 486 bp, Homo sapiens; identical to SEQ ID NO: 824725

SEQ ID NO: 834355 - DNA, 623 bp, Homo sapiens
tttctttcttctttgcagtgctatatcggaaaggccctccattttaccatgcaaggttcggagtgatttttaaataaactaatgggttaaagggacacaaggaatttctggcctctaatttaactttttggtgccataggaacaaaagtcatgttcttcctggcctgatacgaatagatgctatatgttcatgcctccttacacactaatgtcattatactatatataggatgatgcatagtttatgataatatatgttctagtgttaaacactgagttaatctgtgccgtaattgttcattttaacatcacttaggccaggtgcggtggctcacgcctgtaatcccagcactttgggaggccaaggtgggtggatcatgaggtcaggaattcaagaccaacctggccaagatagtgaaaccccatctctactaaaaatccaaaaaaattagctgggcatggtggcaggcgcctgtaatctcagctactcaggaggctgaggcagagaattgcttgaacccrggaggcggaggttgcggtgagccaagatcgcaccactgcactccagcgtgggtgatagagcgagactccgtctcaaaaaaaaaaaaaaaaaaaattagtta

SEQ ID NO: 834356 - DNA, 646 bp, Homo sapiens
ctttagtttgcctgagatgggcaatatattatggwaattaagtgtactggatttggagttaattaacatggattttattctcagcaataccacttactagctatattgttatgaataacttatataactttttctcaaattttcttttcgcataatggaagaaataccatgtaatttacaggattgatgttttatgtagattttagcatttaatttcactaagacacttatatggtttggctctctgtccccactcaaatctcatctcaaattgtaattctcacatgtcaagggagggatctgtaatccccatgtgtggaggaagggaggtgattggatcgtgagggggagtttcccccatgctcttctcatgatagtgagtgacttcttgtgagatctaaaggttttacaggggctcttcccccttagctttctcttctctctcctgctcccttgtgaagaaggtacctgcttaacatttggccatgattgtaagtttcctgaagcctccccagccatgtggaactgggagtcaattaaacctctttcctttataaattacccaatctcatgtagtacctttatagaagggtgagagcagactaatacactatgagatatgtactattattatccccctttcacc

SEQ ID NO: 834357 - DNA, 486 bp, Homo sapiens; identical to SEQ ID NO: 824725

SEQ ID NO: 834358 - DNA, 612 bp, Homo sapiens
tgaagtggtttctgatggagatgaggaacttattcagagttggagtaaaggtcactcttgctatgcaaagagactagtggcattttgcccctgtcctagagatctgtggaactttgaacttgagagagatgatttagggtatctggcagaagaaatttctaaatggcaaagtgttccagaggaagcagagcatacaaatttgaaaaatctgcagactgacgatgcagtagaaaataaaaacccattttctagggagaaattcaagctggcagcagaaatttgcataggtaataagaagctaactattaatcaccaagacaatggggaaaatgtctccagggcatgtcagagaccttcacaacaggccctcccatcacaggcccagaaacctaggaggaaaaatggtttcatgggtcaggtccagggtccccctgctgtttgcagcctagggacttggtgtcctgcatcccagccatgccagccatggctaaaaagggccaatgtacagctcaggcctggcttcagacrgtgcaagcctgaagccttggcagcttccacatggtgttgagcctgcaggtgcacagaagtcaaaaattgaggtttgggaacctc

SEQ ID NO: 834359 - DNA, 509 bp, Homo sapiens
ccaacctattgcttattggccacccccaagctttttactaatgtaaataatgctgtaaagaatatctttgagtaggataattttaagaatcacttccagatgtcaaattacttgactatatgacattgccttttaacttaagtcttgggaacgttttaaatatttaaaaatgttaaatccgaggccgggcgcggtggctcatgcctgtaatcccagaactttgggaggccgaggtgggtggatcaccttgaggtcaggagctcgcaaccagcctggccaacatggcgaaaccctatctctactaaaaatacaaaagttagccaggcattgtggtgcacacctgtaatcccacctactcgagaggctgaggcaggagaattgcttgaacccgggaggcagaggttgcaatgagccgagatcacgctacttcactccagcctgggcaaccgcgtgagactccatctcaaaaamaaaagaaaaaaagaaaaaaaagttaaatccgagtgaat

SEQ ID NO: 834360 - DNA, 582 bp, Homo sapiens
tgtaggacagtctgctggcaaggaattccctcagtttttgttttcctgagaaagtctttactgctccttcacttgtgaaggataatttcgctagatataaaactctaaatagaggtagagcaagatggctgaatagaagcctccaccaatcatcctccccacaggaacaccaaatttaacaactttctacgcaaaaaagaaccttcataagaaccaaaaatcaggtgagtgatcacagtacctggttttaacttcatatcactgaaagaggcactgaagagggtaggaaagaccatcttgaattgccaacgccacccctcctcagttcttcagtaatggccacatggcacagaagacagaatctgtacatttgcgagaagagcacagtgcttgtggaattttgcattggacctcagtgctgccaacaccaggcagaactcagctgagacccacagagagaacatttagatcacccctaatcagaaggsaatcacccatcccagcagttggaacttgaggttcagcaaccctcaccacaggctaaagtgctatgggatcctaggtaaacttgaaaggcaacat

SEQ ID NO: 834361 - DNA, 583 bp, Homo sapiens
agtgagtcaatttataagtataaaaatagatggtttagaaaccaaaaataagcaccacacaaaagcagattatacatacaccatcaggcctttggaatrttaaggcaacataaatatctcaagcaattttagaagaatgctttacttatataacagatgttattaaaacatctcaaaagaggcagggctcacaatttttttcagtatgaggtcttcccttccatttttgttaatatattaatgattcttcttaaatactgtaccataattagtctagattaacaaatgggctatcaaagccactatcttgttggctagatagcggaacaattaattttcttgaaggctgctgacacactgaagatggtaatgtactgctcagttttttgaaatctgactttaatctatcagccttatgacgagatgggtgtccacaattcacactgatctttcctggctccaaatacgtggtttcttctgacaggtatggagtttgataacgctgacatttcattgtttgacaaatcatattactttcctctgtatctgaaagataaccggatggtgaaaactgtttggattt

SEQ ID NO: 834362 - DNA, 597 bp, Homo sapiens
gacataccttcctcactaagcttaatcatttctagcttttgatttaaagtgagagatgtgtgactcttcctttcacctcaatgcttggagsctgttgtagggttattaattggcctcatttcaacaatgttgtgtcttaggaaatagaaatgctcaggtgagagaaagagagagagagacagcaaacagctggtcagtggaggagtcagaacacacacaacattttttccactaagtttgccattttatgtgggagcagtctgtggcccttcaaaaccactggaatagtaacatcaaagatcagtgatcatagatcaccataacagacgtaataataatgaacaagacagaaatatttgcagaattaccaaactgtgacaaagagacacaaagtgagctattggaaaatgacgccagtagacttgctggacacaaggttgccacaaacctgcagtttattaaaaaataatgcaatatatgtgaaacacaacaaagcaaagcataataaaacaaggcacgcttacatatattgattttatagatatttccagtagaatatttaacaaacctacattccctcagtgtttcctttatctt

SEQ ID NO: 834363 - DNA, 599 bp, Homo sapiens
atagggtttaaaatgttcagtattcagcaaaaatgtgaaacatgcaaaamaagaagaaaatatgacccataaacagaaaaatagtcactcagttgaagctgtcccaaagaagcccagatattgtacttacagatgttgtcagctattctaagtgttttcaaagagctaataaaactatgtctaaagcagggttccccactcggcccggactggtactggtccatggcctgttagaaactgggctgcacagcaggaggtgagcagtgggtgagcaaacattgccacctgagatctacctcctgtcagatcagcagtgacattagattcctataggagtgcaaaccctattgtgaactacacatgagaggaatctagcttgtgcattatgagaatctaactgatgcctgatgatctgaggtacaacagtttcatcctgaaaaccagccacatccctgcacccaccaatagaaagatcgtctaccatgaaaccgttccctggtgccaaaaacgctggggaccgctgacctagaagagagaaagagaactctttctcaccaaatagacatcaataagaaaatagacaccaagtacataggaaa

SEQ ID NO: 834364 - DNA, 535 bp, Homo sapiens
tcacatataataaactatgtatgtttaaggtgcacaatttaataagttttgacatatacaccctgtataagtatgtcatcacaatcaagattaygaacacatccataacctctgaacgtttccctatagacctttataattccccctcctgcccatctctaacctgctcctgtcccgaggcgaccaccgatctgctttttgtcaataaaattaggttgcattttctagaatttcataaaattaaaatcaaactttctgtactcttttttcatctgacttctttcacttggcataattttttgagatccatccatactattgtgtgtatcaataatgagtttcttattattgcggagcagcattctatttcagggttataccacattttctttctccattcagctgttgatagacatttggattgtttacaatttttggctattacaaataaagctaatacaaacatttatgtactagtcattgtatgaacctatgcctttattattttgggtgaatacctacgggtggaatgact

SEQ ID NO: 834365 - DNA, 607 bp, Homo sapiens
gcaaacaatgcttcaataataaaccttgtgcaaatggattttcttactgttggaagtgtatcttcagggtgaattcctagaagagggattgctgattcaaaggtaaatgcaggaacaggcgcagtggctcatgcctataatcccagcactttgggaggccgaggcaggaggatcacttgaggtcaagagttcgaaaccagcctggccaacatggtgaaaccctgtctctactaaaaatacaaaaattagctgggtggcagacgcctgtctgtgaagaagcagtggatgtgtcatcagaatgagactcttctttatgctgtttttgtgattgtttttctgcttcagagtcatcagaatcatcttcatcatcgtcctctgaaaattcctctacttctgttccctcctcagggacttcttgacctgccatggaagcatcatggcttgaagaggacttaactccttcatgttctttttcttccttgattttccaggcatctctgcaaaccrtacactcagacctgagttgttttcttcattgctgtctctctcaccatcatcacggtacacaattcatcctcccactttctccatctgatctgttggtgtc

SEQ ID NO: 834366 - DNA, 549 bp, Homo sapiens
acctcccagccttccccactgattctaggtttaggcccaccattctcttcgggattccctcctttccatttttcgttttctttttggactatgctttttcctgcttcaacatctcttactctcagcacagagtctatacaaggagcatctccacatttcatgaagcccaaagagaggtgcaaagaaaccactgctatttccaaaaaaaggctggaagcaactgtttgccaagacacaggcatgctccaagagatgagcagaaaggagaaaagtgcccttcagccattattgtgctgatttcccataacactaagttttaaaaacttctctttaatttctagctccctgccaggcgcggtggttcacgcctgtaatcccagcactttgggatgccgaggcgggtggatcacctgaggttgggaattcacgaccagcctgaccaacatgaagaaaccccgtctctaccaaaaatrcaaaattagccgagtgtggtggcgcatgtgtgtaatcccagctactcgggaggctgaggcaggagaatcacttgaa

SEQ ID NO: 834367 - DNA, 568 bp, Homo sapiens
ggcaggcaccaagcattaggagattagaggccttgcctcaaactccctttatctctgcatgaatctctgagggcagctgttggtggaaagtgtgccgtcctggcaggactgaggtgccatggcrctatgaccagcactgtgtgaatctgagccccgcagggctgctttctcagggatgcctctctaggtagctaggagagctcttcctttcatcagctggtaagctccaggccttagtttgcctcagtttgcctcccagacatcagagctatcctgtactacaaatcaggtattttaataattgggaaattctaaagctttggctaactttcactggctgaggcatttgctttctttcctgttacacaaatattacgtttatgtcagtatttggtgtccagagggctttatattttggggatagatggagggttctagaagtaggggaattaaattccccctatggtccactaaaaggacatccctagaacattagactcccaggttcttgattgcaaaagactgcaatccaggctgccttttgagatacgtttttaatgtgtctctt

SEQ ID NO: 834368 - DNA, 643 bp, Homo sapiens
attttgagataatttttttatatagtgtgagaaaaaggtaaaaattgattctttgcttgtggctatccagttgtccctgtgccatttgtttaagagactattaaatccttttcctattgaaagatcttggaactcttgatgaaaatcagttgaccatagatgtttgagtcttaaatctaagccaatgattatgccattactgcactgtcttggttactgtagctttgtactaagtctttttttttttttttttgagatggagtctcactctgtcgcccaggcatgagtgcggtggtgcgatctcagctcactgcaagctccgcctcccgggttcacgccgttctcctgcctcagcctcccgagtagctgggactacaggcgcccgccaccatgcctggctaatttttttgtatttttagtagagacggggtttcctcgtgttagccaggatggtctagatctcctgacctcgtgatctgcccacctcggcctcccagagtgctgggattacaggcgtgagccactgcgcccggcctgtactaagtctttttttttttaatttcctctaaaaaaaaaaaaaccaaaaaaaaaaaaaaaamcaaaaaacggatacatgtgcaaaacatgcaggtttgttacatag

SEQ ID NO: 834369 - DNA, 565 bp, Homo sapiens
tcccctttctaactggacctgggaggagcttaggctctctttttatggaccaactgatgttcactcaggtaggatgaaatggggtgcaagaaattaggttyttcagccccttttgcagctgccaattttgaaatgatatcatttgatttggaaaatattaagtgtccaccatgtgcaggggcctttcacatgaattatcttacatgttaaaaactcacagaaactttgcagaatatagtgggaccataactccttttagggctctgggtatacaagaaatgttattattctttatttcctttaagtcaactttggactctttgagttcttgttttaccaagaattttttttttttttttttttttttagcattctgcttcagttgttattggggtcccccttcctgtcttccttcctccttccctttcttttatccacctacttcccttaatcccctctatcccctttcattccccttccattctgctcttccccacctcttcataagtcccttctgactccctcttccctctgctcttcctcctcccaccttccttttctctct

SEQ ID NO: 834370 - DNA, 633 bp, Homo sapiens
acttgctttagtaaccatgagaggtgctggtaagcgggctggaggatggaatcaggaaacctagcctgagtcttggctgggtcaactagttgtgtgacctgagtttagctgctgtgtctctcagtggttcattttcctcctctgtagaatgggaataatacaacctgtagagatctctatgtaaaggggacctgtcagtggtgcagatgtgctgggctacagtgattacatgtcaagagcctcaggtcttcccccaggctcactctgacttggagatttgcttctggctcctgtaaaccacttctgggagtcacctctggcagtgtgccataggtctgcaacatctaaatgcaaggtgaatgtggaagtttgcatacctgccctctacccccactgtcagaggcatttgaaccagagggactccatcttgaacaggggctgggtaaaataaggccgagacctactgggctgcattcccaggaggttaggcattcttagtcacragatgagatagaaggtcagcagaagatacaggtcacaagaccttgctgataaaatgggttgcggtgaagaagctggccaaaactcaccaaaaccaagatggcgttgaaagtgacctctggttgtcctcac

SEQ ID NO: 834371 - DNA, 627 bp, Homo sapiens
taaaaaatatattttatccccatggatccatggtgtagtggagaggtggatgcatgtgctcaatwtgtgacttccaaactaatatatttttcaaacttaattttttttcctaattcacatggttcagaagatactgaaaggtctatcaagagggtacaggaaaaaatttttaaaggtactaaaaggatatataaagtgaaaatgtccctttcatcctatcccagataaagactacaggttgtcctcttatatttattctgcccttctttctttagaaacaaaatctccaattttagctatactcatgaatgctcagctaaggagggcgtttcctagttgtgtccaagtcactgagttctggccagtgggaggtgagtggaggccatgtgcttaacgttcagtggctctcctagagggcgtggatgtgcctttcactttctttactccccctttcttattggctggattgcagaggtgatggtgagccatcctcctccctgcagaggaaggcaacactgtagtgatggcagagccacacaatggaatgatcctgagtccctgacacttcgtcaccattatacctgccctgctttgtgagacagaattgaaatgctatcttgtttaagc

SEQ ID NO: 834372 - DNA, 602 bp, Homo sapiens
aagatacaaatagaaacaataaaataacaagcaggaaaataaagttaaggcacagagtcttttatgttagttttccttttgcttgtttatgaaaataatgtcaagctgttatcagcttaaaatgatgagttataagatagtatttgtaagcctcttgggaacctcaaactaaaaaatatacagcaaatataaaaaaataaaaagcaagaaactgaatgatagccttagatgaaatcaccttcactaaaaggaagatagaaaggaaagaaggaagagaagattataaaacacaaccggaaaacgtctaacaaatggcaggagtaagtcattacttatcaataattacattgaaggtaaataggctaaactctccaatcaaaagacacagagtaactgaatggattaaaaaaaaaacaacaaaaacaaaacaagaaccaataatttgttgcctgcaaggaacacactttgtctagaaagaaacagattgaaaataagggtatggggacaaaatagatttccagacaagaagtataagaagagacaaacaaagtcactatrtaatgataaaggagtcaattaagcaagaaaatggaactattgta

SEQ ID NO: 834373 - DNA, 640 bp, Homo sapiens
aagaccaggtcacaccaccgtgagcgcaggcggagtcctcaatgaccagcactggcactatgtgcgggtggaccgatttggccgcgatgtaaatttcaccctggacggctatgtgcagcgctttattctcaatggagacttcgagaggctgaacctggacactgaggtgagagactagggaggtgctatttcgtggtagggtagatgctggatgagtgagtgcaggtcggtctctccctttctcttttcctctgtctctcagaggaaagacctggcattcaggctgtgggtggtggctcatgcctgtaatcccagcactttgggaggctgaggtgggaggattgcttgaggccaggtgttcaagactcacctgggcaacatagtgacatcctacctctatttaaaaaaaattttttttttcaaagacctcgcattccaattcctgaatatcctagcagcccttggcaaacttgccactcaccagaaaaaggcctgttttttttttttttttttttttttttttttttggggggggtggtggttgttaccttgcaaactcccaggccctttttcaraactaatgaaagggggttgggaaattcaaattttggggactaggcaagggaggaaaattgttccc

SEQ ID NO: 834374 - DNA, 479 bp, Homo sapiens
cagtagaaactgtactttgaattttgatctttcctgggctagccatacgtcctaccatacccatggcaggaagctgaagctccgggtcagccgcaccaggcggagggtaagcgactcactctgcaggccactgtgtccccaggtgagtttgcccagctgcaggctgatgttagtgttctgaacacgtttatggaaagccaggctaagctatgatgtttggtaggttatgtgtattcaatgcatttttgacttgcgatattttcaacttatgatgtgtttattgggatgcagcttcatcgtaagtccaggagcatctgtatgcaaaatggatgctttatagttaacaataatatctcctatagcttcaaatagccagaargagaatactgaatgtttccaacatgaaaaaatgataaatgtttgagatgataagctaattaccctgatctaatcactatatatgtatggaaacatcatta

SEQ ID NO: 834375 - DNA, 479 bp, Homo sapiens
cagtagaaactgtactttgaattttgatctttcctgggctagccatacgtcctaccatacccatggcaggaagctgaagctccgggtcagccgcaccaggcggagggtaagcgactcactctgcaggccactgtgtccccaggtgagtttgcccagctgcaggctgatgttagtgttctgaacacgtttatggaaagccaggctaagctatgatgtttggtaggttatgtgtattcaatgcatttttgacttgcgatattttcaacttatgatgtgtttattgggatgcagcttcatcgtaagtccaggagcatctgtatgcaaaatggatgctttatagttaacaataatatctcctatagcttcaaatagccagaagkagaatactgaatgtttccaacatgaaaaaatgataaatgtttgagatgataagctaattaccctgatctaatcactatatatgtatggaaacatcatta

SEQ ID NO: 834376 - DNA, 385 bp, Homo sapiens
tgggaggaattcatggtgtaaattactttctcctgttgttttcctcctttaatgcctagggtttgttgaaacgtatctcgaagatatatttcacagaactaacagaggtcctgatcagattgccccgtggggttccttcaaacctagcctcctcctgcagttgctgctatcacaagtttctcacatttggttaggacatctcagagctactgcctagtgaatctggggagagaatggggactgaggttgggtgaatatgaaagggcaaagctgatcttgatggaaaggagacagaatcctatatggatgatggaragagaagaaaaagggtagcctgtttcagccttgcagaccacatagaatgttcactgtgattattattatt

SEQ ID NO: 834377 - DNA, 655 bp, Homo sapiens
gaacctcaattcttgacttttgtgtatcttgacttttgtgctcaacatcatgtggaagctgccaaggcttggggcttgcaccctctgaagctatggcccgagctctatgttggctcctttcagccacagctggagcagctggaacacagggcgctaagtccctaggctgcacacagtatggggaccttgttcctggcccttgaaaccactttttccttctagacctctgggtctgtgatgagagcagctgctgtgaagatctctaacgtgccctggagacatttccccatgttgtcttgggtattaacattcagctgcttgttacttacgcaaatttacgcagccagcttgactatttcctcagaaattgggattttcttttctattgcattgtcaggctgcaaattttctgaacttttggctctgattattttataaaactgaatgtcttcaacagcacccaagtcaagtcttgagtgctttgctgcttagaaatttcttccaccagataccctacatcatctctcaagttgaaagtcccacaaatctctagggcaggggcaaaatgccaccagtctttttgctaaaacataacaatagtcacctttgwtccagttaccaacaagttcctcatctccatctgagaccacctcag

SEQ ID NO: 834378 - DNA, 663 bp, Homo sapiens
attctatatattcattgatttaagttgaggttaccaaaaaattgaaaaattgtatttatatggtaatctattgcccttttagaaccacctttgcaaaattrtgatagtaagagaaatctgacagagttgattccattttgcttctaacctccaaaatgtctcatcattcctgggtataggccaagctaactttgggagaaatttagtttatagtttaaccttaaagcaaggatgataatagccctttccaaaactaaattgcctttacaagaataatgaaaatccacaaggttaggactatgagagtatcctaaattctgctgaaatataagcatagttcaatgataaccagccattgtttaagaggtcacaagatttgtaacttccccaattactcctgtagataacatcactattgtagaacctaagactggccttttcagcagtcttttcagactttcacatttctgatgatcagctgacttcacctggtctcttgatgcaggtctcaatatgtccagtggcccctacccagaggcagactcactgaaggaggactgttttccaaagacctgtgacggcatctctgaccaatcagcagcatctattccctagtctcctgccaaccaaactatgcttgaaaaatcctaacctctgagcctt

SEQ ID NO: 834379 - DNA, 632 bp, Homo sapiens
gtaagactctgtctcaacaaataaataaataaagtttatgtggaaataaaagacctagaatagcttaccccatattgaagaaaaacaaaaggaaagaattgacattactcaattttaaaacctactataaatctgcaaaaatcaagacagaatgatattagtgaaacaacaggcaaacagatcaatagaagagaacaaagagcccagaaatgaaatcacacaaatacagttaactcatcatagacaatagagtacaggcaattcaatgaagaaatgaggatttttttcaacaagtgatgccagaaaaacagaatatccacatgcaaaataaaaaatatagacacagatgttatacctttcacaaaaataactcaaaattcttcaaatactcaaatgtaaaatgcaaagctaaaaagcttctagatgataatatggaaaaaatctgtgaccttgggtttgctactgcattttcagatacaacgtaaaaagctcaaaccatgaatgagaaattgacaagttrgacttcattaaaattaaaacttctgttccaaaaaagatacccttaagataataaaaagacaagccacagactcagagaagatctttgcaaaacacatatctgataaaggaga

SEQ ID NO: 834380 - DNA, 613 bp, Homo sapiens
cccactcattgggtaggagatgtcctttatgtttccttgagcagtgaaatcacagtatcatcctttcctagttccaggatctctaacggggcagtgatgctctctgatttccctatcttgccctcacttgagattcaaaattttgattttcagttcttgccaatttggtgtgactaaatttctagaaggcatgtaaacagttttgaacttcaataacaagtctttcctttttaaaaatctgcaaacttcattttatttctaatggtaggctgcttgtttttcctctgtttgttattaaaccagtagtgtgtgcccagagttgaactagttttcctgtaagcattctggggagcaggggaacagaacagtccagaaagggtttacttagtgtttgtgtgtgaaagagagtcatgttctcagctcagatatttataaacagagctttgacccacaagaacgtgttgtgagacatggagagccagggtgtgtgacagttccttactgcgtgggactctgctctgcatcatagaataygccacccctagttctactgagttagatgccatgggcaacaaccagtcattgctagaactgaaaacaacctgcaccctcc

SEQ ID NO: 834381 - DNA, 646 bp, Homo sapiens
attcaattaaaaagaaataaaattaatcagcttctcttaagaaacagacttacaggaatgaaaactagtgtgtttcacacagtaaaatggaagaagcttaagagctaggttcaaattccagactctaccattaattattcaatcttagcttctctggcttccagttctataaaatggagccaacagcaaagatcaaatgacataacactgaaggcattttaagcaagaagaatatacaaatgctgagcactactgcctgaaatactaataatgtacttatccgagaagcctttaaagttacatggttctacacaaaatgttagtataaacataactggcaagataatattatcagttttgccatttaaagaacttcctaacaatcaaagatatgcaacatttattctacccaaagttaaagtgtcctgccctaacctctactttgagacacttggtaaataattttcggaagagtgtcaagatacataatattataggagacgatgtcaaataytaaagcttcaataataagtggactagagaatgattctactcacagctcacagttcaatccatctcttcttctcactgacttctcaaccattctgtgcttttccatgttttcctccttcttcccactctaccc

SEQ ID NO: 834382 - DNA, 332 bp, Homo sapiens
acacatcactgtcattcatatttcatgttgatgatgctgacagtgattgcttcctgtatataaatggaaaggaaaaaaaaaaaacccacaacagaacaatacctctctaaaagctacagcctataattgaaatccacttgcattttcagtttggtaattttgaattttgaaaaagaggcctctttgctgatagctcattccaggctgatctgtccaacgctgttayttccctagagtttacctgtctgacacattgtataaagctattatttggcaagggtgcacctttgcacttgggccaggatggataaaattaaacttattacagagaa

SEQ ID NO: 834383 - DNA, 607 bp, Homo sapiens
atttacctatgtgaaagtaagattctatttacctatgtgaaagtaagattctattttggttttgagttataatacattcagcttgctgcctgggttgctaatgagaagctgactccttctggaacaaagcacttcgataacacagaattcatatattatacacaactagtatttagcagcaagagacacagtttcccagtgagttacatagtccacatatgccaaatggcactccccaacttggattgaaaccgcagatctccttttccagattactaaactctgacctgttacggaatgagacagatctgaattaaatctctgagtcaacaactttctagctttgtgaccatgccctgtaatctaatctcaaaacctcaattttctaacatgcaaataaaaatattacctgctttttaataaaacttttaatttttgttggattaaaaggtataatttatataatgtgcttagcacattattcagtaatttagttatcatctttttaacttgattgtgccatatgcatgatttctctccttttatttctgacygatttgttttattttgtttcataatattattgtagtaattactattcagagat

SEQ ID NO: 834384 - DNA, 563 bp, Homo sapiens
caataatcataggaaccttagttttgtaaacactgccatgtagataatttgaggaaagcaatggaaggccaataatatgagtcaaactaacgacaggagaaaaacaaacttgttctgagagtcaagactctggagttctttttgctgtctttttccaatctgtatgccttgaatatggcacttcactcattggattcaattctgtaatcattaaggggctaaaacggtcaaccaccttgcatcaagttttataatgaggaggtagttaagatcaccagctctttgaccagagggctttagttcaaattctggctctaatgtatattatataaaacaagtttctgtcttttaaaagaaaatacttctgtttaatttcagttttgtcacatgtgtcatggcataaataatagtttctaaataacaagctgatgtgtcatttaaatggataaatatattggaagcttawacaatggtgcccgcaacaatgcaaattctcaatagtgattagctaatgcttcattaaagacatttatttctcttatatttttgacaagacttacttt

SEQ ID NO: 834385 - DNA, 563 bp, Homo sapiens
caataatcataggaaccttagttttgtaaacactgccatgtagataatttgaggaaagcaatggaaggccaataatatgagtcaaactaacgacaggagaaaaacaaacttgttctgagagtcaagactctggagttctttttgctgtctttttccaatctgtatgccttgaatatggcacttcactcattggattcaattctgtaatcattaaggggctaaaacggtcaaccaccttgcatcaagttttataatgaggaggtagttaagatcaccagctctttgaccagagggctttagttcaaattctggctctaatgtatattatataaaacaagtttctgtcttttaaaagaaaatacttctgtttaatttcagttttgtcacatgtgtcatggcataaataatagtttctaaataacaagctgatgtgtcatttaaatggataaatatattggaagcttatacaatggtgcccgcaacaatgcaaattytcaatagtgattagctaatgcttcattaaagacatttatttctcttatatttttgacaagacttacttt

SEQ ID NO: 834386 - DNA, 550 bp, Homo sapiens
gttatgtttgatgagtaaggatgaatcacaagaagccagcctttctcttcctcctgaaagcagaagtgattcttacrgagatgtccaactttgtcattagccaaattgtaaggtcttaacttgttgttgttttttttttaataaagatgagattgtgccagacagtgagataaattatagaatgattgtttcactcatgccttctgtcctttgcagaactcagttaagcaagaagtctggggaaaagggtttactgtccaccagaagtctctgtttaaccagagacttctggtaatcagcctttgttgatgtcattctgaaattcttctaaatggtctttagaaaattgatttttaaattagtcttgcaggatttcagtgttatttattattcctaaattaaaatctaaaccatttaataacaccaaatgttgatcagaatgtgggtatgattgctcgtacatatggctaaatatgtagtcataaatatgtatcaaccagtaaactttccttagaagttgatttttaaaaaaaaacccaaattgtggaac

SEQ ID NO: 834387 - DNA, 347 bp, Homo sapiens
aaggagggatttttctgtgttytgtttgttaccatattcctaacacccacagcagtgcttggcaaatagtcggtgctcaataatgatttgttgaattaacaaataggtcaaagtcttctgtgtataatctgtaaacgctgaatgagagaacggaaatagctgtactatagggtaatttgtgggaaaatatctggttgagttacattaggaaatgttaactgtgaagtaatggtgctcattttaatggtatttggtggtatagcattaatgattatgattggggagcttagaaatgagtaagctttttcccagtaaaattaatacgatgtactctttttttactttga

SEQ ID NO: 834388 - DNA, 347 bp, Homo sapiens
aaggagggatttttctgtgttctgtttgttaccatattcctaacacccacagcagtgcttggcaaatagtcggtgctcaataatgatttgttgaattaacaaataggtcaaagtmttctgtgtataatctgtaaacgctgaatgagagaacggaaatagctgtactatagggtaatttgtgggaaaatatctggttgagttacattaggaaatgttaactgtgaagtaatggtgctcattttaatggtatttggtggtatagcattaatgattatgattggggagcttagaaatgagtaagctttttcccagtaaaattaatacgatgtactctttttttactttga

SEQ ID NO: 834389 - DNA, 618 bp, Homo sapiens
ataaaattctaacctaatggaggaagtgctgggcggggtggtcaagaaacacaaacacctgcatctgtacagctatgatgaggagttaatgcaaacaatgtctactgcacacctctatccactcatccattcttttaatcactcgttcttttgtttctccagttcacaacagaaccccacacatatgcaaaaccctagcaatttaaagatgcagaaactatcatcccttccttctatgggccaaacacttgagtcaggcaaccccatccatgcctggtttatttcattactttctcaagaatgttaatgcaagattgctgggatgaccacacttaattaaagcaacatgaccaagaagaaatccccaggaaccacgtggaagtgcagcgaaagcttcagatattccccctgtaattataagttgtgtggcctgacagctgctcccaagagaggctttttgtaaattatttttattattatttttttagaaatctggcatgaaaggattggttataaaggcgaatccttgctggtagaaatcttgagtggactgtctccaccccgtagctgtccagacatagagawgaggttgaaaagagagcagagaactaaacagag

SEQ ID NO: 834390 - DNA, 562 bp, Homo sapiens
atgactcttcgttggaaggacggatccttaaccaacctgctgctcgcctccctgactgcatttcttctatgtgtgctacttygttcagcctgctggccctgcttacatccgttcagggaacagaatgaaggaggccagggtcattttctccaggaagtcccgccgacaggcaaaaatgccccagtgtctgacaatagacttctgttagtttgtttccagttctgtgatcatgtttttcattttttataatttttccatttagaaatttgacacccaacagccaaagtactttatatgccattgtaaagtagaacctggaatataaaagtctggtagctcaaggctattatgtttctttctttctgttggaaagaagacttgcagttggggcaaaaaatgggacagttgaggaaagaaaccacgcaaatgtttctgagccattgtggcccccaaaagactcctactttccctagtcctccagaatccaggttgacaccagcagtggggggatctgtgctcaggctaaggaaggggtggccagaaaagggatcaggatggctcc

SEQ ID NO: 834391 - DNA, 526 bp, Homo sapiens
catgattaaattaaaaaactcacagatttgtgttctaagtttctgtccaatggcccaggtcaatccagcctacattccacacatggaagaagatattccaattctgccaactactgcttgtcaatggggacaggagaaatcattcattcttctattcctttatatatcctttgttgaacacctatttttgttccatgccatgtagtagaatctgggggtgcaaatgtgactaagacacagacagcccatgcttcgaagcgctcacagtcaaatgcaacagataaacaaacaactgaaaacaatcacaatccaatgtgacaagtgctgtaatcttcaggccatggagcttaaaggaattttcatgaatgttgcgcaacacttcctttacttattttcccaccaaggrgatttttaaccctatgtctacttctcataggcagacataggggtatgttcactctaatcacactaatcctgtggaattaaaaagagcacagtttggggaggagacattagtaaatctgag

SEQ ID NO: 834392 - DNA, 638 bp, Homo sapiens
ttgaggtacttactttgtgccaagcacygttctaagtactcttttttaatcctcacaacacagctttaggtagatggtcctaatctgtttagtttatagagatgaaaactaacagtgactgcagaatgctagatggcgaaggggagactgaggatttgaaccctggaggcccgacctcagagtccaggcttttcactcccttgctgtacataggatgcagcaaggatggatggagctttggcaacataactcccccctcttcctttagcaacagcattcccaggatttagcagggcacatgcctcccttatggccatctcactaagttatggccaatggggtaggaacagaaatgatgagtacctccaaagatcatgaccttacaaagaatgggtatttgctctccttgaaacttccaccttctctttagctgcaattcaaacatgatggtgaattcaaagcagctttgtactctagaagctggtgtagaggttggcagaaggtccctaacagcactggttgctgcctttggactgctgtgtgagagaggggagaagtcctgtcttggttagcctgttatattttaaagtctttggggcatagtagcttacactgtgccttaagtaatacagatctca

SEQ ID NO: 834393 - DNA, 606 bp, Homo sapiens
aagactctccacagggcattcagaaccctccaatgactggtagccctatacccattcaaagtgatctcttattgttcccctttaggatcacttcactccarccaggcttgtgacctcacagtctcaccctctttccctgctttcctgtctcatcttaccttctacctcttccttatcaatttcaatctacttagagcagagagtttgagaacacagactctggggatggactgctggagtttgaatctcatttactaccactaactgagagaactcattcatttctgggtctcagtttctccacgtgggaaatgcaaataatgacagaacttaccctagaggtttgttgtgaggattaaatgaattaatatacataaaattcttagaaccataaacattatataagtatgtgatgtgatatgttattattattctagtacaggttcttatcttgttctataagtattttatgactaatgtaattttactttgatttcataaataatgcatcattaatatcttatctgagggcagaaaccatattggtacaactttccaaatatttagtacaaattgggtttgttgatgaataaaatgaaataaaat

SEQ ID NO: 834394 - DNA, 592 bp, Homo sapiens
cagctttcacttataaatgagaacatgcagtgtttggttttctgttcttgcattagtttgctgaggataatggttcccagcttcatacatgtcctgcaaaggacatgatctcagtccttttatggctgcaatccatgggcatatgaccacattttctttatccagtctatcattgatgggcacttaggtggattccatgtctttactattgtgaatagtgctgcagtgaacatatgcatgcatgtatcttcataatggaatgacttatattccttggggtataaacccagtaatgggattgctgggtcaaatggtatttctacctctaggtctttgaggaatcgcatgctgtttttcacaatagttgaactaatttacactcccaccagcagtgtaaaggtgttcacttttctccacaatctctctaacatctgttgtttttttgactttttagtaatagccattccgactggcatgagatggtgtctcattgtggtcttgatttgcatttctctaatratcagtgatattgagcttttttatgtatatttgttggctgcatgtatgtcttcttttgggaagagcctgttca

SEQ ID NO: 834395 - DNA, 617 bp, Homo sapiens
gaagggaaaagttttaaagggttgaatctgtcatttttattgtcttactagctttaaaatccaaaaaatatagcaaatttttgttttttcttttatttatttgaaaaatagatactaattttcagcaattcaagcaattcagaaaaaaatgccttttcctcaagtgaacaaatacatggaataaaaattgatgttttccttctcttcaaccctctacttcctaaataacttaaagtttgcagtagaacagcaatgtccccaaatccacagtgtacaccactgagtccttgagggacttagcatgtaagaactagctgcattttctcatggcatgcaccaaacaaaattgctaaaagtaaaattttctaaacaaagcaagctaaagattctgaagaacagtgaacatccagaattgtggagtagctaaaagaagtcctggagtctcccccaacccccttgtgcctcagactatcttccttgaacttcctgaaatatcactgttaaacgtgcatgactttaaattagcaagtccttctaaaggaaaatatttttgcaacggttctcaaccattcggggatcctagaatcktttgagactcattgaaagctactgatact

SEQ ID NO: 834396 - DNA, 603 bp, Homo sapiens
aaaatcaaagctccctcactctcttagcaaaacatggtcattccrtttgccctgagcaagttccatctaccctcacataagtcctggaaatcagggaggacagaaaaataaggccaccatgaaagagttattgagatccttcttgacaccctagcttgatgaaatgaaaagactgtagactgagatgtacctgggtttgaatcccactccctcgtcattctagttaaataaatttggccaaatcactgaccttctcttcacctccatttcctcatctgtgcaagagtcaatgtatatgatggaacttttatgcctgacacattggaggcactcaattaaatggtagcaccttattgttactggtattgctgctacttttgctgatattcttactaacattcttactggctcatactccccctgaggaaacattagctcttgtccacaatgccctttgtactcatagccgtctttgtctcctatccttttcagatcactccatggggccaccagcaggtttcctcatgcaatatataaatagcgaatattggaaccagagtattaatttagcctagacttttttccagccttcccactggcctg

SEQ ID NO: 834397 - DNA, 617 bp, Homo sapiens
ggctgaatagtaacagctatgatttgtagctcctagcatgattgaaacagaagacasgtgatttctgcatttccaactgaggtacctggttcatctcattgggactggttgggcagtgggtgcagcccatggagggtgagctgaagcaaggcggggcatcacctcacccgggaagcataaggggttgggggatttccctttcctagcaaagggaagctgtgacagactgtacttggaaaactggtacacttctgcccaaatactgcacttttcccatggtcttagcaactggcagaccaggagattctctcccgtgcctagctcagcaggtcccacacccacagagccttgctcactgatagtgcagcagtctgaaatcgacctgcaaggctgcagcctggcagggggaggggtgtccgccattgctgaggcttaagtaggtaaacaaagcagccaggaagctcaaactgggcagagcccacctcagctcagcaaggcctactgcctctacagactccacctctgtgggcagggcttagctgaacaaaaggcagcagacaacttccgcagacttaaatgtccctgtctgacagcttggaatagagcagtggttctac

SEQ ID NO: 834398 - DNA, 610 bp, Homo sapiens
ctacaaaataccttcctatgaataaatktaattgacgtgtttacaacttaaaatttttttttaaaagccctgagcttacttctctatagaaccttttaacttttaataaaacataacagaaaagtgtacaaatgacaagggcacagtttaatgaattttcagaatgaacacaccatgtaactacaacctaggtatctatctataactgtttaatttctctcagacaatgacctcatttaaacaatctcattgtcagcagtgtcatgaattgttcggcactgcatgaaaatgggtcttacttgaggccagcaagtgacagagaccaggcacaccgttccactgtagcacaagatgggtgctcataggcaaaccaccctgcagcggctgctggggagacagacccacttgccatgaggaaccaacgcacactattggagctgatcctgctctgtctcttctctatgtaagtaaagctttatccagtgtttgcactttttccttgccgactctgataccaagatgcaatgggcaagagcatttagattcctttcttgagactggtaaccagtgcactgtattttgccagataccaaccattttggaaaactat

SEQ ID NO: 834399 - DNA, 586 bp, Homo sapiens
aatccaggaggctgaggcacgagaatcgcttgaacccgggaggtagagtttgcagtgagcggagatcatgccattgccctccagcctgggtgacagagtgagactccatctcgaaaaaataaaatagtcgggcacagcgcctcacgcctgtaatcccagcactttggaaggctgaggtgggtggatcacgagatcaagggattgagaccatcctggccaacatggtgaaaccccatctctactaaaaatacaaaaattagccaggtgtggtggtgtttgcctgtagtcccagctactcaggaggctgaagcaggagaatcacttgaagttgggaggcggaggttgcagtgagccgagatgacgccattgcactccaccctgggtgacagagctagacttcgtctcaaaataaataaataaaatgaagtaaaataataaataaataaataataaaaataaaaaatcacagtgttggccrggcacggtagctcacgcctgtaatcccagcactctgggagaccgaggcaggcagatggcttgagctcaggagttttgagaccatcctggacaacatagggaaacccct

SEQ ID NO: 834400 - DNA, 617 bp, Homo sapiens
aaaagattttactttaccttaaatttattccttctctgatgttctttccttaatgttkatctaagttgctgaactatcattattcttttctctgaagaacttcttttaacattttataaagaataggtatgctgtgctaataataaatcccctcggttttgcttatgtgagaaagtctttatttctccttcacatgtgaaggataatttttatggatttagaattcaaagttgatgagggtttatttttctttcaactctttaagtatttttcttcacttgcatagtttatgatgagaagtccactgtaattcttattcttgtttctctatagatatggtgatccccacaaccccagggcttctttcaagattttttcacattccgaagttgaatgtcatatatctaagtatagactttgtggaatttattctactttgtgttctctgagcttcctggatctgaatttaggttagatgtctgtcattaattttggaaaattatcagtcattattacttcaaatatttctcttgttccattcttatttctccttctgatcttccaattacctgtatatgtatgtttcaccttttgaaattgtgccaaagttctgagtt

SEQ ID NO: 834401 - DNA, 400 bp, Homo sapiens
ataagacaaaatataatcatcacagagagtmtaaatgtctgagtgcattgtaacaaggtagtttagcaaagagaagagatggtatgggtttgaatattctgagacctgaggagaagttagaaaataagtagaattaagtttgtgaagaaatgtcactttgataaagggcaaagcaatagcaaagacgcagaggcaggaatcagaataacgtatttcaatatagccagttcagcttggctgcagtgtagttttcactgcagaagagtgggagagaataagtggaaaagctggtgaatgccagaagcggaaatgtgttgctcaacaagaaccgcgaggaccttgttgttaaaacattagccaatgggtggaatgggaaaagtactaagctaggattcatgag

SEQ ID NO: 834402 - DNA, 593 bp, Homo sapiens
tgtctgcttctgacctaataccacccctcctcagcccacacttatgacttcaggaaagtggtctatgagtcatggactacaatggaaaagttttgaacagcatctagagaaggctctgtgtgatattctggcaccatccgaaagatttgctgaaatgtttagcagccatttaggcatgcttctgagggactatgaaaaagagaaacctccctgtgagtagaaacttgagagctcttttgtccaatttgcctgtaattatcaatggcttgaagttaaatctatacaggttcacaggaatgtgctaacggtttggtcagatattcagatatttggaaggaatgagattgaaggattggagataaggtttggagaaatgtatataactctccaaatggacccaggttgtgaggatacctatcgcctacaggagtactcaccgaaagacctaagaaacaaggatattccccaaccctgtgtgacccacgtattgtcctgccttctccttcttgcagttayttcctaacgctagatggttgcctctcacatgtgtactgatcattacttaaagactcaaggggatccctctagagatc

SEQ ID NO: 834403 - DNA, 460 bp, Homo sapiens
  misc_feature 432, 433, 434, 435, 436, 437, 438, 439, 440, 441, 442, 443,444, 445, 446, 447, 448, 449, 450, 451, 452, 453, 454, 455,456, 457, 458, 459, 460: n = A,T,C or G
gtatttaacctttggccttagtttctttagtactatgatcaaaactaatctccccaacttaaattttctgtgacrggtaaggaagccaggacaaaggacttaatgaaggttttgaagcaggaagtatagcagcaaaaggttttacagctatgtatgaaatggagttgaaaggaaagaactcaggatctcagaatccagtgggtatagccaaaaaggttgaagctcagaaatgactttcagagggattacatagaaaaatagataagatttggtcgtgcccttcatgtaagcaggctgtaattagattggctggtgtgagttagtgggaaggattagccatcacagagggacatttaatgggatggctgtctggttcccccatctcgctgtcccagcccacccttgggaactgatgtagctgccgtcaccatnnnnnnnnnnnnnnnnnnnnnnnnnnnnn

SEQ ID NO: 834404 - DNA, 552 bp, Homo sapiens
aaaggtgaccactggttgtggtagccttgacaratggcaaagcctggtatggtacagtagtagtgcagaacagagatacacataggaagtagaataacacagggtttagtgacagactctgtgtgggagataagaggacatgataagtcgtaactgatgatgagcatggatcctcaaggaaagacatagtgggagaatgaaatgttggggttttctggagcttggaaccagttcttactttggttctgtattctaacttttctagactaaaaactccagaagggtagaaatcttgcagtctaatttctccctactcattttgtatgtgaaagaacccacagaacagttgagtttgaaggtcagctctgtaatttattaactttgatacagtatgaggaagatacttaatgtctattcagggcccactacattttgggctctaggaagacaacagtgatcgagaatgaaaaatctttacctttacgaaactctagttcggaagagagacaataaggaaatacagaaacaccggataattacaaactgtgataa

SEQ ID NO: 834405 - DNA, 506 bp, Homo sapiens
ggaagccgcggctgccgcccctccaggcccggcctcgcgcccgtccgcccgccccgctctgacgtcaggcgtcttggagcgggatatttatggcaaggttactctgaattttccctaggtagacttctgattgcagtttcttgggatttgtaattttcacactttcagaccgaacgcaggcggggggagagcgccgccggcagggcgaggcgtacaatgagggtagctgttccccactttggcagggagcgttctcagggccccttctgttttggaaacatggaagggtcaaagaggcaaaagtggccacctgggcagcgggtttctccccggctcctcctctgggctacgggcaaatggcctggtctgaggccggctcggaggtgraggtcccggtgccaaggaatcccctgtccctccccaaagtgtccctgcactggacagtgtgtcccaaggggtgctgggcaagacaggagcgaaatcaggcacaacagaacagctaatta

SEQ ID NO: 834406 - DNA, 623 bp, Homo sapiens
gatcctccccactcagcctcccaagtaactggacccacaggcatacacctccatgctaagctaatttttaaaatttttgtagagaccatgtcttgytatgttgcccaggctggtcttaaactcctgggctcaggcaatctttccacctcagcctccaaaagtgccggaattaaaaacttcaggtgtcaaccatcgcacccagtcagtacaggttaacaataatgtacatttcagtatatatttggttatgaagccaaacataatgaaaggtgccattttaaattttatttaaaaatcacatttttaattatctaattaattcaaatacaagaaagtgtgtgtcatttgctaaatagggaaaagtcaaaacatttcttgctatttatataatgtgaatattattacattttattaggataaactatataatgtaacatttactaatacagtgatataaactaaaataatgcttccttttatctgtatgccaaatgattacataatttaaaacttcccgaagggagttttcaataatatattatagtgaaagagtgagagtatcggaaagggtggtaggcactgatgcaaagtaacgatgtcaatggcactagggaaataggaag

SEQ ID NO: 834407 - DNA, 589 bp, Homo sapiens
gggggagaccatataacacattgactaagagcagggactttggagccatataagtgcagttcagatcccaactttaatacttattagctctatgtccttgggcaagttatttcatctttctctgttctagctttgcttttttttttttaaagacggagtttcactctgtcacccaggctggagtgcggtggcacgatcttggctcactgcaacctctgccacccagcttcaagcagttctcctgcctcagtctcccaagtagctgggattacaggcatgtgccaccccaccctgctaattttgtatttttagtagagacagggttttaccatgttggccaagctagtcttgaactcctgacctcaggtgatccacctgctttggcctcccaaagtgctgggattacaggcatgagccaacgcgcctggcctgaaccagctttttatctttaagtggggaaaatgatactgtaatatctacctcatttgccatgacaatccaatgagctgtacgtgaaaatcacatgcccyagtatatgtgattgctcagtaagtacatagtgcatgctcaatgagtattagctatcatc

SEQ ID NO: 834408 - DNA, 663 bp, Homo sapiens
tgcccagagtcactctactagcaagtgggccaccaggaccagactattttttactgtttacatggtcactgtatttttgacaagtacataatgtagctggtacaaattttactaattggtttygtaaggaatgtcatatttttaacttcgctaaatcagtcttaatctgacttcaacctcccatctcacatactggtgggaaattcaggttcactgaggaaattcaatgttactctgattattgggcctctgctttctcttccctggaatttcatctccggaaggcatagttttgagagacctacttgatgtcatgattatccctaatgggttgcatggtccctgaactcctggagacattactggctcagtgccccacttaggcataggaatgagctcagtcctgaatacccttgggtccagagactagatccctcaaaggtcctgaaacctcccttaggactgcaaaagaggggctttacattcccattactcttcagatctcagtgttcttccctgctccttcactctgttcctccctctgttccttcccccaatctttgttgagtgcctactgtaagccaggcaccacctttcaggttgaggatagagaagggggaaaaatagaaattcccaccctgatgatgctcagtggcaagaagt

SEQ ID NO: 834409 - DNA, 550 bp, Homo sapiens
aaatacaaaggaaaagttcaaacagggacacggtgtctctctggcctagcccttcagggatggttgccttaaccatacattttttattgtccagttaagttttcagtrattcagttgatgggactttcagacctgcccatgggctgtgactcattccactgtcaaattaacagctcttttggaaaatgtgttttcatgacttggccaaaaatttccacggcttaatttcatctttttcttcccagagaaactctttgaacaagtccaattattgtacacttcagaagaatctttatttccagcctcagcaaatgcctgaccaacccatcactttcattcaactttgatcagcacaattccctggggctttcactttctcttctcgtctgcttatcgactcttcttccagtgctaaaagtcgatttgcagcatctggaaacacccaattcatgaaattaaaagtcatttggcaaaatgaaaagacacacagaagggcagtccagaatgcctggatcctctctgagcctctaagaacagcaagactttaccg

SEQ ID NO: 834410 - DNA, 509 bp, Homo sapiens
gttctgtcccgtttagtttccaaagagaatcatttacaaactattgtctgctattttgggcccattcaattctcaaaaaaatcatttactacccttcaaaaatgcctacatttccccatttcccctttccctatgaagaagaatatttaacttgcaaccctcattggcttgataatcattcttctgtaatttttcccccatgcaccttaagaaatgtgtatgccttttctcccattatagtcagttcatttcagtgaaccttcaaagggcagagggaagttttcctttagctcctacaagatcatatcactcagatgggcaaaatatggattcaggtcaaaatgttataaactaataaaaattatatttttctttaatcttctcatcaaactacacaaccactgtttcccactgtacrtcctccactttatgaaggtttgtcatgccaagctcatccctgactccatgatttagttgatgttgcttttcccacctttaataattttttc

SEQ ID NO: 834411 - DNA, 535 bp, Homo sapiens
atatattttcttaatatttaacaaaataaattagaattacacaagtcaaaagctcccaataatatattttgaatatattttgaatttattttgcctctgtcatattgtttatgaagaattgttatttttcacactttctacttctacaagtcaaatttattggtgacttcctacttctacaggttcaatttataacctattggaatgataaattacaaaacgtcatggtttatagtgttagaatttattctctatttctatagattgattgatggaacattacaggatggggcgttatcaggaatttttgatgtactggttggttggctctttttttttttttttgacggagtctcgctttgttgcccaggctggagtgcagtggcgcgatctcggctcactkcaagctccgcctcccaggtacactccattctcctgcctcagcctcccgagtagctgggactacagtcgcccgccacccacgcctggctaatttttgtgtgtgtgtgtttatttttagtagatatggggtttc

SEQ ID NO: 834412 - DNA, 507 bp, Homo sapiens
aattctccaaacaagcttttgtatgtcccagatgttcccgcctttgttcagatttaatcctccctatttatcctccctctggtacctgtttattatgttctatttctcttcggaagctggggctcagcggatctgccacatctgatattatctgcacttgggcaaacacaatcgtgcctatgccttgtcaaccagctctcgtctgaaagggctggagaaagagaagaattaaaatcagcaccgccaagaacagcaagcccaaaaagatttaaaaataaacatgaaagctgctttaggccccgtttcgaggcactcgcaaagcccttcagtggagacacaatggtgctgggtgcacccattctcactgcctcatcctctgcagctggaaaacatgtggctgtggctctcgactcctccttgaagaaggaascatgtctcctgccagagctgtgagacagtaactcagagcttcttctgctcagacttaatatctaggaacattacagc

SEQ ID NO: 834413 - DNA, 481 bp, Homo sapiens
cccccaagactcaaacatcccccattaggccttacctccaacattggggatcaaattttagcatgaggtttggagggtcaaatatctatactatagcatggatcacatggtaattctatttttagctttttgaggaacccccccatacttttcccaaaattgctgtactaatttacaacaccactaacagtgtacaagtgttctcttttctccacatccttgccaatacttgttatcattcatatttatgataatagtcattctaacaggtgtgagttgctatctcattgtgattttaatttgcatttccctgaggattagagatgttgggcatttttttcatttacttgttggccatttgtatgycttcttttgagaaatgtctgtttaggtactttgcccattttaaaaattgggttatttgttttttgttgtttttgttgttgagtaattttagttccttgcacattttggatatgag

SEQ ID NO: 834414 - DNA, 567 bp, Homo sapiens
atccttatcaaaattgcaatggcattcttcacagaaatggggaaaaatcctaaaattcacttggaaccagaaaatagtctaaatagtcacagcaatctttagagcaagaagaacamagctggaacatcacactccctaatttcaaagtatattacaaagctacagtaataaaaacaatatggtactggaatataaacaaacatagaccaatatgaaatagaatagaaagcccagaaataaatccatgcatttacagagtgccaatgacacacaataaagaagtatctcaaataaatggggttgggaaaattggatatacatgtgcagaagaataaaattggacattatctcataccacatgccagaaatagatcaacttgaaatggattaaaaacttatatgtaagacctgaaactataaaactactgaaagaaaacatagagaaaacgcttactgacgttgttctgaacaatgattttttggatttcactccaaaagcacaggcaataaaagcaaaacttgacaagtgggattgcatcaaactaaatacatctgcacaatgaagga

SEQ ID NO: 834415 - DNA, 567 bp, Homo sapiens
atccttatcaaaattgcaatggcattcttcacagaaatggggaaaaatcctaaaattcacttggaaccagaaaatagtctaaatagtcacagcaatctttagagcaagaagaacacagctggaacatcacactccctaatttcaaagtatattacaaagctacagtaataaaaacaatatggtactggaatataaacaaacatagaccaatatgaaatagaatagaaagcccagaaataaatccatgcatttacagagtgccaatgacacacaataaagaagtatctcaaataaatggggttgggaaaattggatatacatgtgcagaagaataaaattggacattatctcataccacatgccagaaatagatcaacttgaaatggattaaaaacttatatgtaagacctgaaactataaaactactgaaagaaaacatagagaaaacgcytactgacgttgttctgaacaatgattttttggatttcactccaaaagcacaggcaataaaagcaaaacttgacaagtgggattgcatcaaactaaatacatctgcacaatgaagga

SEQ ID NO: 834416 - DNA, 595 bp, Homo sapiens
cacacacacaaacacaccacacaattgtgcaagcacacacacaccacacctgcgcacgcacacacacacaccacaaacacaactcacacstgtgcatgcgtgcgcacacacacacctgtgcatacacacacagcaaacccatgcatgcacacacagacactgtgtcctaagtcactgcctgcaacctcacacactcctgtcccatttctcacttcagggacagaatgaccagccctagactcagacaggcctggtgctgagtgaagggggctcccctgggaacaccgacacctccacctggaagacaaggtcttggaagacaagatcttgaaattcttggagcaatagtctattgaccccacacaaatatccacctgcatcctcctctgtgaggctctccagggtcactgtgaagctgaggtttgcaggatggtccctgatggacactcagccattactcactcctgctgactctccagcctttacagtcttgtcacatagtagaaaaagtggttgtctgcaccagtatttgttgaaagtcctgtattcctcctcatactgacactgcacattcagggatccccactgcggtgtc

SEQ ID NO: 834417 - DNA, 623 bp, Homo sapiens
ttttttattttagccactcagataggcaaatatatccatccaaataactctctcccagggctaattcctagagaaagtaaacaactggcctgcaagtctgcctttgatatgcaaaccaaaccaytccctattccatgcccccacctgcttcctttcagcaggctcctgcagtctgggatattttctttcccctgccctaaatcaccccagggccaggtaccagacaactagagaccactcttgtatcctagcccatcagaataattcaaactacacactccgaagcctgctgtttgcttaccttaccttgcctatcacttcctctgaaaaccatgataaaggctcccacatacatttcctctctctctctctctgccccttcacccgccctcgtgcttccccgtgtggccctacatggcacactgcacctcctgcttctaggggtctttgagtagaaacttatttctttatgacagtcatttccgtatctgcatgccttaccatatctggttaaaacaaatcctggtacatttttttgttttgttttgagacagggtctcactgtgtcacccaggccacagtgtagtggtatgatcatagctcactgcagcctccatctccca

SEQ ID NO: 834418 - DNA, 600 bp, Homo sapiens
ctggaggaggagccctgaggcagagagagcagcaggtgcatgtgtcctgccaggggggcatcttagacttggatctggaaaacacaggaagcagatccctctctggatccagtggctccagggcctgcagatagcattctctgtctcctccccagcctgagctggatatggcacaccagcatcagacaattaagttttctgaaggcaggtaagactcgagagagtcatgcattcattcattcattcaacaagcaatttgttgacttgcccttggcagaccccaggatgacagcaagtcacagctgtgatcaggacaagatactgccctggttctccatgagctaccagtccagacgaaacccaccaacaaaacagtgataaacacaagagggaaatgtgaaatgggtcatgaggacccctaaaaaggaagccaccataacccaggaaggtcaaggaacacgcaggcaaacctgtcagctggaggcaggcagaggagtgggaggttgagggtctggacaaagaccygagtcgggagggtggcagcaccgaggtgaacctggagccaggaggttggagccacttgccgggtgataggggctg

SEQ ID NO: 834419 - DNA, 466 bp, Homo sapiens
gtcaacagcttctgtttgggagccactcagagcagtgtttatcacagcgtgcaaaatcatctgtggtacttatgaaaaattcctggacctcaccccaaacctaatgaatcagaatctctagggtaggctgtaaatctgcgtttcacaagttcagagttgagttctgcttgcatctcttattgtctgctagtgtgtagctgtgctcctaaaagagcttttaaacagaactactttaaatgttcatagagttgcaccagaacaggagaacagcatgaaatcccattatgtcgcaatcctagctatttgtttgagaaatcagggacaggctcagcagagacatttttttgrtgagcaagtgtgtcttttactgcttcctcaaaaaccctatccacaaccctctttatccctcttattctcagcatgttaccttacatcctacctcatcaagaaaatagaagtgatcatc

SEQ ID NO: 834420 - DNA, 552 bp, Homo sapiens
acccaaaggagcttcacccgtatttacagccwctccccatggctcacattactgcctaagctccgcctcctgtcagatcagctgcagcattaggttctcatagaagcaggaacccttttgtgaactatacatgtgagggatctaggttgcgcactctttatgagtatctaatgcctgatgatctgtcactgtctcccatcacccccggatggggctgcctagttgcaggaaaacaagctcagggctctcactgattctacattctggtgagttgtataattatttcattatatattacaatgttataataaaaataaagtacaccataaatgtaatgcacttgaatcatccttaaaccctccctgacccactccctggtctgtgggaaaactatctttcacaaaaccggtccctggtgcccaaaaggtcaaggatcactgccctggagcatttctcagtcctatactgactccttctggtacccttccttacttccaagaggccccagagttttgacccatttaaagttcctttgtaagaagttctctttcc

SEQ ID NO: 834421 - DNA, 552 bp, Homo sapiens
acccaaaggagcttcacccgtatttacagccactccccatggctcacattactgcctaagctccgcctcctgtcagatcagctgcagcattaggttctcatagaagcaggaacccttttgtgaacyatacatgtgagggatctaggttgcgcactctttatgagtatctaatgcctgatgatctgtcactgtctcccatcacccccggatggggctgcctagttgcaggaaaacaagctcagggctctcactgattctacattctggtgagttgtataattatttcattatatattacaatgttataataaaaataaagtacaccataaatgtaatgcacttgaatcatccttaaaccctccctgacccactccctggtctgtgggaaaactatctttcacaaaaccggtccctggtgcccaaaaggtcaaggatcactgccctggagcatttctcagtcctatactgactccttctggtacccttccttacttccaagaggccccagagttttgacccatttaaagttcctttgtaagaagttctctttcc

SEQ ID NO: 834422 - DNA, 626 bp, Homo sapiens
ttttgtagtctaggaagaatgggatagaccaaggatccccaacccctgggccatggacsagtaccagtttgtggcctgttagaactgggacacacagcacaaggtaagtggcatgcaagagagcgaagcttcatctgtatttacagccacctcccatcacttgcattaccacctgagctccacctcctgtcacattagcattggcattaaattctcacaggagcatgaaccctgctgtgaactgtgcatgcgagggatctagattgtgtactccttatgagaatctaatgccttgtgatcggtttttgtctcccaaaacccccagatgggaccttctagttgcaggaaaacaagctcagggctcctactgattctacattatgatgagttgtataattatttcaatatatattacaatgtaatgataatataaagtgcacaataaatgtaatgctcttgaatcatcccaaaaccatccctgcccccctacccctggtctatggaaaaattgtctcccactaaacccatccctggtaccaaaaaggttggggacctctgggttacacagcatagcctaggctataccatccaggtttgggtaagtatactctacaatgtttgcacaa

SEQ ID NO: 834423 - DNA, 549 bp, Homo sapiens
tcataattaacaaagccatggatataaaaaagcatttccaataaagcaagcaatgtaagagcacagatgaagggcaggttgtatcaggcattsgcatcagggagataatagggagtggtgagaactgtggtctactagggagtggttacctgtataaataaagtcatcattgctaagttccagctgattcttgccatgttgtaaagtgaatcatctgttgctccttgtttttgtgtgtgaaatcatccaatcttcatatgttgactaaaaaataattttgtttacaggcagtatgtattccaaataaaacacatctccaggtcaaatgtgaccctcaggcctccagtctgcaatacatgctctttatattcaccaacggttggaaacaggactctcaacattgattctacataagaagagactgagaaatgcagccttggaaggcgagagtatgtaggtaaatgttatttatatgcaaaagacaaattatgtgcagaatgtggctatgcaaacagattaagggtagatcaggaaagtcaattgaaaact

SEQ ID NO: 834424 - DNA, 609 bp, Homo sapiens
acaccatgcgcttcagagataacacccccaatgccatcgccattgtgcagctgcaggaactctctttgaggctgaagagctgcttcaccaaggattatgaagagcatgacaaggtaggaagccctgaggcctggagcactgagtgagggcagagggtggctgtggaggcgccgctctatccacaggcacagagtacattcgctcacctcgcctcacgccattgcttgctcactctcatttatttgtcatcccaccaacctttaccaggcaggaggcaggagggatcatgctgggccctgacaatgtcatcatgagcaacaaatacatggtcccaccccatgcagcttatagtcaagtgagcttggcagctgttaaacaaaccatgacaccagtaaatagaattacaaactataaggactgttcattccaacagcaagcagttattgtgtgtctgttgtgtaccagacactgttctagacaccaggaaacagctgtgatgaaaacagacaaaaatccccacattcctggaacttacatttgggggtgayggtagtggtggtgagacagttaacaaaatatgtaagtaaaatatacaacatgtagcatggc

SEQ ID NO: 834425 - DNA, 586 bp, Homo sapiens
tcagtgagttctcaaagccttgtagcaacaaggctgcagctctgtgccatgccccatcagaatcctagaatatcagggaatcttggtgtgtggataaagaacctaactcctgagatgttaggtaatttgcccaaagtcacacagctggtgagtagctgagctggctctccatgctcttggaagcattctcttcccattttttctgtgggttccccccagaccccagcccacccaggagagccaaagctgggctgggatgagctctctctccacacatgtggtgcttatcaagcaaacatggcctcgacgggtttcgcaatgatccttatgttctggtccccgcagtgggctgggagcttcaggagagtggagaccctcctttgctgttctctaactgctgcccaggttgctgccccatgcacacccagggctggggcccagcacatccttcctcaacgagagaagagactagcaaaacctggaaaggaaatgggctcaggacrgttcagactgttttctctctgagggaacagagccacacgttgtgcaggaaggcagggagatgtttgtaggctccagtttagga

SEQ ID NO: 834426 - DNA, 549 bp, Homo sapiens
gctaagagggcaaattagatagaagagtgtatgccttccattaaaccaggaggcaaagtggagaggacctgtgcagccggtagataagagaagctgcaggatggctgaagactcactgcctcaaggcttctgtcttttttttttttttgagatggagtctccctctgtcacccaggctggagtgcagtggcgcgatcttggctgactacaacctccacctcctgggttcaagtgattctcctgcctcagcctccccaagtagctgggactacagccgtctgccgccaccccaagataattttttttttgtatttttagtagagacaaggtttcaccatattggtcaggctggtcttgaactcttgacctcaggtgatccacctgcctcagcctcccaaagtgctgggattacaggcatgagccaccacrcctggctggcttctgtcttatctttgaaaggagtaggagataacatctgctgagaattcagatggaagtaagtatgtggaaagtttgaggacagggatacggtctaccagggtggttttt

SEQ ID NO: 834427 - DNA, 522 bp, Homo sapiens
ctccagcctgggtgacagagcaagagatcaagactttgtcttaaaaaaaaaaaagatttatcccgtggatggctatccgatttttgtcagacatgggatgaataatggcagattctaaaaatatttactatctggccctttacagaaaagatctgtagacccctgtagtaactcagttaatcctcatcagtacaattaaggtcagtgctgttactatctccattttacagataaggcaactgaagcacagaggcacagaaggcttgtccaaggttgcatagctagtaagtacagaggctggagttgaatccaggcagtcttgctccagcccatgttactaatcattccctttctaagaatgttacctgcttcattccctttctaagaatgatcaggaggtggtgggtggggtgggagggataggctggccaacgtcatcatgggagcagcacagcaggaaggagagctggamgtccagcagagccctgatgacccagggctattgtttttgaggcttggcct

SEQ ID NO: 834428 - DNA, 470 bp, Homo sapiens
gctgtatctctgatgcaagtgatccttacggtctcaggtagaggcacattttctttcctgggtggctacatgtatattggcaccaacagccccctgtggaaaggatcactcatggtttgataagcacaactgaaaagtgtcagcagtcaccaaacaagaagttttcccttttgggggaaagatatttggaatcataggaatctctagttttcttactcactgattctgggacaatgcagtttcaatgacataatgtaagtggatgctttctacacagtgctgatgctattaaccatacaatagatttcagtgtattttttctcattctgaccactttacctttagctttaatattctgttagagcatcataatatttatgtctagaaggaaccatawaggtcttctactccagcagttcatctgaagctaacctaccaactaagtataaactgtagctttgtcagttttg

SEQ ID NO: 834429 - DNA, 614 bp, Homo sapiens
aaactgaaagggtagttaaaaattgtaaagcctacataaatggttgaacagcttgtagaagaagagtgactatcttctagtacgtatatttattcaatactagccaggcttttctaagagtaaggacttaagttttaccttcttggaggcaaaatattgtaattgaacatgagcaactttggaattgagcataacttagtttgagctgtgagtctttggcaaggtataaaaccttctcaagtatccatttttgtacttgcaaaatgggggaaactaatatctaatatttggcatcttggagttttacatgcgatatcaacgattaaatgcctggtacacaaggtgttcactaagccttttgttccaaatattttctcctataaataaagcaaagaatgtttagtggtaacatactaccacttctaatattattgttagtaatgatttctgtttattgaacatctattatatagtcagtattggaacggctgctttacatgcacttwttgagcatctactatgcacctgatttttgagttaactactttattttaaaattttgtttaattatttatttttgtggctacatagtaggtgtatatatttatgggtta

SEQ ID NO: 834430 - DNA, 630 bp, Homo sapiens
attattttttccttccatttttctgtgttaggcttggtctttcctgtttgttttttaatgtggaacgttaggttattgatttgaaattcttttttttaacatagatgtttacagcaataaatttccctctgattactgcttttgtgcatcccatgagtttttgtgtattgtgtttgtttgtttcttttatctcaaggtgctttttaatttccctggtgatttcttctttgaacaagaaattgttatgtaagaatatgttgcttaatttccatatatttctgaatttgccaaatttgcttctgctattgactttttattttattccaatgtagttagaggacaaattttgtattatttcaatctttttaagtttaatgacattcattttatggcctgagtggtcaacagccagtagaaaacttatatatatgcaatccacgttttaaagaaatagcctattttataatttaaatcaatgtagttatactatttgtaacatcataaagtcctattcttgcctttgataactttgaatccattaacgcttgtatacataaattrtgacttaaatgcataaatacctatcctttctaaatatgtttattttcattttattttatccttttgatt

SEQ ID NO: 834431 - DNA, 477 bp, Homo sapiens
  misc_feature 328, 329, 330, 331, 332, 333, 334, 335, 336, 337, 338, 339,340, 341, 342, 343, 344, 345, 346, 347, 348, 349, 350, 351,352, 353, 354, 355, 356, 357, 358, 359, 360, 361, 362, 363,364, 365, 366, 367, 368, 369, 370, 371, 372, 373, 374: n = A,T,C or G
  misc_feature 375, 376, 377, 378, 379, 380, 381, 382, 383, 384, 385, 386,387, 388, 389, 390, 391, 392, 393, 394, 395, 396, 397, 398,399, 400, 401, 402, 403, 404, 405, 406, 407, 408, 409, 410,411, 412, 413, 414, 415, 416, 417, 418, 419, 420, 421: n = A,T,C or G
  misc_feature 422, 423, 424, 425, 426, 427: n = A,T,C or G
ttggtgtaaggaaaacacactaaatatggatcacatcatatgactaaggataaactcaagatagtttcaaagaataaaaccaarcctctcctgatctaagggagccaccagtaatttaatggccaccaagaacaatctcaacaggtttttaaggagtcaacataattcacataatggattatggatccagcaatgtccagtataataaaaaatgccttgacctgcttagaaaattcaattaaaaggcacattcaactaaaaaaagacggaaacagacactttacaaaagaatgtgcttgaataaccaatcaacacttaaaatgtactnnnnnnnnnnnnnnnnnnnnnnnnnnnnnnnnnnnnnnnnnnnnnnnnnnnnnnnnnnnnnnnnnnnnnnnnnnnnnnnnnnnnnnnnnnnnnnnnnnnngatttgaaacaaagtggatcactcatacattgctggatacattgctggtg

SEQ ID NO: 834432 - DNA, 633 bp, Homo sapiens
cagaagaaatttctaagcagcaaagcattcaagatgtgacctgacttgtttttgaaagcatacagtcatatgcgttcacaaagagatgatgtgaaattggcacttatgtttaaaagggaagttttactsttgtaaattaagttccttatagattgctggttattgtgagatgcatagtttgtgaaaaatttctcccattctgtgggttgtctgtttactctgtggacagtttcttttgctcttaagttgaatcagataccgtttgtgaatttttgcttttgttgtgattgctttaggtgtctttgtcatgaaatctttgcctgttcgtttgtccaggatggtactgcctagattgtcttccagggtttttatagttttgggttgtacatttacatgcttttaattcatcttaagttgatttttttatatgttgtaaggaagggtgcagttttaatcttctgcatgtggctagccagttatctcagcattatttattgaatagggagtcttttttccattgcttgttttcatcagctttgtcaaagatcagataatcatagctgtgcagccttgtttctgagctctctgttctgttccattggtctatgtgcctgtttttgtactagtagcatg

SEQ ID NO: 834433 - DNA, 542 bp, Homo sapiens
tattttacgtgtgtgtgtgtgtgtgtgtgtgtgtgtgtgtgtatgtgagtatgagtaatggaattttaagagtacagcactctggaaagtatgtagcagatataaactgaggccaaattttatatayatatatatatatatatatatatatatatatatatatatatatatggcatacattatgtattaatctgttctcatactgccaaaaagaactgcccaagactaggtaatttagaaaggaaaaagctttaattgactcacagttctacatggctagggaggcctcaggaaaattataatcatagtaaaaggcaaaggggaagcaaggaaccttcttcacaagatggcaggagggagaagtgccaagcaaagggggaagagaccccccttaagccacaagatcttctgagaactcactcgctatctcaagaacagcatgtgggaaaccgcccccatgattcaattaccttcaccttgtctctcccttgacacatggagattatggggatttgggggattacaattcaagatgagatttg

SEQ ID NO: 834434 - DNA, 492 bp, Homo sapiens
taatgtctaaggctcatcctactgtgtgaaaatatgaaatttctctctcatctgtaatagaaaaatgaatgtgtgatcctccttagaacaggatccataaaatgtctgctggcaaaagaaactcagaaagataaacataaaccttaactttagacaaacagttgaaagcctctcaatctgctttgttttgtcagcaacttctagcggtcatgctaagaattaaaaacatgcatattgctcagcaaaatccacatgaatattttacgtgtgtgtgtgtgtgtgtgtgtgtgtgtgtgtgtatgtgagtatgagtaatggaattttaagagtacagcactctggaaagtatgtagcagatataaactgaggccaaattttatatacatatatatatatatrtatatatatatatatatatatatatatatggcatacattatgtattaatctgttctcatactgccaaaaagaactgcccaagactaggtaatt

SEQ ID NO: 834435 - DNA, 470 bp, Homo sapiens
gtttagaaaatttgcaacctgacaatgcaataaaggagaaaatctcattttctgaggagaaattcaagccaactgcagaaatttgcataagtaaygaggagtcaaatgttaatccccaagacaatggggaaaatgtctccagggcatgtcagaagtcttcatggcagccactcccatcacaggcccagaggcctaggaggaataaaatggtttcataggccaggcccagggtctctttgctgtgtgctgccctgcatcccagccactccagccatgaccaaaaggggccaaggtacagctcgggccatggcttcagagggtgccagcctcaagccttggcagcttccacgtggtgttgagcctgtggtgcacagaagtcaagaattgaagtttggaaacctccacctagatttcattggatgtatggaaatgcctggttgtccaggcagaagtttgctgcagggatgggg

SEQ ID NO: 834436 - DNA, 559 bp, Homo sapiens
agatgtgcgattatataaggattcatgggctgtagccagtggtttggctggatgatcagcgacttggaagaagcatgattaaagaattgatgacacagaaatttggggaagaggtatgtggatggacctctctgagtggtcaaaaaccatgaagatatttgtatttcatgagtgcccaccaacgggtgacctcagcaaaggagaattttaataatcaagtgtgtaggatgacccattctgtggacatcgctcagcctctttccccagcaccacctgtcatagcccaatggactcatgaacaaagtgaccatggtggtagggatagagattacgcatgggctcagcaacatggacttcgactcaccaaggctgacctggctataaccactgctgagtgcccaatttgccagcagcagagaccaacgctgagccctcaatatgttaccrttcctctgggtgatcagccagctacctggtggcaggttgattatattgcaccctttccctcagggaaagggcagaggtttgtcctcactggaatagacactaactccagata

SEQ ID NO: 834437 - DNA, 637 bp, Homo sapiens
catcccaagggtctacaggactaaataaataaatgagcaaacatctcttaagttgcagtttgctgtttttctcaaacaactgggagagtaaaatacatttaatgctacacaattacttttggggggctactttttcaaatgatttatacacaaaaatgatttgcatttcttttgctacataatcttgagcttattccaaataaacaaaaaaacccttcactcctaccaaggtcacactaaaacagggcatgctaattgtttttctccatttacaggtttcattttggggttgcaaactgttggtaaggaaaaagaccaagggagattggtaggagttgtatcatgttggtaaaggtgaaggcaatatccatgattgtagtaaattttactggaatggaaaaccaagggcttggctttatttatagctgtctactacattttgtacttattaaaaagtaaaattaaccaacaactaaagttcagatatttattttcagatgggtgaggttttcagtttcctttgactacatctcacttatttattttattatttttatttctgtcctgctgcttscaggactcaaaacaaattttcctttttttttttttttgagatggagtcttgccctgtcgccca

SEQ ID NO: 834438 - DNA, 596 bp, Homo sapiens
taatttactgtctagtctaatgaaggatttaatttgtgattatagaaagtaagtaaaattaaatgacagtgttatgaaaaatctgtgttataaaaggtacaaatgcatcagaaaatatttgtggcctgtggtcccaggtccttggaggctaagggaggagcatcgcttgagcctagcaggctgaagctataatgaaccaggactgcaccactgcactccagcctaggtgacagagtgagaccctgtcttaaaaaaaagaagaaaaagaaaatatttgcagttattaaacataatacctaccctgtattgaaactatattaaacctattttaataacttaaatcccaaaacagtaaaaatgatagaaatatccctatttaaaagttaaagaaacagagattaaggaaagttaagtggtgtgtctaatgttcaaaaactagtaattggtagtgatttattatgtcctgaagctgattatctacactactgactctctatttaggtattacatactcaattatttctcttgaacatctcacagttctgaatatttytaaagtttgaaagaatcatggataagaaacaagtagtttatga

SEQ ID NO: 834439 - DNA, 444 bp, Homo sapiens
aagtttcttatacattttactatgaataaatgcttcattactatcaatcctatctatttcaacaaagaagttgctcacatcgttaacctatgagtttagctctgacatgaatatgggttgtattttccgatacattagtgagtaagagaaaagtaaaacaatgaagatgtacattaggaaaatttaaattaatgatgatgtgcaagacttctttactgaattagataatagtgttcaaatactgaaagaatattgtctcaattatgtatgttattcacaatgtaaaaccacagacagaacacactttaaaatttaatctgtagtgttatttttttccatcactttcttaagattagacaatcaacraaaaacaaatcaagccctgatttgtagtgcgtgctgatttctatggtggaaatactgccaccatgactagtttcaagc

SEQ ID NO: 834440 - DNA, 444 bp, Homo sapiens
aagtttcttatacattttactatgaataaatgcttcattactatcaatcctatctatttcaacaaagaagttgctcacatcgttaacctatgagtttagctctgacatgaatatgggttgtattttccgatacattagtgagtaagagaaaagtaaaacaatgaagatgtacattaggaaaatttaaattaatgatgatgtgcaagacttctttactgaattagataatagtgttcaaatactgaaagaatattgtctcaattatgtatgttattcacaatgtaaaaccacagacagaacacactttaaaatttaatctgtagtgttatttttttccatcactttcttaagattagacaatcaacgaaaaacaaatcaagccctgatttgtagtgcrtgctgatttctatggtggaaatactgccaccatgactagtttcaagc

SEQ ID NO: 834441 - DNA, 609 bp, Homo sapiens
ataaagtgggataaacattacaagaggggtaggccccagcccttggggcacacaagaggagcatggaatcccttctattgctatatatgaatcacatatatgagaatgtgtttatggtaatatgttcttactcttatgatgacaatttcccttcagatacagacaatttcccctcaaatactcttctgatgacaatttcccctcagatatatcacctataaagtgagatggaacagttacattttgttccacagataaagatgtcgatttgtgagtttacttggcaattagtgttcttaaataaacttagaaaaattcgttgatctataagatactttcagtacagtgaaaataacgttacggttcaatagtaccaattaataaaaataaaattaaattaaaatgttgatttaaatataagcaaatatatttattttgaatgctagtaacacacacacacacacacacacacacacacacayatatatatatagcttagagagagaaggaaggtgagaggcatgtaattaaaaaaccaccacttaaaaatgcagtataaaatcgtgcttatgtgttgattctctgaatatgtattctatggcttcaagt

SEQ ID NO: 834442 - DNA, 616 bp, Homo sapiens
atataattataggttggtggaaaagtaattgcagctttgccattaaaaataatggaaataatttaaattgcttctgccccaacctaatatatacatgtgaatatatgtatataaatatcagtaagttaaacaaacagtaataggtataagtatagacattaatgtattaaatacgagtggtttcatggtaaagcagattaaaggtatggagctgggtgggtgctcctagtgggtgatcaaggaaaagaacactagcgaagtgatatttgagcagaggctttataagagagtattttaggcagagtttatagcaagagcaaagccaagaagataaaatattttttactggttgaataataacacagaagcctgagagaccaaactgcttctttaaaaggaagccagtgggtgcagataactttagatgtagtcacaggcagggcaagtggaattgtagaacaagggtaaagattttggctttttttctttttttttgagatggagttttgctcgtgttgcccaggctggagtgcagtggcaccatctyggctcactgcaacctctgcctcccgggttcaggcgattctcctgcctcaggctcctgagtagctaggat

SEQ ID NO: 834443 - DNA, 605 bp, Homo sapiens
aaaattctcagtaattaacattatgacatttgtgaacagcttccataaacttttgaattarggctttaaatcagaagaataaaaagtgtcatggaagatatggctgcatctgcagctccataggaagaatccccacctgcataactattggttgctgtggctaattgaaggtatgcaatgtccaaatttataaagtaatacaaattgtcttctgcctccgcaatcttcttggcctacgatcttcctctgccaacccacactggaatgcaatttatttttcaaaatccaccccaaatactgttatcttcataacctacttttttttttcacttcagctggccctctttgagccaaaacaccaaaaaaactcattaattatccttttaaatgggtgattgactttaaaatattccttctgaaatgattattcacattacagcattttctttaattagacattaggacttcaagccttctatattataactgtttttctttccctctcactattccaaacccagtggaatttcaactgttagctggggagatttttgttggcagaagaggagaaccctgccgtacttactgttaaccatagtatttgt

SEQ ID NO: 834444 - DNA, 561 bp, Homo sapiens
tgtttacaaaccttgagctagatacagagtgccgactggtgtatttacaatccctgagctagacataaaggttctccaaggccccaccagagtagctagatacagtgtccattggtgcattcacaaaccctgagctagacacagggtgctgattggtgtgtttacaaaccttgagctagatacagagtgccgattggtgtatttacaatccctgagctagacataaaggttctccacaaccccaccagactcaggagcccagctggcttcacctggtggatcccgcacaggggctgcaggtggagctgcccgccagtcccccgctgtgctcccgcactcctcagcccttgggtggttgatgggactgggcgccgtggagcagggggtggcgctcgtcggggagactcgggctgcacaggagcccacggaggggttaggaggctcaggcatggagggctgcaggtcccgagccctgcccggtgggaaggcagctaaggcctggcgagaaatcgagcrcagcgccagtgggccggcactgcttggggacccagtacaccctcc

SEQ ID NO: 834445 - DNA, 485 bp, Homo sapiens
  misc_feature 1, 2: n = A,T,C or G
nntggtatccacgctatttaggatccaagaattaaaaattttaaatggaatctggtgtgtaaggccaagaamttgtcttgtcttagatcacccagctgatccccacgatatttctgctacgctagacccttgggacagagatgagatcatggcattgtcatttagacagacttactgaattgactctcaattttggaggaaggggtgcacagtaactgattctcctccctcaccatggagaaaactcttggacattgtcttcaggtcctggtcctttttcccttagccaagaattactggggaattagaaagaggagttctggatttttagcttcagctctattagtgactagaaacagttattaacttccttgggactcatctgtaatcatttatttctttgtaaataaaggcaatggtttccaaatctgggtactggaatccttttgggacctttataaaaatacagatttctaagccccacc

SEQ ID NO: 834446 - DNA, 560 bp, Homo sapiens
aaaaattttaaatggaatctggtgtgtaaggccaagaaattgtcttgtcttagatcacccagctgatccccacgatatttctgctacgctagacccttgggacagagatgagatcatggcattgtcatttagacagacttactgaattgactctcaattttggaggaaggggtgcacagtaactgattctcctccctcaccatggagaaaactcttggacattgtcttcaggtcctggtcctttttcccttagccaagaattactggggaattagaaagaggagttctggatttttagcttcagctctattagtgactagaaacagttattaacttccttgggactcatctgtaatcatttatttctttgtaaataaaggcaatggtttccaaatctgggtactggaatccttttgggacctttataaaaatacagatttctragccccacctccagattcagattcagattcagattagggtcatttataactgcctggtaataataattggggccccagattatgctgccagcttcaaaataaagccaataatttaat

SEQ ID NO: 834447 - DNA, 545 bp, Homo sapiens
ttttagtgatataatatttaaktttcctttgtagattatagagttttgttgaattaagaattaatttcaatttttaaatatttgtataggtattaaaattcattatttcttcctgtaaaaaagtcatctgtgtgtgcttgtgtctttataaagctggaaaaaacacaagggagtaaaatttaaaaatgaaattcatctataaactcaccactaagtgacattaacggtttggagcatgtcctcctttttccttctttctttattttcttctttacaaaaattgtatcacttggtgtgtcagcctgaatactgtcttcccatagatatccatgtatgaggggacttcaaaaagttcatggagaaaaatgaaattagaagagaaaaaacattcttataaacaggctttttctttttaacaaaagaaaaagatgaaaatttttaaaaaattgagctttttttcttaacataaacttcatgaagttcaagacacttttgtaaattatgataccggccatttgatctattcttttttttttttttttttt

SEQ ID NO: 834448 - DNA, 659 bp, Homo sapiens
gcaccagcagcagaatcttgggaatttgttacaaatgcattctggggtcttgtcccagacctactttgaaactcttggggtgatgcacagccgtttgtgttgyactaagctctcaaggtgattctggtacttgataaagtttgggatcatggctttagttattgccactttgcaacaatccaaaacaataagctggggtaagaaatttccattaaaatcctctctttttgtgggctgtatgtgagcagcttactcttgagagaaatgattagcctttttctttcttataaataggagataattacagaggcctgtattaaggtaagagagtagcagcatgctcctaactaatagtcatatcttaagttgtcatccctttcctctattaggattcttgtttgcggttaataactacctttccagtatttcaagattcctgactcttaagtcaactgaatagaagtcaaacttagagtttctctaagcaatgtcttattttcttccctcatgtttttagatgctagtataaactctgttttctctctctcaagcaggaatttattgaatataaattcaataaagtcaacacactctaacattctattttttttctcctaagtcctttaaatgctaacatttcaatgtacatgatctagttc

SEQ ID NO: 834449 - DNA, 617 bp, Homo sapiens
ttattcctatttttcaactatactcagatattagcattttagcaactaaagagcagggccatatctctcactgttattcttccagtgcataaagtagtgaatctctaaatttgtccagggtatttaatagacytcattttaagtgagaatgaacatcaagaagggagaaagaagcctcaggaaagagatgttgacaagactaaacacggccagcgccatctttgccagcatttggaatttgttgggctgttgcaaatataaatggttatttttttcccaaaagaaagggatgaggaggaagatatgaaggagaggaaatagaaactcaaatctggttgcaaaatgacctttgttaccaatgatcccacgaatattgtagcagacagtcaaatggatatcaatcaagtggattacagtgtttcccttccctgacctttgcaatacaggcttactgagaaagaaggcagggcaggaagaggctggaccaggaacaccagcccatctctagttcactactttaggagtggctaatgaatggtgcccatcaggtgtttcagaaggttctgaacaagcagggctcaaactcagccaacagccacatccacgagcactcagac

SEQ ID NO: 834450 - DNA, 617 bp, Homo sapiens
ttattcctatttttcaactatactcagatattagcattttagcaactaaagagcagggccatatctctcactgttattcttccagtgcataaagtagtgaatctctaaatttgtccagggtatttaatagacttcattttaagtgagaatgaacatcaagaagggagaaagaagcctcaggaaagagatgttgacaagactaaacacggccagcgccatctttgccagcatttggaatttgttgggctgttgcaaatataaatggttatttttttcccaaaagaaagggatgaggaggaagatatgaaggagaggaaatagaaactcaaatctggttgcaaaatgacctttgttaccaatgatcccacgaatattgtagcagacagtcaaatggatatcaatcaagtggattacagtgtttcccttccctgacctttgcaatacaggcttactgagaaagaaggcagggcaggaagaggctggaccaggaacaccagcccatctctagttcactrctttaggagtggctaatgaatggtgcccatcaggtgtttcagaaggttctgaacaagcagggctcaaactcagccaacagccacatccacgagcactcagac

SEQ ID NO: 834451 - DNA, 619 bp, Homo sapiens
aaatcccacttcatcatggtgtatgatccttttactatgctgttaaatctggtttgctaatattttatttaggtcttttgcttctgtgttaattaggaatatattggtctataatttccttttcttacagtgcccttttctggctttaatttcagggtaatggtggcttgtaaaatgagtttgggagtattccctcctcttcaatttgtattaaaaagtttgagaaaaactgatattggttcttcttcaaatgtttggtataattcagccatgaagccatcagtttctgcatttatctttgggagatctttcagtactgattcaatctccttacctattatcagtcttctcaggttttcaatttcatgattcagtcttagtgggttgcatgtttcaaaactaaatttattcatttctcctaggttatccaatttgttgatgtataattgttcattgcaagtctcctatgatcctttgtatttctgcaatatcagttgtaatgtcccctctttcatttctgattttgagtcttctctttttttttaagtcyagctaatgacttgtcaattatgtttatctattcaaataaccatctctaaactttttaatgttttattgt

SEQ ID NO: 834452 - DNA, 546 bp, Homo sapiens
gatggctgaagtttaaggatccaggaacttgttgggyccagccttggccctcaccctgctgtgctggtgacctggcagttctatggggacaaggccccagcctatatgccttttgtggcagtctttcccttttcctagttctttagtaaccaggtcataccttattcccagcaaagggtttcctgctttgaatgtccattcctcagagatagaattccctggcctgacgttcaactctagaaaccagttgccagcacctgctgctgctgctgctgctgttgctgctgttgctgctgctgctgctgctgctgctgttgctgctgcctcctaacacaagcctgcctgaaatttgggcctgaaattgggtgtttcatctctcattccttcgcagctcaggtggacaccctcccttattaacttggaggagtcattctacagacctttctctttttttacttctttctttcagatggatttctcagccttagaatatatgttttccttgtatctcaaattttaacctgtggcataaagtccacttgatgc

SEQ ID NO: 834453 - DNA, 635 bp, Homo sapiens
taaaatgttttaaaaaattaagttatagcccgcagaatgacccttgagctttgcaataaatactattattgaaaacaattttattttkaaatgaaaaaagaagaaactgtcttcatagatcatcttcctatgaaatccttttgtataagaaattttctgtgaagtttttataacttcctatgagatcctttgtttcttgtttgcttttctaatactgcaaagaagcagccaagatttttcactgagttatctttctatactttttctactttagcatctaattccatacatgtatttagagggcgttcctcaaaataggtctaattccatttttctgcataattattctaccattttacaaatcttagatatgcattctttattcatttctacaatatgcttttacatggatgccacaaaaacaaatttaaaacatttctagagagtagagcccctaaatgtatactactcactcatctttaaaaatacccagattgttcaaaccaccattttatttttaactgaccacaaacatgcacatgttcttacttttgttaccaaataatcttttggttcatttctagtcattttcgactagatttttagaagtttctttccctcatcttcttccaatt

SEQ ID NO: 834454 - DNA, 592 bp, Homo sapiens
gaatagaatactatataaaaatcagttaaaagaacaaatcagaattataggaaatactaagcaagtctttgtaccaatggaaatcaatgagagtagataatgttttttaraaaatctcaaaaaatataagaaaaatttaaaaagaataattatttgaaatacctatcaattcaggggttctacatttcactgatcgtttcccaaaatgagagaacagagaaaatcataagtaataaatgattaaaatcataggtgctgatggatgtgaatctgcagataaatgtcctctgagtgtgcagacctgctaatgtggcaacatccagactgagacacattactgtgtgcttttagagactataaaataaataaactatctttaaaacttttagagaggaaatgggagacacaccaaaaaaagagatgttgatgagagattatatgaagaaacattgagaaggaatggcgtgagtcattgcagaataagaaaaatggaaaaatgtgtctaaatatctgagtataactgatgaatgttagcaggaaacttaagactctggctgtaaaactagacagaaatagaggaatcacaagacag

SEQ ID NO: 834455 - DNA, 636 bp, Homo sapiens
tatgatcaatggacttgtaaagtgagaagttcatagttcatttatttttgttttttagaataartttttgcttttcctcacgtgatacaaatcctcgtgatcatcaacatggtaaaaagtgtcctgcattctataaaataaagcagtaattgtcttaatacaggaatggtaaacagtgtcctgcatagtatgaaatgatgcagttattgtcttaagatgattaaggtacatgaggcaaagtgatactgctccgggtcagagtgtacactgggatgggatggagaagtggtaggcaggtaaggtatttgatgacttggctacagctgaggtggtttttatcttaactagaattccttgtaaatattgaccaatgaaacttagtaattgaaagataattgagtgcctcatgggcactttactgattactgatctaggaatgattttaaatgatatgcctggtcccttgaagttgtttattgtaaataaactagtaacttatgcactacatacacctgactagtgaagtgtataagctgagagacactaaaacctagtagcatccctgggttaactcatcctgcagaagtccttgtctttcagcatctgaaaatacttccaggggtgagaaagggataa

SEQ ID NO: 834456 - DNA, 600 bp, Homo sapiens
gtatctgttcaaatatttaatacattttcctcctcccaataaggtttttcatgaattgaaagctggaaaaaatagcatttcttcatgagaaagtaaaaaaaattacattttattgagatgcaatcacctgactaagaaaaaataataatttgggtttatataaatatttaaatctttattttcaatttacttaatatctttacattttgttttactttaccattttcttcaattttctttgatttaatagaaaatcaatgtgtttatgattttaacttaggctcaggctattttaattatacaatctattcttttagtatgttcaaataaaaagagacccactcaaacaggaacatccctgataaacatcattttaacaggtgacctttttctttgacatcagattttattttaatagcaactatcttccacgatgcttttactaatatgcttccatctaacatataagaatagttgtgtcatagggtaacttaatcatcaactacattaatattaataaaaacacaaaactaagagccacagtggtgaagcactgtaacataatsattaaatgcatggattctggcaccagaccctcta

SEQ ID NO: 834457 - DNA, 565 bp, Homo sapiens
tgagatatacatataaatacaaatatatacatatataaaaatataaatatatacatacatatacatatatatatatacatatatatatatatatatatatawaactttgtctccagttccttgtacagaaggcctaaaattcttgcaattacctgtggaaatagggttgctaagagaatcttttgttctaatatttggtctttgatcctggttcctgacacagaacttctaatcacttggattttcttgagtaataggaatgtcttttgttctcatgaggtgaccttggtaggcccctggatgggaattggtaaccaaaaagaccaagttatgattagaagcttaaaatgtttagcctcacttttcatcctccaggaagggaaagagtagctggctatggagttaatcacctatcatgtctacacaatgaagcctctgtaaaaatccctgaactacagggtttagggacctctgcatatgtgcagagtacatgtaaggtgtcatgccacagagggcatgaaactttcataaaataaaatattaaacataaactcaactatatcaa

SEQ ID NO: 834458 - DNA, 601 bp, Homo sapiens
tcagaatggacgtctagccaggaatggacgtctagcctatcggaatggacgtctagtcaatcagaataggcgtctagctaatcagaatagacgtctagctaattccaatagacgtccarccaatcagaatggacaccactgtcaacaaccagtaagccagccctgaccatatgactacgttctcaacagtaaggtatgaggcgtgtcctttctgcctcacttactcaaaaggaaagtgcttgctgtccacttcctctcttttccccttctcatgagctacaattcagacatccccacgacccacttcgaccatgcagagatgccagagtaacagtgtgggagaatcctgggtccctgaatgatcacatggaacagcagtctccttatcagggttgttacgtgagagaggaacaaacttcgacctcatctgggccactggattgttgggtcttttttgctactgaagctcagtttatagtctaggtatttagactaaatctaaaatgctctcaattataagatgtaccacaaagaaagacaaaagtgctgccaattaagccatgataagtcatcaattataagacacatctcgttttcaaag

SEQ ID NO: 834459 - DNA, 674 bp, Homo sapiens
tccggctcctgtcctcccttaaggatccccttttggtttcaaaccstatccttcccaacatcctgggtgcccccccaccgagctctggcctccctagtcaccccacttagatcctgtacatagcacagcctgtccccaagcggggaggaggaggagggtgccagaaattcctagggtgtccctgtcttcattgccccccacagcatccaacagagaagagaggagcggccacttcgatcaacagctccccccacaacctcgagttgtgctgcagacggcatcccgtttcctcccccctcacctcccaacacacacacacaacatcggtctctccccacccgaatcctgatgcttggaagaggctggaagggtgttccagaaccttgaggaaggggtgggagcttggggcgaggggtgctgggggcctggatgccctcaaggtccttggcgggggtattaatagcagactcatagctctgacatgggaggggagagcgagaggagagagggagaggaccagctcgcgatggggggactgatgcagggaggggggtacagggagaaggtgagatagagagatggaggcacagggatatggggcatcaggtatgtggggatggggagagggagccaagtgtcagagaaatgggggcgtgaaaggtctgaggtgtagg

SEQ ID NO: 834460 - DNA, 560 bp, Homo sapiens
gtcacctcttgaatgcttttctgcttagaaatttctcctgccagataccctaaatcatctctctcaagttcagagttctacagatctctagggcaggggcaaaatgctgccagtctctttgctaaaatataacaagagtcacctttgctccagttcacctttgcttccaagaggttcttcatctccatctgagactacctcagcctggactttattgttcatatcactatcagcatttttgtcgaagccattcaacaaatctctacgaggttccaaacttacctacattttcctatcttcttctgagccctccaaactgttccaacctctgtctgttacccagttccaaggtcacttccacattttcgggtatcttttcagcaacatccaactttactggtaccaatttactgtattagtccgttttcccactgctgataaagacatacctgaaaccaggccgtttacaaaagaaagaggtttaattggatttacagttccatgtggcgggggaaggtctcacaattgtggtgcagggcraaaggcacttcttacatggc

SEQ ID NO: 834461 - DNA, 599 bp, Homo sapiens
ggtgtgcaccaccatgcctggctaatttttttttttttttttwaatttatagaagtggggtctcactgtgttgcccacactggtcttgaactcctgggctcaaggatcctcccaccttggcctcccaaaatgctgggattacgggcattgagccacagtacctagctgctattaccttctaaactactcttttaatcatcccctagaataagtgtggagtgagccttttaattacgttgcctttattttatatcctttctcaattttcctctttctaatcctatctagaatacctgggttctggttatagcaatgctactaacttgctttaggatcttaggcaggattcacagacttctcatctataaaatgaggggatagaacgaaacaaaaaaaaagatgctaataacattgagcattttattatgtgccaggcactcctctaggtattttacatatgttagcacatttaatccctcataacaacactatatgggaggtatcagcattatccctatctatagatgaggagacaggcttaagagaggttgtggaacttgcccaaggtcacacagctagtaatgaaagaaccatgattc

SEQ ID NO: 834462 - DNA, 566 bp, Homo sapiens
gagctaaagcaagggaagcatttccccttcccytggctgaaagctcagctgaccccgaggctcttctggtcatgcttaggtatgtacattttatgtcacgaaatccagtatcgacttagagatttaaagcagccacccaaagatattaaatgactcttgcatttttcttcaaagagaaatcttcttcctcctgccctagttaaggccttagttgggggctgccagctgccagggactgggcatggtggcttttgtctattctctcccgaatacccctctccccacttgctggttgctttcagagtctaagtggaggtggtgggtgaggatgcagggaagcggatggggagcaggggaatagggcagtttttacttgactgtatgattgccagctctctgggtgtggcagatggtgaaagctctttctggagggttccctgtgttcttcagaagttcccatctcagccaggcgtggtggctcacgcctataatcccagcactttggaaggcggaggcgggcagatcactggagcccaggagtactagaccagcccgagcaacatggc

SEQ ID NO: 834463 - DNA, 624 bp, Homo sapiens
ttcctaaagagtaggcagaaaccagctttagaaaacaagaaatggmcaccccattcctttatccctattagccagtcacctgaggtagtgactgcactcccccaccctctttacagtttcagggtgacagcttgccagtttcacaaagcatcccttcctaaaaactgaccaccattgctggactagttttggctgactcatggaggatgtgcagcgaggatttttgtgtcctctgcttcaccttttgatgtcagagtaaaactgcctttgcaaagattatgacggtaagagaagtctagcatggctgactccatcttggttttgcctcataggctggctgtcctcactcattcctgggtgtaggccaagctaaccatgggaggcatttagtttataatttaactttgaagcaagaatgataataggccctccatgaaactaaccccctctttgctagaagggggttactgaaaccacttttgtgaaagtaatgaaaagggaccgaaaccactttggtaaaagtaatgaaaaaccacaagattgggattatgggatggacctgaattctgctaaaatatatgtataattaaatgataacaagccatggctgggcgtggtgactca

SEQ ID NO: 834464 - DNA, 624 bp, Homo sapiens
ttcctaaagagtaggcagaaaccagctttagaaaacaagaaatggccaccccattcctttatccctattagccagtcacctgaggtagtgactgcactcccccaccctctttacagtttcagggtgacagcttgccagtttcacaaagcatcccttcctaaaaactgaccaccattgctggactagttttggctgactcatggaggatgtgcagcgaggatttttgtgtcctctgcttcaccttttgatgtcagagtaaaactgcctttgcaaagattatgacggtaagagaagtctagcatggctgactccatcttggttttgcctcataggctggctgtcctcactcattcctgggtgtaggccaagctaaccatgggaggcatttagtttataatttaactttgaagcaagaatgataataggccctccatgaaactaaccccctctttgctagaagggggttactgaaaccacttttgtgaaagtaatgaaaagggaccgaaaccactttggtaaaagtaatgaaaaaccacaagattgggattatgggatggacctgaattctgctaaaatatatgtataattaaatgataacaakccatggctgggcgtggtgactca

SEQ ID NO: 834465 - DNA, 493 bp, Homo sapiens
  misc_feature 97: n = A,T,C or G
ctgctggtgacctctgctgcttggggcmtccaattcatgtcagttcccctcccctgtctttccagctgttcagtcgtattcccacttcccaccaccnatctccccgcaccgcacgctggccacgtggaaggtttgcggaatggggcccaggggcttgtggaaggtcacgcagcccatccagggcacagtcggaactaaaactgagccctcttgaagcttggctttcaggggtcacaaactcaaagccttcaggggccagatagccaagggtagagtgtggggtggctctgggttgggcaatggttgggggagtctgtggcaaagtaaaaggtatgtgccccattgagggccaggtgtgtgcaatcctcgccaagtctaagagcgagtccagtgttcacggagggcagtgacccacccagggtcacgcagggattcagaaccactgggtactccgggttcacagtgtgatctttccaggatgccacttactgac

SEQ ID NO: 834466 - DNA, 581 bp, Homo sapiens
  misc_feature 149: n = A,T,C or G
agacagcaatccttgaggtctttgagcaaacgcaagaaccgtccttctcctgctgctggtgacctctgctgcttggggcatccaattcatgtcagttcccctcccctgtctttccagctgttcagtcgtattcccacttcccaccaccnatctccccgcaccgcacgctggccacgtggaaggtttgcggaatggggcccaggggcttgtggaaggtcacgcagcccatccagggcacagtcggaactaaaactgagccctcttgaagcttggctttcaggggtcacaaactcaaagccttcaggggccagatagccaagggtagagtgtggggtggctctgggttgggcaatggttgggggagtctgtggcaaagtaaaaggtatgtgccccattgagggccaggtgtgtgcaatcctcgccaagtctaagagcgagtccagtgttcacggagggcagtgacccrcccagggtcacgcagggattcagaaccactgggtactccgggttcacagtgtgatctttccaggatgccacttactgactgaggacttgggagcagtcctgctcagtcctgcacc

SEQ ID NO: 834467 - DNA, 600 bp, Homo sapiens
tgtatcactctgccatccaggctggagtgcaatggtgtggtctcggctcactgcaacctctgcctcccaggttcaagtgattgtcccgcctcakcctcctgagtagctgggactgcaggtgcatgccaccgctcccggctaatttttgtacttttagtagagacggggtttcactatgttagccaagctggtctctaactcctgaccttgtgatccgcccgcctcggcctcccaaagtgctgggattacaggcgtgagccaccgcacccggccaacattcatacttcttaaagtgaaccacacttaaagtgactcaattcactctatatagccacatttgtatgaatttaaattgtattttaagagtggtgatttagaacaaaaaatacttgaatatgaggctgaatttactgcctccgataataaaccactatgtaaaatttattaacagaagggctgagatctactcactcaacccttagcaggggatccaaggtctttcacggttccacaagcaaaatggtctttgggttttgtgtaatgtttttggaactactagcaggaaatgattcccacaggagagaaagagagtactttcac

SEQ ID NO: 834468 - DNA, 638 bp, Homo sapiens
ttagaggtggcaaatttaacttctagtgagaattatcttgaggaggtgaatctcatcagtggaatcttgccatttgtgatgcaaagaaaaacattaaaatcaagggagctcagaagggttgagtccagctccagaaatacagcatctccggtcccatttcaaacctgctgaaatataatccacattttaggaagatctcagccattcttattcatattaaaagttgagaaccactgtcgtaaaacaagaggtgcaggggaacttctaatttattcttataaaataacgttttggtcctcaatatatgttgtttattaaaatcaactatgggacttaaaaaaatgaagtagctgttgggtttattgcagacctgttgaatcataaaatacatggtgtgggacattggcacatggcatagataatttgagaaaaattaatacaccacccccaagacatatacataaacacaaatacacttaatatgctctctcccccccccaacataactacattaaaatgtatgtgggtgattctaacatgaccacagtttgagaaaactgagcgaagtctctttgatgcagaacaagccatcttcaaatcatctttctggaaaaarcagcattttgtgctaacattta

SEQ ID NO: 834469 - DNA, 525 bp, Homo sapiens
tgctacattttgccttataactattactactattgatgttcacctagtggtgattctatttttccctcatctcttctacattgattagctgaaattattctgtaaaacaaacaaacaaagacaaaaaaaccttctttatacctatattttttctattctcatgctgctaataaagacatacccgagactgggtgatttataaagaaaagaggcttcattgactcacagttccacatggcttgggaggcctcacaatcatggaaaagcaagaaatgccttacatggtggcaggcaagagagagcttgtgtatgggagctcccatttataaaaccatcagatcttgtgagagttatttactgctacaagaacaatatgggggaaactggccccatgattcaattatctccacctggccccacccttgacacttggagattattacaatttaaggtgagatttgggtggggacactgccaaaccmtatcaatacccatttagttatttatgccagaaaataaagtctg

SEQ ID NO: 834470 - DNA, 381 bp, Homo sapiens
atgtcaggtacctagtgtctaaaataatacttgacatatgtccagtattgatttgcttcttgacagttaagttttttcattgggtttactgtgtatacaagctaaaaacttatttcaaaagatttaaaatattgaagtcattttaatgttaaataatagaagtagccaatatccattttttctttttttcagacgaagtctcactctgtcactcaggctggagtgcagtggtgtgatcacagctcactgcaacctccacctcctaggttcaagctattctcctgcctcagccgccagaatggmtgggatgagaggtgctactaggaatgcttgttccccagtgccgtaaagaaataacacttgaacatacatttaatttcc

SEQ ID NO: 834471 - DNA, 639 bp, Homo sapiens
ctaagtctacaagtattataaatacttaaattgaaacaagcaatgaaatttctgtaaaaaacaaaacctgcttttaattagaacattttattagtgcaaaattaatcagaactaagaaaatttttgagattaaaacatatttaattctatttgacaaacataccattcaggaataattatttttctgcagatattcatttatttgttcatttgggaatgatttaggacatacttatataaaaaggtctacctgatctaatccacgttagtcagttatgtaattagtcttccattgcaaaatagattttgatgtacataccagggttttgtctataatttgtattacattctttagctccaattgaaaatagtaatgcatatcataaaaagatgtataggctataaatgcatttttattgttctcactccaaaaattttctactacaaatcatcaaaatattattgtgttctacttccttgtatatatatattattttttggtaaacattgacaattcaaaggaaaactccctaacatagtactgtgttatatattttagaaatgatcatttmaatttatgggttaaaaatggtgctctgtatgagtagacagacaatttagccagatatattatatgtc

SEQ ID NO: 834472 - DNA, 647 bp, Homo sapiens
tcatttcaagtctctccagagggaaaattatacttaaattaagaacagctctcaggcttaagatcaaatccataggaggtttaaaagagtatttacgaatgcatcatagcaagccacctcataaaaacctgcagaccagaaaaaaacaaaccaaagatcctctaagtatcttatagatgtatcttgtaggttcactttcttaaaacagtaagtctcagaatcctaacagttactggttgcagggagttcgtacaatcttgaaggcatgtgtgggttttgcttttattaaatcgagtgaatgataaatggatatacataaaggtcagaaatattgtaaggcattgtttcagcttggacaaaaggaacagagacattaccacttgtaaagaggatattgacataaaattattaatataacgaatttagatgagagatgttaagaggtgttattgttagagtaggaagataggcagatgtgagcagggcagcagagctcccccaacccctctcccccaccataaatrtcaggcaaccatcaggtgatggtcaggcggttgttaaactgtctctctaaataataatgggtcacagccagcgccagggaatggcagtctcccagtagttagaaaatactggaagctggtgat

SEQ ID NO: 834473 - DNA, 543 bp, Homo sapiens
ttacaaatgaggacacatttgtacctttttccaaactgtgtttttaaaagtgtttgtataagagccttagaaaatacagagtatctacttttgaagagcaaaaaataaacattctaactgaacagttaaaaataatgggcatacataaactcgggatttttctgcagtaaggaagcttaccgcttatgcaggtttaactatccctcttcacattaccctgtgaaaactgggtctcagaaactggtgcagaaatgccagtactctagctatgctgattgttgataataaaaaactcttctttgtatctgattcaggagtcttttatcttctactgtaattcatacaattttgaaaagatacctacttagatttctcgtagggtaaaaactttctaatctttcacagtccttaaacacagctatacattttctacttgaattccttaaataaccacttactttgagcacaaaccatgatcaagacaatattatgcacattgtmatttattagaacttgctttccacgaattttaaaatgtcatgt

SEQ ID NO: 834474 - DNA, 535 bp, Homo sapiens
attcatcagaaagatttgaaaatctccaaatatttgaaaatgaaattgcacacttctgatgtgttgtgggtcaaaaaagaaataaaaagtgaaaccaggatgtattttgaactgattaaaaataacagcatcagatgcagtttaagaatacttagaaagaaacatctatattagaaagaaagacagttcttaaatcaatgggactacaacttcaatcttaagaaactggaaaaataagaacaaataaaacccaagtaagcagaaaaaaagaaataataaagttctgggcagaaatcaaagaaacagaaaagcaaatgggcaaaaggcaataaataaaatcgagctgctttttgagaaaaatgaataggtagattaaaactagccagataaatgaggacaaagagagaagacacaaattattaatatcagaaatgagagaggtaatatcactacagattatggagatattgagygatgataaagaaattattcaacaacacagataaaatggacaactccaatgaaaaacacacaa

SEQ ID NO: 834475 - DNA, 537 bp, Homo sapiens
cattctttttaatggctgaatagttctccattgtttatatgtaccacaaatgtttgccatttgtatgtcttcttttgacaaatgtctattcagatgttttgcycatttttaaatcagattattagattatttttcctatagtttttttgagctacttatgtattctggttattaatcccttatcagatggatagcttgaaaatatttcctctcattctgtggattgtttcttcacgttgttggttgtttcccatggtgtgcagaagctttttaacgtgatggattccatttgtccatttttgctttgattgcttaagcttttgggctattactcaagaaatctttgcccagaccaatgtcctggagtttccttaacattttcttgtagtagtttcatagtttggggtcttagatttaagtctttaatccattttgatttgatttttgtatgtagtgagagatagggttccaatttcattcttctgcatatggatatatccagtttttttagcaccatttatttgagactgccctttc

SEQ ID NO: 834476 - DNA, 589 bp, Homo sapiens
acatcttataacccattattttaaactgatggcaaggtaacactgattgtataaacaaacaagcaagcaaagagaaaactaataaaaactctacacttaatctcccatctttttaacttattgttatttctatttatgtattatattgccaatgtctttaaaagttgttctagttattatttttgataggttcatttcttagtctttctattcaagatatgaataatttacataccacagttacagtgttataatagtctgtgttttatttgtacttaccattaccagtgaattttgtaccttcagatgatttcttattgctcattaacatccttttcttttagtttaaagaactccctttaacatttctagtaggacaggtctggtgttgatgaaatccctcagcttttgtttgtctgggaaagtctttattttgccttcatgtttgtgaaggatactctctctggatatactattctaggataaaagtttttttccttcagcgtttaaaatatgtcatacctccctgtcctagcctgtatggtttccactgaaaagwctgctgctagatgtattgaagctcctttgt

SEQ ID NO: 834477 - DNA, 645 bp, Homo sapiens
ctccaagccaccatcatttctcatcattctactggaattacctcctaactggtctctggcttkcatttttggtgcctttcattcctggtctccatgcaagcacccaagagatctttttaaagacgtgtcagatcatatcactcccatttaaacctacctgttgcccttggaaccatatccagaatctgttccccaggaatgataatgccctgtatgattcagtctttgctttccttgccaatttcatttgcgtttgtcttcttccttgttcccaacttgaatatgtaaacctctttccacctcacagcatttgtaccagattttctctctgtttgggatttcctcttctcctggtctgaccacccaatcaaaagcagccacccaataactcaagcacatcaccctgttttaaatctctgctccatattgtcttttttttcttaagggagcccagcctccaagaagaggcataggccccccatattttccattcacatttttcttacttatttgtttattgaccatctcctgtcactgaatcataacatatgtgaggatagggatcttgccttgcccatcggtactttctcagtgcctcgaatcatacctgacactcagaaagaacttaataaatatttattggag

SEQ ID NO: 834478 - DNA, 630 bp, Homo sapiens
ctatgccattttatgtcagggacttgagcatccttttgttttggtatccacaagsgtcctggaactaatcccccttagataccaagtgatgactgtataatcattcaggcaaaattgaagttaatttattgctcatttgacagtactgagtaggtgaaccagttggagggtgtctcttttccaggcagtcattcaggaacaaaggccaaggaggctctgccattttctacaagtagcttccaaggttttcatggggctggtctgcattccagccaactagcagggagaatgggcataaaagagcatccatataagtggtctttatgggccaagcctaaaagttacactcatcacttctacttatattatgtgggctagaaccagtcacaaggctttcctaacaacaaggaagcctagaaaatataggctagttgtgtaccacagaggaagagctgtgcccttaggggttttagaaacatcctacagtctcttccatagcaacctactacatcagttaagtgaagttcacaattcatgaaaatacaaaatgtaggagcttatattagtctgttctcacgctgctataaagaactaaatgagagtgggtgatttatgaagaaaacaggttta

SEQ ID NO: 834479 - DNA, 595 bp, Homo sapiens
gaacttttatgtatgcaacatytagtgctcggttatttgactcagaaattctacaatctttcataactaccaaaggaaaaaaagatttaataaaagcattttaataacggcagttcaattttaaggcaaaaataactgtaattacttggagccttcataacatctaaaatctgattaaaatgtaccaccatttatgagctgtgatggttatcctgtttcacggccctgcaattactgccggtgcctatgcaacttatgcatgcaagaaactccagattgcttctttttcacacttgcattgtactctaatccctcaatatcaagggcaatttaaatgtacaacatacaaaacagaagaaggaattaacaggtgtcaagttactggtgtgcatcaggaattagtaggcagtttagaaacatggcttatgtggatattatcgtcatcatttaaaaacgaaaaccctgagatcgagagaagaaacctgtccaaggtcagagagctagaaaacggaagaggttagtgaggttggaacttaaagctattcagtggcagctgctgtggtctttcactacgctacaaaacggcttaactggg

SEQ ID NO: 834480 - DNA, 595 bp, Homo sapiens
gaacttttatgtatgcaacatctagtgctcggttatttgactcagaaattctacaatctttcataactaccaaaggaaaaaaagatttaataaaagcattttaataacggcagttcaattttaaggcaaaaataactgtaattacttggagccttcataacatctaaaatctgattaaaatgtaccaccatttatgagctgtgatggttatcctgtttcacggccctgcaattactgccggtgcctatgcaacttatgcatgcaagaaactccagattgcttctttttcacacttgcattgtactctaatccctcaatatcaagggcaatttaaatgtacaacatacaaaacagaagaaggaattaacaggtgtcaagttactggtgtgcatcaggaattagtaggcagtttagaaacatggcttatgtggatattatcgtcatcatttaaaaacgaaaaccctgagatcgagagaagaaacctgtccaaggtcagagrgctagaaaacggaagaggttagtgaggttggaacttaaagctattcagtggcagctgctgtggtctttcactacgctacaaaacggcttaactggg

SEQ ID NO: 834481 - DNA, 607 bp, Homo sapiens
tttaaaaaaatgcccaagctaattaagaaatacatttcaataaaatrttactttttatatttattcaaattgggatatttgttattttgatcagctgaacactaattatagttgtaatcatacaaaaaattcctatgttagcatttaggagattatgatcacaggatatacacaaaatttaaatacagttgtctgttggtatatacctgggattggttccaggacccccggtataccaaaatcctctcatacacaagttctgcagctagtcctgcagaacctgcttacagtaaaagtcagctgtccttgggtttcatatacagcatatactatatttttgatcctcatttggttgaaaaaaatctatgtatgagtacaattcaaacctgtgttgttcaagggacaacggtatacacatattttttgctgcaggaaaggataaccaataaggcttatgcctaaaaccgtactatatagaattcttgttagtcagggtttctcaacagcacactattgagatgttgagtgggttaatttcttgttgttgggggttgtcttttgcaatgtaggatattttgcagcatccttggcatgttcccactagaca

SEQ ID NO: 834482 - DNA, 618 bp, Homo sapiens
agtcagggtttctcaacagcacactattgagatgttgagtgggttaatttcttgttgttgggggttgtcttttgcaatgtaggatattttgcagcatccttggcatgttcccactagacaacagtagtaccccactccctagtttatgaaatcaaaaatgtctccagacattgccaactggcccctgggaggcaacagtcccttgctgagaaccactgcagtagagaatagaatagtaatacaatgtaaaactttgactatcaaaatggatgttagtatcaaactactatggtatttaattccatctgataatatttaaaacagtgatagttactgtaaaatgacattttacaatgcactggaaattacattatttgccattacttaaaataatggtcaagaactttaaatgatccactggttgaaagcatcctgtagtttataggaaaggtgagtaatgcacattaaccttcacttagagtttttttttttggaaacggagtttttgctctgtcgccaaggctggagtgcagtggcgccatctcggctcactgcagcctccgcttcctgggttcmagcaattctccagcctcagcctcccgagtaggtgggactaca

SEQ ID NO: 834483 - DNA, 618 bp, Homo sapiens
agtcagggtttctcaacagcacactattgagatgttgagtgggttaatttcttgttgttgggggttgtcttttgcaatgtaggatattttgcagcatccttggcatgttcccactagacaacagtagtaccccactccctagtttatgaaatcaaaaatgtctccagacattgccaactggcccctgggaggcaacagtcccttgctgagaaccactgcagtagagaatagaatagtaatacaatgtaaaactttgactatcaaaatggatgttagtatcaaactactatggtatttaattccatctgataatatttaaaacagtgatagttactgtaaaatgacattttacaatgcactggaaattacattatttgccattacttaaaataatggtcaagaactttaaatgatccactggttgaaagcatcctgtagtttataggaaaggtgagtaatgcacattaaccttcacttagagtttttttttttggaaacggagtttttgctctgtcgccaaggctggagtgcagtggcgccatctcggctcactgcagcctccgcttcctgggttcaagcaattctccrgcctcagcctcccgagtaggtgggactaca

SEQ ID NO: 834484 - DNA, 636 bp, Homo sapiens
tacatcattagaggagacaaaataaaaaataatataaaacaataaggcatacctacaagatctagaaaatagcctcaaaagcacaaatctaagagttattggccttaaggaggaggtaaagaaggagataggggtggaaagtttattcaaagggataataacttcccaaacctagagaaagatatcaacattcaagtacagaaagattatagaacaccaagcagatttaacccaaagaagactacctttaggttttcagtaatcaaattcctaaaggttaaggataaagaaaggaccctgaaagcagcaagagaaaagaaacaaataacataaaatggaactcccatacatctggcagcagacttctcattggaaacgttacagactaggagagtgacatgacatatttaaattgctgaaagaaaaaactgttaccctagaacagtatatctggcaaaaatattctttaagtatgaaggagaaataaagactttcctagacaaacaaaagmtgagggatttcatcaaccccagacctgtcttagaagaaatcctaaaggaagtacttcaatctgaaagaaaaggactctaatgagcaagaataaatcatctaaagatacgaacctcattggtaata

SEQ ID NO: 834485 - DNA, 664 bp, Homo sapiens
gaaaccagctgaggttattcacaaagctcccttgaaaataggaaaaactagggtgggcacagtggcttatacctgtaatcctaggactttgggaggccaaggcaagcagatcaccaagttcaagaccaacctggccaacatggcgaaactcagtctttactaaaagtacaaaaattagctgggcctggtgatgggcacttgtaatcccagctacttgggaggctgaggcatgagaattgcttgaatccagttggtggagtttgcagtgagcttagattgcacttctgcactccagcctgggcaacagagtgagactccgccaaaaaaaagaaagaaaagaaaaggcaagacaagaaaagaaaagaaaagaaaagaaaagaaaaaaaaaagaaaaagaaaaagaaagaaagaaaaggaaggaaggaagaaagaaagaaaaagaaggaaagacaaagaaagaagaaagaaagaaaaagaaagaaagaagaaggaaagacaaagaaagaagaaagaaagaaagaaggaaagacaaaraaagaagaaagaaagaagaaagaaagaaagacgaaggaaggaaggagggaaggaaggaaggggagagagacagaaagcaagcgagaaacagaaagaaagaagaaagaaagaaaaaggaaggaaggaagga

SEQ ID NO: 834486 - DNA, 569 bp, Homo sapiens
tgcaaaaggatcctccaggcatgtaggtgatattgaaggtggaaaacttttctttgttacactggtaccttttaagatttgtcaaacctatttcttgtcattgagaagaggagcagwgcctgcacagtagatgtatttaacttcaaaaacagtttttcaagtctttcagacgccgtaaccctcttcatgtaaattcatatatctttacttgtcatgtcttcttaagcaaggattttttaaagtggcttttaaaaatctttttccaagaaagaatcaagaacaactaaatgcttcattttgattccaagtcttaaacttagtttggaaggggctttacattaaaagaattagaacactgtttgattatttttataatcagaaaaaatattaaaatctttcagattaagacctctttgttgggtcaaaatggaatggaaagttgagtttgaatttggaaataaaaagtttgtactctgtgatggtctttggtatatgtgtcatgaaaaacacacgatttgcatttgtttgctaggaagaagtagatggaatgatgaatggctgtgttatct

SEQ ID NO: 834487 - DNA, 621 bp, Homo sapiens
aatgatcctccttcttcagcctcttgagcagctaggactacagacacatacaccatatctggttaattataaattttttttgtagagatggaatctcgctatgttgctgaggctggtcttgttgcctggyctcaagtgattcttcagcctcagcctcccaaagcactgggattacatgtgtgagccactacaagtggccttatggtcttcatttatcccacttagggtgaatactgttataatttgttgcagttaattatgaggtgctgctccagacttcaatggagttattccataagaagccgtatatgcatcatatcaccttcaaaatcaaaagaaacctgaattccaaaccatatctggccccaagaatttggggtatggaattctggacctctgctctgcttaaattccattggccaaaagttagtcatgggtccactgttagctacagggcacctgggaaatgaggcctttattctgagcagccaagtgcacagcaaaaatctatcgcaatgggatgaggaagactggacattgaggcccaaccagtagtctctgacacaatctcacttgttttctccaaagctttatcctaaaacatcctcagaacctcctgaa

SEQ ID NO: 834488 - DNA, 608 bp, Homo sapiens
aaaagcattcaccctttcactaaatgtgatgttagctatagatttttcatagacgctttttattagattgaggaagcttctttctatttctagtttgctaagagttttgtgttgtrtgtgtgctttttgtttttttttttttgaaatcagcaatggatgttagcttttggtcaaatgctttttctgtatcatctgagatgatcatatggtttttcttttttagcttgttagtgtgataaaatattgattgatctttgaatatgaaagcaaccttgcctttgtagaatgaactccatttggtcatgatatgttgcccttttcatatactgtttgatttgctagacttttgtgaaattttttgcatctgtgttcataagaatactgatctgcagtttcttttcttataatatctttggttttggtatcagggtaacgctggcctcataaaatgaattgggaaatactttccttcaatttttcagaaagagtttatatagagtcagtcttttttttttctctctctcttaattgttgatcaaattcatcagtgaaaccatctgggcctggaggtttttttgtgaaaaaaaatttaactgtaaattcaattt

SEQ ID NO: 834489 - DNA, 451 bp, Homo sapiens
atagctttaacctttcttgaccaaaattccactataatggctgcttagatttggatgaaaactcaacagctttattttttaaaagtttgatagctttataaatgcttttttaaaaaattccggatgtgaaaatatttatgtttgtagttaagattgacccaagtgggactctagatcggtggattccaacagaaatgtttcttcagagatgattattaaataatgggatggactaaacaaagaaggtgccccccccccaccaaaaaaaaagatatatatacatagaactaactttccggtaaactaagcaaattccacgaggaatgcaaagatgaccatttttgaaggtaggaatttaaattgggtttagataacaaataacgggttgyagacagcttacccataatccctccttcccccaagcactaggcagtgaagttagacttctgga

SEQ ID NO: 834490 - DNA, 573 bp, Homo sapiens
aacaagagttgcatatcttcagacttcatgatgcttatttttgttacaaagacacccttatgtagactttttaaacactggcaattccccatgcaaataaaaaatccccagagtctttgaaagaagtggagaaactttaaattttcttgaataaaagatgatctgaaatacatggttcttctttggaattaaccattcgcctcttccaaacgtgttgttacctgtaatccatgaatttcccctccatttgtagactgaaatctccaataaaagccaccaaaatcatttctctagtttatagttggctgatcttggtggactgggaggatgtggtgggtgttgtacaggtaacaacctaggtttatatcctggggactctcaacagacttcaatcaaagaagagaactaaactataggcatgagtacattatgtagtatattccactggaaattcaggatgaaactgtgagatgtaaagacagaaggagtagcttgcytgatgacaagctttttatttacatttagtcctggctatactattcgttgggtctatggagtcccctgcatcatcaa

SEQ ID NO: 834491 - DNA, 481 bp, Homo sapiens
agtataagttataaaaagtacacgtgatttttagatcagaccctgagcaaggcttaattattaagatgaaggacagtgtgttttattttgtcctgtgaaaactatgtaacaagccrtgcctcttccttgggtataatttctaggaagttaaggaatattttttcttctaaaatagcttattacaaaattctagcacaattgtctttcaatgtattcttttgccatgattctcaacattttctgggtcatgaaagtctttgagaatttaaagaactcccagaataatatacatttgctacaaattttgcatgcaattcaggaacttctgacattcttccatggaaccgtgggttctatgtgttctctgatttttctaattttaattttctttcatataaaaaggttattagctttctaaatttactaaaggcagtattataagctttcacatttctttgtaacatagtcataaattttgaat

SEQ ID NO: 834492 - DNA, 481 bp, Homo sapiens
agtataagttataaaaagtacacgtgatttttagatcagaccctgagcaaggcttaattattaagatgaaggacagtgtgttttattttgtcctgtgaaaactatgtaacaagccgtgcctcttccttgggtataatttctaggaagttaaggaatattttttcttctaaaatagcttattacaaaattctagcacaattgtctttcaatgtattcttttgccatgattctcaacattttctgggtcatgaaagtctttgagaatttaaagaactcccagaataatatacatttgctacaaattttgcatgcaattcaggaacttctgacattcttccatggaaccgtgggttctatgtgttctctgatttttytaattttaattttctttcatataaaaaggttattagctttctaaatttactaaaggcagtattataagctttcacatttctttgtaacatagtcataaattttgaat

SEQ ID NO: 834493 - DNA, 641 bp, Homo sapiens
atatggtcctttaacacatatgtagcttagatatagtaagaagtggcagtaaccaattttgttatttttcttcatttcctgaattagtttcctaaggctattttagcatactggtacaaatttaatgggtcaaracacacacatttattatcttaaattctgaaactcaggagttctaaataggcctttctgtacaagcagggctgcatattctctttttttctggaggaactatagaaaaatccattttcttgctctttacaacttttagaaggtgcttacattccttggcccacgtcttccttccatcttcaaagccagaattggtcagttgagtcttaaaccaaatcaccctgacactgactcttctgcctctctcacaaatatttaaggatgtttgtgaatacactgggcccacctagatgatccaggatggtctccctattttaaggtcgtttgattagtaaccttaattccatctgcaaccttaatccctcttttccatgtaatacaccatatttatgaattccagggattaggtcatgaatatctttgggaggccattattctgtctaccacattcttcttgtcaaatgatgttgtacaatttgttcttctcttccctggttgaaatcttagtc

SEQ ID NO: 834494 - DNA, 559 bp, Homo sapiens
actcattattttctccaaaattggaggtctgtaatttctttcttaattcgtgtgttatataatactcatcccccattgtttcagttrttgctttaaatactaatattcctcgtgtaaaagtgagtcatagagtccaatgcacctggccaggagcatcggctacagggcctctacgggcaggattcgctgaataggggagacagagctacctgtctagtatgatgttcgggctctatggagaatagtaatctagagcttaagatgggaaaacaccactttgggaggccgaggcgagtggatcacgaggtcaggagatcgagaccatcttggctaacacggtgaaaccccgtctctactaaaaatacaaaaaattagccgggcgcagtggcgggcacctgtagtccctgctactcgggaggctgaggcaggagaatggcgtgaacccgggaggcggagcttgcagtgagccgagatagcgccactgcagtccggcgtgggcgaaagagcgagactccgtctcaaacaaacaaacaaacaaacaaacaaagatgggaaaaca

SEQ ID NO: 834495 - DNA, 660 bp, Homo sapiens
gcatactactctagagtcttcttcccctatgaatgggtacttatgctctcatattctttccctaaccttgtatataaacatattctcaagaaaggactttatttatgttatatgacctcattcaacctattttacactctgttacctcatgcaaagtttctaaaggtaagcatcaaatgtaaagaataaagaaaaaaatgagtacctgaatacataaagcactttaaaataactgtgttgtattcagtgcttgaaattcccttactttcccttctgcttctctcaaggatgaaccgcaactattgaatcacacatgatgccttccctgacccccactgaagcctgctcttttgtgctcccatagtgctaggcacatttttcacattgttactatttgcttaaaaagtaacatggccacaaatgaggcccattcatctgtgaggtcctgaaggacaggaatcaagacttttgttaaaatctctgaatggctgattattagttcacacctcatacataaaaaacacttcatgaatatttggagagtgattatggggtatgcactggaagtaagcacaaatgcttatatgtcctccttagtttaaaaagtaatttgccattatttaacaattgtgatmcttcacatgaaaatctatagtcctg

SEQ ID NO: 834496 - DNA, 660 bp, Homo sapiens
gcatactactctagagtcttcttcccctatgaatgggtacttatgctctcatattctttccctaaccttgtatataaacatattctcaagaaaggactttatttatgttatatgacctcattcaacctattttacactctgttacctcatgcaaagtttctaaaggtaagcatcaaatgtaaagaataaagaaaaaaatgagtacctgaatacataaagcactttaaaataactgtgttgtattcagtgcttgaaattcccttactttcccttctgcttctctcaaggatgaaccgcaactattgaatcacacatgatgccttccctgacccccactgaagcctgctcttttgtgctcccatagtgctaggcacatttttcacattgttactatttgcttaaaaagtaacatggccacaaatgaggcccattcatctgtgaggtcctgaaggacaggaatcaagacttttgttaaaatctctgaatggctgattattagttcacacctcatacataaaaaacacttcatgaatatttggagagtgattatggggtatgcactggaagtaagcacaaatgcttatatgtcctccttagtttaaaaagtaatttgccattatttaacaattgtgatacwtcacatgaaaatctatagtcctg

SEQ ID NO: 834497 - DNA, 660 bp, Homo sapiens
taatgactgccataaaaaatttccacagacttggtgacttaaaagaacatgcatttttttttaattttacagttttgttggttttaaatcagattcagttctcagataccgataccaatacagatactaggctaaaatcaagatgtcagcagggctgtgtttcttggaagctctagcagtgaatccattcactcgccttttccagcatctaggggccacccagatgccttggctcatggcccccatccttccatcctcaaagccagaaactgcatttgtttgaccattcctcagtattcacatctctttcttatgtctctttctacatttaagggccatcctgattacactggggctgactggttaccaaaggtgctctctgtgtctgctgattagcagccttagtttcatctgcaactttaatccccctccaccatgtattcacaggttccagagattaagacactgacatctttgggggtcattattctgtctacttcatcctcatgtcttccatagtttttaaaagcacacatgggattttacaattgccagaaatgtattgggttttaagtccttgcctgtgatttttttttaatatgaagggtattgtacaaatgcttattctracattcaagctgtggactctgtatggcactg

SEQ ID NO: 834498 - DNA, 584 bp, Homo sapiens
gcaatagacactgtagacatagatttgcctcccatctccatagtgccttcatctacaccaacatttgacaacttgcagacagattgatacattgatataatatcccttaaagattgcctaggaccttttagggcaaaggagatataaaattttctcatgatctcagaattcactgatcttaccatatagcccatcacccgtaagcttctagcttcatagaagaggggaaaggattgttaagagctcaatcaagggactagctagaagtcagcgctggaggagacaggatgctgtcttcaggattcagagtatgcattgaatgctgaaccgatgcctgatatgcggtgtggagtccccatttgcctgccatacatcattctgagatccaaagggtgaaagtgagtgttttctattttttacactcccagaaactcactttcttagtcttcagattcatgaggacagaagtcccggtttctagagagaagaagatattttccaggaacacagcaggaacactattttgtgctccttacacaaatggaccggcaygcaaaaaaaaaaatagttactatttttactag

SEQ ID NO: 834499 - DNA, 569 bp, Homo sapiens
cctttttgtgtgaatttcagaatcaacttgttgatatctattaaaacaaaaagcttgctggaatttttattgtgattgcattaaatctaaaattcawtggagaaatcggtgtcttaacaatactgaatcttctaatcaatgaccgtggtatatctctgagtttgcttagatcatctttaatttatttcgtcagtgttttatagttttctgcacacagaccttgcacatattttattaaatttatatgcaaataggtgttacactttttttaattttagatttcaatttttcattgctcatatgtaagaatgcagttgattttgtatgtggactatgtatcctatgaatttgctaaattcatttattagttccaagagatttttgtagattctctgtaacgttaacacaatcatgttggctgaaaataaagaccattttctttcttcttttttaaactttataaatttaattatttttgcctattgcactagcgaggcccttccacacagtgttaaataataagcagtgaaaaaagacattctcgccatgttctacatcttagataatat

SEQ ID NO: 834500 - DNA, 527 bp, Homo sapiens
gcaatattccagggcctccgtgttaaccagcgggttcccrggaagcctgccagacaagcccacaaacagctgcccaggcagtgtggctgcagcacacgcagtgggaagggaggctcagaaagacccctaaggagcgggtattcaatctagcctcagaagatgaaattcagtaggcgagaagtgttggaaccaaaatcctcgttctggagtcattttatggaagcagctgctttggcttgaaatggcaagccccgggacctctccccacccagtgctttgatgagggccaggccagcatgtactgccaccttcccgtcctttcacctagccctggacagtagctaccttccttgctgtaaaggaaaggccacgtttataccaaaatccagaatctatctgcaggaggcaaagggaagtggggagcccctgggatgaggatctgtgagggtggctttccctgctaagcagaacatctgactgtctcactcctggctgtgtccaggaggtagatgggcttgaaatcaatt

SEQ ID NO: 834501 - DNA, 608 bp, Homo sapiens
ctgctctactcacccttcagtgtgtcgtctgtgtgcctaaattttcctggtcttgtgacaagaaccagagtttaggggaactaaggagcaatgctctgcaacagtatgttgagttttcacrttaatttttctcaaaatattttctaatttcccttctgagttcttctttgaccctttggttaccgagaactgtgttgtttaatttccatttacttgtaaatttcccaaatttccttctgttgttgatttctgttttaattccattgtgctcagagaacataatttgtatgacttcaattcttttttatttatttaggcttttaaaagtcctaccatataatctatcctagaggatatttcatgtacagttgaacatgaggtatgttctgttattgttgggtggaatattctacaactttgttaaatctagttggcttatggtattgttaatgttttatatatccttttagatttacttcattattttatccattacttaaagtggagtactgcaataatcaattactactattacaatgttcacttctcacttcaattctgtttttgctacatgtattctcgggttctattgtggatgtatatatgtc

SEQ ID NO: 834502 - DNA, 643 bp, Homo sapiens
atgtattgaaacatcacattgtactagataagtatgtatcaatattatgtgtccattaaaaaaataaaatacttaaggtagtcaaagcataagaagtatttcaatacatgtttaaaagaatatttttattctaaactatccaaaatcactaacattaaaaaataagtacaaattataatttatatgaatttgtaattaaaattatttaaagcagtattttacatcttttaaaaatgtaattatatctcattaaatacttttataagaataaaacctttgtaattctagtttcgcatccatttagtatagaatataaatgccacactttatagaacggcatatacagaaatttatgagtaatatagattaatactataaaatacttctcagccatcacatgcaactattgcaaatactgcaataattcatgaaaatttttagaaacacaaattggaacataaagagggaaaataggtgtttggattcctagaaaataatacttaattgtacacatatatgcttcattcatgctatttgcagtcaaatgctctacctcctctattatgctattygaaagaagaatttaacaattaatttactgtttctcttacctaagcatttttgcctctcaaattccacacgc

SEQ ID NO: 834503 - DNA, 623 bp, Homo sapiens
tgtatacagttaaatttaagttgttatcaactaaacatrgactattacaatgataaaatttttttgtagcttcatggtaacaacaaagcaaaaacctctagtagatacacaaaagaaaacaatgaaattataccattaaatcatcaaatcaaaaagtgagacagcaagagaggaagcaagaaacaaaggaactataaaacagaaaacaacaaaatggcaatagtactttcttgcctatcaataataaattttaagtaaatgaatttaattttccaagtggttgaattgattttttaatccaaaaatattctgtctaaagagacttagtttagctttcaagacaatcataggctgaaagtgaaaggatggaaaaatatatttcatgcaaatggttaccaaaagagagtagtaatgactatcctgacagcaggaaaacaggatgttaagtaaaaaattgtcacaagagacaaagaaggtcattatataatgatatagggatcaattcatcaagaggatacaaaagttgtagatatatatgcacctaacttcaaagcaccgaaatatatgaaggaaatattaacagacttgaaagaagaaatagcaatgcaataataataggaaac

SEQ ID NO: 834504 - DNA, 623 bp, Homo sapiens
tgtatacagttaaatttaagttgttatcaactaaacatggactattacaatgataaaatttttttgtagcttcatggtaacaacaaagcaaaaacctctagtagatacacaaaagaaaacaatgaarttataccattaaatcatcaaatcaaaaagtgagacagcaagagaggaagcaagaaacaaaggaactataaaacagaaaacaacaaaatggcaatagtactttcttgcctatcaataataaattttaagtaaatgaatttaattttccaagtggttgaattgattttttaatccaaaaatattctgtctaaagagacttagtttagctttcaagacaatcataggctgaaagtgaaaggatggaaaaatatatttcatgcaaatggttaccaaaagagagtagtaatgactatcctgacagcaggaaaacaggatgttaagtaaaaaattgtcacaagagacaaagaaggtcattatataatgatatagggatcaattcatcaagaggatacaaaagttgtagatatatatgcacctaacttcaaagcaccgaaatatatgaaggaaatattaacagacttgaaagaagaaatagcaatgcaataataataggaaac

SEQ ID NO: 834505 - DNA, 537 bp, Homo sapiens
ttgaaaagtgatgctactgggaaacttgaacctgagtgaagcaatgaaagaaaagggagttacaaattagtagccaatgataaaaaaaaatgacatttatgtctaccgtatgttttcctttcaagagtcaggtttggtatttatgtttcttcagttgtaagacatcgctattaaaataatggcttagtctctgcatatgtgtgtaaatgcactaaaacaccatatccactcaacagagaagatcaaagaaaggcagaacagccaagcattctgcttcttttttaagttaacctattgccaactttcataaaaatgtatgtttttcttcactttaaccagtaacttatagatctggaaaatactttgaaagtagtctcaagcatctggtgttttcatttaatgttccacagattcctacaggttctagagaacgtcctcatgagcatccaggggagaggtgagctrccttagacagagaacactttgggatcccacctctgcttcaactagagtatttaattttcatcttatgccttt

SEQ ID NO: 834506 - DNA, 613 bp, Homo sapiens
tataaactctgtttccaataggatcatattctattaagtttaacaagaaaaattaataaaataaaaccatgattccagaaacagatggtactatgtcctttttttttccaaccatgacatataatacaaaggcrttttatagcagtaacccaagcaggaaactatagtgatactgtgatttaaaaacaaaaaatcttgtttctttcagctctgtagatatttgagggactgggagagtgtctgttatcaaaatggaaaaagtcagaagtactaaaatcaacctctgcatttacacacaatttcctgaaatcgtataaatcaccctgtagtaccttttttccatatccctcctgaaagaccactgaggaattaactacagggttttgaaagttgaaggcatgtttcagctctgcaggatttgtacaaaccatcagatgctacccaggcttggaagacagacatttattatatgtttgtcgtctggcctcttttaggtcttgctgtatagctctctatttttaaataatagaaaatcattataggtaatgattataggaggtcttgatttaattgaccaatttgggaattaagcctaaagggtttttaattgtta

SEQ ID NO: 834507 - DNA, 642 bp, Homo sapiens; identical to SEQ ID NO: 770446

SEQ ID NO: 834508 - DNA, 666 bp, Homo sapiens
ccaccaagaaccagaaaagccatatgaattttaatccattgttttacattttaatatatgctatttgcattagtgttcattttgatgaatggggtctattttatttctatattcattcaaacaatttagtgtttaggggctaaaagaaatcccaaacacaatttaaaacaaaccaaaaagaatctaaaacattagctacaaaatattttcaggttaaatggacattaatgtatagattaaatcatttgctctgtgtaatagaaatatatctattaaatagaatcaataaaatgcacatgtatatttttaaaagtaggaaacatcactctatagctgaagtcatgtagcattcttaaaatggtttattttcaaacaagttagtaatgattttgaattttcaaaatattttggctaccttcaccatgcattttacatgttatcttggtttaacaaccatctcaaaaaaaaatccatatatccacattgttgaaagagcctatttggagagggggaaagagaaaaggaattgtagtagccaatkccaagatggccctcaaagatcccctcctcctgatactcacacccttttgtaatctccatcctttgagtgtgggtaggcctagaaacttatttctaggcaaaataatacaacagacataataggat

SEQ ID NO: 834509 - DNA, 615 bp, Homo sapiens
agatttatgaatatatagccttggtcacagaagtaatttaawctgctcaaggtttttaaagtatctaatgcacttctcttttatttctgctggttacaatactgctagaaaagtcagccttgctaaggttaatccaagattacacttgcaatttctgtgtaacttcaatcaaaatagtagagaagaatattgggataatttcatgactacattgctaaaaataaattacttctagtttttaaatggaaaaacaaaaaaatttaaagaaccaacatgaaaacaacaactttaaaaaaaaggtatgagttattcttactctatgtggaaaataaattatgtgaataatttttgcttgttttggcacatttctttaactagatccataggcaagaaaagacagtaaaactcaagttgacatcaagccattaaagacctggaaagaagagggtgttaaaagcgctcaagttcagataacatgtccaaagggataattgatgctgcaaatttttaattggatttaattggatccaagaacatttaattggattatttgatctttagctaaaattacttttctttttggaagttttcggtacagacaatgatttctgatta

SEQ ID NO: 834510 - DNA, 662 bp, Homo sapiens; identical to SEQ ID NO: 817399

SEQ ID NO: 834511 - DNA, 583 bp, Homo sapiens
tcttggctcactgcaacctccrcctcccgcgttgaagcaattctcctgcctcagtctcctgtgtagctgggattacaggtgcctgccaccatgcccagctaattttttgtattttgagtagagatggggtttcaccatgttagccaggctggtctcgaactcctgacctcaagtgatcctcccgccttggccttccaaagtgctgggattacaggcatgagccaccatgcccagccatcatccattgctgttttaaagagttaaatacatcacattattggaacaaattaaaaaaaacactccgaatttttttctacatatattactaataattaatgacttctgaagcatcagctaattatagttttaaaggcctagaattctttgtaaggatagatggcattttttctagaatcttccttttggatggaggagaataaggcaaaaaaagcactggatttggcactgggtagaccttggttggaatcttagctcttagctgtgtgtcccctagagaaatgacctaacctctctgaacctccttcttcatttgtatgatggggatgataatatctctctcatg

SEQ ID NO: 834512 - DNA, 583 bp, Homo sapiens
tcttggctcactgcaacctccgcctcccgcgttgaagcaattctcctgcctcagtctcctgtgtagctgggattacaggtgcctgccaccatgcccagctaattttttgtattttgagtagagatggggtttcaccatgttagccaggctggtctcgaactcctgacctcaagtgatcctcccgccttggccttccaaagtgctgggattacaggcatgagccaccatgcccagccatcatccattgctgttttaaagagttaaatacatcacattattggaacaaattaaaaaaaacactccgaatttttttctacatatattactaataattaatgacttctgaagcatcagctaattatagttttaaaggcctagaattctttgtaaggatagatggcattttttctagaatcttccttttggatggaggagaataaggcaaaaaaagcactggatttggcactgggtagaccttggttggaatcttagctcttagctgtgtgtcccctagaraaatgacctaacctctctgaacctccttcttcatttgtatgatggggatgataatatctctctcatg

SEQ ID NO: 834513 - DNA, 572 bp, Homo sapiens
gaccagcctggccaacatggtgaaaccccaactctcctacaaacacacaaaaattagccasgcttttgtagtcccagctactcaggaggctgaggcaggagaatcgcttgaaccctggaggtggaggttgcagtgagcctagatcgtgcccctgcaacccagcctgggtgacagagcgagactccgtctcaaaaaactacactaaaatataaaataaaataaaatgcagcaggaatctgagaatagaaagattttgaccagcctacaaatagagagttaagcagcgaaggaatggaaaaatcatatgattttaatgagacattaattggtggttccaaagttgtttcctcatttgtacaatgacaagctttggttatacaattctaatttccagttctaaactcctatgcagacccatgtgattgtaagagaagttaggcattatgtataagcaattttgcttaaacggaagttctgtagcaggttcaacagacttatttcacacagtcttactctatatagtacttcaacccctaaaattcatgaaaagtgagaaatataaacttatgttc

SEQ ID NO: 834514 - DNA, 592 bp, Homo sapiens
cacatgtaccccagaactttaagtataataaaaataaatttaataaaaaaagtgatwcacataattttaagtgaagtagtgattcaaagtcttattttccttctggtcattgattcaggaaacgaagtctttagttccagtgggatcccaattttaataaataaaaggaaatgtatatgtgttttgatgtttctgtgtagaaggaaaaccctcaggggaaagaaaaatagaacagtggtttttccctgagaactaaatctcttttcagaaatacaataaatgttcaatttccttaatcagaaaataagttaaaaacatttaaatacatagttaaaatatgtaatagagtactggaattcatttcaaagtagcctgtgtatgttttcgtataccaacaaatgaaaacaaactacatattttaaaaagataaactccaggttaagtttaaattcagagaaaggtcaaaaaaattaccaggatgccatcagactatccattttacaatgttgtgtgttttataaaattgcatgtaacttttctgccaattaaaaatagttccttcataaacccttactatatagagccatagttt

SEQ ID NO: 834515 - DNA, 529 bp, Homo sapiens
gaccgaggggatatgtggtcgccatcttgctcgtccatgttgctaatgaggttaatgattctcatcgggtcatgcaktactttcagtttgacttaaacgtccctcagcaaccatgagggcaggcaaagaggcagcctgagtgctttctgggctaaaaaacccttctcttgggggcgatttccttcccagaaaagacctcaggcatgcgtcatttattatttcaccttcagagtcgttcagtcttagagttgatacagacccatctcacctgcagagataatgacgggatttaccccctttagttttcagaactgtgcttctccaaactaaagtaaaactgttaagcagccttatgaaataaaaacagaaagtgacaacaacaacaaaaaatcctttacgttcaaatatgtatttcttattcccaaactaaagacagggggagactacatgcatttgcatttgcatttcaacaacccaactttactcttgcactaatggggcagagtttttgtttttttcttaaattcaa

SEQ ID NO: 834516 - DNA, 529 bp, Homo sapiens
gaccgaggggatatgtggtcgccatcttgctcgtccatgttgctaatgaggttaatgattctcatcgggtcatgcagtactttcagtttgacttaaacgtccctcagcaaccatgagggcaggcaaaraggcagcctgagtgctttctgggctaaaaaacccttctcttgggggcgatttccttcccagaaaagacctcaggcatgcgtcatttattatttcaccttcagagtcgttcagtcttagagttgatacagacccatctcacctgcagagataatgacgggatttaccccctttagttttcagaactgtgcttctccaaactaaagtaaaactgttaagcagccttatgaaataaaaacagaaagtgacaacaacaacaaaaaatcctttacgttcaaatatgtatttcttattcccaaactaaagacagggggagactacatgcatttgcatttgcatttcaacaacccaactttactcttgcactaatggggcagagtttttgtttttttcttaaattcaa

SEQ ID NO: 834517 - DNA, 624 bp, Homo sapiens
cttgtacccacatattaagctagcccatccttaacgcaaacttggtctttttccctcctcctttagctggttatatgggaccccctcacatgaccacaggtgaggctgggggaggggtgctggtgcaacygtagtgaatgacatggaaatctgggctaattgctcatgcagcttgagtgtgcgtgtgccctctggtcccacttgtgttcagtcccagatgtaccagttttatcctatgatggctttgatactgacccgccctgaccttatcacttggtgtgtctaacaggacgtagctgatggcagccagttttgaatccatgatcacttggtgtctccaccagggcccagtagaaagtaggagctgttttctgaaaggagtgtaatccttcactgcagttggcatgaccttgttacactatccaaggagtctgcattgtgattcctctattgggactcaccataaatgccatactacatctttttccatcactgacatctccaacatgagaagctgtgccagattttacagtccactcaaaagggctgcttgtgtcacagcctggagagctctttcctgttctgagcctcactcaaagctggcaatctctgtgtaacccagta

SEQ ID NO: 834518 - DNA, 617 bp, Homo sapiens
tatccaaggagtctgcattgtgattcctctattgggactcaccataaatgccatactacatctttttccatcactgacatctccaacatgagaagctgtgccagattttacagtccactcaaaagggctgcttgtgtcacagcctggagagctctttcctgttctgagcctcactcaaagctggcaatctctgtgtaacccagtatatgcgcagcagcagtattcttaggtgtgaaatgtgttttgtcaagaacccaaagattcctaacagactttgtgcttccttctttccaataaatataaatgatgcaacaatttttcttttgccttggaaggaatgtcccagcacactggtgaccattggacctttcaaatcgttagtgaagtggcaggtcaccgtatctttgtaggatttatttcccactctcaggagcacatgtgtcataccaaggcctctaccatgctcttcacctctttctcatcctgctagagcagcatgacatcctcgatgtgatggatcaatgtgatgttacgtgagatgtccaaatgctccagttctctttggactagattacggcagaggaytgaaaaggaacatagccctgtggcaaaactgt

SEQ ID NO: 834519 - DNA, 622 bp, Homo sapiens
aatcatttatttagcacagtttctccaaacgagctcaagataacctttataatgctcatttagcagcaacttataataattagtacttgttccttttctgtctgcccagctagaccatagacatcccaaagggagggccagtatctgactggttgtctgctttatttcgtgtttagaacagtcttttacatagtaggtgcttaatatgtattggtagatgaaatacgtcaattaagaccttggcttttcatttgacttccaaaaaggcacttagaaaatcaaaaaaagatactatttcaaggcttccttcagttcaggtaggttcagctcccaaatttggatcaccttacgtgtctttctctggggtcgtctaaagagccctgtacagagttaggaggcctggtactctttccaccactgaccagccatgtgagtcaggcctaataaccttaaaaatgaaacacaaacccaccgctctagtaatatcattgcatttttaaacaggtcttagaaatggaaaagtctggacttgaagggccagcattgacttagacaggcactgacttaggtcactgatcaakaatttttcatgtgggatccttggatcccctagagattcatg

SEQ ID NO: 834520 - DNA, 430 bp, Homo sapiens
tttttttttttttaaaaaaacacttstgtttcataaattgcctctgtttcttctggttttgttttgattttctatttgctttggtctttgtcatctttcacattagaggttgtctttaaatgtttgctaatacttggctgcacctccatttttaagaatgagacactgaagagctgactgagcatatagaccataagtagtgatgtgaactggtagacttcactgaagggaaatcaagtgggctcgaagtagaatccctaaatgttttatttttttaggtgttttcttttgagccagtgaatatgtccaaagagtaatacaatcttctgtcttatggggtggggatggtataagcttagctgccgcagttctaatagcatgacagcagaaggggtctaggggctttcacgacttggtacttaaagctttc

SEQ ID NO: 834521 - DNA, 498 bp, Homo sapiens
catgaatgtgtgttgaatttggtcaaatgyttttttctgaaatgatagtaagctttttctcctttataaatactggtgcatgacataaattgattttcatatttaaattaactggcattccagtgataaaacccacatgaacattttataaatcctttttatatactgctgaatttgtttcctaaattttgttttaaaaaaatgtgtctgtgttcaggacggaaattggcctatagcatttttcttgttagttttcctgtaatgtctttgtctggcagtggtattgaggtgactgaccttatagaatgagttgcaagtgtttcctccctcctatcttctggatgagtatgtgaaagatttatatcatttctagtttaaatattttattgcattagccaggaaagacaactgggtctgggcttttctttatggaaagatttttaaattaatagctcattttatttatgtgttataggtctattcaaatttccaatttct

SEQ ID NO: 834522 - DNA, 619 bp, Homo sapiens
agctttctgtttcaacaaggtatcaaagagaaggtaatctccaaatagggatattgtctcttattcatcgaatctaatagtgctggtccataagcaagcacycaataaatacatgttaaatgaatgaactattataatttgaatcaattatgtatattatgtatcttttggctaaaacaaaatgctctatttttaaaggtcaacttttagtgattctccccagagtatggttttctttgtctcttattcaacatgaaacttgaaggttataagaggcagtataatatgtaggtccaaacattgacattatatcataagagacagatgatgggcattccgaactcataaatttttctattatttgaaagtatgaaagcctttttctcatttatatttctgatgctgtatctgaaataaatttttttcctagttcaggtaatagtagataacagggaccaatctcagggatataattaagactgctttggttttaccctgattccaactgttcagaacaaaatataatttacttctctgaaaaactaatgaaatttaggtgagttttccttctaaaatatgtaggatattatcttctgttcataagcccatccacttagcc

SEQ ID NO: 834523 - DNA, 602 bp, Homo sapiens
acaccagtcagaatggctattattaaaaagtcaaaaaataacagatactggcaaggctgtgaaaaaaagacaatgcttatacayggttggtaagaatgtaaactagttcggccattgtggaaagtagtttggagacttctcaaagaacttaaaagcagaaccaccactcaacccagcaatctcattactgaattaatatccaaaagaaaacaacccattctaccaaaaagacacatgcacttacatgtttacatggaaacaacctaggtgcccattaatggtgaattagataaataaaatgtggtatatatacagaatggaatactatgcagtcataaaaaagaataaaattatgtcccttcaagcaacgtggattcagctggaggccattatctcaagagaattaatgcagtaacagaaaaccaaataccatatattctcacttataagtgagaactaaacaatgggatctcagggacataaaggaactaaacaagaggtactcagggacataaagatggcaacagtcaaaactggggacttctagaggagagagtgagagggggcaagggttggaaaactaactattgggtactatgctc

SEQ ID NO: 834524 - DNA, 641 bp, Homo sapiens
gaagggtgtagtttttaaggtaaaagataaagaaaaaagaacctatgacatattcactgccatagtcaatcttgtacgtgggctgcctcagacagtcacagaagttaaataaggaattggcttttcacatccaaactgtctgtttcctattaagtttctgccccttcatttcctttttgtttattcctctgaagtttcttcttggaagctactgatgtggtggtaagagaacaaaacttgctttaagcactcatcatacaaattaaattttacgtaaaagcaattggtattgctgctgagtaagttcttcctgtagatctctcagacactctgcaaaattgcctgctgacctactccatgggccagagatgccagtggcctgatagccaatagtatctatcataggtgacatttatagtggagagctcctttcagttgtgccaaaagtacacagcaactgcaaacaggctatttgagatgaaatgatatattatattaaattatatgctgcactttcaactgaaaaatgagcatcctaaagcactaaaatactcttgaaaaccaacctgaaaaaactgaaaattagaaaattttatttcgatgaackgagtaggtaaaaatgcataaagatggcatctgca

SEQ ID NO: 834525 - DNA, 533 bp, Homo sapiens
gtgcaaactgtaaaaaaaaatatgaacatgactatatcagttcactcttcaattatacactatatatatttaacattgaaaaattaataaaactcatagatagatggtagactggaaggagatatttacagtccttaaaactgttgaggcgttaatatctacaatatacaaaaaactcttgcaaatcagtaagacccaagagaaaaacaggcgagagacatgcagagttaatttacaaaagaggaagcccaaatggctaacgagtatagaatggaatgctcaaactcactagtaatcagagaaatgtacatgtaagtgacataccaactaacatccatcaaaatggcaaaatgagaaaagtggataatgctaagagttgtcaagggtgtgggggaataagaactcttgtgcagttcttgtagaagtataaactggcatagactttttagcattacttagtaaaaatgggtattcctaygccatttggcctcatgataccattcctgggtatacagttgacccttgaacaacac

SEQ ID NO: 834526 - DNA, 648 bp, Homo sapiens
atctgcacgggagaaccacaatgagctggatctaccaccaccaaacaggaaagccttggagggcctcctgtgtcccagcgaccctctgaacacagcccaaacacagcacctgtctcatctgtaatgtttcttttcagtctgttgttcttaccaggctatgatatctctgtgagtaggaaagatctcctttatggattattggattccaggccaaaaaatgcttttcagtgcatgaatagaccacttccaagtattcccagaaaggcatctcatccttcagaggagcaatggaaggtagagtgcatacactttattttctcttttacactagggacagcaggaaggaggagagcaggaggagggagaaaaagaaacaccaaagccaggaatcgaattaagccatgcggttgtcaattggaagactggaaattgagttgaaatctccaaaattccaggctggcgctgattccagggcaccatactatatataccccatgttaaaaaggcaagaacgagggagtctgattgtttcccttccctggccttaaggtgggttttgaaagccagatccctactcacacaagctgccwgaatcaataaagggatggatcctggaaacacacacatcttggcttctcttatcacaaa

SEQ ID NO: 834527 - DNA, 582 bp, Homo sapiens
agggagtccaactgaatcatttcttaaatcccctcttagtktagaaagccaagcttttggcttggccatagggagcctgtggattctgaagaaggcagatgacagacaaaatgaaggaggctttcttagaatacagttatgttgcagggtgccttgcggactggaaggagggtgaccaggaggcagggaggttacaccaccagtagtcccagagatgtgttgtgtaaggttctggactgtagcatcgcaggaggggaccagccagataggcaaaagctgtgaggtccacaacaaaaggaaaatgaccaggagagcaatcccatttggccactggccttcccagatagatagaaactgatatattaatcatcaaggctgagggcacagggcctatttccaaggaggcactggggaatggatggggtagggggaggatgaggtcaatgtgtagattaaaagaaccaaagaaggcttgcttctaaaaatcatgtaattgcctctggagtagaaagtgagcaagaaaagcctgggagggttttctccaagtacaccacagctccgcaccaccccacggactgctaa

SEQ ID NO: 834528 - DNA, 591 bp, Homo sapiens
tggtgccaagacacctcctggagaggacccagaaggcccggccacaggtgggggtcatggtgccatggtccctgcccagaggatgcctggctggtgcgggggcaagagggaggtggtcctggaggcagcgttgcctttatctacccacaggagcgcactggacaggggtcctgtgagtgtgggatcagggtcccccaggccccatctgccctctggtgcccagtggcatcgagcagttgtcttagccactctgacctccacatcctcctctgtgaaacggggtgcgacaggactacctcttgagctcctgagatcctggcatgcgtagtgctgtgtcaggcgcagttctaggccctctacctttactgggcctaggcagcctcctaccaaaggaggatgagaagacacagagaggctgagcaactgcctgaggtcacacagctgcccagtgaccgcagaggacacagctggtgtcccatccatcagtcacccaccctccccatgcaggactcgcctcttcaygtctaagcctgggacgcccgagcaggatccttgggctgcttctcccagctgcaacgatgggcaggctcc

SEQ ID NO: 834529 - DNA, 571 bp, Homo sapiens
aaaaattttctcccattctgtaggttgcctgttcactctgatggtagtttcttttgctgtacagaagctctttaggttaattagatcccrtttgtcaattttggcttttgttgccattgctgaacaaagctggaggcatcacactacctgacttcaaactatactacaaggcacagtaaccaaaacagcatggtagtggtaccaaaacagagatatagatcaatggaacagaagagagccctcagaaataatgccacatatctacaactatctgatctttgacaaacctgacaaaaacaagaaatggggaaaggattccctatttaataaatggtgctgggaaaactggctagccgtatgtagaaagctgaaactggatcccttccttacaccttatataaaaattaattcaagatggattaaagacttaaatgttagacctaaaaccataaaaaccctagaagaaaacctaggcaataccattcaggacataggcatgggcaaggacttcatgtctaaaacactgaataatatttcattgtatgaatgcagcacagtttatttattcatt

SEQ ID NO: 834530 - DNA, 617 bp, Homo sapiens
tagaacaatttctatttctttgacgatgtacaaataatagrattactggatcaaatggtagcagtttaagccaaactgctttgaacactggctaattcagatttctaccagcagatataaatattcccttttctttacaacttcaccagcacctgttattttttgactttttaataataaccattctgactgctgtgagatggcatctcattctgtttttgatttacgtttctcttatgatcagtgatgttgagcatttttttgtaggcttgccggccatgtgtatgttttctttttaaaactgtttgtttatgtcctttgcccactttttaatggagttgtttaattcttgcttggttaatttgtttaaattccttacagattctggatattagaccttttttggatgcagagtttgcaaatattttctcctattctaaatattatctgtttactttgttaatagtttcttttgctggcagaagctcgttaatttaattaatcccatttgttgatttttgttcatatagcaatttcttttgaatctttgtcatgaaatctttgctagagcctatatcaggaatatttgtaggttttcttctagcatttttatagtt

SEQ ID NO: 834531 - DNA, 617 bp, Homo sapiens
tagaacaatttctatttctttgacgatgtacaaataatagaattactggatcaaatggtagcagtttaagccaaactgctttgaacactggctaattcagatttctaccagcagatataaatattcccttttctttacaacttcaccagcacctgttattttttgactttttaataataaccattctgactgctgtgagatggcatctcattctgtttttgatttacgtttctcttatgatcagtgatgttgagcatttttttgtaggcttgccggccatgtgtatgttttctttttaaaactgtttgtttatgtcctttgcccactttttaatggagttgtttaattcttgcttggttaatttgtttaaattccttacagattctggatattagaccttttttggatgcagagtttgcaaatattttctcctattctaaatattatctgtttactttgttaatagtttcttttgctggcagaagctcgttaatttaattaatcccatttgttgatttttgttcatatagcaatttcttttgaatctttgtcatgaaatctttgctagagcctatatcaggaatatttgtaggttwtcttctagcatttttatagtt

SEQ ID NO: 834532 - DNA, 516 bp, Homo sapiens
atcccagagattctggtatgttgtatctttgttttcattaatttcaaaaaaattattgatttctcccttaattttaattttattgtttattaaaatgccactcaggagtaggttgtttaatttccttgtaattttactgttctgagtgatcttcttagtatcgatttctatttttatagtgctgtagtccaaggatgggtcagtatgatttctctttttttttgttagtttgctgagcattgtttaatggccaattgcgtggcagactttagagtatgtgccatgtacagatgagaagaatatataatctgttgtttgaagtagagagttctgtagatacctgttagacaaatttgttccaatgtcaagttcaggtctcaaatatctygttagtcttcatctaatactgtcagtggggtgttgaagtgtcctactattattgtgtgattatccaagtctcttcagaagtctctaagaacttgttttatgaatctgagtgcttttgtgttgtgtaca

SEQ ID NO: 834533 - DNA, 625 bp, Homo sapiens
tggaaagcaaaatatcttcacataaaaactaaacagaagcattctcagaaactgctttgggatgtgtgcattcaactcacagagttgaacgctttctttgatacagcagtttagaagcattctttttgtagaatctgcaagtgttcrtttggagcgctttgaagcctacggtggaaaaggaaatatcttcacataaaagctagacagaagtattctcagacagttctttgtgatatgtccattcaactcacagagttgaatctttcctttgatagagaagattggaaacgttctttctgcatactctgcaagtgttcatttggagcgcttagaggctcatggtggaaagtgaaatatcttcacatataaactagacagaagcattctcagaaacatttagggatgtgtgaactcaactcacagagttcaactttccttttgatagagctgtcttgaaatcctgcttttgcagaatctgcttgaggatatttggagctctttcaggaattcgttgccaacgggatatctgcacaaaattgacagaagcattctcagaaactttttttgggatgtgtggattcaactcacacagttcaaccttccttttgatagagcagtcttgaaa

SEQ ID NO: 834534 - DNA, 609 bp, Homo sapiens
tatttggagctcttgaggaattcgttgtaaacggggtatctgcacayacaaactggacggaagcattctcagaaacttttttgtgatgtctgcattcaactcacagagttgaaccttcctttgggagagcagctctgaaacagtgtttttgcagtatcaggaagtggatatttggagcgatatgaggcctatggtggaaaaggagataccttcacatggaagctacacagaagcattctcagaaactgctttgggatgtgtgcattcaactcacagaggtgaacgctttctttgatagagcagttgtgaaacattcttgttgcagtatctgcaagtgttcttttggagcgcttcgaaacctgcggtggaaatggtaatatcgtcacataaaaactagacggaagtttgctcagacagttccttgtgatgtgcgcattgaactcaaagagttgaaccttccttttgagaaagcagttttgaaacagtgttttcttacgatctacaagtggatatttggagcgatttgaggcctatggtggaaaaggaaatatcttcggataaaaactacacagaagcattctcagaaactgctctgtgttgtgttcattg

SEQ ID NO: 834535 - DNA, 624 bp, Homo sapiens
taccttcacatggaagctacacagaagcattctcagaaactgctttgggatgtgtgcattcaactcacagaggtgaacgctttctttgatagagcagttgtgaaacattcttgttgcagtatctgcaagtgttcttttggagcgcttcgaaacctgcggtggaaatggtaatatcgtcacataaaaactagacggaagtttgctcagacagttccttgtgatgtgcgcattgaactcaaagagttgaaccttccttttgagaaagcagttttgaaacagtgttttcttacgatctacaagtggatatttggagcgatttgaggcctatggtggaaaaggaaatatcttcggataaaaactacacagaagcattctcagaaactgctctgtgttgtgttcattgaagtcaaagggttgaactccgtctttgatagagcagttttgaaacattctttttgtagaatctgcaagtgttcatttggagcgctttgaagcctagggtgcaaaaggaaatatcttcacagaaaaacyggacagaatcattctcagaaactgctttgtgatgtgtccattgaactcacagagtccaacctttcttttgatagagcagatttgaggcattct

SEQ ID NO: 834536 - DNA, 624 bp, Homo sapiens
taccttcacatggaagctacacagaagcattctcagaaactgctttgggatgtgtgcattcaactcacagaggtgaacgctttctttgatagagcagttgtgaaacattcttgttgcagtatctgcaagtgttcttttggagcgcttcgaaacctgcggtggaaatggtaatatcgtcacataaaaactagacggaagtttgctcagacagttccttgtgatgtgcgcattgaactcaaagagttgaaccttccttttgagaaagcagttttgaaacagtgttttcttacgatctacaagtggatatttggagcgatttgaggcctatggtggaaaaggaaatatcttcggataaaaactacacagaagcattctcagaaactgctctgtgttgtgttcattgaagtcaaagggttgaactccgtctttgatagagcagttttgaaacattctttttgtagaatctgcaagtgttcatttggagcgctttgaagcctagggtgcaaaaggaaatatcttcacagaaaaactggacagaakcattctcagaaactgctttgtgatgtgtccattgaactcacagagtccaacctttcttttgatagagcagatttgaggcattct

SEQ ID NO: 834537 - DNA, 517 bp, Homo sapiens
tatctccacatacaatctagactgaagcattctcagaaaattttgtgttgtgtgcattcaagtcacagagttgaaggtctttttggatagatcagttttgaaaccatccttttctagaatcagcttgaggatatttgtaggtctttgaggaattcgttgtaaacgggatatctgcacatacaaggtagatagaaacatggtcagagactttttgtgatgtgtgaactcaactcacagagttcaacctttctttcgatagagcagttttgcagcactgcttttgcagaatctgcctgaggacatttggagctctttgaggaattcgctgtaaacgggatgtccgcacatacaaactagacacaactattctcagaaacttttttgggatrtgtggattcaactcacagagttcacccttccttttgatagagcagtcttgaaatactgcttttgtagaatctgcttgaggatatttggagctcttgaggaattcgttgtaaacggggtatctgcacat

SEQ ID NO: 834538 - DNA, 635 bp, Homo sapiens
ctgaaacagtgtttttgcagtatcacccaagtggatatttggagcgatatgaggcctatggtggaaaaggagataccttcacatggaagctacacagaagcattctcagaaactgctttgggatgtgtgcattcaactcacagaggtgaacgctttctttgatagagcagttgtgaaacattcttgttgcagtatctgyaagtgttcttttggagcgcttcgaaacctgcggtggaaatggtaatatcgtcacataaaaactagacggaagtttgctcagacagttccttgtgatgtgcgcattgaactcaaagagttgaaccttccttttgagaaagcagttttgaaacagtgttttcttacgatctacaagtggatatttggagcgatttgaggcctatggtggaaaaggaaatatcttcggataaaaactacacagaagcattctcagaaactgctctgtgttgtgttcattgaagtcaaagggttgaactccgtctttgatagagcagttttgaaacattctttttgtagaatctgcaagtgttcatttggagcgctttgaagcctagggtgcaaaaggaaatatcttcacagaaaaaccggacagaagcattctcagaaactgctttgtg

SEQ ID NO: 834539 - DNA, 560 bp, Homo sapiens
tgcaaaaggaaatatcttcacagaaaaaccggacagaagcattctcagaaactgctttgtgatktgtccattgaactcacagagtccaacctttcttttgatagagcagatttgaggcattctctgtgcataatctgcaagtgttcctttggagcgctttgaaggcttatggtggaaagcaaaatatcttcacataaaaactaaacagaagcattctcagaaactgctttgggatgtgtgcattcaactcacagagttgaacgctttctttgatacagcagtttagaagcattctttttgtagaatctgcaagtgttcatttggagcgctttgaagcctacggtggaaaaggaaatatcttcacataaaagctagacagaagtattctcagacagttctttgtgatatgtccattcaactcacagagttgaatctttcctttgatagagaagattggaaacgttctttctgcatactctgcaagtgttcatttggagcgcttagaggctcatggtggaaagtgaaatatcttcacatataaactagacagaagcattctc

SEQ ID NO: 834540 - DNA, 634 bp, Homo sapiens
ggcttatggtggaaagcaaaatatcttcacataaaaactaaacagaagcattctcagaaactgctttgggatgtgtgcattcaactcacagagttgaacgctttctttgatacagcagtttagaagcattctttttgtagaatctgcaagtgttcatttggagcgctttgaagcctacggtggaaaaggaaatatcttcacataaaagctagacagaagtattctcagacagttctttgtgatatgtccattcaactcacagagttgaatctttcctttgatagagaagattggaaacgttctttctgcatactctgcaagtgttcatttggagcgcttagaggctcatggtggaaagtgaaatatcttcacatataaactagacagaagcattctcagaaacatttagggatgtgtgaactcaactcacagagttcaactttccttttgatagagctgtcttgaaatcctgcttttgcagaatctgcttgaggatatttggagctctttcaggaattcgttgccaacgggatatctgcacaaaattgasagaagcattctcagaaactttttttgggatgtgtggattcaactcacacagttcaaccttccttttgatagagcagtcttgaaa

SEQ ID NO: 834541 - DNA, 601 bp, Homo sapiens
tgaatgcacacatcccaaagcagtttctgagaatgcttctgtgtagcttccatgtgaaggtatctccttttccaccataggcctcrtatcgctccaaatatccacttgggtgatagtgcaaaaacactgcttcagaactgctctcccaaaggaaggttcaactctgtgagttgaatgcagacatcacaaaaaagtttctgagaatgcttccgtccagtttgtatgtgcagataccccgtttacaacgaattcctcaagagctccaaatatcctcaagcagattctacaaaagcagtatttcaagactgctctatcaaaaggaagggtgaactctgtgagttgaatccacacatcccaaaaaagtttctgagaatagttgtgtctagtttgtatgtgcggacatcccgtttacagcgaattcctcaaagagctccaaatgtcctcaggcagattctacaaaagcagtgctgcaaaactgctctatcgaaagaaaggttgaactctgtgagttgagttcacacatcacaaaaaagtctctgaccatgttcctgtctaccttgtatgtgcagatatcccgtttacaacgaattcctcaaagacc

SEQ ID NO: 834542 - DNA, 601 bp, Homo sapiens
tgaatgcacacatcccaaagcagtttctgagaatgcttctgtgtagcttccatgtgaaggtatctccttttccaccataggcctcatatcgctccaaatatccacttgggtgatagtgcaaaaacactgcttcagaactgctctcccaaaggaaggttcaactctgtgagttgaatgcagacatcacaaaaaagtttctgagaatgcttccgtccagtttgtatgtgcagataccccgtttacaacgaattcctcaagagctccaaatatcctcaagcagattctacaaaagcagtatttcaagactgctctatcaaaaggaagggtgaactctgtgagttgaatccacacatcccaaaaaagtttctgagaatagttgtgtctagtttgtatgtgcggacatcccgtttacagcgaattcctcaaagagctccaaatgtcctcaggcagattctacaaaagcagtgctgcaaaactgctctatcraaagaaaggttgaactctgtgagttgagttcacacatcacaaaaaagtctctgaccatgttcctgtctaccttgtatgtgcagatatcccgtttacaacgaattcctcaaagacc

SEQ ID NO: 834543 - DNA, 601 bp, Homo sapiens
tgaatgcacacatcccaaagcagtttctgagaatgcttctgtgtagcttccatgtgaaggtatctccttttccaccataggcctcatatcgctccaaatatccacttgggtgatagtgcaaaaacactgcttcagaactgctctcccaaaggaaggttcaactctgtgagttgaatgcagacatcacaaaaaagtttctgagaatgcttccgtccagtttgtatgtgcagataccccgtttacaacgaattcctcaagagctccaaatatcctcaagcagattctacaaaagcagtatttcaagactgctctatcaaaaggaagggtgaactctgtgagttgaatccacacatcccaaaaaagtttctgagaatagttgtgtctagtttgtatgtgcggacatcccgtttacagcgaattcctcaaagagctccaaatgtcctcaggcagattctacaaaagcagtgctgcaaaactgctctatcgaaagaaaggttgaactctgtgagttgagttcacacatcacaaaaawgtctctgaccatgttcctgtctaccttgtatgtgcagatatcccgtttacaacgaattcctcaaagacc

SEQ ID NO: 834544 - DNA, 617 bp, Homo sapiens
gccataaggttgtttcattttcttttcattcattgtttaccagagcaacagttttaatttccttcaagaaatttttctttgcattcacaatgggctaactgtccagcycaagagagctaagttttggcctgtctcgagttttgacatggctttatcactaagcttaataatttctaccttttaatttaaagtgagaggcagacctgtgactcttcttttcacttgaacacttagaggccattgtgaggttatcaactctcctaatttcagtattgctgtgtctcagggagtaggaaggcctgagggcagaaagagagattgggaaatggccagccagttgagcagccagaaaatgcacatttactaagtttgccactttatatgaacatagtttttggcactacaaaaaaatcacaatagcagcatgaaagatcacttataatagatcaccagagcatatataataataatgaaaaagtttgaaatattgcaagaattaccaatacttgaaacacagaaaccaagtgaacacatgctgttggaaagtggtgccaataggcttctcgaggcatggttgccacacatcttcaatttaaaaacaaaaacaaacaaacaaa

SEQ ID NO: 834545 - DNA, 617 bp, Homo sapiens
gccataaggttgtttcattttcttttcattcattgtttaccagagcaacagttttaatttccttcaagaaatttttctttgcattcacaatgggctaactgtccagctcaagagagctaagttttggcctgtctcgagttttgacatggctttatcactaagcttaataatttctaccttttaatttaaagtgagaggcagacctgtgactcttcttttcacttgaacacttagaggccattgtgaggttatcaactctcctaatttcagtattgctgtgtctcagggagtaggaaggcctgagggcagaaagagagattgggaaatggccagccagttgagcagccagaaaatgcacatttactaagtttgccactttatatgaacatagtttttggcactacaaaaaaatcacaatagcagcatgaaagatcacttataatagatcaccagagcatatataataataatgaaaaagtttgraatattgcaagaattaccaatacttgaaacacagaaaccaagtgaacacatgctgttggaaagtggtgccaataggcttctcgaggcatggttgccacacatcttcaatttaaaaacaaaaacaaacaaacaaa

SEQ ID NO: 834546 - DNA, 617 bp, Homo sapiens
gccataaggttgtttcattttcttttcattcattgtttaccagagcaacagttttaatttccttcaagaaatttttctttgcattcacaatgggctaactgtccagctcaagagagctaagttttggcctgtctcgagttttgacatggctttatcactaagcttaataatttctaccttttaatttaaagtgagaggcagacctgtgactcttcttttcacttgaacacttagaggccattgtgaggttatcaactctcctaatttcagtattgctgtgtctcagggagtaggaaggcctgagggcagaaagagagattgggaaatggccagccagttgagcagccagaaaatgcacatttactaagtttgccactttatatgaacatagtttttggcactacaaaaaaatcacaatagcagcatgaaagatcacttataatagatcaccagagcatatataataataatgaaaaagtttgaaatattgcaagaattaccaatacktgaaacacagaaaccaagtgaacacatgctgttggaaagtggtgccaataggcttctcgaggcatggttgccacacatcttcaatttaaaaacaaaaacaaacaaacaaa

SEQ ID NO: 834547 - DNA, 617 bp, Homo sapiens
gccataaggttgtttcattttcttttcattcattgtttaccagagcaacagttttaatttccttcaagaaatttttctttgcattcacaatgggctaactgtccagctcaagagagctaagttttggcctgtctcgagttttgacatggctttatcactaagcttaataatttctaccttttaatttaaagtgagaggcagacctgtgactcttcttttcacttgaacacttagaggccattgtgaggttatcaactctcctaatttcagtattgctgtgtctcagggagtaggaaggcctgagggcagaaagagagattgggaaatggccagccagttgagcagccagaaaatgcacatttactaagtttgccactttatatgaacatagtttttggcactacaaaaaaatcacaatagcagcatgaaagatcacttataatagatcaccagagcatatataataataatgaaaaagtttgaaatattgcaagaattaccaatacttgaaacacagaaaccaagtgaacacatgctgttggaaagtggtgccaataggcttctcgaggcatggttgccayacatcttcaatttaaaaacaaaaacaaacaaacaaa

SEQ ID NO: 834548 - DNA, 433 bp, Homo sapiens
tcttgattaattaacattgctcctttttaggagcaatcagtgcttttccttaagggaaagcatctaatggacactaattataaattttttcagtactttatatggaatgtaagcaacagaggccgtctrtaaggatcgtcacaagcttgacaacatgctaaggcttgctgacatagaaacaatctacaaatatatggcataaaaatgttaagagcaattaatcctaacatgagtcatatcttattatttttggctactcattaattcatttttaaaacatttataaggaaaaaactacatcattgtgataatggactctgaatagcattgcaaataaaatacttattcctttacaaaacttggggcaacttatactaagaaataccgacttcttcatttaacatcctataatttgcatttgctaaatgtgact

SEQ ID NO: 834549 - DNA, 619 bp, Homo sapiens
cctgtgaactaactttatttacttccaacttttcctctgcagcttcctcatctgtctcagttatcayagaactgaaaagacttagggtcttactctggactaggctctggctgaagagaataaggatctataacagatatgctaataatgaaaaggtttgaagtactgcaagaattaccaaatgtgaggtacagagatataaattgagcacatgctgttggaaaaattgtgctgataaactttcaagatgcagtcttgccacaaactttcaatttgtaaaatacataatatctgggaagcacaataaagcaaagtattataaatgtagctgtcaagcaaaactgaattagaatttataacatgtttcctaaattcattccatatatttaatgtaactaggtaaagttatgttaaattgtgaggtatgagtttatcagtagtggcatgaaataatgaacatgtgcattcataattggacaaaaatacttacatttcaacagtataatcttatttttacaatgaatttttaaacaacttaaaaagacatgtcaagaaacccaggcagtattcacaattcctccctccacatgctcagtctatctcctgcttatcttatact

SEQ ID NO: 834550 - DNA, 655 bp, Homo sapiens
accatgaggtaggaaagaaatacacattttcttaggagaaattcaagctggctgcagaaatttgcataaataatggggagctgactgttatccaccaggacaatgagcaaaatgtcttcagggcatgtcagagacattcatgtcagccccttccaacgtaggcccaaaggcctaggagggaaaaacggtttcatgggctgagcccaggttccccctgctctttgcagttttgggacatggtgccctatggcccagctgcttcagttccagctgtgtctaaaaggggccaaggtacagcttgagcagttgcttcacagggtgcaagccccaagctttggcagcttccacatggtgttgggtcttcaaatgcacaaaattcaataattgaggttaggaaacctccacctagatttcagaggatctatggaaatacctaagcataattgtgttttaaaatatgaggaatataagatttgggagtggtcaggggctgaatgttatggtctggctctgtgtccccacccaaatcttatcttaaattgtattcccaatttactgggaaagggacctcatggtaggtgattrgatcatggggtccttccccggcatttttctcattataatgaatgagtctcatgaaatctgatggttttat

SEQ ID NO: 834551 - DNA, 532 bp, Homo sapiens
tctataatgtcaggcagaaaaaaattaaattaaacttttgccaattttagtggcattaaggtaagataatttacagatctgaggctgtttacttagcttaataaatgtatataataacactgtacttacyacatgaggaataaataaataatatatgtaaaacatctggcacagagtaggtaagcaagacaaatgccatgcaatattagctttaagattgtctctgtctgtacaataaagctaaatagtatgatcaatttggttcaaatatttaatgaaatagtcccctagatgccacatgtatatatgctttttttaaataagggttttggtttttacgactaacagactaagtattagagatgtatattattatttttgtctacaaataagaagaatcctttaatgataaagaattttgactataggataaacagttaaatgactgatggataaacaagagaataggagcaaaatgtaaaggcattttgagcttattcggacattatactggttcttaaaagaacaaaat

SEQ ID NO: 834552 - DNA, 662 bp, Homo sapiens
aggagtttaagatatttttgcaacagtgtaggcagataatttttatttaaaattaagaactctccaaattgtattcaattaatcaaacttgacagtttgaccaattacacaaaaattttctgatgtgatattcagttaaaatactttgttaacctttgatacatttattttactaataaaacatacaacctggtgttatcttaaaaagtaccttttttacactgagatatataattttacaaaaaaattaatgttgaattctaattttaaaatcatagtaaagaatcgatataattaatgcatattattttcaatcaaatattcctgaaattttgaaatttacatctaaggagatggcacttctgttgttattcctacatatttatatatcaaaatcaaaatatatggaatatcatgttgcaagatgtttacaaatatcctcaagttgctacaaagacatgggtatctttagcaacatgtttaatgctattatatttaaaaatatacattccctcttgtttctctatattatcaacaatattatttgttataaagcttgaattacttagtatttgatgtttatcttccttttattaccaggaataaactttttttaatcyattactatttttggcatttcttaggttttggatctgtgtaat

SEQ ID NO: 834553 - DNA, 632 bp, Homo sapiens
ggagtcctgggtctccatcctaacctaaggtatcctttcttttgacagaaccatacagaaagacacacaaagtataccagattggctatagcttaagaccaacctcacaaatcctttttcactaattaaaactgtacagagaatataaacaacaatccttattatcccttttgccggtttgcatggggagagagaaaccaaaagctcgactggttaaaaaaaaaaaaaaaacaaacttttaccttcttgccagcatgtcaggctactaggttcccttcacctgagattaactctaagccaaacattttaaggtttggtgaaattaactctttccatgttgaaagaacattataaaaaagccagttgaaactgtaaaagaaggaaaaacaccatagaaaagcctgcgggttccaattaaggttttcaagaggtactgccatttttcctattgagtatggtgtttcccctatttctttgcctttcctattttctcttttcttttaggcctactataggagacatattgygcatctctgaatttttctgctgcttacagagccacctgcttctcagctgtggttaggattttggtttaggaacagcataacatccctccatgagaggtcaaatac

SEQ ID NO: 834554 - DNA, 420 bp, Homo sapiens
tccaaattttatagtctagtttggggaggcagtatctgatttccatacggctcacagttcctttgataaggcctgatgtttacatagcatgtagggaaagctgtctgccccaccctaatcttcttatgcaaatgggttttgtagttgatcagtgctatcttgtctgcttttgatagtacacatggctggcagggaaaggaagatggagccaccatcttaacatgtctgatttttagtatctgtgagcattcacccgtaaaagctcccagcttgcttgtctatgtctgcagctcaactttacaggctgctctttgttaraaaacgattttgggctgcttttcattaaaaggaaaagccttactgaggactcctatgcccttactatcttcctaaataatttcttcttaacttctatatcat

SEQ ID NO: 834555 - DNA, 420 bp, Homo sapiens
tccaaattttatagtctagtttggggaggcagtatctgatttccatacggctcacagttcctttgataaggcctgatgtttacatagcatgtagggaaagctgtctgccccaccctaatcttcttatgcaaatgggttttgtagttgatcagtgctatcttgtctgcttttgatagtacacatggctggcagggaaaggaagatggagccaccatcttaacatgtctgatttttagtatctgtgagcattcacccgtaaaagctcccagcttgcttgtctatgtctgcagctcaactttacaggctgctctttgttagaaaacgattttgggctgcttttcattaaaaggaaaagccttactgagractcctatgcccttactatcttcctaaataatttcttcttaacttctatatcat

SEQ ID NO: 834556 - DNA, 604 bp, Homo sapiens
actgacaacaccaaatgctggcaaatatatggagtaacacaaaccctcatccatttcctgtgggagtgtgaaatggcatagccattttggaagacagtttgtcagtttcttacaaatctaaatatactcttaaccatatgatccaccattcacacttcctggtaatttatccaaaggaattgaaacttatgtccacaagaaaacctgcacatagatttttatagtagatttatttataaaagctaaaacttggaagtaactaagatgtctgtcagtagatgaatgaataaataaactatgatgcatccagacagtggaatattattcagcacttcaaagaaatgagctgtcaagcgatgaaaagacatggaggaacattggatgcatattactaagtgaaagaagccagtttgaaaaggctacatactatatgattccaactaaatgacactgtggaaaacacaaaactgtgaagacagtaaaaggatgagtggttgtcaggggcttgggggagggactgatgaayagatgcagcacagaaaaattttagggcagtgataatactgtgtatgatagttaaatggtgaatttatgtcactatgca

SEQ ID NO: 834557 - DNA, 453 bp, Homo sapiens
gctgtcagtggatctaccattctggggtctggaggatggtgggcctcttctcacagcttcactaggcagtgccccagtgtagactacgtgtgagtgctctgacgccatatttcccctccacmctgccctagcagaggttcttcattgagattccctgcctgcagcagacttctgcctggatatccagacattttcatacataccctgaaatctaggtggaggttcccaaacctccattcttgttttctatgcacctgcagggccaacaccacgtggaagctgccatggctgggggctttcacccttgaaagtaatgacctgagctgtaccttgcccctttttagctatggctagagtggctgagatacattccctaggcagaaaacagcagagaggccctggacccagcccaggaaatcattttttttcctcctaggcctccaggtctctgat

SEQ ID NO: 834558 - DNA, 431 bp, Homo sapiens
ctccctcaccttgccccccagtccccgacaggctcctgtgtgtgatrttcccttccctgtgtctctgtgttctcattgttcaactcccacttataagtgagaacatgcagtgtttggttttctcttcctgtgtttgctgagaatgatggcttccagcttcaaaaagcaggggttacaatcctagtctctgataaaacagactttaaaccaacaaagattaaaaaagacaaagaggggcattacataatggtaaagggatcaatgcaacgagaagagctaactatcctaaatatatacgcacccaatacaagagcacccagattcataaaacaagctcttagagacctacaaagagacttacactcccacacaataatagtgggagactttaataccccactgtcaatattagatcaacgagacaggaaaat

SEQ ID NO: 834559 - DNA, 431 bp, Homo sapiens
ctccctcaccttgccccccagtccccgacaggctcctgtgtgtgatattcccytccctgtgtctctgtgttctcattgttcaactcccacttataagtgagaacatgcagtgtttggttttctcttcctgtgtttgctgagaatgatggcttccagcttcaaaaagcaggggttacaatcctagtctctgataaaacagactttaaaccaacaaagattaaaaaagacaaagaggggcattacataatggtaaagggatcaatgcaacgagaagagctaactatcctaaatatatacgcacccaatacaagagcacccagattcataaaacaagctcttagagacctacaaagagacttacactcccacacaataatagtgggagactttaataccccactgtcaatattagatcaacgagacaggaaaat

SEQ ID NO: 834560 - DNA, 615 bp, Homo sapiens
tggaagagaacgtaataaaatcccacctcccygcagaagctgagaaagtctgcagcttgtgaagggccgagatcccaactgagcccgaagaggtcccatcactctgtatccctgccccagggactgcctttgactcaacccattcctgaaataagccctctgtaataaaaggtctgttcctacctatgagttctgcagtgagtcctacagccatattgtagaaatattgggtttctggggtgagccatattttcccccaacctaaaataatttgctttggtatcagaaaaattatgttttaattatggctttctgacattttttactgggtaaactcaagaaggctgattaaccactctggactgtgattccattaactaccccaaattaggatattttatctcttgcaagattggtgcaaagactagctgaaatatgcaaagtgtctaatgcagtacaagtcaaagaatagggtattcaattaatggtaattataataaaaatatattgataatgggaggacatcgagaaagatgaaggaaatgaaaagatttgaagggaaaatgagtgtttgctaaagtagtgctaggaactgttctcatactttgatcaatc

SEQ ID NO: 834561 - DNA, 579 bp, Homo sapiens
gtgcaacagtataataagagcaaacctaaattatgcttgttgttcactgattgtctccccacagtagcatggaagttcagcaagagcagggatctttgtttttgttcaatgctaggtcctcagcacctaggactgtgccaggcacaaaaacatccagcacccaccaaggtaaaatttacaatgtctgacatcccataaaagttactttaaaaatagaggctgggccaggtgccatggcccacgcctgtaatcccagcactttgggaggccaaggtgggtggatcatgaggtcaggagatcgagaccatcctgccaacatggtgaaacctgtctctactgaaaatacaaaaattagctgggcgtggcgacacgtgcctgtaatcccagctactcgggaggctgaggctggagaatctcttgaacttgagaggttgcagtgagccgagatygcgccactgaaccccagcctgggcaacaagagctagactccgtctcaaaaaataaaaaaatagaagccagtggccaggagctgtgaccgacacctgttatcctagcacttcgggaggccgaggcaggtgg

SEQ ID NO: 834562 - DNA, 576 bp, Homo sapiens
  misc_feature 172: n = A,T,C or G
gtgcgactacccaggctgcagggctgcaaagctggccccattaaagaagcagagggagattgtccagtgataaattgtccatttatcagttgcttagtgtaaaaaccatacattwttatcttgatgagaaatcagctgaccccctgcccctcaaaatggcagcattctgccntagatgtcatcaccgttgggaacattagagtcttgctctgggcaatctggttttaaactttattttccatgtacagtttcagattatacaaaacatagaaaatggactattttaaaggtacattaagtagaaagtttctaactaccctaaagtcacaaaccaagattcaaaatgaacctctaggccttgccctaacatttccccaacaccacaaaattgtccaacttgctctattgtaagtaacctttaaactattagcgagtttagtaacatcccgcgaggcagattttaaactacgatacagtttctatctaggccactgtgtttagtgtgtttacaaacaggcttggagttctaggtttcttcatcatcagtgaacacagagcgtcctagagcgccagcct

SEQ ID NO: 834563 - DNA, 623 bp, Homo sapiens
catttataaaggccttaattggaaacagaaaggtacagatcccaggtcaaggggaaggaaataagacccaactgctgctggggctggaatgtttgtgtgttcaacctagattcaacaacccgaatttcacccctaaaagacctgaacaaacaatttggataaatgcccaccaggtggcaggagtgcctcttcccttcatttctgcaattgaaattaaacatgcaccttatcctttaaaaaaaaaaaaaaccgttttgttttcataagctatttttatccttttcaatgttgaaaccagttgatttcacaatactactaaataacatacttaaaatacagtgccaatgtagcaagtctctaagctagtatctaggtaaaatatggcccttaccttccaggcctccacgttgatctcagttgcttttgattcttaacttgattcaccaatcttacctggaattgccttacaagtcagtcagcttctttaaactcagagtccagagctcttccttggctgtsttcttaattccagagcttcagttctgcttagagcccaacatccttgctggcggattttctcatcaagcaaaatgttccctactcttttccgtcgtgcgttcatc

SEQ ID NO: 834564 - DNA, 596 bp, Homo sapiens
ggatccttccgcctgggcctcctaaagtgcttggattataggcagatcctcractgttaacacagcagtgacaccagaaaggagctagccagcctaaggacaaaagtcatgctcgtaacacagtcacacagtacacagaacccacaacctgaccccaccccacaaaatgcttcctatacctccagtgggaaacctttataccttcattaggtaacagaatcaaactgagtgatgactgaaaattgaatacattgagaaaaggctacggagtggcccaaggaatcactaggaatcctacagactcaaggaaaaaatactttgcaacaacccaatgaggtttggaacctgctacagtttatgcaattcacattctacataatgatatgttagacattttatgcccatttgaaagatggagagacgagcccagagagcttaggagacttgtgcaaggtcacagaggcccagggaataattacagccaggattcaaaaccagctacatggttctgattcatgctgtgtacaccatgctctgctgtctgtgggaactagactgaaggaacagttagttagaattcacactctttgctgcct

SEQ ID NO: 834565 - DNA, 600 bp, Homo sapiens
gggcaagataatagtagtagaaggaaaacaccaatgatagttatttctcatttggggtcagcattgccaagctgctcagggtttccatggcatcatttccaaaccctcctattaaattctaaaggagaatrgatctttgcctgtggacagtgtaaatttgacaacaaatacagggttgatagactggtggaatagaaaaacacaagaagctacgggatggaagctaggccatcgtcaccactgccatggggcagaacagaaagaagcatgatgttttgaccccacagaggagacaacactcaaatcctcttcagtgaacggctgtgtttctagggtactgggaatgagaaaggaagatgttgtatgcacagaaacttaagttattttcttaatgcataattaagaaaagaaaagaaacccacagaaaagtgaggcaaacccactgataaacaggcaggttctatttctgttaactgggtaagcccagattctttaaaagtgattttaaagccgttgatgctatcaactttgaaatgtggtttgaaaaagcggatattacactttagcatatgcctaataactgccctcaccatggaaaca

SEQ ID NO: 834566 - DNA, 592 bp, Homo sapiens
ccaagctctccctagggcatggctggaagaaaayaggttgaggggccagaaaggaggggcccagggtagggcctgggggctcacacctgtaatcccagcgctttgggaggccaaggtgggcggatcacttgaggccaggagtttgagaccagcctggccaatatggtgaaacccctctctactaaaaaagatacaaaaaattaggtgggtatggtggtgcctgcctgtagtcccagctgcttggaaggctgaggcaggagaattgcttgaacccagaaggcagaggttgcagtgagctgagattgcactactgcactccagcctgagcaacctggtaatagccatttctctagagcctgttacctagtgcatttcctagtaagcctcaatttaggatttagattgtcaccacagctccagagtcatccaagcgtgaactggctccttggagatcttgtcacctgtgtctcacaggactcatttctgaccacccaggtgcagaagcactggaaactgtggtggacacaagcttcatcgaagcctgtgccaaccattcagttatcaccctggtgctttgcaaacatcattacaa

SEQ ID NO: 834567 - DNA, 634 bp, Homo sapiens
gattgctcacaaattatacaaatcacattgattactgacaaatcataatgtttacagagcactatttggctttggctccaaagcatgagtaggtatttaattaacaactgtcagatataatttacaccattacaatgaccagaaaatggctgattgctgattttacatactagaacaaatactctgcaactagccttggtaaaggcaaaataactagggactcaacgatagacaataaaatcaaatttcagtaccgtgtttaaccggaagattcttgaaggccatgatacctctgcctccgattagaaatggacatccttttgctcataggtccgagaaactctgtaactagttttgtttcccttttttgccttgactaccaggaaactccaagccaaatctttagccccagtacataacctttttggatactgtggtgtgcaaatgtgtattttattctattacgcctgctttttacttttacatgtgttttactacttcattgtatattaaggatctagcctggatgtcagcaaastacagtccacaggacaaatccagcccaccagcctgtttatgtacagcccacctgttctggataatctgtaatttgttatgcaaataatgggggtgg

SEQ ID NO: 834568 - DNA, 634 bp, Homo sapiens
gattgctcacaaattatacaaatcacattgattactgacaaatcataatgtttacagagcactatttggctttggctccaaagcatgagtaggtatttaattaacaactgtcagatataatttacaccattacaatgaccagaaaatggctgattgctgattttacatactagaacaaatactctgcaactagccttggtaaaggcaaaataactagggactcaacgatagacaataaaatcaaatttcagtaccgtgtttaaccggaagattcttgaaggccatgatacctctgcctccgattagaaatggacatccttttgctcataggtccgagaaactctgtaactagttttgtttcccttttttgccttgactaccaggaaactccaagccaaatctttagccccagtacataacctttttggatactgtggtgtgcaaatgtgtattttattctattacgcctgctttttacttttacatgtgttttactacttcattgtatattaaggatctagcctggatgtcagcaaagtacagtccacaggacaaatccagcccaccagcctgtttatgtacagcccacctgttctggataatctgtamtttgttatgcaaataatgggggtgg

SEQ ID NO: 834569 - DNA, 531 bp, Homo sapiens
gccgaaacctcgacttgcaaatttgagcctccaaaactgtgggaaaatacagttctgctgactgaagccacctagtacgtggcacgcctaagaaacgaatgtgctatgccatcatccttggctacagctacctcatttctgtgactgtgcttagcctggggagtaaatgattctaggaaactgtgtgttgcatctcctcccaggggtcatcaaggaaccttggactttggctggagatcggctcttgggaaacttagctgtaggtgggtggagatggccttacaaatcctgaggtccacaggcaaacatcaggcctgcattcaaagcacaaggcaagcaaaagagaaaggccagacagaaagccacatggagactcagtttcctctttcctggggtacactgaggactgactgcatccatgtgcccagtacaggggctgatccaaaaacaagcacatttgtgctttttcctcttcyttccctctcccttcccctttttcatttattaaactcaagtgaaaagaaaacaaca

SEQ ID NO: 834570 - DNA, 614 bp, Homo sapiens
gaaattaggaaatgagtggccaggccagctggcagtggagctgatggtgaaaggtaccatgcaggtgagctgggccacggcatgccataaccaactagctaagtgatattacaaagtaactgaagaataaatcaatcaatcaagagtgaagaaactggtcagtggagagagaatggagtagatgggaagagagaaacaggcagtcccaggaggaaagtccaacctcaaaagctgctcctggttctctctgtctcttttttgagctaacctgagtgagtctctttgcaatcaatcaaccaggactgaatgaaagaataacggcatttggccaaaaaagaaccacacaggttaacatgcatggtctataccactgccaggacaatgtgggcaggtgctctggaggtgtgtcacctcaatgatatgactgtcacttaaagaccagcatgactttggatgatggattttggaacttgcctcttggarccgagctcacatttgaaacatttctgggctgaagtgggggccatgatccaggtaggattgtctctatggtggacccagctcctggaccttgtcacatttaactagatggcctgggtactgacattatgcag

SEQ ID NO: 834571 - DNA, 606 bp, Homo sapiens
cagccattcactaaatacttgttgattgatgcactacaccctcaggcagttcttcctaattccacttactgtctatggcacactttcyacacagcaatggctagagtgatctaagccttgggttgagtggttctcatctgcacatacctcggctttcttttcagggtggatgaagcccttttctgtaaggcatgtgaatgctgcagggttctggagactttcaatttcttcagagatccagcagaaggagtaggtgctattggttgggtttaggatggtaaaggtcctggccagggtggagagaattgacagaagagagtgggacaggggattgaggattaagagaaatttcttagaacctggccccaacccagtcccccatctgggaagcagaactgttcagagcactttgttactgtggaaataaaaactccatctcctctagcgatccacagtcagggtagggttctggactttggaataacaatgctgccaagggcacaactgtgccaatgatcctctgtggttaaggaggtggtcagggattatacttttgtgtcttccatattttcctcagtggcaaaactaaggagacagaattcagct

SEQ ID NO: 834572 - DNA, 546 bp, Homo sapiens
gtcttccatattttcctcagtggcaaaactaaggagacagaattcagctttcttaacgtaacagttctctaaagtcaaacctctaaaactcaggtcaaaccccaggatatcgagcctgcttataggaataggtctagctcatctatctgaattcttttagagttctttaggaccgatgtgaattcaatcaatgtaaacctaagcaactcaccggagattcttccctcctatgcccacagtggtgaactcaatcacccgggtgtttggatccagagctcccccactggaccctcggagctctgggttgcgctgatggccacttatgtagtccgagtctttcagatcaaaatggcagatgggcaaggtgctccgcccttttgctaccaggaccggaccttgctctccaggtggcaggttgggaatcctgagaggataaggttatttttatttgttttattttgtcatcagttgttgctttcttagttggttggaaatgaatmttatatccaccagaatgtgagctctatgggagcagaggctgggtct

SEQ ID NO: 834573 - DNA, 572 bp, Homo sapiens
ggtattatgcctagtattcactttttttgaatttcttacgagagataaataataaatattagacctggagaggacataagaacattcagtcagatcagcccttgttatctgagtgaggaactggaggtccaaggagtatgcagaactttccagatcacgtaggtagtgtcaaaatgtggttgccaacacctctgtcattaacagaggcagttataaaatatacgctaggccaataaaatgcaaatgaatacttgtaattctataagggcctgcattgatgtcaattcctaaaaaccagtatctcctaggtgctatgcattagtttagttgcctgatagtgtcatgttgagcatcctaccacgataagagaaaaaacaaggtgggcatttgacctacttggagaaagtggtggtttctggcccattataaggaagataagactaaagccatrcatctgatttcggatatgagacatcagcaggcattgttagaagacagtaatgctggcaccatcatgaaaaagattgaataatacaaaatatgaggcatggagaaggcagaaatagtgatat

SEQ ID NO: 834574 - DNA, 592 bp, Homo sapiens
acttggctcctattccttcacgctctgccaagacacctgggtttgcayggaagatggggcccagtgagggaaggacttgtacttgcaagactgtgggagcccagcgtagagcagctggaggctagcagtaaactatgaagaatatggacaattttaacaacatgattaatggacttgggcaaatagatgcagaaagaaaatacacacactattcaaacacacgtggaacatttacagaaaccagtcaccgatgaggccacacagcaaggctccacagatgcaaaagatcaatatgacatagagcatgtactctgcggatagttatcaaaatcaggactaaaaagagaaggcaaaatgaagctgttcatttggaaattagaaaatatacttggaaataattcatggattaaagaagcagccataaaggagagtagaaaatatttagaattgaacaatgaaaacactgaatatcaacaaatgaggactatatctaaaacagtttggaagtttatatgtctttaaatgcttttataacctttttttttttttttttttttagacaagttggagtgtagtggtatgatcacagctt

SEQ ID NO: 834575 - DNA, 592 bp, Homo sapiens
acttggctcctattccttcacgctctgccaagacacctgggtttgcacggaagatggggcccagtgagggaaggacttgtacttgcaagactgtgggagcccagcgtagagcagctggaggctarcagtaaactatgaagaatatggacaattttaacaacatgattaatggacttgggcaaatagatgcagaaagaaaatacacacactattcaaacacacgtggaacatttacagaaaccagtcaccgatgaggccacacagcaaggctccacagatgcaaaagatcaatatgacatagagcatgtactctgcggatagttatcaaaatcaggactaaaaagagaaggcaaaatgaagctgttcatttggaaattagaaaatatacttggaaataattcatggattaaagaagcagccataaaggagagtagaaaatatttagaattgaacaatgaaaacactgaatatcaacaaatgaggactatatctaaaacagtttggaagtttatatgtctttaaatgcttttataacctttttttttttttttttttttagacaagttggagtgtagtggtatgatcacagctt

SEQ ID NO: 834576 - DNA, 496 bp, Homo sapiens
catgtgtgtatgtgtgtggtgtagttctgtgcaattttatcacatgtagatttgtgaacccaccaccgcaattaagatccaraactattccattaccaccaagattcctcgtgcttcttgaggaaataaaattaaaaacaaaatctccctccaacccagaaaatctatccacaaaggtagaagagaaagaaaacaattttattattgaataagtattaaaccagaatgtgatgcccatcacaggcaatctgctgagagattgcaaagacagaaggaagtctgcccctcctatagagccaaccagatccaagccttttcattcctgttctcagagtaaaaaatagctagtctcaagtaagaggacttgacaccatcatttgtcacacatagtttatcctaaatcgacatggtaattgaggtgaccaactgtgttagctaattggctttatccaaaggaaaaacaaacttgtctttctagcagggccccatggaagct

SEQ ID NO: 834577 - DNA, 579 bp, Homo sapiens
gggctttctctagagcagctcttgtttgctgtttctcttttccatgaagaaatttttttttgtcttggtccaggattcagtactgagctagatcgtgtaaagaatctrcctcattgtgaaacggaaatatttgaagtgagatttgacccacagggggccaatcttcctgttggaagcaaagaagtcattctgcccatcaaggtacaaggcaccgctgggcccacccggacctgcaggtttccagctctgcttgctgatggcccctgggataatccagttattatgtcagagccatgattcttcctttccccaaccccatgacacatgataactgcagtttataccctctctaggtggttggagggccaacagttcacatctgtctccaagccaaggtgaccattccaaccatgactctctctcgtggaaaagtggactttgccacaattcagtgtggacagtgcctggtggaaactattcagctttccaatcatctccaagtcccttgtgaatggttcgtccagagccaaaagcctgttgacaaggtaaatgagctgtggcccattggtcctcctttct

SEQ ID NO: 834578 - DNA, 471 bp, Homo sapiens
tcacacctctgcactcagcctgggcgacagagccagactccatctctaaaaagaaaaaaaaaaagaaagwaagtacctatagatttgatgctcagctcagcatttgtttgttgggagaatgaggaactggcctctccatgtagcaacaatgtaccttattttatcaatggtagggagggaccatttcatacctctccagcaatgttggtatcaaccttcagagcagcctccaggaattaccaatctaaaaccaaaactagtacaatctcaccttaactgaacataagtttcctaaactggcattgccctctttcctccactctgcaaaaaagggtacctcatgggttttagttctacatgtgaagttctataacaattgagtcctcagctcaaaataaagcaaacacaacattaagaattttagatttcttttgtgaataagagttgaattgacgttagtttgcatctaag

SEQ ID NO: 834579 - DNA, 646 bp, Homo sapiens
attccgtattgccccctctatatgggcctttctggagctctgactctcctcaattcttctttcctcagcacctgtccgtgaccgtctattgtttgtggaaacccagacactgtgggtcaatgctccctctcaggttgtttgccagcagctaagggaaggtctaggtcctttcttccagagcttctgttcaggtgagaaaacagcttgccttggagctgcttggagagaagaggtttcaggactgcctttcaagcctggcctattgctcctaggcctgtctcctttgctcctccagtactaaatagttctgaatccccctggtcctccatctgtctgcatgtgtcctagatctccctgggcagggattaagtaattgtgccattcccatcagcatgcccaggggtctggcaggagggaagctgccggctggcagcagtgggctgagcaggagccaggggatagtctgctccaactccctgagcagcttgcggctgttcccggccctcagtgggccagccacgtgcctgcctgctytggatctgcctcagctcagaggccagctctcaaaggaagagagcgcacaggcttagatcaaggaagaacgttttccattaccaggatgccccttcaggtctatcccaattga

SEQ ID NO: 834580 - DNA, 540 bp, Homo sapiens
atgttttattttgtttttgcttttttgattgttttatgttgtcttggtgccaaggattagcctgaggtgtaaaattaaggttttctcagatttttattgagcctgcacctcaccctgaacatctgtggtgactttttaatttccctcatgtatgctgttgctttggaatgttatagttatcctgatctggcccccaaaagagaaaaaaacagaaaatcgactacagaatgaaaagagaaaggatgctggttcttccactcttccggaagtcactttatgcagaaaggaggagcttgccacaagtaagggaagtgcaacaacagtggccatgtttctttgtctgtgcctgtgatcagaagctgcttttagtaattagagcacagatcttggctatttggagcagagttctttttgcstactttggctcctgcaaactgtgtgtatgttgctccaggaacacatgcatagctgcctgccatgggactgagggaataggagataggtagctagctactactgtgctaagaggtgaaggtgacc

SEQ ID NO: 834581 - DNA, 592 bp, Homo sapiens
acactgagcattctcagattaaagtcaaagctctattaagttcagtttccttgcatgcatggtagctttgggtggtctgctccattaggcctgtgctctagtcatgccatctctcctaagcactcatcaattgagggaggtagaagccagtgagaagaaactaattattaacagtaaaaattgtagctaatccttacagaacacttaccatgtgtcaaatgctattaaaagtgttttcatatatcattttatcattgcaccaccttatgaggtagtgtattagttgttttcacactgctgataaatacatacctgagactgggcaatttacaaaagaaagagatttaatggacttacagttccacgtgtgtgggaagacctcacaatcatgagggaaggtgaaaggcatgtctcacatggaagcagataagagaagagggcttgggcagggaaactcccatttttaaaaccatcggatctactgagactcaatatcaatgagaacagcatggggaaaacctgcccccatgaytcaattaccttccactggatccttcccacaacacgtgggaattcaagacgagatttgggt

SEQ ID NO: 834582 - DNA, 604 bp, Homo sapiens
cagaacattatttattttcctcataataaccatggcaccttttggactcaagcttgtattacatcattaaaaggtgaagtttttcttctttttattctaaagaggtggttgaaattttctgctccttgaaggtttgcaaaaactgacaagatgccatctggacaagtgttttttatgggaagagttttgaggaatgattttagtggttaacagaaggggttataatcaaaatatttaacagctgttcagtaattgatatatacaaatgcttatatatcaatacgtaaatcaataaaaagtcccttttatgatcttagtaaactgcttaatgaatgataaaatttttagcaaatctattgatttttacaaattattgggggaatctttggatttacatcttaccactaaatactgtctgagccacagtttgatgtgaaacaactagactagaccaaaccattacaaaagttgtcccattraatgaaaagttatcacatgatgtggtgttcaaaagaatttttttcagcaaaatttctatagtgctgaattctcttcaaatttctgataactattatcaacatttgaagttttctggctcctttaa

SEQ ID NO: 834583 - DNA, 604 bp, Homo sapiens
ctagtgggtagaggtgagggatgctgctcgatcgtgagccccgtaatcaagaattatcaacccaaaatgtgacgattgccaagtctgagaagccctgctctgcagacaatatgtctcagagtyctggtgctgatcagacagcacgtttctggggctcaatataggcgagccagagataatgcccacagaaaagggaattgtaattaggagaggatgatctttggcagtatgcatttgtgagcagacactcctgaaaggacagggctgagggtaccttatggttctgtttctcccttaggatggcagcatctgataaccagatacaaaacctgagaggaaatttttaagctgtgactagtctgattcccagctggccagctgagccaccctacttctgtgttttctggtgcaaagaacaaggttctaccgagtgaccttagacttggcttctggataaaattgtcagagagctcctagcattttgcctgagccatcacagggaacctgggtttggaatctcaaccactcatggcaaagttattttcattccccttgctctcacctgcccccatgggaatcttccataggagaaatgttctaattg

SEQ ID NO: 834584 - DNA, 564 bp, Homo sapiens
ttcttcttctttgtgctttcttgtattttctaagcttttcttcggggggtcagaaataactttgtaattagtgttgataaatgtgtttgatgttcactgcgaaagagaacttggaaacaaggcaaagttgatcaaactctcccagagactcagtggaggtgggggtagcaagagggttctggacagctggacagagaatcaacccagcaataagagactggttagttatttggtcatatgctagcccacttagagttagaaccactgtgggactcttctgtagtacggtgttgcctgggaaccatccctcctaaatttcagcacacggcagaggccatgccaaatgatcttggaaccctcggtccacctgctccagagcccgggatcacagtgctgtaaatgagtctctgtgactaaaaaaaaagccaactgacattccaagacagaaagcatttcatagcgagcatgtacaatgattttttccttcagaaaccaycaaaagtaaagactccattagaagtgttgtcacccaatccgattctctctcccctttctaaaagccgc

SEQ ID NO: 834585 - DNA, 606 bp, Homo sapiens
ctgtgctggagttatatttacaaagggaacagatagcaataattatytggggttgtagttagtcattattagttaatgcctgagcataattgagaggaaattaagacaagtgtagattatgggtacaaaacgggataaataagcatctgtcagaacataaattctacctatatttttgggcatggatgaggaactcaactgcacagagaagcaacaagttcctcacctgaaatctatttaacaagaagcatgtgcaatctatattgtctaattttgaataattcacattctgggctttctgttatagatgttcactctcagaccaacttttcttggtgatgcaatatgcttctgagctacctctctttcctttgactcaggggaacccacagaaggcaaactcagtctaatcacccggagccaagaaaatagaggagtctgtcattttcaaaatactcaatgtatcccaaagtcaaatctaaaatgggaatgagttaggtatgttctggcttccattagattattgcaagttgactcgtttttaaagtttcagctttaatattgttaacagtcattagtgtaggtaaatatgactcataaaggtat

SEQ ID NO: 834586 - DNA, 557 bp, Homo sapiens
aagggtggcaagtgagccgtgtttaaacttagtacgtttagaggtcactgtatataggtatgccattctgaagccagttttgttcctggggtatgttcttggttaaatcacatcatccctctagattctggagagctctgacccctaccttattctcaccttctgtggggactatgagaaattcctggacatcttaagcctcatagagaggatttcctggaaatagagctactattctcaatttgacaggtctattcttctcctggagggagaaggaaaaaagaaacgccagcttcctacatctccttcccacttgtgtcctttcctccttagagccatctttcttcaccaagtataacaagttagaaggaagaaaattaccgagtgtccttttgagctcaataaaacctttagcttggccgggtacggtggctcaygcctgtaatcccagcactttgggaggccaaggtgggcggatcacgaggtcagaagatcaagaccatcctggctaacacggtgaaaccccgtcactactaaaaatacaaaaaattagctgg

SEQ ID NO: 834587 - DNA, 570 bp, Homo sapiens
ttacagccaggtctcctgccggaatgaccctttagtactgttgcacattgaaacaatcagtattagatgtgggcggctcctggaaggaaattgaccttgggcaaggcwgttgttttcagcctcagtcaattgttggagagactgacagcagagagatattctctggcaatactatcatcagctgggggtgtgaatccttcattcttccagggggtcctgggtggcacattacagtatccactacactaggtattagctactatgcgattagtaagtgatgaggcatggtgattagaatcactggctttgggtctagtctgggctagattcaggttctggtgctactactcattaaccgaggcaggtcccttcatctctagtgggggaaatctcagccactacctcctggttctcagaaggttcccatgagataaggcacagagagcctgacactagaaccactggactccactggaccctggagtcctcaagttccggatctgacttaacagtttcagttatcactatctgacttaacagccaaaagcagaatcacaatggtttaattaa

SEQ ID NO: 834588 - DNA, 557 bp, Homo sapiens
ttggttgccaaattaaatgccccagatctattcactctagagggtggtgtcatttctggaaaacagaaagagaaggctctgctctctatcttgatatttgacctgtttaatataatttgaaatgaacctttagtgtgataaatggggagacagaacaattccttgcagggccaacgtctccactgtgctttggcccctgggtggcagcttgagtcagagagggcaggtgcctggcactttgatttaggataatgggggccaggctgcggtggagcagtcacactgaggaaggcaggaacaagtctggagacagctgaggccccagaaacgcacccagaaagtggaggccgtgagggcaaagctgctcaacaccaagtgtgtggcttcggcatgatagacacaaagtaaccacaaaacagtcaagacyatccttaaatgaagctcctctgtgttctctactgaattgggggccaatcctgggttcaccccagagtgaaatcaggccccacctggcactctgtaccactgtatgccagatggaaggacttgatggttag

SEQ ID NO: 834589 - DNA, 401 bp, Homo sapiens
agcatccctggctcctacccactagaaaggcgaagtagcacccccacccccttccccatttgtgacaagcmaacctacctcctgagactgccaaatgtccacgggagcagaagagaggggtgcaaaaatcacccccagttgagattcaccaatcgacataaatgtcagcttcttagaaagtattttcctggccacttaaactaaaataacccccttgcctcatcaacatcactctctgttgctttgccccacttgtttgtggttgtccatagaaagtgccactcactgaaattatattatgaatcagttgactggtttgctggctgtctccccagcttgcacgtaagtctcacatgagcagaggccttgtccattttgttctctgctgtatccctcacgcc

SEQ ID NO: 834590 - DNA, 659 bp, Homo sapiens
agggttctttcccatgtccatatcrgtgtgttcttccttccatagtgaaaacccgactcccaatgataacaacaacgttcactcctctgttcaattctgtaatactccaaaatgttctcagaagattagaacaaaaacagcaacatgaaacaaacctattaaccctattaaagattgtgagtggatagtgaaacactgtgttcgtaagttatactgattagttttgtttaggttgattcccttcagtgttgttatagcattcatataaaatacatagtctgctaattttatattcagttttataatgtttttatccccctcccatctttattaattttttgtgcttccaaaagtcaaaatttattcaagaaagtataaaactgtctcactctctctcatattccacctgcccactccagcctcaccttttccaagtaaccaatttcattttggttgacttattttcctgtgcatattttttttctagtaaagataagcagacacatgtattggtttttattttctattccttctttacacaaaaggtagatgtttttacttaacagtattttctgaaaatcattgtttataaaatcctccttcttgtttacactggcagagagtcctattgtgtggcatggagaggttacacatccact

SEQ ID NO: 834591 - DNA, 566 bp, Homo sapiens
gttattaactacaggcaccatgttgttcattaggtcttcagaacttactcattttgtaactgcaagtctgcaccgtttggccactaactccccttttttccccatcccacgacctctggtaaccactcctccaccgtttccatgagtttgactttttagatttcacatagaggtgagattatgcagtattcgtctttctttctttggcttatttcacttaatataatgtcctccgggttcatccatgttgtctcaaatagcagatttctttcttttttttaaaggctgaataatgtaaattgatacagccattatgggaagcaggatgaatgttcctctagaaattagaaatagcactaccatatgatttcccattcccacttctagttatatatccaaaggaaagaaaatcaccatctcaaagcgatctcagtactcacatrttccttgcagaattattcacaagaaatagaaatgaccgatgtgcccgtggacggattagtggtaaagaaaatgtgatcacacacacagacacgcacacacacacacacaccatatacaatgga

SEQ ID NO: 834592 - DNA, 607 bp, Homo sapiens
attgcattttagaataaacacctgtatgccctgcaaggtattctccaagaatgcacacaatctggcctcttcctgcctatttgrtgttgtaactattgacagcaacaggaggcagagaaactctaggcagccagggattggtccccagtgaaaaccccaacttcagactaaaagttgcctgaaacctgtggcttaaagtgagaactcctattcctgtttgcccactctttcctgattagttctttctgaataatgtctttttaccaatggaatgttgccttttccaaaactacccatggcccaccccacccctaatcctgtgcctataaagacccaagactcagtcagtagagagggaggtgacttgacttcagagagaggtaacttgatttcagagggatggctggactttggaggagagacagcttgatgacttgacttctgagaagaaccagccagagatggccaggctttgggggaagattacatgcccatcccaacccctttccagctctcctctccactgagagtcacttgtatcactcaagaaaattctccatattcaccatctttcgattcatctgcatgacctcattcttcttgggca

SEQ ID NO: 834593 - DNA, 511 bp, Homo sapiens
tgtccccaggttgagaagaatcatcccagaaggtactacgagttcacacagtgaacaagcccagtgttaaataaaactgaagcatgtagagagaaaactttaattgtctttcaacctttatgattggtaaagaacagacactcctttggattgtactgtgtatttaataattctaacattttccagtatccctttttagcagacatatagtagccttttgacccaacagtggaagtgagaaacccatcactttcctaaaattaaggcaatggcgctggttgcacccccacttccctccacctccaccaacacacacaaagcaggaaggaataacaagatttactacataacaaagttttcagaggagatcagggcaggcttacaagcagctgcataaatgttttgggagcacagaaatagatggccagcttgggttatatgctggttaggayggggcttccttgtgttgccaggacatacgtggttcaaacttcatgccagcaccacgaga

SEQ ID NO: 834594 - DNA, 568 bp, Homo sapiens
gaagtaaacactgctctgtgaagtaaacatgtgctgagaactgagatctaaarccgtttaagacttctgctgttcctgcctatagcaaggagcacattttcttcactgcttgaagtggagaaaatggctattcccagccattcctgaagctcccatggggactgaaatccagtaatgctgctaaatgaatgaaagaaattagggtacctgggttcccagatgtcctcaaatggggtttaggtcaggaagaagttgccacagaactcaggacctactttgctactggtggtgacgtgcgtaaatgtgaccacttctttttactccacagaaatttttaagtgtccaaactgatagattgctcaccagcaaacactgaaatctcttgctctagtcatagggcgaggctttggaaaaattaagaacagaactcagagctcctcatatttcctagtgatttccagtggactttacatcctgccctcaaagattttctttgaagagttatgatttcataatctgacccaccaaaggctgtgaacaagatcatgtaatgatgcttcatatccaa

SEQ ID NO: 834595 - DNA, 615 bp, Homo sapiens
ccctatggcccctctcaactcatgtgaactctgctcactcctagcagatggtattctctctccctgacttcctctcgggatgtttcaggcaaccactaaggtggcctccagggatccctgccttctggtacttactgcctgtatgatcccatccccgttgagtgtgggctggatttagtgactagcttctagcaaatagaaataggcagaagcaaaatcacttccaagattagataattaaaaaaagatcatggcttctgtcttagtctctctctctctctgtctctctctctctccctccacccccgccaccacccctcattctgcagaagataagctgccatattgtaatactctatagagaggcccataaatcaagggaccaatgttcccagccagtgaggacctgagcctaccaacagccatgtgagtgagcttgggagtagatccaatcccggttgaacattgagatgactccagccctggccaatacyttaactgtaggtttgtgaagaacaggaagttatagccagaacatatagattcctaacccactgaagctgtgagataatgtttgttttaaactgctatgtttgggggtaatttgtaacacag

SEQ ID NO: 834596 - DNA, 642 bp, Homo sapiens
tcttccatcttcagagccagcagaatagcatcttcaaacctctgacctctatatccaccctcacatatcattctttcattcttctaactccttctttcccttataaggatgcttgagattacattgggtccaaataatccacaatcatctccccatctcaagacatgattaatctaatgacatctgcaagatccttttgccatgtaaggttcatattaagatgtggaggtctttagggggctgttattctgcgaccacactgagtatccagattgaggagggaacagtgaagatcaggccagagcctaggcacctgcccccacagtagtagggtagtgtttagtcaggccttcacagcaccagcagagtggggcaggaagtctgtaggtgtgagttctaatcctagcaaaatgacttacacaatggccaaagctaccctgtgttttacctggttacaggcagatttgcattcagcattccctaaaaccataaagctgttactgacaatccatgataccaaattagcttgtaagtctgggtaggactgaggacagcaggaaggtgccaccaagaacctgaacaatgagttgcccctgttaattttaaattcttaaaatcaacasaaacattgattttataaag

SEQ ID NO: 834597 - DNA, 619 bp, Homo sapiens
aaccaactcaaaccagctcagattggcttggtaactaggaagaatgctgggtggctcacaggtagaagaaagagttayagaaccagaaacttatgaattgtaatggggatcttaatgtttccaggagtttctctccttgctgtgtgtgtgtatatatggatctatatcacacctacacacttacatgtttgcatgtatttggttataatgaaacctcattaaatggtggtgtgctggcttcctttattctaccagaaaagagggctatgagtctttctttgtctcattttttctctaatatgaccctaaggggtcagcaacctactggcctagtagcctgtttctgtatacccccccactcccacacctggcaagttaaaatgatattaaatttttataaggttgtgaaaaagcaaacaaataatgaaggctatgagacaggaccatatggcctgcaaagcctgaaatatttactatctggccctttatagaaaaaagttgctgactcctagaaggtaagagacagtcccttacctcctccatcaattctaacagaaacttccctgggagagaggagtcctccctgaagagtcaatgtggcaagggagaccagggatgc

SEQ ID NO: 834598 - DNA, 619 bp, Homo sapiens
aaccaactcaaaccagctcagattggcttggtaactaggaagaatgctgggtggctcacaggtagaagaaagagttatagaaccagaaacttatgaattgtaatggggatcttaatgtttccaggagtttctctccttgctgtgtgtgtgtatatatggatctatatcacacctacacacttacatgtttgcatgtatttggttataatgaaacctcattaaatggtggtgtgctggcttcctttattctaccagaaaagagggctatgagtctttctttgtctcattttttctctaatatgaccctaaggggtcagcaacctactggcctagtagcctgtttctgtatacccccccactcccacacctggcaagttaaaatgatattaaatttttataaggttgtgaaaaagcaaacaaataatgaaggctatgagacaggaccatatggcctgcaaagcctgaaatatttactatctggccctttatagaaaaaagttgctgactcctagaaggtaagagacagtcccttacctcytccatcaattctaacagaaacttccctgggagagaggagtcctccctgaagagtcaatgtggcaagggagaccagggatgc

SEQ ID NO: 834599 - DNA, 510 bp, Homo sapiens
ttcatggaaaagaatgttaactgttgatttcccctaagcagaaaaataaactgaggaagtaagatagggaagtggagttggtggggcagtgagataccattttatttaggaaagtcctgtatgccctcactgaataatacatttgagcaagacccaacagtgctaaagcagcaagctatgttgatctgaggggcaggtgtgggtggtcacagagggaagaaccttaatgaaagcttcaagggcaatgaccctgagattacagcatgactgacttgccatgaatctgaaggaagtgcaaggaggccagtatgtctaaagtaactggaataagcaagggggtgactagttacatgagtaaagagaggtaactaggacatgagttcaaagaggcamtagatcttgaagtatcttgtaggtatgtgtaaagattttcacttttcctgtaagtacaatggaactttagaaactttagtaaaatggaacaatagaaacttttgaacaaataattga

SEQ ID NO: 834600 - DNA, 548 bp, Homo sapiens
ataatgttatttccagggtaagagagccagtaaatgatgagcctttcatgaaagatttaaaaaaaaacacaccaaaaaaaccttgtgagatgaagaaaagaaagacatttgcatcagtaatagtgaaagaagaaattactttgatttgtagaccatcgcatctttctttcaaggatttggctttatttggcgtggtatctcacttgtcttttcaccagtcctggcaacattcctgacaagtgagaggaagtgagacaagaaatgatacagtaagggccaagtacgcaactccagggccaggcatagtcattgcctgcttgggccccacttccttcctgcacccccggggtcatcaaagcacactctctcttcagattcctctggagacaggggtttctgcctcttaccccatccccttcacctrggagagaactgtcactaaactcaggaaggaagactttctcaccttgggttttcagttaatgggggtagacacaaaacaactaaggacattgactgcggtaaggtatttagacaaagcaggtaga

SEQ ID NO: 834601 - DNA, 537 bp, Homo sapiens
ctaaacagatgtgcatacactcatttgaatggtaatactaaaatgttgatttgttactataattaaggctcttcttgtaagcccccataataaagtcrtattctgctaaactggcaactataggaagcataaggtactcatatttgaacaaacataaaataaattaaggatttcaaaagaatgactctacttaacttcaaactgaaatcctgaaaaagccaaaataatgtgagagaagaaaatcccagctaaagctcagagcaaagtattcttttggattttctagctctgccagttggtctcatcagaagtttttaaataatcaaagtaaaaggccacaagatgaacatattaaaggactctttggatctatcgaattctcacttgtgacttttaaaagctagaaatctcagaaataataaaacatctcttaaataggtcacatccacttccagttgaatcacatgttaaagcattaccaagtagcattggtagcattctactaccaatgattttcatatcttgaaaaaaattaac

SEQ ID NO: 834602 - DNA, 651 bp, Homo sapiens
agagccgtttgaaaagttcagccccttcactctaaggcatatattttttcaactcatctgattcactattaacttgtaacagggatttctaatcaaatttattyaggaaaaactactatattgcaaaattataatattttaattggactaagattgagttactttcttctgagatatctatgacatcacaagaaggtaaattagaccctctgaggcagaaaaaaaatctaccatttgaaactaaacatcaacaaccaatatgcatgttaaagagcagtattttttttttttctattcactgaaaataaagggtttagaaattatcatctgtttataacaactctgtcctgccatactcaaatctcatcctttcggcaattacattttgtgaagtccttaatatttttgtaatgttatgccctgtattataagaacccataaagtcagaggctctatggggccagcattaatgatattagtgcagcatgtaatttgtttgataccttatacaaatgacaatgaaatcaatatttagacaaagctgtccagaggtcatatcttttaaactacaatattgatttagactacataagaggttaatgtgcatattattaactttaatgataaagaataattgttttaaatgcattg

SEQ ID NO: 834603 - DNA, 631 bp, Homo sapiens
cactgtgttgtttttccagtggtagtgatggattggagcctgttcattcccacattctcacccagtcccctcctgtgtccaagagcacacatctgtgagacacctggttgtagctggagggagtctgagttaggtaaaatcaacttgccaagaaacagagctaagaagacagccagcatttgtggggattgagcttttgaccctggcctcatttgttctgcattctaaccactggccatagaacgttcatgtttttttggagtttgctaatagtagttttaaaattcaactttctatcaggagaatacagcatactttattaacccatgtttctgccctgtacccgtacagtatatctgctgttgaggatcctgcacttggagacaagaagacctgagttccagactctcactaccttggacaagtcacttaacttctctgtggctgcattattttaattgaaaattataaatagtaaacctattcttcctaacttataggattactgggaaaataatacgaaatcatgaatgtgaatgtatttagtgaaatattrcacgcattgtggaaatttgggaagtttgatgttaaccccctctttcccactctggaccctggatataacagagat

SEQ ID NO: 834604 - DNA, 485 bp, Homo sapiens
acctgatctccagggctgaagtatgggcatctatgaatcaatgcccatcaggtgattgtgatgatcagtcaatattggcagcctctgatttaattaatcatcctgagaataatgttccttatgtgtaagattattagaaagccaagttttctctcagagttttggtgcagatcaaatgatgtcctgtttttacaaagcctgaagcccaggtaaacctaaagcactgttattactgttattactgcagagaacctgtgtgctgtggaaggtccccaggctacagggtgcagagatgtccactgggcacatgctgacagatccttcaaaaaatggtacttaaagaagattagatcaacatttctgagaaaagcatctcttttgccttytcattggttcagtaaacccagttaaaggcaaagtttccagccctcagagcctgccatgggattcctgtatcattagatattgttaacattagcactttt

SEQ ID NO: 834605 - DNA, 541 bp, Homo sapiens
gaagaaaaagagccagtgctgctttgacggcagtgatggcgatgaatgatttatgtcyagcctaatggttacataagcagctgttacattttaaaatcatcatgcaaacaatatgaaacatttatttaagtggttctacactatggggaatttgatttaatcagcctttatttctgttctcattagaatgaagtctggcaactctagtagacagcgctacctccgtttggtagcttccagctactgaaagcaaatatttttactgagccacaattaaacatttatacagcacccggctccccatctggcctgtggaggggagggggtgaggcagtgaattcatccaaaaattccacacagaataaagccagacgcacccccgcatctaacagaattaataaaccatctgaagagcccatttgagaatgaaaaagttcaccgattcataaaatttttccaatatgctgtgagctgcaggtagccaagctggggatcctcgaggctggcttttaatctttgctcttctgggccaagtggggtt

SEQ ID NO: 834606 - DNA, 597 bp, Homo sapiens
tttatgttgtgtattttaccacagtttaataaatgttttccgtgttgtgtctagcattttataattccccccacctatacagacccctgcaatcycatgaccatcaataagctcccagtatgtttactttctgatataagccaacttttgttttcaaaaaagacttttcctaccattttcccatcactcaacctaaacaaaataatcagtccttttagaatttttttcaatttttgtcactggtggtgagctattagtttattttctcttgtcacatgtaaaaggcaatataattctattcagcttaccaacagtgaataaaataagagttagtatgtggacaaaatgtatagagttctgtataggttaaaaataattttaaaaatgtatattgcatatgataaaatatagataattctaaagtataaaatcaccatcccagatactgccttttatgatgaatcactttttaatccattcagtcattgaatgtctaccatgtgctaaatgtttgcatctacttccatttcatctacttatgtactcacaaacctattcataattcactttattcatttattcttttaacaattattg

SEQ ID NO: 834607 - DNA, 621 bp, Homo sapiens
gctttacaaagaaatgtattttacttctttttagcatgctggggtgaccgtgctcaggtttttgctgagataagakatcaatgagatatttccaccatggctttttgaagagattctttactgtgtaattgctaagacaattagctgcaagctacagctactattccttagaaatgaaagatgctttccactgtaagaattatgttactcctcagtggtgttgacaagatgaagaaccattttggatgttatgattctgaaatggctatctgttggtgatccatgcttcaacgtggttatgagtcagttctagtcaactgacatttatagcttttagtttatagactggggctttcaattcagctcaatcaggtgtctgcaaataaacatctgttatatttaagttttccagtgtctttctttcaactcttatttcccttaaatcaaatgcttatttagcagagcctgaaaataaaaataaataaataaatacataaataattaagaaatgaaaacaactccaaatggtctcaatggaatacttcacagaaaactgttatgaaaaggcacaaagaaagtatatgaaagggtttaaaatggagatagcctaatttctttcat

SEQ ID NO: 834608 - DNA, 538 bp, Homo sapiens
ttctccttttgctttcttcccttttctaagattatacaaccacacttaataggcttttcagatcccaamgtttttgcaaagaagaaacaaagtaccctccttaggttacacatacaaagaaatccaaattgtgcagaaacaaaatatttcttcttaggtaaccctcataacagctttcccttttatagccaccaagttttttagaatacacctaatagatgcatgccaaatgaatgaaagccaacagggtccttggattttctttcctaacatttattttaaaacataggagttagaaattacttttaataaatttctgaatgccataaagctaagattccacggtgaatgatacagtaaagattcaaattaaccctgacatgctggaatgatggctcatgtcaataaaatgaaaggtaatgtagataaatgtgagatattatatttgtgctatctcccaaatagttgcacaagaatggaataaagaaaagaccctaattaataggaatttccataaaaatgattggagatagagtga

SEQ ID NO: 834609 - DNA, 543 bp, Homo sapiens
cctgtagtcccagctactgggaaggccgargctggagagtagcttgaactcaggaggtggaggctgcagtgatcacgccattgcactctagcctggatggcagagcaagactccatctcaaaaataaaaaaaaaatcgctgtgtgtggagatgcccagcatttgcctcctccacaaaaaatacaggacaaagcaacaggtagataatcccacactgaaggagcgtctttgtgagaacactgaaactcagcagggaagtgatattggagctctgaggcagggaaggagagagaagtgaagcagctagtccagctgagatcagttcagagccaggaaaaactccccagtgcagagaaaaggtgagagatccccagcagttcatgttcccaccagggactcctgcaatcctagttacagaagagctcctcaggttttgcaggtcctgaaactagtatagagagataccatgcaacagcagtgttccagagagggagtccacactaggtcccacatctctccaaagacccaagcaactgtagcatga

SEQ ID NO: 834610 - DNA, 630 bp, Homo sapiens
aacatatgcattaccttatatgcttatcatttatttgtggtgggaacacttgaaatctcttagmaattttcaaatacataatgcattgttattaatgatttgtacaatagatcttttgaacttattccttctgtttaactgaaattttgtactctttgaaaaacatcttcccaaccccaccccagccactagtaaccaccattctactctctgcttctatgactttgacttttttagatgctgtgtataagtgagatctgcagtatttatctttctgtgtctggcttatttcacttaacatcaggtcctccagtttctatcctaaccatttttaagtgtacacttcattgatattaagtacatttaaattattatgaaagcattactaccacttgtctcctcaactcctttcatcttgcaaaactcaaaccctatacccgttaaacaataatttcacctgcccctcaggccctggcaaccatcattctactttttatcgctataattttgactaagtaccacgaacaagtgggatcttacgtatttgcttttttgtgactggcatatatttagcataacgtcctcaaggtttattcaagttgtagcatatatcagaatttccttcctttg

SEQ ID NO: 834611 - DNA, 616 bp, Homo sapiens
aattctaagcaaaaagatcaaatctgaaggcatcacattaccggacttcaaattatactacaaggctatagtaaccaaaacagcataatactgctataaaagtagacacattgaccaatggaaccgaagagagaaccgagaaataaaacctaatatttaaaatcagctgatcttttacaaagtatacaaaaacataaattggagaaaggacactctaataagtgatgctgggaaaattggatagctacacgaagaataatgaaactggatccttgtctctcactgtattgaaaaagttaactcaagatggatgaaagacttaaagacctgaaaacttctagaacataaaaattctagaaagaaaaacctaggaaaagcacttctggatgttggcctaggcaaataatttatgactaagaccacaaaaacaaatggaacaaaaacaaaaataaataaatggaacctaattaaactaaaaagcttccgcacagtaraagaaatagtaatcagaattaacaacctatgaagtgggagaaaaaatttgcaattatgcatctgacaaaacgactaatattcagaatcgataaggaactctaaacaagaaaaaaaaacaggt

SEQ ID NO: 834612 - DNA, 559 bp, Homo sapiens
ctgctaactacacatacagcgtgtcgcatagtgacacgtgctaaggagaaacttaaagctrggtcaaaggagtgagtggggttggggcaacagcaggcccctcgttcaagcagagaccccaaggaagcctggtgggagccatggggaggagggcagaagaatgtgccggggagagggatcaggaagtgcagaagccttgaggagaagcatgcttggcgtgtaaatgaagccacatatgcaggaagcctggcatggaatccaggtgctcagcaaatgccagctctctatttcaagtcccgcagaaagaaccccacgcatgtgtccttttcctgagaacgaaagcacaaggattctacagggcaagactgtgccaagtgttccttcagcctaagattcaggcaacattcgagctccaccaccagtttttgagcccttgccaggcaccagtctctgggatgggcaaccagggatacaagatgatcaagacaagggctctgtcctcagggaaccgcaaagagtcacagagacaggcagtgacaatgcagtcattgcaacgatg

SEQ ID NO: 834613 - DNA, 542 bp, Homo sapiens
cctcaagccctctcccttggtgcccaccccctcggccttccccccgtggccgtggataaggagctctgctcctggtcccctcctgcctgctcatagacatggttcctgwcatttgtctacttcctccgcctccacggaatcacccccatgagcacacagaagagccccggtggcgtccgtcttttcaaaacaccctccatcagccccctcaccagccacagtcctgtctctctgccctccctccctcagggcaggtctttcttaagtgctggttatgccaccctctccttttccctcttaagctgtgccctgaggcgtgagtccctgcccatcactgaccttcagcctgtcagaccctgagcctacatcctgggcccactaccgggcccctcgctttcagcccaggtgacctctcccggctgtgtgaatgttgctgcttgtggctcctgggccttcccgagctcccgccgttcctcctgctttcctggccacccctcgccctacctgtcctccctatgttgaaagccccatggttctatcct

SEQ ID NO: 834614 - DNA, 475 bp, Homo sapiens
ttcccattcctacattttacaaagcactctgacagtgtgataatgatgatgatgattgtcacctactgcccacctactatgtgctaggccctgtgctaagcacttaaaatgctttggctcatttaattcttaccacagtcttgcatgggccatactatcccaaccccaccttgccccccttttgcggatgagggcacagaggctcaaagaggtgaaataacttgtccaacatcacacagctgctgagttcagttagaccttccacctctccaggtctcctttatttgtaaagcactttggatattttgtgctgcccaactcggccttgcctaagcgcaggtctgagttggtgtcatttcctacagcatgctaagtgtatggtgtggcatttccaggtgttcttgctggagataaatgtaggagggggtgatgtcatagggggtraggtaatcatgacatatgggattgagcgatg

SEQ ID NO: 834615 - DNA, 549 bp, Homo sapiens
ctgactaccactcatttgttctctgtttctattatttgtcattttcaggatgttacataaaataaatcacattgtacctaacccttcgatagtgatgttttacactcagcatgcctttgagatccattgaactagttcagtgttaagcagttcgttcttttttttttactgcatagtatgcgatggtatggatatactacaatttatttgaccatcacccatcaaaggacatctggggtgttttcagttttttgtcattataaataaaattcctaagaaccgctcatgtgcaggtttttgtgtgaacataagtataatttctctgagataattgcgtacgagtgcctgcaggctttccccaccccttttaggccattccttttctttcaccccttttttttttttttttttccagaaggagacaagctgattccatttttttaaatggaaattaargagtgtaaaatagccagtcttgaaaaaagagaacaaagttagaggacttatactgcctcaaggtttactataaagctatactaattaagacta

SEQ ID NO: 834616 - DNA, 472 bp, Homo sapiens
aacttaggactacagaatgaagagcatgaagaacagactacatacaggtaaaataaaatattttttrtttctcttatttttaattgatctaaaaagtaatttttttttccaacttttgtctttgttttgggtgtacatgtgcaggtttgttacttgggtaaattgtgtgtgtcatgggggtttggcatacagataattttgtcacccaggtaatcagcatagtacctgacaggtagttttttagttctccctcttctcccatcctccaccctcaagaaggcctgcctattgttttcttcttggtgtccatgtatactcagtgtttagctcctacttataagtgagaacatgcagtatttggttttctgtttctgtgttaattcacttaggataatgccttccagctccatccatgttgctgcaaagataaatttgaaataatagtaatgatatattgagtgattatatcaca

SEQ ID NO: 834617 - DNA, 534 bp, Homo sapiens
gtacatggagcacctgtccaagggtctaactctccttggagaaagmgggaaaggatgatctttccttgaagatttttgattcttgattattataaactgcttttggcagcagctgtcttcttcagagaaagctgtagaagtaaccaagcagaatgcggaataagtcaaagggataagagaaggaagagtaaaaagagatggaccatgggccagcaatgcttatctgtcatggaaccatgtcactactcagttaaacagtcagccacactgctaatggggcagaaatgtcaatggttgacttcatttctgagcttttccatgggctgttttaatacagtgcaggaacagccttaacgtctttaggctcccagcctgacattcatcaaactggctccctgacatcctgcaaggcccaggggcccagactggaccactccccgggtctgctgctggaatctgtgcctttaacctcttatggagtttcctgaaatgcttcctctcctattactttgaaagcaacaagagacgctgcag

SEQ ID NO: 834618 - DNA, 538 bp, Homo sapiens
taacccactgcttctagccaagctgtctttcttcagaaggtagaaaaagattgttagtcattgtttaatctttattgagtatataccgccacaccaattgcactgccattcattatctcakttaaatctgacaagagccttgtaaagtagggattattcccaccatttcccagatgttgaaactgaaattgataaacacgacatgttgccatggctacatgaagatctccaagccggaggatctccaccctcacctgcctagcttcccagacctctctgcagaaaagggactgacccccaagacagccctggcctctgggctccaccccttccacatccatcccagggccgctgaggactgaagagttctccacgtttgccctttaaagtgacttaaaaataatctttatgaatttcttcatatacaaaatttgtacttactcattgcagcaaatttagaaaatacacataagcaaaaaagaacgtaacagccatccataaccctaactctcagagatcaccactattaaaatgttta

SEQ ID NO: 834619 - DNA, 615 bp, Homo sapiens
tctatcttgtattgtagattttctattttttaatttttcagtggttttactctgatgttcttataagtggttttctttgtgtttatcttgcttggggtttgtagtgctccttcactctgtgacttgatatatttcactcatttttttaaaatgttcatttattagctctttaaatatcgcttcattatcattatttatctctttcttttctgagactccaattatacatatgttcaaacttttcatcgcgtctcatatgtctcttatgcaagcttatctgtgattccattctttttttttctttttttgagatggaatctcactttgttgcccagcctggagtgcagtagcacaatctcggctcactgcagcctccaccccttgggctcaagtgattctcctgcctcagcctcccaagcagctgggactacaggcgcgcaccaccatgcccagctaattttcatatttttagtagagacgggatttccccatgttggccaggttggtctcgaactcctgacctcaagtgatcccccgcctaggcctcccaaagtgctgggattacaggcatgagccactgtgcctggmctgtgatttcattcttttctctcttgt

SEQ ID NO: 834620 - DNA, 412 bp, Homo sapiens
aaagaaagaaagaaagaaagaaaagaaagaaaagaaagaaaagaaagaaaagaaagaaagaaagaaagaaagaaagaaagaaagaaagaaagaaagaaagaaagaaagaaagwaattagaacccatataggctaaagtaggactgtaaaacggtgcaaccactatgtaaaacagtctggctgttcctcaaaatgctaaacatagaatgaccctatgatccgacaataccacttctaggtattttcccaagagaactgaaaacatatattcacgctaaaactttaatacaaattttcacagtagcactgcctgtaacagccacaaagtggaagaaacaaaatgtccgtcaagtgatgaaaagacaaacaaaaagtggcatcagtacaaagcaatattcagcagtaaaatggaa

SEQ ID NO: 834621 - DNA, 511 bp, Homo sapiens
gtaggtcacctattggaacatgtatgcattattcctggagatgtttctggaggcccaacctagtaycatactttcagcctctctagtgattttctttttcttttcttttcttttcttttttttttttgagatggagtcttactctgtcgcccaggctcaagtgtagtggcacgatcttggctcactgcaacctccacctcctgggttcaagtgattcttgtgcctcagcctcccaagtagctgggattataggcacatagcaccatgcctgcctaatttttttatttttggtggagacgggggtttgccatgttggcgaggctggtctcaaactcctggcctcaagcaatctacctgccttggccttcccaagtgttgggattacaggctgagccaccacgccctgcctctccagtgaatgaatgaaaagcacctcattttccatatcaaatcttttgcaccctggagagatagttggtagttggattaaagttgtgtgcagatatcatgg

SEQ ID NO: 834622 - DNA, 524 bp, Homo sapiens
tcactgcacctcgttttcctcacctataaaattatttaatagttcttatttgacagacttgtgataagtattaagtgtgctaatatttgtaagttacctagagcagcatatgacgtggtaatttaaaagagtttgttaaagaaatgacctgtatcatattccattatatgaaatgtattcatcatattttgttgaatctttaatatctctttttttaccattgcacactgtccagtattctgttgctaataacatgtctttgaggatgtctctgtgtgcatttgctcagtcatttctgtaaggtatgcttgtgatgtggaattcttgggtcagaagatgcagatgcttgctttctacatggattgccattgcactagccatagctgttttctcgcttacagtaaaatratgtcttctattactggagaaaatttaaattttaataaaatcaaatgaattgtgcttttcccttaaaatttaatttcctttataatttcatcatttcattaataaattattccata

SEQ ID NO: 834623 - DNA, 537 bp, Homo sapiens
caagaactgctaaaaggaactctaaatctttaaacaaatatctgaaatacaccaaaatagaacgtccttaaagcataaatctcacaggacctgctaacaataacacaatgaaaaaaatgtatttgggcaaaaaatagcatgatgaatagatagtacttcatatctcaaaactaacattgattataaatggcctaaatgctccacttaatagatacagaatgggagaatggataagaattccccaagcaagtttctgctgtcttcaggagactcacctaacacacaaggactaacatcaactgaaggtaaaggggtgaaaaacgatattgcatgcaaatggacaccaaaagtgggcaaaagtagctattcttatatcagacaaaaccaactttaaagcaacagcagttaaaaaagacaacaataaacattgtctaatrataaaaggactagtccaacaggaaaatatcaaaattacaaatatatatgcacctaacactggagttcccaaatttacaaaacaattactactagacctaa

SEQ ID NO: 834624 - DNA, 494 bp, Homo sapiens
tgtatcctttatgacagggcttactcctctcatcaaacaaaagccactattttttctttgatagtttggaatttatttgtctttgatattaagcaggtttattctaataaagaaaaaatagtggttactgacaaaagaatacctaattatagcagaactatcaataataaaaaatgtcagaagacaataacattctgttttccatttcttaagatggaattggctgggcatggtggctcacacctgtaatcccagcactttgggaggctgaggagggcagatcatggaggtcaggggttcgagaccagcttaaccaacatggagaaaccccatcttacttaaaaaatgcaaaaattagcctggtgtggtggcacatgcctgtatttccagctattcatgtgactgaggcacaagaattgcttgaacccaggagtcagagactgcagtgagccaagatcaygccactgcaccccagcctgggcaacagagtgaga

SEQ ID NO: 834625 - DNA, 648 bp, Homo sapiens
agaaacattaataattgatcaattagtatgataaattaatctgtaagatgtttcaatgtagwaaagatagacttactactttgcttctcagtgcacttctttagtctggacctctaaaacaccatgagaagtttcaaaactgtcttcatgatatacctaactcccatactcgtagctactatggcagatatagttgattggtgactggctgtttggtactactctctaccctaaagctagctctgtgtgcaacttcaacagaaacacttggagtgtacaggagtaactttcatgcccttcaagttatgctctcattaaaaaatttggcatggcacagtggcccatgactgtaatcctagcattttgggaggctgaggcaggaggattgcttgaggccaggagttcaagaccagcctgggcaacaaagaacaaccccatctctacaaaaaaattaaataaattaatgaataaattaataaatagtcatagtagtgtgtgcctgtagtctctgttacttgggaggctgaggcaggaggatcacttgagcctaggagttcgaggcttcagtgagccataattgcgccactgaactttagcctaaacaacaaatatacacacacacacacacacacacacacacacatatat

SEQ ID NO: 834626 - DNA, 637 bp, Homo sapiens
aaaaatgcaaagatgctgtgcttgctaatgaagctgcagtgacagtttcacatttttttttcctttgttacagtggtccttaggctggattcattattctggaaatggcaggcaacccytgctgcagatctccatctacaatacatatcaagcaatccaacttctttttttttttgtaatgtcatgacttttttctgcttccagcaaaagcaattccatcatcaatagtggcattttgtatgggtgtcatcatgttattcaaggtttatgatattgcactaaatgcagtagaaactatgcgagaatcatgagagatcacttttactgcaatacacaatttactggagatacgaattgcccatgtggagatgattagtgtcacgtggtattttaaataaataccaacaacgcttgagctcaccataataataactagaggggactgtgaaattactacagtagtacactatgtactatagttaattttctacagttatgatttaatactacatctttatatttacttacatatctctcgactgcaaatagcaccatgtatagtctgtgcttatgtgcataagttttgataaattttaacatagtagatttgtatatatgttaggatcataaatgataa

SEQ ID NO: 834627 - DNA, 603 bp, Homo sapiens
gtatactataccgtgatgctgaggtttggagtttgaatgatcctgtcatgcaggtactgagcatagtaagtccctccctcatctagtagcccccagtttctattgtttccatctttatgtaactgagyacccagtgtttagctcccacatataagtgagaatatgttgtatttggtttcctgtccttgcattaattcgcttaggataatggcctccagctccatccatgctgctgcaaaggatatgattttattcttttttatggttacatagtattccatggtgtatatatacaccacattttctttatccaatctaccattattgggcacctaggttgattctatgtctttgctattgtgaatagtgctgtgatgaacatgttattacatgtgtcaatttggtacaatgatttgttttcttttgggtatataccaagtaatgggattgctggttcaaatggtatttctgttttaagttctttcagaaaacttcaaaatgcttttctcatttgctgaactaatttacattcccaccaacagtgtaataagtattcccttttatctgcagcctcatcagcatttgttattttttgatttttta

SEQ ID NO: 834628 - DNA, 651 bp, Homo sapiens
attgatcttttagcaaagattgtctattataaattaatttatttttcatttatcttcattgtctaatttgatcattaagaaatattttagagaaaggctcctgagtgctgcgtcccttcaattctttcatgcttgagatgttctctgactttaatacatgaagaataatgtgactaattataaatttaactatactttctatttcttagaccttttaaaaatgtagatatttgatatggtttggccctgtgtccccaccaaaatctcatcttgaattgtaatcaccacatgttagggagggacctggtgggaggtgattggatcatgggggtggtttccttcatgctgttctcatgatagtgagtgagttctcatgagatctgatggttcaaaagtgtggcacttccccctttgttctccctctctcctgccaccatgtacaatgtgcttgcttccccttaaacttctgccatgtttgtaagtttcctgagcccaccccagccatgtggaactttgagtcaattaaacctctttcctttataaattayccagtcttgggtaattttttacagcagtgtggaaagaggctaatacagaaaattggtaccgggataatggggtcctgctataaagataacctgaaaatgtgga

SEQ ID NO: 834629 - DNA, 623 bp, Homo sapiens
ggggttcactttgcacatcacaggatccaaactgaagaagatkaagggaaggcttttataggcacccactttcctcccttctttctgattacaaatataattttgatcccttactctcctgagtacattctagctcctaccaatttctcatttctgctcaaaacctttgatgaaaaataggaaagagttccttagaatatatgagaccatagtctagaaatacccttttacatgggtatagcatatgcatgggctattctgctttgagcataggaagggtaccacctgtgactgtcagtgtggacatgtctcatagtgtggaggtccagccacagctggaagatcccatagcttcccaccattctgctctcatttcacatgcagcatgtactgatttcctgctacttagaagagactgttgccgtcactcattattgcccactgtttggtactataaattaccgaaacttgaatttcagaaaaatcctcctaaaagtcctgcaaatttttttcaaaagttttccattgagtatccaggaactgagtggtttcctgttctgctaaatatcttcctcccttcctgattttccaaacgctttcctaagaagaaaagctttgggaaa

SEQ ID NO: 834630 - DNA, 515 bp, Homo sapiens
ccgttgctgccctcatagggctcacagctccaaggggaggcagacacaggaatgggtggtctcgtgtgggcttgccctgggtgtgatggggatgcagaagtaatagggggtggggacccggggacagggacctgaacccaccagtagtgctcagagctctctgcagcccccaggaaggaaagggcactccaggtggagggcatggcacaggtaacaaccctgaggggtaggagggagcgtggaccctccgagggaccgaggggagccagtgtggcccaccgtggtgcaggccttgtgtcccccaagcctggaggcagggggcgcatgaactatctgtggggacccagaaggtgccgcaatgagccaacagtgtcaccagagggcaccatcggacagcggttccagcctctcccgaccccggctgaggaggggayggtccctctttcccgggcctgctccaaagagagagcccaaagggggctccctgaaaagtgcccagtccccagccatgccaa

SEQ ID NO: 834631 - DNA, 634 bp, Homo sapiens
tacctatcattaattaagagaagagtttgagatgtataaggctaataaaggaagtgagagtgtggtgaattaagtgatgagtattatgtacaattgcctttacaaaaaacgtatttttactgtggaagaaattcatgcagagatgcctgtggaaaagtatcaataagaaaacaaaacacctttaacactatgacatactgattataatatactatgatatgtattattacagcattacttacacattctactttaggcaatgtaatctacttctgaatgaccttgttaatttttaaggcatcagtgcatcaagggcaaagctccataaaataaatataaaaacaagaaagcattagctaatttgtggcatagagaatgatcactgtatattatatctgttggccacttccatataggtaataaattgtacatcttattgtaaaaatgttatagcataaatttcacatcatttttcaacacttcatttaaagggctaaactgatctggcagtattctcattttcattgttccatcagctccacaggagaaaatgtgatttgcaggccctgtctcaatttgcatsactccagttccaatatttctaaaaatggactgccgagcatgttcactgaca

SEQ ID NO: 834632 - DNA, 537 bp, Homo sapiens
gttaatttttttcaagatatgaaaatcattggtagtagaatgctaccaatgctacttggtaatgctttaacatgtgattcaactggaagtggatgtgacctatttaagagatgttttattatttctgagatttctagcttttaaaagtcacaagtgagaattcgatagatccaaagagtcctttaatatgttcatcttgtggccttttactttgattatttaaaaacttctgatgagaccaactggcagagctagaaaatccaaaagaatactttgctctgagctttagctgggattttcttctctcacattattttggctttttcaggatttcagtttgaagtttaagtagagtcattcttttgaaatcctttattttattttcatgtttgttcaaatatgagtaccttatgcttccttatagttgccagtttagcagaataygactttattatgggggcttacaagaagagccttaattatagtaacaaatcaacattttagtattaccattcaaatgagtgtatgcacatctgt

SEQ ID NO: 834633 - DNA, 690 bp, Homo sapiens
tctaatttaagagctaattatytttgttttcattcttaaaaacaaatttgttttttccattaaatataaaaatggttccaccttctagcaaccccttcattaaaactatgcaaataattcaaacaaagaaattaccacataattgggccatattacgcataatttattatgccttttcagtctttagataatagtttatttgtataaataatttttatagtacttcggtgttgtgtagggaggatacagtgtccagaatgaaagaagcagtgtgattagttgatgaggtgttgacattgcctttattttattatagctacacaggttgattagcatcataacattagaataaatctgcatacaattaaaataaaacataatgccaaaaaaaaagcacacaaaacttattgacctgattcaataagttctggtatagctgaaattttgctttaaaaaattgtccaccagtgttcttttgcttatttttttcagatgcgttttctttgactgtttttctttacctttctgaaagatatttataactctccagggtgcaccatcctactgagataactgtgttcttagatgcttgaagacaaagatgaacagctcacttgtggtgtgtggttatctcattatctctacccaccctgttgtagggtattgcttgagctacagtgaactgtttgc

SEQ ID NO: 834634 - DNA, 406 bp, Homo sapiens
acattcacaattattgctcaggccaatgcctactgtgaatgtttttgaaataagagcattctagtctcataattttatatcctcaatgtattcttaggaggcaggaagaagaaattattgccattcagtatgagactaactttttttgaaggcaagcctgaaaagaaagagcatttcttcacacaaatacatatttttgattcacataattattatatctacagaagacttaatttgaactcaataaaaatgatcattttaaactatgagtcaagtattctaygatattgcccttggattgaacaaaaattacatatgatgcaggcaatctttttttctggtttgttcactaaaatatgacaactataagacatattacagcttaggactagagaatctaaagaga

SEQ ID NO: 834635 - DNA, 536 bp, Homo sapiens
gcctaggcagaaggagggcaaggcagaagtcaaatatgattttttctggttttttgggaagataatggccagataaacagaagtagaaaaatcaaaaaggggggcacagtaagcttggttttgtgcgtgttaaatataaattaagagtggatcttccacgtggaaatgtccagaggaggcatatggaacttgagcctgggaaatgaggtttaagagtagggtttattaaaagagctgacagttggaattgaacagaggagagacacttgtggtgcagggaacatactgaataaggtcaaaggaataattatgtaaccgggggtactttcaattaaggtgctggaaacagagacaatgaaaagaaaagggagatctcatatgaataaagttaatccagtaaatgagacagtatcaacaaagagggrtgagcatcaatttcaaatgctaataatattttgccatgactaatactgtgcatatcagtaagtgactttaaatgcaaaggcaatgctgctttaagtttgtttgtgtatgta

SEQ ID NO: 834636 - DNA, 453 bp, Homo sapiens
tgacacaattatggtaacttgcactttcctagaccacatattatcaaacctacatcaatcaaaagtggttgccctctacacatgatgggcaacagtcatcctgggatccttgtttctatcatcctggaatctctttgaatcctttcctgtgtttcatcctctgtttgttaatcccatgttttcttcttccttagtagtttatttggtttattcccttgttttgatggagaacaccctccagtcacagcctgagaaagcttatgtaaagataaatgttttaggtcttgtatgttaggcattatcacaatattatccttccacttaactaaaggtttaattgagtatagaattgtaggtaaaaataattttctttcaraattttgagagcctcagtccattgttttcaaactcctagtgttgctactaaaaaatctaaaattgttttgattctaa

SEQ ID NO: 834637 - DNA, 404 bp, Homo sapiens
ctatttctcagcctcctagcttactgctaagctttcttggatctgctaagagaatcactactcatccatttgccttctggctccaaaactgagttgcaaytgtttcctctcgccttccttttgtccttgcaggtttctctaattgtttgaaaacccttttctgtaaagtgctatattaaaggtaactatctgaaggtaatagttaaaattctatacccaatgaaactattagttaagtggaaggataatatcatgataattcctaatataaaagacctaaaacttttgtctctacataccctttctcaagatgttactggagggagttctccatctaaacaagggaataaaccaagtaaactaagaaagaagaaaatataggatcagcaatcaagagtcaaaca

SEQ ID NO: 834638 - DNA, 509 bp, Homo sapiens
gtgcagtggcacgatctaggctcactgcaaactccgcctcccatgttcaccccattctcctgcctcagcctcccgagtagctgagactacaggcacccaccaccacgcctagctaattttttgtatttttagtagagacggggtttcaccatgttagccatgatggtctcgatctcctgatctcatgatccgcccgcctcagtctctcaaagtgctgggattacaggcgtgagccactgtgcccatcaggttttacattaaataatctgtttgagaatcactaagaacttcaaatggagaaacatttactgaaggatagaaatctggtgaaatactgcttcaacattcctttgttcacactaggccactcattcattacctagtgcaattcaaaatacagacgtaatctataraacatgatatatcttggcctttgactactgtacaaaatgccaacctcactagagataagactcattgaaattagacctatgctaaagtcttaggat

SEQ ID NO: 834639 - DNA, 569 bp, Homo sapiens
gctactggtaagttaatgctatctataatgttattactgtctattagttgtcaggcaaatagactatttatatacatcaaaratcaccaaaaccttaaaaatccttttctttctccagaaaatattttaaaaccatgtttcttagcatttcaaagtcttccagcctaaaattataggtactcttgcttccttttttggtggataaattattttgaatgtgttccacttgaaaaatagtatgaatatattaaaactgtcttagatagtgcaactgacctggaaaaaaaatggcaaccttaaactcttttggagaaaactcccttatcaaaaagagtaaacttacagaacttacgtttgtaaaataactgttcaaatgttagtaaatgctattatttccaaatctggtatctgaaaataacttagtttgaaatacgtaaagaaaagttttaaaagtatacagaaaactgcaaaaaaaagccacaaacccttcaaactcattttaacagaaaataaagagtaattatcacaagctacaaacacttctgtccttgatattagtaaataaaaac

SEQ ID NO: 834640 - DNA, 469 bp, Homo sapiens
tttaatctctctaagcccaaatttcctctggtgatagggtttatgagaacaaaggacatcataattggaaagcaccaatttcagtgcctgtagaaagygtatgataacagtaaagtattgttattgtttatctttttttttttttttttttttgagacggggtctcactctgtcgcccaggctggagtgcagtggcgtgatctcggctcattgcaaactccaccctcgggttcaagcaatcctcctgcctcagcctctctagtagctgggattacaggcgtgcaccatcacacccagctaattttttgtaattaaaatcccaaagtgctgggattataggtgtgagccaccgatcccagcctgttattgtttatctgtgtgaccttagataagttactcaatcactctgtgcctcagttttcttgtctgtaaaatgggataattatattatctgctccatagagctatt

SEQ ID NO: 834641 - DNA, 475 bp, Homo sapiens
cgtcttgcttagagaactcccagcgactaaaagctcaccatgagactctgaatgtagaagtctcttcgccaaaggatctcccttaaaatgagagtttacaaaatgtaaaaattctagtttcagaaataataatacccaaattaaattataatatggatcaatttatcaggtcattttacttcttggtagcaagaacatggtaaaattcaagagcaatgagatttccagagtgttgaagcaggctctgtagccagaataaaatcagagcaagaggcaaataatgtgtggaaattgacaaagataagcactgtcactttaacatttgagtggattttattcaaatgactrcaaatattgaaagtgccattcttgttcttcccttgaagcaaaggtaactccaaaaaggtttgggtaaggaatcagtggcaaagcatgatttatgaaaaatttccttagaacactgcaggaggcaagc

SEQ ID NO: 834642 - DNA, 595 bp, Homo sapiens
ttcattgggtatagaattttaactattaccttcagatagttacctttaatatagcactttacagaaaagggttttcaaacaattagagaaacctgcaaggacaaaaggaaggcgagaggaaacarttgcaactcagttttggagccagaaggcaaatggatgagtagtgattctcttagcagatccaagaaagcttagcagtaagctaggaggctgagaaatagccaaatttatacagaatagccactaaaggcacaggaaataatagtatcaggtacctttaaaactttggtggtgagtgagcaactaggtggggagaaaactgctgcaggagatccttaaaatcatcatcccttccatcctgtgctgctgctgaccccctgcttacccctccaaatctggtgttcattctccaggaaaggtaaaacaggatctcttgaatgatgatgtgagccgtgtttgtgggttaggatccctaaataaaacaggggattaagtgaccatatgatgatcgaattcagagactccagttttttacccccttctactaggtcccagatgtcctggtaattatatctgtaccctttaggtggga

SEQ ID NO: 834643 - DNA, 453 bp, Homo sapiens
tttagaatcaaaacaattttagattttttagtagcaacactaggagtttgaaaacaatggactgaggctctcaaaattytgaaagaaaattatttttacctacaattctatactcaattaaacctttagttaagtggaaggataatattgtgataatgcctaacatacaagacctaaaacatttatctttacataagctttctcaggctgtgactggagggtgttctccatcaaaacaagggaataaaccaaataaactactaaggaagaagaaaacatgggattaacaaacagaggatgaaacacaggaaaggattcaaagagattccaggatgatagaaacaaggatcccaggatgactgttgcccatcatgtgtagagggcaaccacttttgattgatgtaggtttgataatatgtggtctaggaaagtgcaagttaccataattgtgtc

SEQ ID NO: 834644 - DNA, 556 bp, Homo sapiens
atgggaggacagggtctacttgtgagagcactaattttaattttgggattgccaatttgttggcctttcactgyttccttaaaggaaatgcagggtctgaaagaacttgcctaaggcctatattcaaggagaaaattatgagcttcacttcctaaggaggagacatttaacttcttcctcctttgagggtggtgcaggcttcacattcatgggtgtcaaaatctctgctacaaaatgagagattccctgtgatggataagttgtaagagctaactactttggaaatgatcttgtcctttacaagtgtttacatacctcattatttttctgaaataaagaggagtgtgcaggagtgctactattaagatgtgacttatagataccatgtatcctaaaagatcagggctaaagtttgattatcataaagcataattctgacagttaatttctttatgtcttcatctgtcaagacattagcagatatttaatgaacggatatcaaatggcaaacattatttatctttatgagatgattgagaggattattacggtggtg

SEQ ID NO: 834645 - DNA, 563 bp, Homo sapiens
agttcccaggaacttaataattataggcttaaaaggataaatttacatatgtaagtccatgttctttgcattaaaacttacggaatcctacatattcttccatgtatttaactagcatcatgtcctgtcctrtcctatcctatcctgtcctgtcctgtcctgtcctgtcctgtcctgtcctttcttagtgtgaataaatgtgtcactgtctgttcatgaatgtctcatcattatatggtggcttagtgtagatgtacacattgcaggtctcgcattttgtgtgtgtgtgtgtgtttttaattaactgagctattataagtgcaaccaaatactattcatcaagattttaagaaagaaattattctgccaaaagcaattcattgcaagaatagtaaatattttgaatgaactagtctcaatagtaaatatttatatgtgtaatagaaacaaaagaaataatcatattatcttgagaatataattcaaaatagaattaaggtaaataaaaaatggttttagattcctaaagttaaaataagttatatttaagaaatttggtgcca

SEQ ID NO: 834646 - DNA, 420 bp, Homo sapiens
ggattatgggagatacaattcaatatgagatttggggggggacatagccaaaccgtaacacccccatttaaaacacamctcactgtgacaattgattccatgtgttcaggactagaatcacagcatcagtgaagaagccaagtatctgccagagaatttggccctcaaatgaatttctccatggacttttaaataaattatttttcttacctcatggcaaatgtttaaagaagattttacattaatctttagcattaaaaattaatcaagataaatgaaggactcattactggagctgaagtagactgttttatcagaaagtcaccaatctcagataattacacagaattttaaacagaaggaaagaaagtggagcttgtttgggaggtgcttacttgccaccctatgtttaaaggcaag

SEQ ID NO: 834647 - DNA, 502 bp, Homo sapiens
tgcgcccagctaatttttgtatttcttagtagagacagggtttcaccatgttggacaggctggtctcgaactcctgacctcgtgatcctcccgcctaggcttcccaaaktgcttggattttggtggcgtgagccaccgtgcccggcctcgtcatcttttttgtagtgacaggaagcaggcttgcttgtgcacctgagtccactatgcttccatagggatgtgcacatcagtgcttctcctgctctgcttggttgcatgattttatcacaggggtctgatcccagcccactcatttcccatattacctggcttccctttcagtctgaccaatgaaaggtacaggccagagacagaaggacagaagggaaggggcgccagggtatctccccctctctctctgccttggtgagtgtttccagtagcagccacatcttccttgctgctcaggttcctagaaagccctgagctccatggttccaacttttactaggcagtccccagt

SEQ ID NO: 834648 - DNA, 614 bp, Homo sapiens
tgggcacctgtagtcccagctactcgggaggcctaggcaggagaatggcatgaacccgggaggtggagcttgcagtaagccgagatcatgccactgcactccagcctgggcgacggagtgagagtctgtctcaaaaaaaaaaaaaaaaaaaggaatatgcgaatatattatatatatatatgaataatgaaaacgatagttattacatcatacatgctatgtgttggcatgttctaagtactttacctgtattaatgcacttaatacttgcagcaattctatgcaataggaactattattaaccttactttatggttgagtaaactgcagcatagagaagtgaaatgatttgcccagagatacacagtaaagaaaaagaccaagatctgatccaaacagcctgcctccaaaagaccacttctcagtcagtatgcttacttctgatgtgttcctaacatggaattctattcagccatgaaatatgatgtcagaaaaggatccagaagagcatattttaaagtatttattatcattctcttggcgtgtgaaattgtgagtattcttcatttctcacttatrttttctattaattgtttgacatgtatacaatattt

SEQ ID NO: 834649 - DNA, 349 bp, Homo sapiens
aggcgtggtggtgtgtgcctgtagtttcggctgcctrggaggatgaggcaggaggactgcttgagccaaggtctttgaggctgcagtgagctatgactgtgccactgcattctggcctgggtgacagagcaagacctagccttttaagttttttctggccaggggttttgggaggctaaagtggccttcttgagctcagtagttcgagaccagcctgggcaacgtgacaaaaccacgtctctaccagaaatacaaaagttagccaggcatagtggcacgcacctataatccagctactcggggggctaaggtgggagaattgctggatcccaggaagttgaggctatag

SEQ ID NO: 834650 - DNA, 385 bp, Homo sapiens
cttgggcacaaaatagttaaattcaygtaaaccaaagataaaatgaaacactagaaagtaaaaagaaataagatgacacattacatacagaggaatgaagatatgaaaggcagctaatagcacattaaaaacaatgcaaacattgtcagcagaacaaatcttctccaagaaatgttaaaagtaattccatcaggctgaagtaaagtaaaggtagttaaaaaacctaaattttcaggaaggcatgaataacactgggaataggaaaatatgatacacagaaaagtaatcttttttatttttttaaaacacatgactatacaaaactatgacattgtatttgaatttaatatgatatgaatatataatgcatatatatcaattatag

SEQ ID NO: 834651 - DNA, 630 bp, Homo sapiens
agttcttaaatttttgaatatggcactgggaggcattaggcccccaccagcatggtattgaggaactttccctgtcctattactttcacaactgtgagataaattcaggaccttttcagggaagactcatgtcatcattgctcattgaagtgtaagtggagaaaaaggaaaatgaggtaaagaaagatttctctagagcagccacctcaggtggcaatgtctaaaagtatttttgtttgacaaaactggagaggtgtatgctactagcatctactaggtagaggtgaagaatactgccaaacatcctacacagtgtatatgacagtatcctaaaccaaagaatgatatggcccaaaatgtcaacagtgtgaggtttagaaaacttggtatatttttatctcttctctcaccccttcctccctccaagatacacatacaagctgttaaaagtggttccatttagggaagaagctagctttgggtagcaatatttggaaactcagagtgaggagaaggaacatagactgtccttttttkgtagaatatatagtatatactaatatatgtattataaacataataaagtatattttacaaaacaccctactgtatttttcaaatgatttttaa

SEQ ID NO: 834652 - DNA, 569 bp, Homo sapiens
ctcctgcctcagcatcccaagtagctgggattacaggcatgacgcccagctaattttgtatttttagtacagacggggtttctccatgttggtcaggctgctcttgaactctcgacctcaggtgatccacccacctcagcctcccaaagtactgggattacaggtgtgagtcaccgtgcccggctggctttcgattcttacaggagtgcaagccctattgtgaactgcgcatgcaacggacctaggttgcacgccctttatgagactctaattcctgatgatctgagatggaaaagtttcatcctgaaaccatcctctgcccctccctgcatgtgtgaaaaaatggtcttccatggaactagtctctggtgccgaaaaggctggggaccgctgttctaaggctcatctgaaaatgaagatctacgtgattgaagtcttgagattagccctaccttttaacatgtaaactcaaaaygccataaacaaattcaggaggagatcaagagtttattaactaatttctgatcataaatgtggtgatatttaggataaaataaaattacttgaat

SEQ ID NO: 834653 - DNA, 474 bp, Homo sapiens
aatgaaagcttcacaaggtcatagatttcacctctgtttttcactgctgtattcctgccacacagtatgaatttagtaaatattcgaatgaataaaattgaaaatatgaatctttccttctrtttggttgagtgatcatggaattaaaactatgcatgaagccccatagtctaagaatgcaaagaacagtagtgttcagaagacgaataataaatgtccataaattgctcttctcaaattgcaatatctgatgaatgcagtttaaaagaggactttaaaatctctaaaatttctaagaatttgagacatattgcaaattactgaataattgtgattttattgtcaggtttcattgaaattttaaaatcttaaagctaatttaaaacccaagaaggtgtcagatgaataatctttaatgaagaatctacacacaggagcagcaatatagttcctaaatatatagcttaatatgtg

SEQ ID NO: 834654 - DNA, 595 bp, Homo sapiens
ttctcacgcaaataaataacaaatggaaaaaaagattctgcaaactaatacacacacacacacacacacacacacacacacacacraagttccttggctagtttttttgtaatatatatatttcctatatgtagctaccctgtggcctccccctaaggtaaccactttactttttagtagtgaagaatgtctaaaatataataaaggtatatctagaacacaaacctccaagcaggaacaacccattatctctcctttgcatgccctgtcaatggcttcaaggtcaaagctagctaagtctctgagtgtgtagggagctgacatcttggtgaaaagtccttcagtacatgctagatcatagctgacttgcactatccttccaaactttggaatatctctctggtattggattggttacaatggaaacagaaagattctgatcatacaaaataaagattttcatttgtgagctcaaccattggatctgtcatcttccattagtagaaaaaatgaggaaatcaaatactttgttttgtttttaaccacgcagagaaggaagagagtagagtgtgggaaattgatatatctgccttac

SEQ ID NO: 834655 - DNA, 641 bp, Homo sapiens
gcctggttcatacctgtgacaaattttgaccacggaattatatgtgaaaatgtcacttamtagaagaagcagctaaaagggccagtatttgctcttttctcactgtcgggagaccaacaatattccagttagagaatactctatcaactgtgtctctgaattaggacaacatagagcaaggctgaagccaacctgaaattaccatatagtacaggagagttaaattttaagccactgacattttgcagtcattgttactggcatacattatcctgattgatacagtagaaacattgcacatgaagataagtgatccaatttgagggatatttctcatgtaaaatggattaacatcatgatggattggataaaaggtctgtatcagagagaggtgtgaagttaaactccatctggtttcacaattgagaaccagatggatggagatgactgagcttagatagaaaagagaagaagatatgaattattgatcagaattaattctagatctctattccttaagactattacttgcagttatctttattatcttattccagcgttagtatcaatcccgttgagtaatcattaaacataaaagatcttctggtgtcaaagagatttttggacatgatagtcatatt

SEQ ID NO: 834656 - DNA, 662 bp, Homo sapiens
ttgaacatgcaaaaaacaaataacaccactgaagaacgggcaaagggcatgaacagacacttttcaaaagaagacatacaagtgaccaacaaatacgtgaraacaatgatgtacatcactaattatcagagaaatgtaaatcaaaaccacaatgagataccatctcacacaagtcagaatgattattattagaaagtcaaaatacaacagatccttgcaagggtgtggagaaaaaggaatgcttatacactgatggtggaaatgtaaattagttcagaccctgcaaaaagcagtttggagatttcttaaagaacttacaatagaactaccattcaacccagcaatcccattactgcatatatacccaaaagaaaatagatctttataccaaaaagagagatggaactcctaagttcattgcagcattgttcacaataacatagacatgttttcaacctagatactcatcaatagtagattcaataaagaaaatgtgctgcatatacaccacggaataccatgcagccataaaaaaagatgaaattatgttatttgcagcaacatggaggcagctggaggccattgtcctaagcaaattaacacaggaacagaaagccaataacacatactctcacttataaatgggaactaaacattgatta

SEQ ID NO: 834657 - DNA, 662 bp, Homo sapiens
ttgaacatgcaaaaaacaaataacaccactgaagaacgggcaaagggcatgaacagacacttttcaaaagaagacatacaagtgaccaacaaatacgtgagaacaatgatgtacatcactaattatcagagaaatgtaaatcaaaaccacaatgagataccatctcacacaagtcagaatgattattattagaaagtcaaaatacaacagatccttgcaagggtgtggagaaaaaggaatgcttatacactgatggtggaaatgtaaattagttcagaccctgcaaaaagcagtttggagatttcttaaagaacttacaatagaactaccattcaacccagcaatcccattactgcatatatacccaaaagaaaatagatctttataccaaaaagagagatggaactcctaagttcattgcagcattgttcacaataacatagacatgttttcaacctagatactcatcaatagtagattcaataaagaaaatgtgctgcatatacaccacggaataccatgcagccataaaaaaagatgaaattatgttatttgcagcaacatggaggcagctggagrccattgtcctaagcaaattaacacaggaacagaaagccaataacacatactctcacttataaatgggaactaaacattgatta

SEQ ID NO: 834658 - DNA, 615 bp, Homo sapiens
tgatattttccataaaagaaacttaactaaattaaattaataaatcaagagacaaaagaatgacatattctgatggttaatacagtgtcaacttgattggactgaaggatgcaaagtattgatcctgggcgtgtctgtgagggtgttgccaaaggagattaacatttgactcagtgggctgggaaaggtcgacctacccttaatctgggtggacaccatctaatcagctgccagtatggctagaacataaagcaggcagtaaaatatgaaaagactacacgggcctagcctcccagcctacatctttctctcatgccagatgcttcctgccctcgaacattggactccaagttcttcagttttgggactcagaatggctctccttgctcctcaacttgcagagggcctgttgtgggaccttgtgatcatgtgggttaatacttaataaactcccctttatatgtgtgtgggtgtatatatatatatataaaggaaacaggggatagccatgttacaaatgcactgaagacccctgctgatatatatatrcacacacatatatatcctattatatatacacatatatatcctattatatatacacatatatatcct

SEQ ID NO: 834659 - DNA, 561 bp, Homo sapiens
accagatgcctgcccaagctattgtaggttgggagcttcagcccaaggaccgtgatgcagctgatgccccctgagaacatccctgtctatttgtgcagcaccagtcatggaggaagtttggcagccaggtaggtttcacctcttcaatttgttgccatcatggactgtctaggccaaggcacggttcccagggaaacccagcttctgaagacttctggagggaagcccttggaaatgagtttgcaatgtcaattgctcttcggagcatttctgagctgtgctgcagaaaggccattctttttcatctttgccaagaacgccacaagctcttttggaaaaacagtttctgaagggctcatcttggccaaagccctagtgtctagacagccagcttgccaagacccagagcctgcagcgaatgagaggragatggcagatgcaggttggaaggcttagggagctggtctaggtgctgactcactccccaaactccccaggcagggaaaacaataatctaagtaagtactaagaaaataagattgaagtaacgaaatcaagaac

SEQ ID NO: 834660 - DNA, 509 bp, Homo sapiens
tcagacagcaacatgcaagagattttggtaacacaggccagagagtctcttaaaagcctcacgaaatgactgaatttatcatatsatgtgataaacctaagctttttattgtacacaaaactgttaagcagatatttttatgttacacacaaaactcttaaaattgttttacaatttctctagaagtatagaaacagcgtatcctcaattcacaaagttcagctgagcagtgaatgttttcctctataaaagaagcaaaccagccttttctaactctgcagcttatgaaaatgcatcctaaaaaagaaatcccgagaagtatcagaacataactagaatataacgactctcccttttaaagtaattatcggtttggtagctgtcccagttctccttgaatacctaatcaggtattttgattgctttcccaaagcatattacctctaactgaggaaataatttggtaactaccatatgtgctctgaacaaccagtaggtagtgaatttgc

SEQ ID NO: 834661 - DNA, 626 bp, Homo sapiens
catgcagaaatgaatgaataaagcccacatccctgcattaggagggtcatcttattcctctctatctacaacctctatagttcactgtagaatttcagagcratggctatgacgattttgatcttagaatcaatttgattatttaacgccatccctgatacataacccatttatcttcatacaggcttttaaggacgtcccaattggattctgtttctactggcatccatataaattggaacctgctccttcccttcaattctttccccagaagtgagagctgatagccccaggtaagtccccagcccccactgaagacgcatttcttctctgagggttaccttgagagacagaggctctgttggttatgattagatggtttactaacataattgtgaacataatttgttctgatctgcttctgccttccagtcaacccacgttccgtatattagaagaagaaagggttggtgtgtgtgcatgtgcgtgcacacacacaagtgaagagtgtttagttctgcctgtctgtgcctcagggaatggaatgtaacagatgttacagtaacacacattttttgctttaagaaaaggatgaaggaggtggagtgggccaacttgtagacact

SEQ ID NO: 834662 - DNA, 576 bp, Homo sapiens
gctgtactcgatctaggaagtttaaagggaagtattgggaagagcttacagagtaggttaagatatggaaggcaaactacactaaggtgtgaggtctttattttcaggcaacaagctaccatagtacattaatgttagaagatcttattaatattaataagaccattatcacaatagtgtacctaggaaactaggcagatgagaacatagaaatggagaagtcagtttgaagccattacaattgttaagaagagaaataaatgaagcagtgactttgagggtttcaatgtgaatcaaaaggcaaacatagtacacaataactgtgggtaatggaaactacagcaaattagagatggccacagattcgggcattcctcccattgagagctggatctatgttctccacctggaatctgggttggctcagtgactgctctgctcgctctgctcattttaatacaacagaagtcatgttgtgytagtttccaagcccaggacctaaaagcctggcagttgctacatcctgtagcttagaacacattctttaagacactgagacactaggtcagaagtcca

SEQ ID NO: 834663 - DNA, 620 bp, Homo sapiens
attatgtaaactcccttctctttttaagtcattgatttatcatgcctgccattttcactgttgaatctgcagagttctgataagcatccttggggttgcctcattgtaaatttgtccctagttgtagatycactttttcttcatcctatgtttttaagcatttactctataataggtactgagaatacagtgacggagaagacagacatggctgtgaaacctgtcagaacttccttcgtgccaaagaagatgggtagttgcaacatgactacagtgaagtggcaggagggctgtggaagggaaaatagagaaggatctggagcacagagcaggacggtggtaagcaggggacttcaaggaagaccttacaaaggaggaccattctctggacacccgcagaagggagaaggcctaggtagacagaggggaaggctattccaggcagagggagctgcatgttgaaaggagtgtgatttaagaaagtttgcagcagccaaaggactgaaaatgctggatctggctaatgtccattccacagtcactggtatgcattgatgggaattttacaaactatcccttctgcaacgtggagaatggattgcagcaaggagcgatcagac

SEQ ID NO: 834664 - DNA, 567 bp, Homo sapiens
atacttgtgcatacattttgcagcaagatgaacaatggtgatgcttttcctgagaaaccagtgatgctgactatatagaggctggttactcttgggagctcatcattgatcatcagctgatyatctccttagctttgtggcttcactagctcccaagtgtttctgagagaaataccatgtccctataagtatctaatgtgctcaactaaaggggagagaaaaatgctaccatgtgatactctctttaataaggcattgcatttgtaagactgtaccagattaactagtttaaaagacaaatattgaattcatatgcaaggctatttcaaggcctgttctctctatgcatattaaaacacaaatgaatggtgattatctcaaatgctccactcggagctttgtcactcctggtagctggtagcaggttgtgtgtgtggttttatgggctttaaaaagatcctcatagacttatctgtaaattgtggaaatgtatatctaaaaattctgtagaagtgaaaaatcgaggcagtccctttggagacccagccttcctcaggtaattgaata

SEQ ID NO: 834665 - DNA, 532 bp, Homo sapiens
tagtttctggctgtaaaaatcattctycttatcactataaacacacacacacactttcatatattataatatcataacttataatggaggtcacttatatgccagttcatatataaggttatctaaaccaacaaatgcagttacaaatctgttctagaagttgcctaataaggtgggatgtttcttattcaaagccctctttcaggcctatagaaaatgctccagttgttatacacagaattctgtaccatggataaatgtttttatttatttttctctcctaggaaacattgcaaaatttaagcaagtgtattgactgctttttgcttcaatttctattcacttagacaaataattcaataaggtgtttcataaaaacacctgctctttcaaaatatgaagacagtggccgggcgtggtggctcacgcctataatcccagcaaaagtgcaaaagtggcctctcaaaggggaggccaaggcaggcagatcacgaggtcaaaagatcaagaccattctgcccaacatggtgaa

SEQ ID NO: 834666 - DNA, 643 bp, Homo sapiens
gtacatcacttaagttggctggatagccaaatctctttttaaaaaataagggctgagtgtggtggctcatggctataatcccagcactttgggaggctgaaacaggtgggtcacttgaggtcgggagtttaagaccagcctggccaacatggtgaaaccccgtctctactaaaaacataaaaattagctgactgtggtatcaagtgcctgtaatccagttactcgggaggctgaggcagaagaatcacttgaacatgggaggcagaggttgcagtgaactgagatcatgccactgcactccaggcaacagagtgagactctgtctcaataaataaataaataaataaataaataaataaataaataaaatgaacaagcaacactactccaggagactactgtcttttaatttcagtagcaagtgctcggtagaatcagaagtagacaaggtgagctacagaaattgaccaaaaacatgtgtccaatttgaagggaacatttaattgactaaaaagcccagtgagtgttctttatggataatcaattgattagctcaaatccgtcagcagcactacaatcaatgayggaagatgcatttggaaaagaatattgtctgattgtttttaaataaacttctattaag

SEQ ID NO: 834667 - DNA, 612 bp, Homo sapiens
catctgaaatatcaataaatatacatcrtaatgaagatttttcatggtctacagttagttcaggctgatctggaaagaagtgtctttataatcagtactagactatatgagagctacgacagtatcttttccattgtgaaggggaagaaatctaattgtaatttccaataacagaaatctccttgggtctggtgtaatatctgacaaagaacctcatatccctcttcctttctgagaatttcccaaggatatctcggctgtgtggtttttgcatgtcacaaaagcaggctttacagcagcacaaaagcattgctcagcctcacaaaccaaaggataaagatgctgcaaaggccaactggaaagatcagtgaggaagcaatttagccagaccttctcgtgctgagcttctccatcaaacctttgccactgtctgtgtccactctgtgcagccagcaccagaggcaggtgagtaaggggaaatgctgttactcttacagaagaagcaggaacagcaaaagcaagtcttttgaaaagagcttgtccaagaggaattttatttgacagtttaaagtgttaaaagaaatataacctgtaaaggcaggagaaaaaaaa

SEQ ID NO: 834668 - DNA, 500 bp, Homo sapiens
cttaatgaaaattaccttaaagattccagctgaatattcttctttttgacttgcaaaaaataatattcttcttctgaaatcatctgtgagtttctaaggaacatttgaattaaatttgaaaacaaacagaacagtctgatgctagaaatgggagagaaaagtgatatacaacatttacttgccagtaatcctaattgtgagacattttcaagtctgcatccatagactgacaggcatacacagcaatcattttgtgatggtaagatggtgcgtaagcattaggaccacatccattcattcaacacatatatcttgagtacctgagttgtgctaggcactgccctagatgttggaagtccatcatgaactaacaaagatccctgcccttacgtagattaagttctaggtcaagtcagagaaaatggraattaatttattaatacaccacagttttttttttactacctatgatttgtattacattatgtccaaatacacct

SEQ ID NO: 834669 - DNA, 556 bp, Homo sapiens
tataaaaggatcatttatttttgcctaaaaatggaacaaaaagtgtagaaatatgcaaaggaagaggtggttttggagtaaaattaaaccatgctaggtccttgccttctttagaaggacaacactaattaatattttggtaaataacaaaagtattggaaaatttaaaaatgcacatcataattagatgaataaacagatagctagcttagagacacatatatttgtgataaagcaaaacgaatggattagaattgcatacaaaattcctgatcacgtcttccttgaggagaaagggaggaggagtattggaatggaaagggaagcagagaaacacaaccccatcagtgatgtcttatttaagtgtaatatgatttaagtttcaaaagaatctgaagatgaaataagatgaaatatcactcaataattttgaatgtttcctttattactggttctttctgtatttttcmcaattttgaaataaaatgctgcaaatgtgtgtatataaacatacatgtgcatacatgttatatacctgcatgtatatgtgtacatg

SEQ ID NO: 834670 - DNA, 630 bp, Homo sapiens
atggtcaggttccagtaagaaccccttcctggcttacagatagtccccttctcactgtgtcctcacatggtggagacagaaaaacgatctctttctcttcctattcttacaaaggctagaggcctattaatwggggcctcattcttaggactcatttaacttaactacattgctaaagatcctgtctccagatagagcttgagcatatgaatgttgtggggacactgttcagtccctggcaacgcttagctcattttgcatctccatccccagggctcgtaaatgcttgctgaacccattgataattagagttgtccacttttccggggttgaaaataccttgttcagttgcttatctccagcatgttctttcaaacattttagataaacacctctatttcctgtgtcaatgattaggctagatctctctaactctttatttatcttgaagaatacactttatttcaaattagtgtggtattgaaaatccttaaacaaagcttaacatttgacccatctatttgtccatttaagacacacctgtacctgatgtgagatagtcatggttcctgcctcaggactgccaaggtgattaaccgaaaattaaaaaaaaaataatttgatggaatt

SEQ ID NO: 834671 - DNA, 630 bp, Homo sapiens
atggtcaggttccagtaagaaccccttcctggcttacagatagtccccttctcactgtgtcctcacatggtggagacagaaaaacgatctctttctcttcctattcttacaaaggctagaggcctattaataggggcctcattcttaggactcatttaacttaactacattgctaaagatcctgtctccagatagagcttgagcatatgaatgttgtggggacactgttcagtccctggcaacgcttagctcattttgcatctccatccccagggctcgtaaatgcttgctgaacccattgataattagagttgtccacttttccggggttgaaaataccttgttcagttgcttatctccagcatgttctttcaaacattttagataaacacctctatttcctgtgtcaatgattaggctagatctctctaactctttatttatcttgaagaatacactttatttcaaattagtgtggtattgaaaatccttaaacaaagcttaacatttgacccatctatttgtccatttaagacacacctgtacctgatgtgagatagtcatggttcctgcctcaggactgccaaggtgattaacmgaaaattaaaaaaaaaataatttgatggaatt

SEQ ID NO: 834672 - DNA, 629 bp, Homo sapiens
tagtttgctgagaatgatggtttccagcttcatctatgtcccyattcatcacatttctaatagtaaatgaatgtagagaagaaatgctgattttgtgactatttgtcatgtattgactaatgtaacactttagaagatataattatatttaaattcatcactaaattagccattttgtgttttcaaagaaagttaagaatgacctaaaatgttaactgggcatggtggctcatgcctgtaatcctagcactttgggaggctgaggcagtcggactgctgagtctaagagtttgagaccagcctgggcaacatggcaaaaccctgtctctacaaaaaatataaaaattaactaggggttgtggtgtgcacctgtagtcctagttacttctgggggtgaggtgggaggatcacgtgaacctaggaggtcagggatacagtggcctgatcacagctcaccgcagcctcaacaaccctgacagagagaccctgtctcattaaaaaaaaaaaaagacctaaaatattgagtgaaggcttttctcatcagaattctgaagctattttactgtactcgtccaactcagaaatgcaattatgtaggtaattatagtttgtatttggagattagaatt

SEQ ID NO: 834673 - DNA, 620 bp, Homo sapiens
agggaaagaccagcagagagaaagaggcaaagtcaaagacagaaggaaagagaggaagagwcaaaggagtcagagagaaagagatagaagtagtaaagaaaaaacagtgcaccctattcctttaaaagccagggtaaatttaaaatatataattcatgcctgtaatcccagcactttgggaggccaaggcgggcagcatcatgaggtcaggagtttgagaccaacttggccaacatggtgaaaccccgtctctactaaaaatacaaaaattagccaggtgtggtggcgggcgcctgtaattccagctactccagaggctgaggcaggagaattgcttgaacccgggaagcagaggttgcggtgagcctagatcatgccactgcactccagcctgggtgacagggcaagactccatctccaaaaaaataaaaatgaaaaataaaacctacaattgataattgaaggtcttctctgtaaccctgtaacactccaataccaccttgttgtcagtgtaaacaagggcatagcccaaaagcactgaggccactgacaacctgtagccttcctatcaaaaatccttaacccagcaggttcctaacaggggatctaaatctgaaggt

SEQ ID NO: 834674 - DNA, 313 bp, Homo sapiens
gactctgtctcaaaagaaaatagaaatgattcaggtatcttgcagccatagctactaggccaacaaagaggaaacattttagtatcaaaatgagcaaaacaggagagtatttgtgccccagcaaacccacawtggggtgaaggccgtagggtctggttaagtgctgcatcgggggccaggctgagagtgggatgtggttgccccggctgctggtgcagtgatggctttcttgtttccaggatgtctttattcaagggaacaggattaaattaggagctggttttgcctgtcttctctcagtgcccattctctt

SEQ ID NO: 834675 - DNA, 587 bp, Homo sapiens
tctaactgttgcatttgatttcccaggatgttaatttcctactgctgctataacaaattaccacaaattttgtggcttaaagcaacacacatttattatcttatatttctgaaagttgtaagtccaacatgggtctcatcaggctaaaaatcaaggagtcagcaggaatgcagcatttctgggaaagggggctggctctaggagaaaatgcactcctttatcttttccagcttctagagacctcttgcatttgtcgattcatggatttatcctccatcttcaaagccagcaatgcaggagatcctatttctctctctgactttggccctcctatggttctcttataagaattcaagtgatacattggcccagacagaaaatgcaggataatttccccatctcaagaccctttacttatcacatctactaagtcctttggctataggaggcaacatattcaaaggttccaggataaggaagttggcaaccattggtcgggcgcggtggctcacgcctrtaatcccagcactttgacaggccgaggcgggcggatcacgaggtcaggagatcaagaccatcctggctaa

SEQ ID NO: 834676 - DNA, 656 bp, Homo sapiens
ttgcgtagtaagttgaattttcaaaaactcaacaacctttcccattgcttcaytgaccccctgaagcccatctatgaacccagaataggaatggttatcagcataaaaagcaaagctgaaatggagaggtcattcagaagggaaataagataggaccgatccaagctccaagatggaatcactcaagagcaggagtgagatctggcaacaccatgtagtgaagtctcaaactggttggcaggcagtggaagtctaataggatgataaggatgaggctcaggaaggtgcaggctgcaaggtgagtcagactgcgggttgccccatagcagaggccaggaaccttgagtctcttgagtcagaggactgccacaggaagaggtccagcatgagtttcctggaaaacaggttgactgtgaagtcttctttgcagaagcaaaggcatcagtgggccatgcatgaagctcttttgtttcatgaggaacacttgctaagaagaattaggttctctcctactcatgtagacactgatgctgtggaaatctgctttgtgagttaaggtcaaagagggagatggtaagtcaggaactgaacatttcctgggtacttaccatgtgccaaattctttcacctatttctttggtgaattttttgctcta

SEQ ID NO: 834677 - DNA, 635 bp, Homo sapiens
atcaaagaagtattcagatttctgcaaattgtgtctatgagagttgttgtaaggtccttgctgtctttgtagaaatgtatatcgtgacaaaaacacgtattctgaggatagcggaaaatraatctctgcacccgcttccctgccaggaccagctagtgttgcctgtgcaaacactgcaattctacctctcctctaaataattctacttcaatggcccagagttctagctctgagaagtccaaaatgatttagttcagcatttggctctgcaccacatgataacattattttctgatggtaacaagaaagaggactactcaggaaagcaaataaagcccaacatcatggtgccaacattctgaatgtatttattcatgtttgtatttgtggatggaaaattttttccatgctacaaagtttggttaaaaacaagttgttacaaatcaataaataattgctataactattacctattgtaacaataataaatagaaaataaacagatgcaactactttgctatacacaagactttatcctgttataaaactaatataagtgctgccacttttctttctttgagtattttcccttgagatacgatttttgtattgcacgttgctttgtgcttgtctta

SEQ ID NO: 834678 - DNA, 554 bp, Homo sapiens
ttcaaaaacctaaaatctgggagtatagtaatcacatcctgaggttcatagcaaagcaccgagcccaaagcatccagcccagtgaggtttggtgggagggtctgaggttgaaattacctgggttacagtcacaggagggtgttggagtggagggcaggcaggacagggtgggggcagcagtccataaacactgcagggaagagaatttctttctgctgctagggcaggatgacccacggtgggaggtgagccttgggacctacaggaggcttcagggggacacccccccacccattgcctcctcctccactccttgtttccaggtcctcagaaggagggaagtccagggaccagggagcctggtggggccggacctgaggtactgcacgcagccctgggcccagtctcctcggccacctccctgcctctggtgtctatgagatctgcgggtgagctgtgcagctcctgagccctcatccttaggccctgtgggcactgacggatgctaaaatgaaaacctctggaaggatccgwgcccggcctggccctgtgct

SEQ ID NO: 834679 - DNA, 584 bp, Homo sapiens
ttattatgtaagatctcagtttagcccaggaatattactcattctggtatatagcttttctgaaatcaatatatccacagtagtcttgttaattttggcatttacatactgtatttttcttatttatacatctaacctatctatatatttcattcaaaggaatttctcacagacataatacagttgtttctttttgcaataattttccctcttttatgcttcctcactctattattttgattttttatcttcattcttgtcctattatacattttaaatttaaatgtttggtggttgccatggatcatacaacatgtttaattctatagacctccaattattattataccacgtcaaaatcgtgtctaaatcatacaacaatatactttcagtctttctccaattcttaaggtctgtgattatcacaaaatttatacatacttagaagaccaataatatattgttactagttttgctttaratagtaatttaccttgaacaattttacaataaagagataactttattatcttcatttttaccaattctgatgttaaatttttttaatttagatacaaatttcc

SEQ ID NO: 834680 - DNA, 581 bp, Homo sapiens
atactctaaaatcaatcacacaatcagacataaaataatcctcagtaaatgcaaaagaactgaaatcataccwaccactctcttggacaacagcaaaaaaaaaaaaaaaaaaaaatgaaaatcacgattaggaaaatcactcaaaactgtacaattacatggaaattaaacaacctgtccctgaatgaattttgggtaaataattaaattaaaggagaaatcatgaagttctctgaaactaataaaaacacagatataaatataccataatctctgggacacagctaaggcactatgaagagggaaatgtatagtaacaaatgctcacatcaaacaattagaaagatctcaagttaataacctaacatgacaaataaaagaactagagaatcaagggcaaacaaattccaaagttattagaagacaatagctgaactgtaggagatggacaacaacaataaaaaaaattcaaaagattgacgaatccaggagataattttttgaaaaaaaaatgagatagataaattgatagctaaactaacgaagaagtaaagagagaggatccaaataaatatgattaa

SEQ ID NO: 834681 - DNA, 660 bp, Homo sapiens
aaaccaaatggacctgatagttatccagagaactctatacccaaaaccagcagaatatacatttttcccattagcacatttaacatactctaaaatcaatcacacaatcagacataaaataatcctcagtaaatgcaaaagaactgaaatcataccaaccactctcttggacaacagcaaaaaaaaaaaaaaaaaaaaatgaaaatcacgattaggaaaatcactcaaaactgtacaattacatggaaattaaacaacctgtccctgaatgaattttgggtaaataattaaattaaaggagaaatcatgaagttctctgaaactaataaaaacacagatataaatataccataatctctgggacacagctaaggcactatgaagagggaaatgtatagtaacaaatgctcacatcaaacaattagaaagatctcaagttaataacctaacatgacaaataaaagaactagagaatcaagggcaaacaaattccaaagttattagaagacaatagctgaactgtaggagatkgacaacaacaataaaaaaaattcaaaagattgacgaatccaggagataattttttgaaaaaaaaatgagatagataaattgatagctaaactaacgaagaagtaaagagagaggatccaaataaatatg

SEQ ID NO: 834682 - DNA, 660 bp, Homo sapiens
aaaccaaatggacctgatagttatccagagaactctatacccaaaaccagcagaatatacatttttcccattagcacatttaacatactctaaaatcaatcacacaatcagacataaaataatcctcagtaaatgcaaaagaactgaaatcataccaaccactctcttggacaacagcaaaaaaaaaaaaaaaaaaaaatgaaaatcacgattaggaaaatcactcaaaactgtacaattacatggaaattaaacaacctgtccctgaatgaattttgggtaaataattaaattaaaggagaaatcatgaagttctctgaaactaataaaaacacagatataaatataccataatctctgggacacagctaaggcactatgaagagggaaatgtatagtaacaaatgctcacatcaaacaattagaaagatctcaagttaataacctaacatgacaaataaaagaactagagaatcaagggcaaacaaattccaaagttattagaagacaatagctgaactgtaggagatggacaacaacaataaaaaawattcaaaagattgacgaatccaggagataattttttgaaaaaaaaatgagatagataaattgatagctaaactaacgaagaagtaaagagagaggatccaaataaatatg

SEQ ID NO: 834683 - DNA, 623 bp, Homo sapiens
gacacttctcaaaagaagacctacatgtgaccaacaaatatatgacaaaaagctcaacatcactgatcattagagaaatgyaaatcaaaaccacagtgagataccatctcacgcaaattagaatggctatgataaaaagtcaaaaaataacagacactggggagattttggataaaaatgtgcgcttttatactattggtgggagtgtaaattcgttcagccattgtggaagaaggtgtagagattcctcaaagacctaaagacagaaataccattagaaccagcaatcccattactgggtatattcccaaaggaatataaactgttctattataaatacacatgcacgtgtaggtttattgcagcactattcacaatagcaaagacatggaatcagcctgaatgcccatcaatgatagactggataaagaaaatgtggtaaacatacataatggaatgttatgcaaccataaaaaagaacgagatcatgtcctttgtacggacatggatggagctggaggaccttacccttcacaaactaacacaggaacagaaaaccaaataccacatgtttctcactcataaatgggatctaaatgatgagaatacatggacacatagag

SEQ ID NO: 834684 - DNA, 629 bp, Homo sapiens
gatttataatgatctctgcagttagattgggcttatggtaagagtcctgttaccaacaaggctgggtatatacctgatccttgtttactgggagaaactctctgtgaactcaggctgattcatggagtgcacagtggtttgagggcccttctcagccctggggatatggggcaagttgagcagggccagacggcatatatttgcctacaggtcccttgatggcaaacacaagcatgagcattgagggagaattcagtaagtgaccaccaagtgaccacaggtgagtctaggtgtagagttggaaaacctcctcagccccaagttatctgcatggcgacaggggtggcctatattcttaatacaggagagtgggttctccaaatgtctggagatctgcccgggtatggggcagagagggccccacctgcacttgaaactctgcataggaatggtggagtgttaatatgggcaagcacgtactttgaatgcctggagatctgcttggsctttgagcagagggctccgctgcaccatgatctatgcacaggaaaggtggtgctgttctggttgctgatcatgtgagcagatgcttcaaatgcctggagttctgcctggtcaggaagtggaga

SEQ ID NO: 834685 - DNA, 605 bp, Homo sapiens
ccgaagcttccgcagcagatgctggtgccatgcttcgtatacagcctgcacaaccatgagccaattaaatctcttttctttataaattacccagtctcaggtatttctttacagcaatggaagaatggcttaataaaatatcaagcatattttacttttataagaaaaaactaaagtaataacatgttcttaatgcacctgtcaccaaagagtaaaagaaagcagcctagaggtattttgtgtttggaaaagaagacctaatattgtaattctaaaaacaagatattgtataaagtgaaatgctagttgtaatgttttggccaagtcaaaaagtgggctaatttttcaatataaagttacatagtatatacacttgggattccacattttaaaaaattgctccttatactttttcttagccaattcttacatatgaaagagaaaacagacaatttaactatgtataaaaattttaamttgctgctgaaaaagtctagaaagaaaattatagtggtggtggtagtgaaataaaaaatgaatggagaatttgataggaaaatcatggattctgtacagaccttaaatcttatatgtaaaataaaagt

SEQ ID NO: 834686 - DNA, 621 bp, Homo sapiens
gggaggactgcttgagccttggaagtcaagactgtagtgaaccaagcttgcaacactttactttagcctgggtgacagagtgagcccctggaagagggagatataaaaaggaagtcacactttcacaatatgacactcaattagccattgctggctttgaagaccaaggaaggtgatatggtttagctgtgtccccacccacatctcaccttgaattgtaataatccccatatgtcaaggttggggcgaggtggagataattgaatcatggaggtggttttcctccatactattctcatggtagtgaataagtctcgtgagatctgatgattttgtaaatgggagttcccctgcacaagctctcttgcctgccaccatgtaagatgtgcctttgcttctttgccttctgccatgattgtgaggctcccccagccatgtgaaactgagtccattaaacctctttccttcataaattaccgagtcttgggaatgtctttattagcagcctaagaacagactcatacaaaaggggaccatgtaggcagcctctagaagctggaacaggctctactggtgccrccagaaaaaaattcagccctgctgacacctaaattttggtgc

SEQ ID NO: 834687 - DNA, 624 bp, Homo sapiens
aggtctgagtcaagattccttcatttctctccttggggaggggagggggttggaggaaacatactctgactttgggcaagacagttccttctatgggcctcagtttcctagttttctatgttttcctagtttctcagttttctatgaaataggatagaactagtagggttagctacatgagttaagtttccaatcttggttagttgcacatcagtatcatcctaggcacttaaaaaataacattacctgggctccaccatagatgaaataatccagaatctctgaggatgggggtaattggaatgtgcagccagggttaggaaccattagtctaggagatagcacctagagtatataaatctgttccatgttaatagccataaggaggtctacagaatcgttgcaccagactttatttacagtcttccattggtgaacatttagttgcttccagttttttgctgttttaaatgatgatgcagggagtatcctcatttataacctttgtgttcytgtttgagtgtttctttggctggattcctagaagtgaaattgttgggtcaaagggtattcactcgaaaaatctgataaatatttccaaattgccttccacaaagtctgtac

SEQ ID NO: 834688 - DNA, 467 bp, Homo sapiens
taaatagagaaataaaatcattgctgtgagtgatcagcgcatccaaggaaataaaataattgacgtgacaggggctggaagacgccagctccagccagagtggtgagggagggagagcctcactgaggaagcagcgtgagccaagctgcagggaaccagacggtgatggtgacagtgatggggagcagcaagcacaaaggaacctgaggcatggagcatcgtgcactccaagaaccaagcggaggccagtgtgtctacagcacagagctgagagacagaggcccgacggcgacgaaaggcccgaggaaggcccaggacacgccatcaaatcctgaaatcagaaggtgctgggagagcccctcaagcggcccagagtccagtgcacacaactycattcaaggcacacatgggaactccagactgaagatagactgcaggtgctcatgtcacatacaagactgtttgac

SEQ ID NO: 834689 - DNA, 540 bp, Homo sapiens
caaggttttacataaatgagcacacaaatcaaggtatgggacattccctgcaccccagtaggttcccacatgtccytccaaaggcagtcacttcttcgcctctatcacagacatccactttgcccactccccagcgtcacaggaacagacacgtgcaccccacttctccgctgcctctgcttcctttgctcaacatgatgtctacacgagtcacccacacttgggggtggcaactggttgttcatctttattgctgcgttcatgccttcctgttaatttttgttttccaaagggtcagtttccacccaatccttttgccccatccatgtcaccatgaacaaacagaagaccacagatcagatcagcccgttccttccttcccaccatttgctgggtagctcgtttaaggtttaaagcatttccatcaccatgtctggcaaccagacaccactcagcggagagctacctctcctctgacggacctttgtgcagaaagtctcacggctgaggcagcctgctggccccacgggcaggaggaga

SEQ ID NO: 834690 - DNA, 577 bp, Homo sapiens
gtctggcctcacaatgaagttttaatattgatttttgtattcagcaacctcgctaaactctctcattgaatataatagtttatctgtggatygctttgcatttttcatatactcgtcatatcatccgtgaatgataaagttcatttttatctttccaatccttgtatgttttattttatttattttccttggtacacaggccaggtcttacagaacaagagtttaacagctgtggtaatagtgagcttccttatcttgttgccaatctccaaggaaaagtttttaacagtttcacctgaaagtatactatctgttgtagtgtttcatatacctgtatattagatcagatattatcagatttagggagttcccttctgtttccagtttgctaagggtttttgtttgttttaaaatcatgaatgaatgttgaattttgtcaaacatctctttgcatatattgcgatcattattagaattttctactttgatcttttaatgtcatgaattacattactttttttggtaatgtaaaatatgtattgcatttgttaaacctaacattatccttttatatgtt

SEQ ID NO: 834691 - DNA, 646 bp, Homo sapiens
ggtagtgcttttttattgctgtatattttgccatatgactatactacaatttttttatcctttaatattttaacggacatttgagtgatccgtttttggttattatcaataaaactgctaccaatattcttgtacaagtctttttgtgattttatgttttcatttctctttaatgaatacctataagtagaattactggatcatggagtagacgtatatttaactttataataaactaccaaacagttctctacaacaactggaccattttattcttttaattatttttatttttatttcatttttactattttattttattttatttttttgagacggattctcgatccattgccaggctggactgcaatggcgtggtctcggctcactgcaacctccgcctcccaaattcaagcaattctcctgcctcagtctcccgagtacctgggattacaggcgcgggccaccacgcccagccaatttttgtgtttttagtagagacggggtttcgccatgtcggccaggatggtctctatctctwgacctcgcggtccgcccacttcagcttcccaaagtgctgggatgacaggcgtgagccaccgcacctggccacgactcgaccattttaaactcctacaagcaatgt

SEQ ID NO: 834692 - DNA, 646 bp, Homo sapiens
ggtagtgcttttttattgctgtatattttgccatatgactatactacaatttttttatcctttaatattttaacggacatttgagtgatccgtttttggttattatcaataaaactgctaccaatattcttgtacaagtctttttgtgattttatgttttcatttctctttaatgaatacctataagtagaattactggatcatggagtagacgtatatttaactttataataaactaccaaacagttctctacaacaactggaccattttattcttttaattatttttatttttatttcatttttactattttattttattttatttttttgagacggattctcgatccattgccaggctggactgcaatggcgtggtctcggctcactgcaacctccgcctcccaaattcaagcaattctcctgcctcagtctcccgagtacctgggattacaggcgcgggccaccacgcccagccaatttttgtgtttttagtagagacggggtttcgccatgtcggccaggatggtctctatctctagacctcgcggtccgcccacttcagcytcccaaagtgctgggatgacaggcgtgagccaccgcacctggccacgactcgaccattttaaactcctacaagcaatgt

SEQ ID NO: 834693 - DNA, 610 bp, Homo sapiens
aacacaattagaatctaattttattattattacattaataaatgatactgctgacaataatggtataacaacaataatggtgacttacatttacagaacacttaggacatgtcaaacactgttctgagtgctttagatatagtctttatttttttgtcacaatagctctatggagcagataatataattatcccattttacagacatgaaaactgaggcacagagtgattgagtaacttatctaaggtcacacagataaacaataagaggctgggatcggtggctcacacctataatcccagcactttgggattttaattacaaaaaattagctgggtgtgatggtgcacgcctgtaatcccagctactagagaggctgaggcaggaggattgcttgaacccgagggtggagtttgcaatgagccgagatcacgccactgcactccagcctgggcgacagagtgagaccccgtctcaaaaaaaaaaaaaaaaaaaaaaagataaacaataacaatactttactgttatcatacrctttctacaggcactgaaattggtgctttccaattatgatgtcctttgttctcataaaccctatcaccagaggaaa

SEQ ID NO: 834694 - DNA, 606 bp, Homo sapiens
gcactctggcctgggcaacaagagtgaaactttgtctcaaataaataaacgtgtaatttcatctcaaataaataaatgtgtatagctcattgttcattattgtatggcattttcctggacattttgtacaatacatatgtgtacttaacaatggaagaaaaatattccaaatatagtagaagaaaaaaaaattttggccagaggtttccaacacattttattttgcagatcacagatttaaagcttttgaagaccatcatctctatcaattcctataaaatgtccaatcaatttcagtttcatagcaggctcttctgtactgcatgccatgcttatagctggaggtctggtcacacacacatgaaggttgcccgctggttcctggagatggtcatgtccaagaagcctcttccagggagcttcatcttcccggcggggggggttcctttggcaagaagtggatacgtttacacatgaggctttggtgcctgtgagcrggaagtgtcagaaactttcaggatatgctgcttctcttaggaagtcagggacccaaggatctagtgcccttgcgcttaatgagaaggattcctcctcattgtttagtgg

SEQ ID NO: 834695 - DNA, 351 bp, Homo sapiens
ttgctaggcttcggtgtcttccastgggtataataaattgccaataaaacacaagtatataggggaaaaagccctcaagcagagagtaggaagagagtaaagatggtggttgctttctttttttttttttccttgtctgttcaacctagtcaatgagatgcttcattccaacagcgcctctcatttttaatatcaagtgggagataaagcaccaaagagctctgttctgaatggctggttctggctttctgtctcatggtacttcgcactcagcatcctgcctatatatagcatgcgtcttaaaacatccatcattagagacctgcagagactgtttggaagtttgtgggc

SEQ ID NO: 834696 - DNA, 351 bp, Homo sapiens
ttgctaggcttcggtgtcttccagtgggtataataaattgccaataaaacacaagtatataggggaaaaagccctcaagcagagagtaggaagaragtaaagatggtggttgctttctttttttttttttccttgtctgttcaacctagtcaatgagatgcttcattccaacagcgcctctcatttttaatatcaagtgggagataaagcaccaaagagctctgttctgaatggctggttctggctttctgtctcatggtacttcgcactcagcatcctgcctatatatagcatgcgtcttaaaacatccatcattagagacctgcagagactgtttggaagtttgtgggc

SEQ ID NO: 834697 - DNA, 668 bp, Homo sapiens
  misc_feature 1, 2, 3, 4, 5, 6, 7, 8, 9, 10, 11, 12, 13, 14, 15, 16, 17,18, 19, 20, 21, 22, 23, 24, 25, 26, 27, 28, 29, 30: n = A,T,C or G
nnnnnnnnnnnnnnnnnnnnnnnnnnnnnntcttatacgctgttggtgggaatgtaaattgtacaacccattatggaactcagtatggaagttctttaaaaaattaaaaatagaacgtaccatacgacccagcaattccactactgggtatacctccaaaggaaatgtaaattgatacgttgaagagatagctgcactgcccatgttatggcagcacaattcacaatagctaagatacgaaatcaagctaagtgtccatcaatggataagtggataaagaaactatgatatatatactccatggaatactattcagtcataaaagaatgacatcctgtcatttgcagcaacgtggatgaatctggaagacattatgctaagtgaaaaaaaacaagcacagaaagacaaataccacattttctcactcatatgtggaagctaaagaaggtgatctcctagacgtagaaagtagaatattgattaccggggctggagaggggctactgtctagagactgcccaacgggtacaaagtcacagttggataggaggaagaagttcygatattccagaataggaaggtgactatgcttggcaatattatattgtatgttgccaagtagtcagaagagaggattttcagtgttatcaccacatatgataaatgca

SEQ ID NO: 834698 - DNA, 272 bp, Homo sapiens
ctcttgcttgccccttacacaggatttctagatagtgtaattctctttttcttcccttttcacactytccaggaaccaccctgtgttggaacacaagtttagctcccatccatttgctgatgacactccatgtctcttcctcggccttggcccccacccccatcattatgtgtgtgcctactgaggtcttccaggcatcctcaccccagtgagcccaatggcacatcctacgctcctccccactcatctcctacatgccattccatgtgtgt

SEQ ID NO: 834699 - DNA, 559 bp, Homo sapiens
taatgttgaatattgtaagccaacgttatttgacaatgtctatcattctcttttcagatcctctttttgaagtaaaaatagtgaaatagctttctttttaataatgctcttaattttttttttttttttgagacagggtctctcacttggttacccagactggagtgaagtggtgggaacacggctcactgtagcctcaacctcctgggtgcaagtgatcttcctgccttagccccccaagtagctgggatgacaggggctccaccatgcctggctaatttttctatattttgtagagacaaggtttcaccatgtttcgcaggctgaaatacactttttcaaaataaaaaattatgctatttccatgaataaagagatttcacagaatggctaaaacatctagcaattaaaataatactatttctccacaacgttcaatttaaataacccgtcaaactcctttcagtgaacttaaattattcacaaacaaggaatttttaaaaccacatttattgaaggaaaccataaataagaarctcaatttcgttgtgtatccaat

SEQ ID NO: 834700 - DNA, 541 bp, Homo sapiens
aaacaagataaaactgtagatttgtttctttcgtgaaaggccattgactctttaaatasttttctgttgattgcactagcttaattacttacttaaacagtgaatgttttgtcagctcaatcaaatattttattagtattgcttagtattaagattccaaatgtacattgtgatttagattcaccagcatcattattgtagttattgactacctgtgaatttttagcactacaaataccttcaactttaaaacagagataaactatatttggccatcatgaaatgcattaattttcattaggtttatcaagaattgggttctaaagcaagtaattttttgtttgtataaaccatattcttttgaatagggttttgcttttgaatgaaacatcagtgttcttaattccatagaaagatattcaagggttatgtattaaagatatgtatctatactttcttgtaaacattcattgtattacttgactcacaaatctatcttggtattatctatttacatatacagaaagttaatatcatatat

SEQ ID NO: 834701 - DNA, 607 bp, Homo sapiens
agtaacctccaggtatttcatttctaaatatttcagagtgcatctctgaaaaataacattttctttttgttttttygagatggagtctcactctgtcgcccaggctggagtgcagtggcacgatctcagctcactgcaacctctaactacctgggttaaaagcaattctcctgcctcagcccctgcaatagctgggattacaggtgcacaccaccacgcctggctaatttttgttttttttagtagaaatggggtttcaccatgttggccaggctggtctcaaactcctgaccacatgatccacccacctcagtctcccaaagtgttaggattacaggtgtgagccactgcacccagccaatattttcttgaatgactccaatattgtgatcacacctgattaattatcacctgttagaaatttacatgtaaaatatattcatacacaaccaccatagcaatatattattgctatggtttcaatgtctccctccaaattcagaagttgaaacttaatcatcaatatgattatattaagagatggactctttaagaggtgattaagtcaggagggcagagcattcatggatgggattggggtacttat

SEQ ID NO: 834702 - DNA, 607 bp, Homo sapiens
agtaacctccaggtatttcatttctaaatatttcagagtgcatctctgaaaaataacattttctttttgttttttcgagatggagtctcactctgtcgcccaggctggagtgcagtggcacgatctcagctcactgcaacctctaactacctgggttaaaagcaattctcctgcctcagcccctgcaatagctgggattacaggtgcacaccaccacgcctggctaatttttgttttttttagtagaaatggggtttcaccatgttggccaggctggtctcaaactcctgaccacatgatccacccacctcagtctcccaaagtgttaggattacaggtgtgagccactgcacccagccaatattttcttgaatgactccaatattgtgatcacacctgattaattatcacctgttagaaatttacatgtaaaatatattcatacacaaccaccatagcaatatattattgctatggtttcaatgtctccctccaaattcasaagttgaaacttaatcatcaatatgattatattaagagatggactctttaagaggtgattaagtcaggagggcagagcattcatggatgggattggggtacttat

SEQ ID NO: 834703 - DNA, 611 bp, Homo sapiens
gcaatatagggcttgggtaggcagtggaaagttacagttaaaggtggttatctattattagcagaggaggggtcacaaggttcatggtggggagatcataagacttattgtccagaagaatgtcacaaggttgattgatcagttggggcagggcaggaacaagtcacagtggtggaatgtcataaggttggtcaatcagttaaggcaggagctggctgtttcacttcttttgtggttttttggctgctccaaacttcttggctcctgcaggccatctggacatatatgtgcaggtaacaggggttataatggctgagctttggctcataggcctgacaatgggtactaagcttaatacctgaatgaccaaatagcctgtacaacaaactccctgaccattttactaatgtaacaaacctgcacttgtacccctgaacttaaagtaaaagtttaaagaaatcgattttacaaatataagaaaaaatggaacaaggaagcaatgggaaaatacaaaacaattagaaaaataatagaattaaattyaactatattaataattaattcaaatgtaaatggagtatctgctccaaatgaacaggaaagattgccag

SEQ ID NO: 834704 - DNA, 488 bp, Homo sapiens
ctgggaatgaaaaagtgagtttaaggccaccatctgtttgtgaggatccactactgctctgaatgcttccgtaggaacaggttgaatcttagcagagagtatcccagtttagctgactcatctcatgctggggctacttaaatcatatcttaattgtcttctgcatttgactgttcacttatcaatgttcagtatgctagttgatgtttatgttatggcctgctctctgaatgaccctacaggaaacaggatgcacaggttttggagttcaaaatactaaggtgttggtaggactagtcattttgcaggcttgaagaatgggtcttctatcagatgtgaagttaaactgaagtccacctggtctttaagaatgtgctagtttaggctgaagaaggcacaaagcctcttcccactccttgctcatcacccctcaaaataagrcaacaaatggcctctcaccattatcttcataaatacctatgtctcca

SEQ ID NO: 834705 - DNA, 456 bp, Homo sapiens
ggggctgcctgagtaataaacttatccttcataattagttgttccttgactggatgaggagatagagaggtgtgctttaccaagggcccttttagcctttccaagaaggcagttgagacttctattaaatccctggtctatcatggatagctttctataattgaggcttggtcctagttctacataagcccctcattatatgcacctgaaagtgtctcctcttccagactcccatctcgtcattggaatcccatcgagggtcttttgctgatactgcctttcttccagttggatagagttttcctccctccctgatgctatatgtgatacaaagcttatccccaaatttttctgccacatgcagagcagcttgcttctcagtgttcatcaggktttgatttcaaagtaacatttttttcagaagagcctaaatacttgggttaaattctaaaaagc

SEQ ID NO: 834706 - DNA, 383 bp, Homo sapiens
cgcccctgccagctcagggctcggatgccactggttccaccctgcatggcggctttcaacccgaacgcgtccatccttcaaggtcaagacccaggacrtagttcaacaagtagttggtgatgatagcatgccctgactgggccagaacagcctctttagtaaaacagcgcaggaaagtcatgaagaagatgttcagctcctttcctcattttcactttaattccgtgatgcctctgtgtctgtctgacaacatctctcctggggtctgggactctgctggtcttcaatgcctactgagaagggttcctggccatcatcaggcatgaaaaccacaaagccctccgtcctcaacgtgggatccctgggcaagcggcatcagcctc

SEQ ID NO: 834707 - DNA, 505 bp, Homo sapiens
ccattcaactcacagacttgaaccttccttttgatagagcagtttttaaacaatctttttgtagaatatgcaagtggatatttggactcctttgaggccttcattggaaacggaaatatctacacataaaaactagacagagtcattctcagaaacttctttgttatgtgtgcattcagctcacagagttgaaccttccttttgatagagcagttttgaaaaactctttttgtagaatgtgcaagtgtacattgggactgctttgaggccttcgatggaaaggggaatatcttcacatgcaaatgagacagaagcattctcaggaacacctttgttatgtgtgcattcaactcacagatttgaaccttccttttgatagagcatttttgaaacattctttttgtagaaactgcaagtggatatttggagygctttgaggcctatggtagataaggaaatattttcacataaaaagtagacagaagcattctcagaaacttctttg

SEQ ID NO: 834708 - DNA, 499 bp, Homo sapiens
cggtttccaaacactctttttgtagaatctgcaagtggaaatttggactgctttgagtcctccattggaaatgggaatatcttcacataaaaactagasagaagcattctcagaaacttctttgttatgtgtgcattcaagtcacagagctgaaccttccttttgatagagcagttttgaaacactccttttgtagaatctgcaagtggatatttggagcactttgaggcctacggttgaaacgggatttcttcacataaaaagtagacagaaggattctcagaaacttctttgttatttgtgcatttatctcatggagttgaacctttctgttgatagagcagttttgatacactctttttgtacaatctgcaagtggatattttgactgttttgaggccttcgttggaagcaggaatttcttcccataaactctagacagacgcattctcaggaacttctttgttatgtgtgcattccactcacagagtggaacctt

SEQ ID NO: 834709 - DNA, 624 bp, Homo sapiens
cctggatgagtatccagcaggctgtctctttctatcacccattcttcctctagctccaactgcgcgattacctctggcttacaaagctgataccctattcrcaggagtaacatacatcttaggagtttgtactgggaacaaaattctcagacacactcccaaccttttcaatctttagagcctctggaggggagacttcagaggcagcaaaataaagccactcatctcaaactcaatcaagacattccattggaggagaaagagcagaaaacaaaggtctttgactccaaaactgattagcattcttctatcccagcccaaactatattcacaaaaactttgcaggcttctactagttcaggaaataaacccacgtgaacggcttccggtttcacagggatgccatcctcacccagtgcaactagattcctgtagttctccagcatcacgtctcgatagaggttcttttgggcagggtacagctggtcccactcctctctggtgaagtccacggccacatcctgaaacgtcagtgattcctgaaacatcaagcacatccctgctcaggcaaaaacggttcttacagggaccctcaagggagggaatgaaagtgtagcaccaggt

SEQ ID NO: 834710 - DNA, 624 bp, Homo sapiens
cctggatgagtatccagcaggctgtctctttctatcacccattcttcctctagctccaactgcgcgattacctctggcttacaaagctgataccctattcayaggagtaacatacatcttaggagtttgtactgggaacaaaattctcagacacactcccaaccttttcaatctttagagcctctggaggggagacttcagaggcagcaaaataaagccactcatctcaaactcaatcaagacattccattggaggagaaagagcagaaaacaaaggtctttgactccaaaactgattagcattcttctatcccagcccaaactatattcacaaaaactttgcaggcttctactagttcaggaaataaacccacgtgaacggcttccggtttcacagggatgccatcctcacccagtgcaactagattcctgtagttctccagcatcacgtctcgatagaggttcttttgggcagggtacagctggtcccactcctctctggtgaagtccacggccacatcctgaaacgtcagtgattcctgaaacatcaagcacatccctgctcaggcaaaaacggttcttacagggaccctcaagggagggaatgaaagtgtagcaccaggt

SEQ ID NO: 834711 - DNA, 615 bp, Homo sapiens
aaatggggtttcaccatgttaagcaggctggtctcgaactcctgacctcaggtgatccgcccacctcagcctcccaaagtgctgggattacaggcgtaagccaccacacctggccaacagtgcacaattactaagtatattcaccaacctgtgcaatagctctcaaaaaatccaaatcttcccaaactaaaactttatatccataaaacaataactatcctttctcccctatttctgggactcacaattgtattttctgtgtctatgaatttgactactttaggtacctcatacaaatgggattctgtaacatttgtccctttgtgactgaattatttcatttagcataatgtcttcaaggttcatctctgttttaacatgtgtcagaatttccttcctttttagggctaaatgatattccattgtacatacataccatatattgcttatccattcatttatcagtggacatttcagttgcttccacctgttggctattgtgaataatgctgctgtgaatataaatgtrcaaatatcttttctggaccctgctttctattcttttgggcatacaccctgaggtggaattgttgaatcgtatggtaattctatgct

SEQ ID NO: 834712 - DNA, 623 bp, Homo sapiens
tagttgtagttgtttttaatwtttttgtcttttaacttttataccagagttaaaagttatttgcatgttatttcttcaacattcaggttaaagatggttcagggtaaacatagtgtgagaaaaatgatgcctactgaaaatcttttttctatgtgtttcccacagcaggataccttgctttaggctctggctcagtagacagtttccaattgtgtgcacagcctgagacttatgctgacagaaaccaattagtgcatactgtcaagtcttaaaatgagatgcagggtagatccctgtctaattaaatttattacaatatcatcatctctgtcatttttgtgtgtgtgtggcggagtcttgctctgttgcccaggctggggtgcagtggtatgatctcggctcactgcaagctccaccttccgggttcacgccattctcctgcctcagcctcccgagtagctgggactacaggcgcccgccaccatgcccggctaattttttgtatatttagtagagatggggttccgccatgatagccaggatggtctcgatctcctgacctcatgatccgcccacctcggcctcccaaagtgctgggattacaggcatgagccaccgcgctg

SEQ ID NO: 834713 - DNA, 635 bp, Homo sapiens
ttcatgtaacttaaagatgattttttttaaaataatggcctagacatgccaataaaaatacctattcaatttgcaaaaaaagtattaaataccacaggtattttctacataattatatatatatacacaagtggtatgtgtgcatgtatgtgtgtgtgtgtgtgtgtgtgtatacgtgctgtgtagcatactagccatgtaataactgttaactgtgaaagtttctaagaggtcagtcatctgtttcatcaccttacttcaaaaagggctgtgcctgtattaaccgtggggcatggctaactaatgtggtttcttacctcttactcttccacctctttttattcattgaagtcacagtcataactagcccatacacagtgctcactgtttgccaagcatggttgcactttacacatactgactcacttaactcttacagcatctctatcagataggttttccattactcttcacatattacctttaaattccctttctttcccttgcttctcatttaacccaattctaactttaaataagctcacctgtctttattcttctattctcktgttcatacttcttattttaattttttcctgacccattttccctacttgtgtcacactttatcttct

SEQ ID NO: 834714 - DNA, 565 bp, Homo sapiens
tgaaattattttttatttttgcatttctgcccatcaatctggaaataataatagctcataagaaaaaaagcaccaaatatttttcagattaaaacttctcacaatagtatactttcacaaaagtgtaacttycaacaacaaatttacaagtgataacagaaataaaagcttcatttgaaaaaaaggataagctaacagcgactatcatgcttagaatatatatctactaaatactattcaattaccagaaaaaaatgcaagattctactgatgtacgccatttcaaagtcaaatataagaagcaatatacaagtccattacaaaatgaatactgaaataagtaagtacaaaagatattgtaagaatgaatattcacacacaaaatggtccacacaaatcaagatggattcatctgggaaaaaaatacttgctcagaggaaaagcagatatatccaacatagttgcactaagaaaaaaaagcaaagttttaagaaacaggactaatgaaattttaattaactaatgtttacatcttttcaactcctttaattcttcctaagtcaca

SEQ ID NO: 834715 - DNA, 549 bp, Homo sapiens
tccttttttattctctccctgtgcctgctacctatacctgctacactcaattaagctcatcttctaaacctgccatttttcagccctgttatctgggcagacacttccttcccascttctaacaatgagactgcttggctggaaggggttaacttatccccagtgaggtaccttagtaacagcacacatcaaactgaagcgccaagcaatgctgcaggtcgttccttgattggaaaagaatgttgctaattttactcatgactgtcttatgttatttgctaattctaggatgcaatgccagaataagagcaatgactgcctcgccccacagacctgttgttgcacatatctgcatgcttcaatcaacagaacctgatgcaaaaaaaaaacagggaagagggagatgtgggagttcggtcaagctggtgggaaaaattttaagatgaagttataggatatagacacaaaccttcttggaaggctggaaggttttgcaaaagtctcaggatagggttatggctgaaagcagcctaatccttacctagagtt

SEQ ID NO: 834716 - DNA, 529 bp, Homo sapiens; identical to SEQ ID NO: 826227

SEQ ID NO: 834717 - DNA, 662 bp, Homo sapiens
ttcttttctcttgctgcttttaggatcctttctttgtctttaacctttgggagtttgattattcaatgtctgagatagtcttgtttgggctcagtcagcttggtgttctataatcttttcatacttgaatcttgatatctttctctagctttgggaagttctctgttagcatttctttgaataaaatttctaccttgatctctctctctacctcctctttaaggccaataagtctcatatttgtccttttgaagctattttctatatcttgttggcatgcttcactacattttttgtttttcatttgactcctttgactgtgtattttcaaatagcctgtcttcaagatctttaatttttctgtttggtccattctgctgttgagagtctcattcttcagcgtgtcagtggaatttttcagctcctgacatttctgcttgatttttaaacattatttctgtctctttgttaaatttatatgataggatgctgaattcattctctgtgttatcttgaatttcactgagcttcttcaaaacaattcatttgaattctctctcwaaaaggtcacatttatctgtaactccaggattggtcacgggtgtttaatttagtttgtttggtgaggtctgttttcctggattgtcctgatgcttgttgat

SEQ ID NO: 834718 - DNA, 574 bp, Homo sapiens
  misc_feature 1, 2, 3, 4, 5, 6, 7, 8, 9, 10, 11, 12, 13, 14, 15, 16, 17,18, 19, 20: n = A,T,C or G
nnnnnnnnnnnnnnnnnnnngtttaatttctgagtgaaattttaaaagagatcagctttaattaaaaaaaaaaagaaagcatacaacatatttccstaaagggggctatcaggatttctttgttctattctagcccactctgcaaccttcatttattttatcatacaattctaagatttctctctccaaaatgggtttaacatcccttctaaaagctgcagtggtatatctgcaaaacctgtcaagaagccctgatgaaaggcaatgccgaattgcaagcattattacaaagacaggtgtggtgttcaattcaaaaccagccacctgtgcgtcctccgttttcagagatgactcgcacatgttcatcacagattccccaagtcacttatcgcctgtgcactccttagagggagaccatctggaattgcagagttttctattcttaagctcttttaatttttcaatcacctgccctgacataagacgggttcattttctgtttatagtatgtctcatgggcagtttatggatctgtttctggcattttccctccaatcatcttgggaatcacagc

SEQ ID NO: 834719 - DNA, 506 bp, Homo sapiens
gtctggcttcactcggcataatgttttcaaggttcatccatgttgtagcatgtatccgaatcacattctttttacaggctgaataatattccattccaatatgtacatagcacatttggtttatctctccatctgtagatgaacatttgagttgtttccactttttggtacttgtgaataatgctgctacagaacactgaagtacaagtatttgtttgagtccctgctttcatctcttttgggtatatacctagaagtggaactgctagtacctatgctaagtcaatgtttaacttgttgaggagccaccaaattatttctattgccgcaacatcattttacattctgatcagctatgcacaaggtttctaatttctacacatctttacyaatacttattttctgtttttttgataagagccattctaatgggtatataaagcagaatctcattaaattagatttgctttgtaaactatttattaaaaataagagacacgaagaga

SEQ ID NO: 834720 - DNA, 599 bp, Homo sapiens
agatacagaaatacttagcaatgtgttacatttgcctacagtattcacttcagtaacatgctgtatgaatttgtagcttagaagcaatgggctataccatrtaatctaggtgtatagtaagctataccatctaggtttgtgtaactacactctacaatgttgcaggacaacaaaatcacataatgatgcatttttcaatgcatcccattagtaaatgttgcttgactgtgtatccatgcaatggaacattatttgatcacaaaaaaagaaatacagtactaatatatgctacaacttggatgaacctcaaaaatattagtttaggtgaaaaatggccattttttatatgattccattgataagaaatgtatagaataggaacatttgtagagataggagattatttgccagcaacttgggaagtaggaatggggtgtgactgataacataaggtttctttctgggttcatgaaaatcttctagagttagtaatgtttgcacaatcttgtgaatatactagaaaccattgaattgcacacttctaaatggtgaattttatggtatgtgaattattaatacatattaatttataaagaaag

SEQ ID NO: 834721 - DNA, 627 bp, Homo sapiens
  misc_feature 592: n = A,T,C or G
gtggttgtattactgaatatcttttaactgtagaaatcaaagggcccttgggaataagaatttctttatgcaacagagttaggagcttgctaggaaccatcaatggttttcttgtaacttttaagaaaatgatatatttcaagaatgtggacacctggggtaactgcttaagttccttttaagaatatcaatttattattttactcaacatgactaaatgaagctgttgctcacctgaattcttccaatttattagttgagagcataaataagttgcttcaaatgccaaagtcctgggtaattttcttctcatattcactttatattaaatattcattggtgagttttttaagggtcaaaagccaaaatagttcattctgttgcacaaattatagccatatggcattttatgttcatatagaaattaaatggtaaagattcatattgatatcttgaattttgcaatttgtttttgacacaaggagggaataaatayatagaagaaaagaaaagagaaagatgtaagatatagaggagaataaatgctaacattgtattatgaatgccattttaaataacaggtatccatatnaaaatgttaaatgaaacaaatttgtaagcaggtac

SEQ ID NO: 834722 - DNA, 580 bp, Homo sapiens
ctacaaggaactcaagcaactctacaacaacaacaatgacaaacaaccatattaaaaagtgggtaagggatacaaatagacactgctcaaaagaatacaagtgaccaacaaagatatgaaaaaaaggctcaacattactgatcatcagaaaagtgcaaactaaaaccatagtgagataccatctcacatcagtcagaatggccattattaaaaaactgaaaaacagcagatgtttgtgaggatgaagagaaaagggaacacttatacactgtttgtgggaatgtaaattagtacaacctctgtggaagacaggatgggtatttctcaaagaactgaaagtaggatctaccatttgacccagcaatcccactgttgagtatctacccaaaggaaaataaatcattttatcaaaaagacacctgcacttgtatgtttattgtgacactattcacaatagcaaagtcgtgaaatcagcctaagtgtccatcaatgaatgattggataaagaaaacgtggtatatatactccgtgaaatgcyactcactcataagaaagaataaaatcatgtctttgcagcagc

SEQ ID NO: 834723 - DNA, 616 bp, Homo sapiens
ctagcaaagccaattcaacaaaaatacgaatgcactctgaagacactctgaagacaacgaaaaaacatagaaaaggagacaaattttaaaatcacttacaaataatatgtcggtcttctyagaaacattaagaaatgaagagaaaacaattggaagttcacaagggttcatcattcagtggagagtaagagagaatgcacaaaaatgttgctatagttcagaaacagagagacaaatagcgcacataaaatcgtactcaccaaaacaaatcaatactgacgggaaaacaccttagaaatccatttaaataaatcaccaggagaaaaaggcacacagaagaatctgctcgattttacaaatattttagcactctataaatcaattcatagttgtaagtaatgcaaatgaaaagaaaaagatggttttctttttcccaagaaggaagagagacagtgataaaatggttctgttaaaaggaaaaatgtgttacacaaaggtggaaactcacacaaacctaagacaacataaaaaagaaaaattcaagccttgcttataaaagcttctgttcaaaatgttttcagaggcaacaataaagtggaaacacattttcataata

SEQ ID NO: 834724 - DNA, 525 bp, Homo sapiens
cttagaattaaccattattccagagagccctggttcttttttttgaacatgatactaggaaccaaagtgctgggtgaaatgacttctcagtagcattaaagagatgtactggctggatgccgtggctcatgcctgtcagcacagcacttcgggaggctgaggtggaaggattacttgagtgcaagagttcaagaccagcctgggaaacttaatgagacaaaaaaaaaaaattaaaaattatctgcttggtggcacacacttgtagcgttaaccactcaggagactgagataaaagaattgcttaagcccaggcgtttaagatgacagtcagctatggttgcgccagtgtgctccagcctaagcaacagagccaggccccatctctaaaaaagattaaaaagtgcaagggtttgagattacagtcagctgtgattgcacctctgcactccagcttgggwaacagagccagaccccgtctctaaagagagcaggaggcggcggtggggggtaacccttcatcagatt

SEQ ID NO: 834725 - DNA, 492 bp, Homo sapiens
attaagatctattttatttctttaaaaaattacatgagatcttccagggaccatgtaatgagcaatagttagcatataaagtactccagacccatccaaacatttgtcaacactacagtataaacattattcctttattttccaaatttctggtgtagagtgtgttgcaattgttggaaactagactgagattaaacagtgagtaatactcagtattgcaacctgtcgtttccaatttcctgaaccatcaggagaatacagtgcctctttttagtgttatttatgaaccatagcttttgcatccattttgcaattacacatggccaacgtttaatatataaagtcatgaaaactctttggaatctaattgtttttttcccctctggctggaacgaatagttaagcagaggaaactgtwaagaggttcatgtagatttcacagaatgtgttttatgatctttttgcatcatgagtttggctctgtctccaggg

SEQ ID NO: 834726 - DNA, 492 bp, Homo sapiens
attaagatctattttatttctttaaaaaattacatgagatcttccagggaccatgtaatgagcaatagttagcatataaagtactccagacccatccaaacatttgtcaacactacagtataaacattattcctttattttccaaatttctggtgtagagtgtgttgcaattgttggaaactagactgagattaaacagtgagtaatactcagtattgcaacctgtcgtttccaatttcctgaaccatcaggagaatacagtgcctctttttagtgttatttatgaaccatagcttttgcatccattttgcaattacacatggccaacgtttaatatataaagtcatgaaaactctttggaatctaattgtttttttcccctctggctggaacgaatagttaagcagaggaaactgtaaagaggttcatgtwgatttcacagaatgtgttttatgatctttttgcatcatgagtttggctctgtctccaggg

SEQ ID NO: 834727 - DNA, 457 bp, Homo sapiens
caaatacaaacacacttaccactgaaaaaagcatattatttcttgttttgtgctcaaatataaaacatattggttagcatgtcctcctgttacctattgktaataaaacaagagacccaacattcttcatgttcaccagagtttcctttatgccaaatgtatacaggtgagtcatgcgtttatttcttaataaatcaacgcatgttttaaacaagctttaaatgtttgacaaacattcaaagaatgataaaggaatgataaatcctttgctactcagaataattttgttgatataccttataagcttatattttaatatacaggtagatcatacttaataacagaatgtcagaataattttggtagtggtgctatgaaagagggacaagttagagatgccagtaaatcagatagattgacaaagtaacatttaaattaaagtcaaagattaattagt

SEQ ID NO: 834728 - DNA, 636 bp, Homo sapiens
tttctaaacttttatgctctatttcccttttaagtataagttgcaggttcaggtcatttctttgtttttccagatgagcttagacttttagaagtagccaggctgcawcttgaccactttgctgcttggatatttcttccactagataccctaaatcatctctctcaagttcaaatttccacagatctttagagcaggggcagaatgccacctgtccctttgttaaagcatagcaagactagcctttactctagttctcaatgtttctcatctgtatctgagacttcctcagcctggacttcactgtccatatcactatcagcattttgatcacaacaatttaacaagtatctaggaagttccaagctttccctcatcttcctgtctttttctgagcccttcagattgttccaacctcttcccattatccagttcaaattcgcctccacattttcaggtgtctttataacaatgctccacttttctggtacaaattttctgtattagtttattcacacactgctataaagacatacctgagactgggtaattcataaagaaaacaggttcaattgaaacacagttcctcaggctgtataggttttgcttctggggaggcctcagaaaacttaacat

SEQ ID NO: 834729 - DNA, 460 bp, Homo sapiens
aaaatccacatacaacttttaagataaaagactttcaagaaatgcaacgctattgagaagggtaacattggcaggggtatcctrtgtcactaaggatataagacatacttgaccaatactgtgccttgttgcttttgatacactctcattataaccattagctaatgtggggtagttggaatatcatctgatttaaatttgggctgattgattatgccatttactagacatgtgatcttgggcaagttacttaaatgttgtgaacctcagtttacccatttgtattatgaagccaacactaccttcttcaataaacttcactggggttttatatctagatcacctggtacacaggaaattgagaaaagtcatcagttctttacatctctccctggagttattagatatgtgctgataagaagacaatatatttaatacaaatgtttaataattgcttgac

SEQ ID NO: 834730 - DNA, 632 bp, Homo sapiens
ttaaaaggaaagaattttgaaggcaactctgtcaatggatgcaagtcatgactggaatagtccaaagcagtggactctttaaatgttgtataaatattactagtcaccctccatggggaaggctttgacaatgaggaggcaatataagtggtggctcagagtatgcgcctcacactcagagagagctggcttagattctgtctctagctcttgaagaactagctatgcatcccaagccaggcctgtgcatctccgtaagcttgtgtttcacgcttaatggtacctgtctcatagggttgttatgagaattaaataggccggccatggtggtgggtgcctgtaatcccagctacttgggaggctgtggcaggagactcacttgaacctgggagtcagaggttgcagtgagccacgatcgtgccactgcgccccagcctgggtgacagagcaagactccatctcaaaaaaaaaaaaaaagagagagagaattaaataaagcacatgaattgtttcgagcaatgcctggcacaaaggaagtgcctgatatgtgttagccatgactactttgattgtgtttattattcaygactagtgtcatcattattagatatttggtgggtggtggggataga

SEQ ID NO: 834731 - DNA, 533 bp, Homo sapiens
cacaggacataaaagtgcaaaattccaccaggaagggaaacaaaacagtcttgagacagccatgtctcagaggtgaaaattggaggarattttaatatagggtgtgaattccaattcacatctcttccaacgggacctctttccgaagtcccgggaactaacattcatcaacacctctgacatcccagaggatcgcaacattcctgccaagggttattactcccatttcccagatgaagagattgagtccctgcagcacgcaattagacagtagcagaaccagaatttgaactctgatccaccccgattctgggacctgtggagctccaggtaccgagagctggctctcgcctggggccttggagtctgggtagctggatgctgggagaggctgcggaggtaagggcccaggggctgaggttgcagcggctgcccgggaatgcggcccttgcacgcccactttttaacacagtgccatccctgacagacacccttgtccttttcctgtgctgcccttcgtaacaccataaata

SEQ ID NO: 834732 - DNA, 589 bp, Homo sapiens
tctagcaattggagattgctgaatcatatggcagttgatcatatgatccagcaatcttattgctgggatatatcctacttttagttttgtggcccaacatatggtctatggtctatgctgggsaatgttctatttgctgatgagaagaatgtgtaatctgttgcagctggataaaatgttctgtaaatatgtgttaggtccacttggtctagaatatcatttgcctccaattattttgttgatttttgcctagatgatctatccattgttgatttttgcctagatgatgtatccattgtcaaaagtggactatttaagtcccttactattattgtgtattgtagtctatctttccctttagatctgttaaacttgttttagatatttggtgcatacatatttactattgttatatcgtcttgctgaatttacccctttataattatataaagaccttctttgtctctttttatagttttttacttaaagaatattttatctgatgtaagtatagctacttctgcttttttttttggtttgcatttgcaagggatatctttttccattcctttactttcagtttatgtat

SEQ ID NO: 834733 - DNA, 597 bp, Homo sapiens
tccagggaggcagggtgtggtgggggtggaccctgggccacagcacgtctgcatcgagggctcctaactctcctgcccaatcccttctctggagatgctsactctcctaactagccaggccttcataagaactgccccagcatcttggacacatgtgcccagcctcttggcctcccagcctcccgggatagccaatcatctacagttgggagaggaggaggggagtgggaagcctcaggtgagcatcctggggtccacaagttccagcctctggcttcttgattcagatctgccacatagacaaagtgccaggaagggaaaggcagctctgacaagttggcaggtgccagaaatgctacagcttccatacaccatcattaggcagcccccaggagtcttcggaaccaagggaaaccaagtcaagcccgggcccaggctgggctccaggagaaaggccacagcctcatggtacccatcccctcactctctcatctacattgagaaaggcctctagcttccaatctccatgctgaaaactgtatgcttactctgctgctcaacagccacccatggctgcccagtccccaaagaataaag

SEQ ID NO: 834734 - DNA, 644 bp, Homo sapiens
aaacttgtgttatttaaaggttaactgtacattaatttatataacacaagcctctttgtccagattttatagaactatataggaattcagctctcaaaatccggatatttgtcattatgtagggtcaattgagttatgtctccaagttcaattttaaaagaaaactcaaattgctaacatttatctaaacttagttttaacaactttaagaaagaccaaccactcttattaataccagaggcctttagggaatataataaagcattgtgttacatataaagttatattctagtgataggcaataataattgttttatttcagttatttcattttttagtaatatgcagtattgtcacctgctttcttatgatttcactattgtttacaagaactaagctgaattgcaaaaaaaaaaaaaaaaagaaaccaaaacaaaacaaatctacactgtatttgttttaacatttttttctattatttcaatgtaggcaactctagaaaagttaacatccctctaaaaacccatttcccttttayttctaacttatcattttaaatttgaaaaggaaagcaggaagacacttatgctgttctttttttttctttttaaataaaactgattattttaagggaaggtaaagaa

SEQ ID NO: 834735 - DNA, 532 bp, Homo sapiens
ggtgagaagaatatgtttatgtgtatgtgtgtagagagacagaaacttgtaagaggtttaaatattcatgtttcatcattggtagtgaggagaaaatcttacatggaaatatcaaaaaatagaaaaataacctcattaaattctgaaaaatgtctatagtttcaaaatccaaaagcttgttgggagctacaatctgtattattaaggttattaaggatgtattatagtactagcagttgttctatttgtctatggaatgtacataagacatggatttcttctcatgagaacatgtatggctacacctactactgagtggttcattttcaatatttgatatcaaacgtgagcccagatatggcatcatttcttaggtggatcagccagatattaggtaacaagttgattacattgggtcaattccgtcatggaaaggggtagcatttttcttcatactaataggcacttattttgaatattgaaatatcttycctattcataaatcttccaacaaaaccatcatatttaatgt

SEQ ID NO: 834736 - DNA, 491 bp, Homo sapiens
gtccttcaagtccttgatggttgcactaatctctgcaatgcctccagggatgtgataktattttcgattcatgatatttctatgtagaggcagtgctaatggtttctatttggcctttcccgccattatagccatcattctaccagttagggagccaatgtgggggctctgtcagctgctaagtatgtctacgccaattatggattctggcactggggaaatgaccacagaatgagtctggggacacactagacccactgttaagtcagtcctgagctaaaactccattaattacttgacctccatgaactcctactttaagtggatgaccacaatgacattttgtgtcccctggaatcaatgtcagctcagagccagtgtccagtagtccctgaaaggtctgatcatttccctttccccaatgcacagttaccctggtaaaaggccagaggtctctttggggaaggatgggagaaatattaacaataaat

SEQ ID NO: 834737 - DNA, 596 bp, Homo sapiens
gcctcaaggagaaaatgccagtctttctttcttcaactgataaataattttatgacaatagtgatcaattttaagaaacataaattttaaaccaagatctatcaaatagacaacttcaacagaatatttactgttatttttgtctttaaagaccataaaactctaataatattcagtaaaaaatttgtgtttctaacaaaacaatgaataatttgactgaactgtattgttaaatatcttcagcttgacatgttgctagttaggttgacaggttacatggaattatagtacatgctcacttggctgatattacatatcattagaatgattcaagcaagagaatgttaaaattcatgtccaactaaatgtggcataaagagaaatatattacaaatcatgctatcattttcagcatctgctaatgatgttaattatgggaacatacatcatataatcttattgtgataaggttttcaattagacagttatctcagaagtaagagtgtccattgcctcccttaactatcctcaccaattattacatgctgggtwattcaggtagcaaactgtgagatggacaatagcatgtggaagtc

SEQ ID NO: 834738 - DNA, 574 bp, Homo sapiens
aaatgacaacaacagcaacaacaacaacatacaactcaaaacagtggtgttggttccttggctcttgctacctctttctgatcttttgccatttcttcatgccaataaatgactggtcgaatttatgatagaaaagagtcagttatactggaaaaggtaattcctaaggttttttttttaataagcataaagactttctcccaaaataattaaagagaagcttttctagctgatttgtttgagttcattgtagattctggatattactcctttatcaaatgtatagattgtaaagattttctcccactctgtggtttgtctgtttactctgctgactgttccttttgctgtgcaaaagttctttagtttaattaagtcccatctagttatctttattttattgcatttgctttggggcttttggtcatggaaatccttgcctaagccaatgtytagaagggtttttccaacattattttttaggatttttatagtttccggtcttagatttaagtccttaatccatcttgagttgtataaggtgagagatgaggatccagtttcattttcctac

SEQ ID NO: 834739 - DNA, 574 bp, Homo sapiens
aaatgacaacaacagcaacaacaacaacatacaactcaaaacagtggtgttggttccttggctcttgctacctctttctgatcttttgccatttcttcatgccaataaatgactggtcgaatttatgatagaaaagagtcagttatactggaaaaggtaattcctaaggttttttttttaataagcataaagactttctcccaaaataattaaagagaagcttttctagctgatttgtttgagttcattgtagattctggatattactcctttatcaaatgtatagattgtaaagattttctcccactctgtggtttgtctgtttactctgctgactgttccttttgctgtgcaaaagttctttagtttaattaagtcccatctagttatctttattttattgcatttgctttggggcttttggtcatggaaatccttgcctaagccaatgtttagaagggtttttccaacattattttytaggatttttatagtttccggtcttagatttaagtccttaatccatcttgagttgtataaggtgagagatgaggatccagtttcattttcctac

SEQ ID NO: 834740 - DNA, 547 bp, Homo sapiens
ggccaccataaatcatttttctcaagttcaaaattccacagaagtctagggcaggggaaaaatgccgacagtctctttgctaaagaataacaagtgtcacctttgcttcagttcccaataagttcctcatcttcacctgagaccacctcagactggcctttattgtccatgtcactatcaccattttggtcaaagcctgtcaacaagtctctatgaagttcaaaactttgccacatctttctgtcttctgagtcctccaagtctctaggaagtttcaaacttttccacattttcctatcttcttctgggccctccaaactgttccaaagttggttagaacctctgcctgttacccagttccaaactcacttctacattttttggtatccttaaagcagcaacactctaccagtaccagtttgctgaattagtccattttcatactgctatgaagaaacacctgagatggggtaatttaaaaagaaaaagacatttaatggactcacagttccacatgtytggggaggcctcacaatcactgcagaag

SEQ ID NO: 834741 - DNA, 585 bp, Homo sapiens
aaagataactagtgggtactaggcttaatacctggatgatgaaataatctatacaacaagcccccgtgacacaagtatacctatgtgacaaacctgcacatgtacccctgaaattgtaagtttaaagaaagatgaaagcacagtagctgaagtcaagaaataaatctccttcctgttggcactgtctcactcatacccgctacttaaaaacagcttaacattgtgccagctggcaaagaaacaatatttaaagggcccagattcattttcacagaacagggaatgaagagttagtttggagctgagaggcaataaagtaaaaaatggcatcctcctgtgtgtgtaaaagttcttgtttgacattctgatgtgagaatggccttcaggggtacctctaattcccccttgcctacctacattgtgtcatgttatgaaagttccgagccagaggtcacatcgtgatttatatctgtcctatagtacctggtacccmaaatatgtagatggtggaggaaaaatatgactggaaccctgaagacctagaaactagtcaaattcatttttctatttattagttttattaaa

SEQ ID NO: 834742 - DNA, 610 bp, Homo sapiens
ttcagagggtttgagtaactaatccaaaatcacataatatgaatgatgctaaagggcagttagagttaaaattagatcctttggaagccaagrtctgcaatctttttaaatcacctcaccatctcccatttatcttctggttaaatttggagagacattataaaaaggggaaacacatttataagttttctcattgccatcattaacagtggtgtaataatgacaaaataattaaaatttaattagttcttcctttgctgtcactccattgtgagcttatattctaatcttgcatcccctcaagcctaaatgaatctttgaaatgagggttgatttaaatcgatagtggaactttggctataggttactatttctttttttttttttttaattgaaatggagtctcattctgttgcccagggtggagtgcagtggtgcgatctcaggtcactgcaacctccgttcgcaccaccccctgcaggttccaagtgattttcctgcctcagcctcccaagtagctgggattacaggcatgtgccaccatgtctggctaatttttgtatttttagaaagcatggggtttcgctacgttagccaggctggtcctgaa

SEQ ID NO: 834743 - DNA, 574 bp, Homo sapiens
gtttatttctactattacaaatytctagtgcagcttggttatcaaagtttgtagtgctaaggataattttttatttttgaggaaaataccaaagtagcaatctaccaagcatagaaagcatgactttaaggtattgaagctgactatactctttaatttctattgctgactagcagagaccaaatcagcactgctttcaatgtagtcagcccatctgagaatgcttcatggtcgccaatatttttggagcctttttattgtacctatatccagcattaggtcaaaagcctcacaagataatcaagtttccttcttcatggtcacactttggtttgaaccaaaggctccattactaattacccaggctgtcctctcaggttattgacaaggcttgtaacagagtgagtttggctatttcaagaaatcctatccttcagagagaaaagatttgccactctgaagatattcaaaagaagttgatgctgactctacagacaattccaaaagagagatttctccacagcctccaccactggaagctccccaagcaggaggaagataccttattttgatg

SEQ ID NO: 834744 - DNA, 574 bp, Homo sapiens
gtttatttctactattacaaatctytagtgcagcttggttatcaaagtttgtagtgctaaggataattttttatttttgaggaaaataccaaagtagcaatctaccaagcatagaaagcatgactttaaggtattgaagctgactatactctttaatttctattgctgactagcagagaccaaatcagcactgctttcaatgtagtcagcccatctgagaatgcttcatggtcgccaatatttttggagcctttttattgtacctatatccagcattaggtcaaaagcctcacaagataatcaagtttccttcttcatggtcacactttggtttgaaccaaaggctccattactaattacccaggctgtcctctcaggttattgacaaggcttgtaacagagtgagtttggctatttcaagaaatcctatccttcagagagaaaagatttgccactctgaagatattcaaaagaagttgatgctgactctacagacaattccaaaagagagatttctccacagcctccaccactggaagctccccaagcaggaggaagataccttattttgatg

SEQ ID NO: 834745 - DNA, 466 bp, Homo sapiens
gcttttagaaaaaacaaacgagaatawtttcaagacatatttgtcaggtaaagaaattttaacagaacacaagtaacaattatcataaaagacgagagaacttgtggccttttttttttttttttgagatggagtctcgctctgtcgcccaggctggagtgcagtggcacgatctcggcttactgcaagctccacctcccgaatgcacgccattctcctacccccattgtatctaggaagtaactagcttgcttttgatctaggaagtaactagcttgcctcctgagtagctgggactacaggcacctgccaccacacctggctaactttttgtgtttttagaagagatggggtttcactgtgttagccaggatggtcttgatctcctgacctcatgatccgccgccttggcctcccaaagtgctgagattacaggcatgagccactgtgtctggccgagaactta

SEQ ID NO: 834746 - DNA, 516 bp, Homo sapiens
tgaaatgtgtccatactcaagtcccatagctgaccttgtggaatccacttacacaacaagttggtcctctgtataagtgggtttcatatcctgcaaatagtatattttcaatctgtatttgattgaaamatagccacctataagtggacctgtgcagctcaaacctgtgttgttcaagggtcaaccgtgaagcatctggcacagtaactcacgaaaaggcgtcacaaatgaaagatcctatcttaggtgacatctataacctccttgtggtcaacattcttttgctgcattgctagtacagactttagattagaaggcacccgctttttatgtataccatttctttcaatcaacctgaatacctcattaaccgtaacctaggattatggaatttgccctacaatataatatgaaagcctgtcagcatatgtttactaatcatctaaaagatgggaagagaaaaatgcctctctaatcttccattattttccttcttaaaaattaaaactgaaggtc

SEQ ID NO: 834747 - DNA, 640 bp, Homo sapiens
agaaaaagactgcggtttccctcttctgccctcatactaaggacaaatttgattcactcactaaatggcagattatatrgtaaaactttgctctcctgataaattcatatttgcacttcccctggaaatttaacagagtccttttgtagttaattaactgtaaaataagataagattgggcagttgtaaaaggaagtatctttaaggttttctgctaggctgggaatattttatttctaatcaaaagccaagaaactatctctaaactagctcagagggaaatccaccctccccacccctcttctttgatgttgctgcgtatcctggtgagggcttttattagaaaactaaggagcaggactggcacatcaatagcgataagccatttaaagtggtgcccctcctggtcctcgatgctcgggattaactcactgtggttcttttctggctgctccttttttgtaacttgtttattgcatatgcttttttccctgctcgactatgtttgggagccacgacttaccatcttgatttgtcttgtttgctttctgtgtcccttgcttcctgtgcccagttgagcctgttgatgcccgccctgctgccgaccgaggactgaccactcgaccaggtatcagaaccg

SEQ ID NO: 834748 - DNA, 554 bp, Homo sapiens
ctgtgcaaatccccattaatgtacctaactcattaaattatctatrattcttactcccctctttaatgtgagatccatagggctggatttggtcttttttctttatttggaaccccaataacacagtgcttgacccagagggtgctctgtatttgcttggtgaatgcctgccacagaggccatgctactgtacttgagaaaacaaatacatatacacaataaaaataaaacaacttgggctcatctgccttcttttttcctaaaagaaatgtgcttctctataatccccagaaagacagccatcacagcttgcaacagttcttggcaacttattacaactctcatctgaactgtgaaatctggttgaatttacaaatcagaggatgaccttttaaatctcagaagaaaagtagtaaaagaggtaatgactgataagctatatctctatatattgaaaagaggataggttatacatgtgaattaaaaaaaaagaacatttgaaaacatcagagattaaaggctgactcttgttgattgtgaaggatatttgatat

SEQ ID NO: 834749 - DNA, 577 bp, Homo sapiens
ttggtctgtcgtggactaaaatgtcattatgtggcccataactgtatttttattggtagagttgttagcatttggaaatgagcacttgctagttgktggttttttttttttttttttttttcaaataagcaggaaatattgacttactgaatttacttagccataaggccagagagtcactctgtgagccattggccacgctttcccaaggaggtaactgtgccttattggtgcttcaagcagtgaagcaatagccctttattattaccactccccaaatgtgccctccatgtcagaatagccctctggtggctggaaatctcagcactagctgaattaaccaccttgctcctgttttaggacgttcctgcaaagcccactaatcccaggatctgtttagtagcaagcggtacttttctacattcacatacatagacactggatatttaaaaatacgtattgtagctctttctgctactctccccagacatgtcacctttaataaggagaagttgggggcacagcttctctttattataggatgtgaaaaacttttcctctcacagatgtgatcact

SEQ ID NO: 834750 - DNA, 577 bp, Homo sapiens
ttggtctgtcgtggactaaaatgtcattatgtggcccataactgtatttttattggtagagttgttagcatttggaaatgagcacttgctagttggtggttttttttttttttttttttttcaaataagcaggaaatattgacttactgaatttacttagccataaggccagagagtcactctgtgagccattggccacgctttcccaaggaggtaactgtgccttattggtgcttcaagcagtgaagcaatagccctttattattaccactccccaaatgtgccctccatgtcagaatagccctctggtggctggaaatctcagcactagctgaattaaccaccttgctcctgttttaggacgttcctgcaaagcccactaatcccaggatctgtttagtagcaagcggtacttttctacattcacatacatagacactggatatttaaaaatacgtattgtagctctttctgctactctccccagacatgtcacctttaataaggagaagttgggggcacagcttctctttattataggatgtgaaaaasttttcctctcacagatgtgatcact

SEQ ID NO: 834751 - DNA, 631 bp, Homo sapiens
ttttagttttttgagaaacttccataccattcttcacagtgactatactaatttactttcctattgatagtgtaaaagtggtagcttttctccacgtcatcaccagcgtttgttattttttgtctttttaataatagtattctaactggggtgaggtggttttgacatgcatcttcctggtgattagtgatgctgaacattttttcatatacctgttggccatttgtgtgtcatcttttaagatgtgtctattcaggtcttttgaccacttttaaaattggattatttgttctttttgctattaattttttttcccttatatattctggctattaattccttgtcagatgggtagtttgcaaatattttctcccattctatgggttgtctcttcactttgttgattgtttcctttgcgtgcagaaaccttttagcttgatgtaatctcttttgtctatttttgctgtgattgcctgtgcttttgagatcttaccttccaaaaaaaactttgcccagactgatgtcctgtagcatttcctcaatatcttctcatagtttytagtttcagttcttacatttaagtctttaatccattttcagttgatttttatatatggcaaaagatgagtat

SEQ ID NO: 834752 - DNA, 621 bp, Homo sapiens
tgattctttgtagcataaacacaaaagagaaaaatacatttccaactaatgataaggttatttataaatgagatatattcaaagaatgattttccacatattggacacatgctattcatttctcaattttatttttacctttagacaaaaaaattttaaatactgaattataaacaagatttaaaattttattcatgaaactaaaagtatgttttaatacacagctatacaagacaattacttaagcatacatttaagcaatgtaattaataaaatattttctttgtgagtttgagatgttacttttatgaattttgcaatagcctaatgaaagaataaaaattacgtaatttttgcaatgatcattcattcatcatttttagtagcaacacaattctatgatatgttatggttgtaacagtggctttttcaatgatgctttcttaatgacactttacaaattacactaatagtctctcacggcaaggttggctgtatgtattttttgtaggctttataatatcayctgagtctattattacctctgacatttttctagaggccagttaacttgtttatattcaaacaccgagtgggaaatgccagcatcaatcaccgttt

SEQ ID NO: 834753 - DNA, 528 bp, Homo sapiens
gagagatcaacaatatatttaactgtactgctccaatacttcacagaatcttatttattttagtatttaatattgatttaaagactagattttcttggagggtcagcagtcatccaggaaatagataatttcctgtcatattcaattgatttcattagttctcaagagggttctatatttcctttgacatgttagtaccaatatagcacaaaatctccaaaacaaaatagaattcttacagaaaaagtatctattacctaggatatcaattccaatctgatggacatgtttattacatagattaaagagtttcagaaatacataatacctatcacaaagatattttagttgattctctacttaacaggattttacaggcaacctctatgcaaaatcamtaaaccctctattctagagcttctcccctggaaacctgaggtggattttacaattttgacccttaaaattttgtatgcaaaatattaccaaactgtatttttattgttgaatagaaaattaaaaagtgag

SEQ ID NO: 834754 - DNA, 633 bp, Homo sapiens
cagtgaagttaatccaggaatgcaaaaaaaaatcaagatatagctgtacagtaagcagaattaataatatctatagatttaagcaggaagttggaagattcttgaaagcakctcttcaagaaaaaagtggattacaggtgataaatatgattaagacgttaataatcttagtgtaatagtgaaagcataagctaaaatgtggcaataaaactccttgggaaataaatgaagagaataagaatctatacaaataaaccatggttcaaatgggtagcaaattaataaatagcatgattttgaaacatttatgaaaatataaaaaaacacataatttatttggattgttatctcaaacttatttggaagaatggttaactaggtttgattatatatccctttctttaggactgttatcactaagtactttgttctgaaatgaacattattcatgcacttttaataagataagttttttccccaattttgagattaacctagagtagaaaactttataagaaagtacttgattgaaccccaaattattattacataatggaatacaaatcaaataatcattgtaatttctattatttaaaaaaatcttttcagtgttatacaatcttaaagtcgtgt

SEQ ID NO: 834755 - DNA, 617 bp, Homo sapiens
ggcgacagagcgagacatcatctcacaaaaaaaaaaaaaaaaaagtwaaagcaagcttattaagaaagtaaaggaataaataatggctactccatacgcaatgcagctacaagggctgctgtttggctatttttatggttatttcttgattatttggtaaacaaggggtggattattcatgagttttccaggaaaggagtgggcaattcccagaactgtgggttcctcccctttttagaccaaacatatagggtaacttcctaatgttgccgtgacatttgtaaactgtcatggcgctggtaggagtgtcttttagcatgctaatgaattataattagtcgataatgagtaatgaggacgaccagaggtcactttcattgccatctgggttttggctggctgttttactgcatcctgttttatcagccatgtctttgtgacctgtatcttgtgcggatctcctatctcatttggtgactaagaatgcctaacctcctgggaatgcagcccggtaggtctcagcctcattttacccagcccttattcaagatggagttgatcttgttcaaatgcttctgacatatttctctccttccttttacaagggaacctttaat

SEQ ID NO: 834756 - DNA, 558 bp, Homo sapiens; identical to SEQ ID NO: 830677

SEQ ID NO: 834757 - DNA, 619 bp, Homo sapiens
aatggggaaaccagagagagaaaaattgtttcagaaaaaaaagaaacttgtaattactgtagccttggtaccagcatggtactagtaccaaaatagatatatagaccaatggaacagaasagaagcctcaaaattacaccacaagtctacaacatctgatctttgacaaacctgacacacacaagcaatggcaaaagattccctgtttaataaatggtgttggggaaaactggctagccataagcagaaaactgaaactggacccattcgttacactttatacaaaagttaactcaagattgattaaagacttaaacatgaggcctaaaaccataaaaaccctagaagaaaatctaggcaataccattcaggacagaggcatgggcaaggacttcatgactaaaacaccaaaagcaactgcaacaaaagccaaaattgacaaatgggatctaattaaactaaagagcttctgcacagcaaaagaaactatcatcagattgaacaggcaacctacagaatgggagaaaatttttgcaattgatccatctgacaaagggcaatatccagaaccttaagaacttaaaaaaatttacaagaaaaaaacaaccccatcaaaaag

SEQ ID NO: 834758 - DNA, 597 bp, Homo sapiens
ggacatagcagagggtggacctgacagaatcactaaggatcggagccagggtaatgggattaagccaactctgaaacatctctaacaaccattatttcagttttgcgaaatctgtacatgtttttgcttctacttttgtttgtaagaatttggtttgttgggtggttatgtgtttgtttttctaacttgtggttaaaagcgttttagcaggcatggaagttttcattgcatgctttaccattacctacaaataattcattattaaaataatattgcaacaacaaataacaaaatggagaaacataaatttcacttttggatggttacaagctaaactgtgtcccccaacgtttatatatttaagtcctaaccccccactacctaaaaatgtgactgtatttggagataggacgtttaaagaggttaagttaaaatgagacttttagagtgggccataacccagtctaacaggtgtttttataagaggagttcaagacactcagragactatgtggagaggcagcaagtggtctgacattcacaagcccaggaaagaggcctcaaaggaagccaaccttgccagcaccttgatttttg

SEQ ID NO: 834759 - DNA, 600 bp, Homo sapiens
gattaagggtctcaaaaagaattcagccaataaaataaacccctctccctccwcttccaataaaactttttaaagcaccaccaatgctcatagatgtctcctttctcatttttcattccatcctcaacccaacctagtccaggttcattgagcttcacgactctgctgacgtgattcttgctaaaatctcatgtgaccgccattaaagtaaaatattttctgtgttctcctatttaacatcttatcaaaattccagaatgataactggtccctggttcttataccattttttcattgtcttctctgccacaatctttcttgcttttcttctcccgtttactttcaatgttcattgtctttctccttggcaggtacattctcccctatacagttatttaagctcaaatcttagccccttttctatccctttgctctctcccttggtaatctcatctataactgcaggtgcaattgccacctcacatatttcattttgtgcccaatcatgtcctctgtgattcaattgcctacttgattttcccttttggatttctgaaaggcatctcaaattcaatctgttttgaagtacatttgtttccc

SEQ ID NO: 834760 - DNA, 600 bp, Homo sapiens
gattaagggtctcaaaaagaattcagccaataaaataaacccctctccctccacttccaataaaactttttaaagcaccaccaatrctcatagatgtctcctttctcatttttcattccatcctcaacccaacctagtccaggttcattgagcttcacgactctgctgacgtgattcttgctaaaatctcatgtgaccgccattaaagtaaaatattttctgtgttctcctatttaacatcttatcaaaattccagaatgataactggtccctggttcttataccattttttcattgtcttctctgccacaatctttcttgcttttcttctcccgtttactttcaatgttcattgtctttctccttggcaggtacattctcccctatacagttatttaagctcaaatcttagccccttttctatccctttgctctctcccttggtaatctcatctataactgcaggtgcaattgccacctcacatatttcattttgtgcccaatcatgtcctctgtgattcaattgcctacttgattttcccttttggatttctgaaaggcatctcaaattcaatctgttttgaagtacatttgtttccc

SEQ ID NO: 834761 - DNA, 468 bp, Homo sapiens
gctttgatatttgaagtcaaacttttgatattcagaaaaccttttttctcatgaacttttcctatataactgtctctactagcataaayatacatacatattcacacacactctctcacacacacaattgtatttgccttaaaaaacaaaaaacaaaaaaactaagttatacttgccctttctcttcaaaacaatagttacatgaagttgtggttgctgcctgaatgtcaggggaaaaggaatgagcaccaggcagcacaatgaaagaaaccttactatgtaaaataatattcaagacttatgcagtgacatgtaaataggacaaaaataaaatacaaataaatacaactaaggctgattttaagataaatgaactcacgtctaattaccattttcattagatacctaaacatatttttacctggaataagaatcagaataccaaattttagtgatgagaattttgta

SEQ ID NO: 834762 - DNA, 647 bp, Homo sapiens
aacatatatggcattgccaaaacttggaatgtgcttttctgcatcattagtgacttctgacttctccgattggaacacacgtatgtttgtttcctttgcaggcctaattggcaagactgcagataccctagaggaattgaggaaaggtggataaagcaactgattgctttttttcaggaccctttagtctatttcctttgtgaattcgttcatttggaggacaaccttagaatgagcattagttaccagattgagccatcaactatcttccgagagacaaactataatttcctgaatttattacccaatattttataccacttgtcttgcagtattttgctgttataagatgcatttattactgatgatttccatctactaaggcgtaagtcaaaccagcattccattttgtcactcttctgcatttcatatttagccaacttagagttcgatggaatagaaatacgctctatcgaaattactcaattactgtattcaaaagtttccacaaatgctgtaggtactaagagaatatttatgtaaattcacattttccaaccrtgctcatctatgttagtttaaaatgcaagagttaaatttttcattttgtggtgatactattcccaagtgcattatgttcattgctt

SEQ ID NO: 834763 - DNA, 616 bp, Homo sapiens
gctattgttactttttgctattctggaggaattttttttaatgaattatgaaaacttttctacaatctattatgttgttctcttgccaaaactttcaaccatggttcaaaccaggaccatctacctagttttcccatccacatcaactcaagccagccttcagtctccctagggtggtttctctctcctctctccctccatctctcccttcctcattccctccctccatcccttctctctctctatgtctgtctgtctgtctctctctctcttcctggtatctttctccttgtatctacagtttgtcccacattgattttgggggactgcagcaatcagcagcctcagcttttcccagaggccttgctcatacctcccaggcctgaacacctaaagaacccatagctgctggacccaggagggatggttgaccagttgattggagttaggagggaagcacagttggaatgcgttctaactgccatatccctagaatcctttggtgwttaatatttagtgcaataattttcatgtagattgaatttaactaaagcaagtgtcatggctttgtcaggaatcttaatcatgaaactttccttggcttccagtatctatt

SEQ ID NO: 834764 - DNA, 597 bp, Homo sapiens
ttgacctataaatgtcattaaagctgaggtgagtctcttgtaggcagcatatagtttggtttgtgtgggtgtgtgcatatgtgcacatttgtttatttttatccactctatgtcttctgattgaataatttaatccatttatatttaaagtaagtattgataggcatggacttactattgccttttttcaattgtgtctgtctcttttgtagttcttttgcttctttcttcctctcttgtacacttcctttgttattgattttctgtagtgatatctgatgattccttactctttatcttatctgtatctactataggtttttcctgtgcaattaccaggaggctaacacaaaacacattagatttataacagtctattttatactaataacaagttaaccttaatcacatacaaaaactctgccctttctttcctccactccccctaaatatattttatgtttcttgatctcacagtttacatatttttattatgtatgtttattgaaaaattaactatagttttaaaaaatacttttgtcttttaaccattatacsacagttaagagtgatttacctatcactattatagtattt

SEQ ID NO: 834765 - DNA, 530 bp, Homo sapiens
tttgaacaatgtctgcaataataatactcaataaatgtgaactcttatgttgcaagtgaactcaagcatcagtaaattactgaactagaagacttttaatgtcttttccaatgctggggtgatatactactctgattttctggattacttcctcgtacctctcattttgcaggtaactgataccacccgttttgctatttaccttcacaggtgtctatcttattttcacccagataataatttccttgaaggcaggcagtgtgtcatatgttattgttattttccccagggcactatggagcacaatttcctatacagagcagattttctaaatgtaattctgttgatgatactgataagtgccttagacacacttctctcccatcctgtcagtagtaattaattaagattacctagatgtctcygttattcctcgagagtaaggtaagtgccttgaagagtgtgggaggccacacagtgttctaaaggttccttttattctccaagaggagtttaggcaccagaaacat

SEQ ID NO: 834766 - DNA, 616 bp, Homo sapiens
cttttgtctgccacctgccaataccatatacctgcttgcagctctcaccagaaaataatggctttgggtttcttcagttttcctaacctyttgtatctgtaattggcaaagttaagcccacactatgctgacaaaagattctgaaaaatatgtttcccagatttcttctttaaaatctacagggcaatgtaacaagagatttgataatatacaatcttgcacagcggctaaggagcttctagacttcagggcttaataagccttatagggtttctcagaggtcgatacgatgttcctgagatgatcacctcatcagtggtcttgagcctttagaaaagctaattataggcttatgggggaaatactttcttcttccctacctagtcaggaagtaaagtaagtgctccctcctgccccacatacacgtgaggaggcacttgtaaaggtggacgtcgccgcataaacatctcaaaccctgttccagagcttgctgagcagctgaaattagtcaacccttactgggtgccatttgagttgaaaaagtgaagtgagataatttttttttattgatatgttcggccctcctcctcaaccctgtctttgagggcatgcgcct

SEQ ID NO: 834767 - DNA, 657 bp, Homo sapiens
agtaaatcagatagttctaatgtgaaaattagtaaacaggaatatatatcaatggtaaatattagatgaaaccatcatgagaaaataaaagaggaaaaaaaaacaaaaaacaaaaatgagagtcatacatgatgaaaagatcttgcaggcatgcaattgcaactccaaaatgtaagacgataacaaatgagatagaagcaatctgtgaagagacagaggccaagaattgctcaacgctggcaaaaaatatcaaggtcccaattcaagaaataatgaaaataacaagtaagatattacaaagaaaatgaaacttggaaacatcaaagtaaaagctttgaaactaaagaaaaagacaacaatcttaagggaaatcaaaaaaataaacaatcatttaaaaataacaataggattaacagctaatttactaacataaataataaaagtcagaaaaaatatgtatcttcaaattctgaaggaaaattctcacctaagaattctatatgccacaaaaatatctatcctgaaaatgaaggtgaaataagtatattttcaggcaaattaaaaaaaaaaaaactaaaatcatccctgaagaccttgaataaaaggagtttwtaaagcagcaagataacaatctagaaacatgcatgaaaatgtgaa

SEQ ID NO: 834768 - DNA, 612 bp, Homo sapiens; identical to SEQ ID NO: 829902

SEQ ID NO: 834769 - DNA, 595 bp, Homo sapiens
actctttgggcatctcagtattaccatgccctgtgaataagatcagtaggaaactacaataacccaatccaggcagaactacaaatggccagacccttcaggaatgaaggtttgggtcacttcaccaggtamaaattcacaacctgccgtggtgcttgctgaaggcaaaaggaatacacaataagtagtagaatagggtagtcatcaataccagctatgaccacgtaaccagttgcagaaacaaggactgtaattgtcaggtgtatttcctccttattttgttaagaccatgtttgtgtgtgtataaacttgtactaagaaaatatcttccttttatttcctttctttttcctttattacatgacataagatttattgacttcatatcagtatttaagtgtcattaactttaggtaatagcattgaggttatggattgatgaatttccagttgtacaaaggataggtatattatgttaggcataattataaccttacatgttatgtgaagtgttatagcctcagcttaccactgtgctttggccaaaaggcattgtgtgtgcgtgtgtgtgtgtatgtgtgtgtttgtataaaga

SEQ ID NO: 834770 - DNA, 500 bp, Homo sapiens
ccataaattcatgcaaaatatatgtttgaatttatgagttggcaattcaactgtgtagtgtaacttattcaagttacacatctataagactagatgatgtatattttttgcattgcactctttgcatctrgcataatgggatgatttttagtcatttctaaaatatttgatttttctttgtattttctcattgaattataagtactgtattctaaggattttaatgaaatgaaggcacattaaaatcataatccatggtaattcaatgcaaatcacaattcctttgacaattatttctactattgaaaaatcaggcagtctattccttacaagcagttttgcttccaacttcttaaggcaaaatactgcccctccacccccactgacctccggagctgcaacataaaggaaacatatttctattacttccaaaggatgagaatattgggatcccatatttaaattcaccaattccaaacacaaacaagagaaaaaagtga

SEQ ID NO: 834771 - DNA, 598 bp, Homo sapiens
atgggtgtggatctcaaccttgccacttttctcccagaggatggcgaaccaattgagcatgactgycaacaaattatagcccagacttatgctgcctgagaggatctcttagaagtcctcttagctaatcctgaccttaacctatgtaccagtggaagttcatttgtggagaatgggatacaaagagcaggttatggcatagttagtgatgtaacagcacttcaaagtaagtctcttcccccaggggccagtgcccagttagtagatctagtggcgcttacccgagccttagaacttggaatggaaaaaagaataaatttgtatacagatagcaagtatgcttatctaatcctacatgtccatgctgtaatatggaaagaaagggagtttctaacctccaggggaacccccattaaataccacaaggaaataattgagttattgtatacagtgcgaaaacccaaggaggtagcagtcttacactgccaaagccatcacaaaggtgaaggagaaaaggtagaaggaaaccatcgggcagatgctgaggtaaaaattgctgccaggaggaacttcccattagaaatacctatggaaggat

SEQ ID NO: 834772 - DNA, 647 bp, Homo sapiens
ggggccccgccccaggagctggcttcctggcctcagctgccctgcccacccagcagagcccgggggcaggcctttcctaatccttcatcctgctgctgctcattggagggtagagcagagtgagtcacacacctgtgcctgggcccgtcctctgcctcctgtgcactcattacctgcttcctgagctccccgagaagtcatccaggacctccccgagaagccgtccaggaaacatgctctcaggggacccccatctgcctcagcctctttgtcactgcctggaccattgtccctgctgtttctcacgtaagaggctggtggcctgagggaagggctaagtttcggccgctttgtctagctgccctgcagaatccccaaggctgctcagattctggaagggtccacagagctaggtgatgtctgatttccctcctgttggcaccccctcaaggacacatggcccgtctttgttgcccacagacacagcacaatcctctcacccctcagggccattcacacacactcaccaacagacgcagcattcmtcacacaccacacaaaacacatcctcgtcacccacagaatcccttcacaacacacaacagaccctcatcatccacagatacaacccatgaccctccctatac

SEQ ID NO: 834773 - DNA, 513 bp, Homo sapiens
gtttctgtctttatgagactaatcrcacttaactaaggaaacataaagtccatgaagtatttagctcaaagtgaagtgctaaattgcaggttactgtgtgcacagggactgaccactctatggacaatttgttgctgctgcatatgataaattggtgtaggaaagaattggttggattctgagtataatgtgaattttgagaaggaagaggaagctttctgtgggcaggagaagcttcattcatctcttgatatttggtactgaatctctcctttctcttcatagcaagctccttggaagaataatccatgctgcctccacgttcttgcctctcactctttcttccatgctttgcaatagggcttccatatgcataattcaatggaaattgcaacaacaaaggccagtggtatttttaaccatcaattgcagtggcactctaaatttctcattttaattaacttgcctgtggtatttgaccagatcattgtttctccaattttgaaactcatt

SEQ ID NO: 834774 - DNA, 513 bp, Homo sapiens
gtttctgtctttatgagactaatcayacttaactaaggaaacataaagtccatgaagtatttagctcaaagtgaagtgctaaattgcaggttactgtgtgcacagggactgaccactctatggacaatttgttgctgctgcatatgataaattggtgtaggaaagaattggttggattctgagtataatgtgaattttgagaaggaagaggaagctttctgtgggcaggagaagcttcattcatctcttgatatttggtactgaatctctcctttctcttcatagcaagctccttggaagaataatccatgctgcctccacgttcttgcctctcactctttcttccatgctttgcaatagggcttccatatgcataattcaatggaaattgcaacaacaaaggccagtggtatttttaaccatcaattgcagtggcactctaaatttctcattttaattaacttgcctgtggtatttgaccagatcattgtttctccaattttgaaactcatt

SEQ ID NO: 834775 - DNA, 513 bp, Homo sapiens
gtttctgtctttatgagactaatcacacttaactaaggaaacataaagtccatgaagtatttagctcaaagtgaagtgctaaattgcaggttactgtgtgcrcagggactgaccactctatggacaatttgttgctgctgcatatgataaattggtgtaggaaagaattggttggattctgagtataatgtgaattttgagaaggaagaggaagctttctgtgggcaggagaagcttcattcatctcttgatatttggtactgaatctctcctttctcttcatagcaagctccttggaagaataatccatgctgcctccacgttcttgcctctcactctttcttccatgctttgcaatagggcttccatatgcataattcaatggaaattgcaacaacaaaggccagtggtatttttaaccatcaattgcagtggcactctaaatttctcattttaattaacttgcctgtggtatttgaccagatcattgtttctccaattttgaaactcatt

SEQ ID NO: 834776 - DNA, 673 bp, Homo sapiens
tcagctaagacaatgaacacacrgagcgccaaaatagaaagaacaggaagcaacaaacaggttgagtctgagatgcctgtaaagcatctggaggcacatgtcaagtagacatttggaaattcacatctagaacttctgggagatattggggctggaaatatttatttagatgtcatcaggatgtaggtggaagttaaagttggaagagtggactaaatcctctgagacactgtcaagtaagacaaaacattctaggaaagaatcgcaaaaaagatatacactttgaaggccgttagggttgtacccaaaatatagtctctttaccgtctgtacttgccacctattccctcaatcttattaaccaataaaaactgacaaggcttagctcctaaacttaaaccttaaaaagtgctagtccccagctcttttttctcctagcttacttcttttttttcttttttataatttatttatattttcagagtgtgacatgatttcttcagtttctcttctataactactggcagaagtgtctgagtggttgcacattaaagaattctttcatcatttgctcatggtaacactatttcatatgaagattccatggtctttgttcattttcacccattttaggtttctgatgaatacaagtactttactctcagaagttagc

SEQ ID NO: 834777 - DNA, 510 bp, Homo sapiens
ttaactgatataaaacaactgaaggatcctacaacagatacaatacattctcttcaacagctgataaaatattttaaaatatgttaggtcataagaaactcattaaaccacaaaagcaaaaatgtgtaaaaattgttttctttgttcaagaaaacaataacaaaaatgaaaatagataattgaagaaaactgaaaaaatttaaaatatactttttagatcaaagaagaaattaaagttgtaattgcagattatttagaaaacaatgataaggagtttccattaaaacttatgagatattacctcagtactgtgattatggtatcctaatgtcattttccacttttaggaccaggactcactgaagaaaactaatttcaggtctgggtgaggaaattcataatgtaagtctagaacatttgtcataacagaaagtaaggaagctctcatagtatgcaaatttcctatcagaatgactcargagtaaacatgaagaggtttccactggacaa

SEQ ID NO: 834778 - DNA, 540 bp, Homo sapiens
gaaactaatggtaggtaaagtctagttaataaaggtttgttttgttgattcctctggttctgtctcctggcttataaaagtctaaatttatctttggtgatcaatctttgtttttcctggtagaggtggaagggaagacatgtttataaatatatgccctgcttttaggcaaatgtgggaggacagaaagtttttcttgtatctgcttcttctcaattcccttcaattcaaaataacccttatgccaaaatggcagattttggggtgacatactttgctacccttcaaatgagtaaattaattttgatagaatcactgactgaatggtgtaacagcaatgagattaacaaattatagctgcatgcaacaagatggaaaaatcttaaaatatggaaagatgggagtgaaagacacaaaaaattackattccagtcacagaaattacaaaacaacacaatacaaaacatcccaacaaaacgtatctacctatgctgttaaaagtgactgtagtggtggtccttataagaagagagggagcgc

SEQ ID NO: 834779 - DNA, 618 bp, Homo sapiens
tgggtcaaatgactcgggaactttcagccagcaccaaacgctgaggactgtacacacactttcaaagggcaagaaaccaattttccatgttctggaggtaatctattccaaagtgaatgagctatggaaatggacttgcaggcaggtttcggaagaagatttaagggatttcagcagctggaatagaatcatctcatgcttttccagagggcatctgagctatcaatggatgaacatggcccaactcttaactcgaccttttcactgctgtcagtctgacatgctgacgtgaagcagggattgttatgagtcagggagaagtgccactgggacagactaaactctacacgagccagcctgggaaccagtgtctgacatttggtctcagatccaggtattctagagctggagcagttcttaccgtggccccttgatgcagtcagatgcctggacctaagtgaaggatgggatctgcagtgaccacagtcagtccattgtcrccacattaaataacatcatgggcattggggaacatgacgcagaatcacggaattaggacatctggcgtggaaaacaatgctagattgcccacctcatcagaagattctcttctatgtt

SEQ ID NO: 834780 - DNA, 595 bp, Homo sapiens
atggagctaaatgctgcagaatgttaatttataaaacactgtcaaggactcaaaaccagaagaattcatgcagatactaataaaacagagtcattgtgcattagattttcccgctcaaaggcatcttagagcttatctaattgaacattttatctgtgaagaaatttagtccccatgtggaagtgctataataatagtttaaggacacagaattagttaatatgatttcttgattttgtttcttcatacaattaagcagataggacttattttcacaaaaggagctgagaagagagtgtgggggaagaaaccatacctgatacattgctttacccaagagaaccctctgtcttagtccattttctgttgctataacaatacctgagactatgtaatgtacaaagaaaagggatttatttcttagggttctggaggctggaaagtccaagatcgagggaatgcatctgatgagggccttcttgctgatggggacactgcagagtctcaaggtggcccaacrcatcacatatggcgagggggctgggcatgctggctcaggtctcccttcctcctcttatgaagccatgaaggcctc

SEQ ID NO: 834781 - DNA, 492 bp, Homo sapiens
tcatccacatctttctgtctccttggccactgccctggcctggactctagtgccctgtcccgccctgtggggacagcccccccctctcgtctccttggctctgtcgtgccaccatccagtttgttctctgctggagagacagaggacactttttgaagcatgcatttgataaggccacttttgtctcttgtcctcagataagatcaaaactcttttgcgtggcttataaggtgcctgcctaccccctggcctgttgcagccctctctgccacactgactcactctgacctgagtctccacgtcagccacacctctggtccctcgggcaggcccatcttctcctgcccgggctcagcacaggcatcctcccacttgcacagcagcatcttcttgctagctctcctctctgtgcctggctgaccagagctcagcccagatgggacgctrcttcctccaggttgggcatctttcccgtatgctcccatgtgagct

SEQ ID NO: 834782 - DNA, 647 bp, Homo sapiens
tgatccaatttccccaaaaaaccctaaaacagtccatcctttccccctttgtgttcttttctttcacctcacactcattctaagttcatgtaattatactggcctatcrtctgttaataagtcagtagttgttttctgcagatttttactgatttctgttattgcaattgcttttgcttttaaggattttataaaatcttgtaaggtaagtcactatatttactctcattttcaaaattctcttagatattttgaaatttagttttcaaaatataatatctttttgttggatttcaattggagttatattgactatatagattgatttgaacaaagatattaggataatgctataaatggctatttttctgaactctgtttctaatggttggtcttttgatcatattaggttttctgtgtggatgatcattttgtgcactggtacagtttcctcctgctgcacctggcaaaactcacataccctatgcactagagtctactacttaggatgtgtcctaaggaaacttgcttatacccagaggaggcattcttgattatttgtgatagctgagcattagaagcaaactatccacatctaggaaaaatggaaaagtaaaatataagactttggaacattatgaagcagt

SEQ ID NO: 834783 - DNA, 578 bp, Homo sapiens
atatactataatcaattttaatagaaatttatataactaagccacttatatatttctgagtgatcattttcattatagttaaaagctacattcctgaaatattaaattattattttactaatatcctgamtatctgaatatctcatagagacttagacttcacagaaaaaaaaattgaagacaaaaactgtatttaaatttaaataaaataattggctgatatgactagtgctcttttttcattatgcaccctggatgttgcaatgtaacaattttgcaaatatttctttattgcttttactgagagaagtgatagcattctcatactttgagttcttagtgtattcatgtcaacatttctgcttcttagatctagtaattaaattctagtttgacatagtattttttcaaactgttcaaactggaattgaactttttgtatatttttacaaagactaatgagaaacccagagtgattaataaaaatttattatatcatataaatatgtttaatatactacattacattatgttgaattatattatctgaatctacagctgcaagaaccttaatctga

SEQ ID NO: 834784 - DNA, 490 bp, Homo sapiens
ttatcttcaaatattcttttttgtttctctaaatgtaggattgttcatcagtactttcaaataaccaattcactaaatttaccaaaaacgtagtttctttacagctattagtttggaatgttgtattaagaaggttcaacaatttctacaaaattttaattgtccagttttctttttttttccccataataacatcttggggtgtatttgatttatctctggactaagtcgctgctggaacaaagacaaagatgagacagtgctccccagaacctggactacaaatgggacaaagggggctcttggtaaaaagcctgggagaccagaaaaaggctgtgcaacacaacaaggaaactggagcctagaggaaaacgcaggaagactaaggagggaaaagaagagggcrgggcacaggggagagacagacagaagggagccagagagggcagaaagagaggcaggccgaaaccgtctgtataaatggataaat

SEQ ID NO: 834785 - DNA, 451 bp, Homo sapiens
acattgagttgaatggtgaaattgcaggagctaggagtcacaaaaaggggaagcttttagaactgtaaccctaaaattgaatgaatgaacaaggttgagtaaaatatatyttattagaaagtttaactcacacattaagtagctcgactgacaggattggtgaaaggtcctttgatcctagtagcatagtatagctatgattatgaatgtgcgaaagtaaagaaatctaggagtccctgttcccagatctcagactaagtcagaaatattttctgaaggagctagtcttccgtttgatatttccggcaaatctttctctgcaaaaaaaatttcttttacagaagaattaaatattaccccttctattccacaagtgcatgaatagaagactctccagatagctgaggatggagtagagaaagacaccagcaaaggcaaggacagcccccac

SEQ ID NO: 834786 - DNA, 516 bp, Homo sapiens
agaaaaagtaagttaacagcagattctttactttttcacagtgaaaactgtcttactaaaatagagccaacataaggcttgtgacttacataacaggttmtcaacccctttataagactgaaggaaactgaggttttgactttcaagtaacataacactagagtagaaagtctggtttttgctggttcttatttccactacagccctttccgcatatggaaagtgaaagggctacaatttgtattgtcttaaaaacaagaaatatgagaatgttcatgtcagtctggaataaaactattctatacaatggctattttaaaatattggaattagaaatatttagtggtctaatgttttcaagcataaagaaactgcattgcttacctttacatgtggaaacaagaaattttccattaaaaaggagagactaatgagataagcgtgtatcaaagagttgactgtttttaaaacttggatgtttccatacattgcaatcaaaacagtttcagtgttttt

SEQ ID NO: 834787 - DNA, 699 bp, Homo sapiens
ctcaccacaaggatccttcatattgctactkccttccccttcttaatccttgtgaaccattaaataatttgttctccatttaaataactttgtcatttcaagtatgttacataaaaatctttgcaaatcatatatttgatatgagactagtatccagaatatatgagaaacacctaactcaacaataaaaacaaaaataaccctatttttaaaagggaaaaggcaggtgtggtggctcacacctttaatcccagcactctgggaggctgaggagggcagattactggaggacaggagttcaagaccagtctggccaacatggcaaaaccctgcctctactaaaaattagccgggtgtggtggcacatgcctgtaatcccagctactcaggaagctgaggcatgaaaatcacttgaactcaggaggcagaggttgcagtgagccaagattgcaccattgcactctagcctgggcaatagagcaagactctgtctcaaaaaaagaaaaggattttgtattagtctgttcttacactgctaataaagacatacgagactgggtaatttaccaaggaaagagatttaactgactcacagttcagcatggctggggaagcctcaagaaacttaacaaccatggggaaaggggaagcaaacacatccttcttcacagggcagcaggaaggagaataagtgcccag

SEQ ID NO: 834788 - DNA, 646 bp, Homo sapiens
cctccagaggatgcagcaggaaggtgccatcttggaaacagagtagtcttcactagacaccaaatctgctgacaacttgatcttagatttcccagcctccagaactgtgagaaatraatttctgttctttataaattacccaatctcaggtattttgttatagcagcacagactaaaaagaaaacagcatgtgcacaaatcctaaagagagagcaagaactcagactgttcaaagctattaaggaggccagtgtgtcttgactacgagcagggtagaacaaacaacattgtgagagcacccaggggcaagctgtggaaggtccatgtctgtattcaattgtaatgagaagcttctgaagagccgtgagaaagcaacatgtccaacctactttaaaaatcttattctaggccaagcacaatggctcatgcctgtaaccccaggactctgggaggctgaagtgggagtatcacttaagcccaggagtttgagaccagcctgggcaacatagtgagaccccagctcaatttttaaaaaagaattaaaaaacaaaaacaaaaacaaaaatcttatgctagctacaatgtgaagaacagactggagaggagctacgatgaagcagggatcccagtaaagaccaggcaagag

SEQ ID NO: 834789 - DNA, 560 bp, Homo sapiens; identical to SEQ ID NO: 829686

SEQ ID NO: 834790 - DNA, 604 bp, Homo sapiens
taacatatatttttattcctactgtcttttttttcttttccacctcgtaaagcaccctgacatgcatgataaacatcaagaagctcaataaagaaaagttactcccaacaggaatcttagctggtactttttgtttgtttgttgtttgttgttgaattcttttctgtcatgtttgttattgaatttttttctgtcaatagcatttgagaaatttgcccttttcaaaactgacattttacccacaattctgcaaacaaaaagtttttgatgatatcttaaacccttgaagtactttatacaattcaaattttaaataagtttctatttttaaaaacatcagaaagtgactgctgtgtatttttgtatagagactattccccatctgtgcagtctgtgtcagagaataagatcttacaaggtgccaggggtcctcctcacacaagctttggctgccttttcagggttgctcttgagwtaggccttagacacaatatgactgatgtctctgccatgagggctactggagtttggatttatatgaccaacatctcctttattcctttacaatagaatgggtctcaataagcttttcctcaacaaatat

SEQ ID NO: 834791 - DNA, 612 bp, Homo sapiens
gaatctagaagaggaattaaatctggaagactctaagaagaatcaatctggaataaaaggtacaactttactcaaggattttatttttgaagcagcactaatgaaattcaagaaaaggcatcctgctccatatccttgcatccctaccctagcgaccaaaacaccagatggacaggctgaaggcagattagctggaattactgccaagtgcaagtaaccaggcatgtcggtggtactccagcgagcctaaataaatagaccaaaagaaccaaaagtacccagcaaagtagtggaaactcccacattttattcatgactcttatctgtaactctttctttgcttctcaaatggttaatggggtcacttatgaaaagtatggaaacctagtccattcaactcccatgccaaattcttcccatagactactccagtccattccatattctttgtcttagaaacagattggaaaagaataaggtatctgcggagacttccagtaaatgagatttttgcttattrtatcaatatgatagtctgaaaactgacaaacactgagagaagaattcttagttgtatgagttttttcccccgaaaaatcagtggatttctgc

SEQ ID NO: 834792 - DNA, 574 bp, Homo sapiens
cattatactagtgtaatgatcaaatctgggtaataccatatccatcactttaagcrtttattatttatttgtggtaacaacattcaaaatcttctagctatcttgaactatatactacattgttatttgctatagtctctctatttattaagtcctttatttatgtgttttgcacattttttctttcagtctgtggcttgcctttaaatgctcttaatgaaaattcttacatatgtattttggtccacatatgcctgcatttctctacgggtatacacctggaaatggaattgctggccatgatgtatgcctatcttcaactttactagatgaaattgctttataaattggttccaccaaaatacatctcttcagcatggatgagcgctctcaaagccccacatcctcattggtaaagttgagtttctgaatttttgcaaaattggcaggtggtaatcttgattatggattagcacatctaagagtgtttatttcactcttttacccatacctttataggtgtttttttgtttttccaatggatttgtaggaatgtatacattctggatactcc

SEQ ID NO: 834793 - DNA, 604 bp, Homo sapiens
taaccctcttggaatgtgactgtgaaacagaaaaatgggcaagttagtgacagatgaagcgacagggaaagcatctggggaytgaagcaagtatgtctatttagctgagaacatttaactgactgtctccaggctgcggtgtttaaactacaaaatgatcagttcagggatgtattgtccttgctaaaatgctggatataatgttgcatctattaagtattgaggagaaatgttcacttccttccctatttaaaattcaacaaatgctattgaatgatcaagtagttgcagttttctgattatattaaggtaatatttattaaaatgttttagtacattgagtgaatcatgaggctcagatgactatggcaacaacaacaacaaaaataactgctaacatggacgctgtgattaactctttggttctgtttgtaacaccatcatcatcatcccctcatcaacaacattattaagtagtataacttaaatgagattcttaaacagggctactctaaggaatacaagggaggaaaggagaaactgtaatatgttctaaagattttaagtccagatgttaagtgataaaaatgttatcagtaaccat

SEQ ID NO: 834794 - DNA, 632 bp, Homo sapiens
gggctggagtgcagtggtgtgatctcggctcactgcaacctctgcctcccaggttcaactgattcttgtgcctcagcctcccatgtagctgggattacaggcacatgccaccacacccggctactttttgtatttttagtagagatggggtttcaccatgttggccaggctggtctcaaactcctgacctcaagtgatccgcccacctcagcctcccaaagtgctgagattacaggcatgagccaccgcacctggctcaatattgttaacatatttattttttaaattcaggtataatcacacacagtgaaatgtactgaccttaagaatacagtacaatgagttttgacaaatgtgcacacctgtataacacaaacccttatcatgatagaacacattttcattatttcagaaggtttccttttaactcatcctactcaatccctgctttcccagaaacaattgttttgaattctttcaccatagattagttttgcctgttctagaatttcacacaaatgactaacatccaactttaaaccaaatttacaacaatratttataatttagacttcaccggtttattgctcattttcaatccttttatagtacctcaacttccccatttttga

SEQ ID NO: 834795 - DNA, 645 bp, Homo sapiens
tgcaatgaaaagcattgtaaatattcacccaggaaagagggtagagtctaaaattgtggttctgagtattttgttcaattttaactgtgcaaccattcttctagccttttagaaataaatgacactaaattggctatacaaaaaaagccatcagtgtagttggtagactgaggttggttctcaaattattcctaattagaacgaagataaacagatgtgcccacactttgtggcactgctctaggaaatggggaatttaacttttgtttaaatctaatgtactgtttccgcatataaatttcacaggtgtcctgaaatttagaatagcactcccctctctctccagttaaaaaatgtgatatatggtccagttaagaccaatctgttaagcctgggaaacatagtgcaccacatctctacaaaaccaaaaaattagccaggcttggtggcacatacctgtagatcaagctacttagagactgagctaggaggattgcttgagcccaggaggtcaaggctacagcgagcaagccttgatygcaccactgcactcaagcctgggcaacagagtgataacctgtctcaaaaacacaaaaacaaaaaccccaaaagaccaatgtgtctccgttttgagagatgtgggac

SEQ ID NO: 834796 - DNA, 622 bp, Homo sapiens
taacgaagtttaggtacaaactatcccaagtaccttgggaatttggaacaaaaaatgagaaagcaagtatcatcgaatgatttccaaatrtgagaaatatgaaggctctatccctggaagaatttaacatgcaacagtagtatctacctctcaggactattgggaagattagtgaaagctgctagcccagtgactaggatacgtgggaagcttcatagatgtttgattttttcttcttgtcttctggcattgtctttcttttcttttaccaaaccatctaaggaaataaatgggaaaagagcaggtgttatagcaacaataatcattgcaaattttctggggaaagtttggggcaactgtagaaggattcaggaacaggtggaatttgtctagtctttgaaggaacttagaatttaagttacagttgcgggaaactgggagagtattcttggcaagagggccctcaagaacagaggctcagcagcagagtttaacctagtgtttctggggaacagtgcaggaaacagctaaggttggaggctgattgtggagggcttcaacatgagagctcaggagcctgtggtcttcatcttctaagctttgggcgaagttgttgagtaat

SEQ ID NO: 834797 - DNA, 596 bp, Homo sapiens
tttaaaccactgaaaaggtattatcctgtcggctttggaattgtaaatttccaattctttagtgattaatatcaccataaataaacaaatcctttttgagaaaatgtctaaracacaagaaaacattgtacattttatttaactaggaacagtttgttgaacgtatttatcagctggggataggaaaagtaccctttatcgtcagcacatataatgtcacccgtgtctccaatgctttgcaggtgactgggagattaatcacacaatcttcaagctgtatttgtaacatgacatgtaagaattcattttccgcacagcaaccaggtatctttcaaaagcataaatcagagcatgccactcctctgtgtaaagctcttctccaacggtttcctcttgtacttagtcatattcaaaccccttaacctggcccacaaagatggacgtcacctggatcatggccactcctttgctaccatcatgcccacttgcttctttctcttactagaataacgccccgccacccaccttattcccaaggtctttggattaacctccatattgtccatggccagctacataagggaaggtgatgttta

SEQ ID NO: 834798 - DNA, 668 bp, Homo sapiens
cctcgcttccctccctgactttttaatactgtagtgccttaaggctcagtcctgtattttatccatctctacattcacagacctggtggtctcatccaatctcatggctctaaatgctatctgttactgataactcccaaattgacattgctagccaatctctctcatgaacgccagacatgcatatccaattgccttctcaacagctcaacttggatgacagacctctcacttagtatgtacaatttcaacccctatacctatagttacattccctcaattgacagtaactccatcctcccagttattaaggtcacaaatattgaaatcatccttgtctcactccttcacaccctatatccaatcagttattcaaagcgtatccagaatctaagtacttctcattatttccattgctgtaaccaggtccaagccacccatctccttctttaattagtgtaatagcctcctattacactggttttcctgtttctatgcttgctctctataggctactctgaacacagcagccagaatcattttttwaaaaacttaagttggatcatagcactcctatgttcaaaaatcccccaatggttccctatatcactcacaacaagagcctaagtccttaaagtgatccacaacttcttacgctactctcatcc

SEQ ID NO: 834799 - DNA, 609 bp, Homo sapiens
tctgctttccacttcaacatgcttagagagtagttttggcctcataatcacaacagggctgctctacctctggacatcacatacatatttcaaataggraaaaggcgaagaagagataggcagaggccagtccggtttgtgctcttcggaaaaaaaaaattagtaaaataatagttttcccagaatcctttcattcattttatttctaccagagctgctgccagcagtgacaggaagtctcgagagatacgtgtttttagctgtcccgagaaacatcaaagttctgtcagtacagtggaaggggagaatgaatggtgaggaagatgttacatttagcaatgttaaagccaatgaagtcactgaggggctgcttctcagatatgcaagtccagaaatgttaatagcttgactaacagagattcctctctagggagtggaccagggctgacagtcttaccagaaaaataattataaagtaacacatcaacgaagcattttaccagtgagaattgcaacagcccagtgactgggactcctttcctctactgctcaggacattgttcaccctgcagaaaatccatggtgcttagaagacagattcccagggaa

SEQ ID NO: 834800 - DNA, 609 bp, Homo sapiens
tctgctttccacttcaacatgcttagagagtagttttggcctcataatcacaacagggctgctctacctctggacatcacatacatatttcaaatagggaaaaggcgaagaagagataggcagaggccagtccggtttgtgctcttcggaaaaaaaaaattagtaaaataatagttttcccagaatcctttcattcattttatttctaccagagctgctgccagcagtgacaggaagtctcgagagatacgtgtttttagctgtcccgagaaacatcaaagttctgtcagtacagtggaaggggagaatgaatggtgaggaagatgttacatttagcaatgttaaagccaatgaagtcactgaggggctgcttctcagatatgcaagtccagaaatgttaatagcttgactaacagagattcctctctagggagtggaccagggctgacagtcttaccagaaaaataattataaagtaacacatcaacgaagcattttaccagtgagaattgcaacagcccagtgactgggactcctttcctctactgctcaggacattgttyaccctgcagaaaatccatggtgcttagaagacagattcccagggaa

SEQ ID NO: 834801 - DNA, 502 bp, Homo sapiens
aagacaaaatcctccaaccctttggttctaatcctccccttcttagtccattcagaaagcacagaaggtaatggcatctggccgatactcatgagggctgggttggtaaagtgaaaacctttctgtgctgtgacaaatttcactggctgtgctttaggtagtttgcaaagcacaaagttaagtttctggatgatatgttcatgattaacaaaccagattataatgccctttccagagtgaattctagttcttaggattactttgcagatttaaaaacaataaatatttattaaatatctgttatttaccaaggtcacacctctagggccttgtcccgtgtgttttctgaaccactggcgtggatgacttgatgagtcactcatgaatcagaaaattgcaaaatatcatcttcactgaattttatgtcagcacagactcagtcagagttgaatatggactccctggtttctgggaaggcaragatatttcaaaaacatttcca

SEQ ID NO: 834802 - DNA, 404 bp, Homo sapiens
attgagcctccctggtttttgttttttattttattttattttttgacaaagtttcactctttcacctaggccggagtgaagtggtgcgatcttggctcactgcagcctctgcctcccaggttcaagcaattctcctgcctcagcctcccaagtaactaggattacaggcgcctgccaccacacctagctaatttttgtatttttagtagagatggggtttcaccatgttggtctggctggttttgaactcctgacctctggtgatccacccgtcttggcctcccgaaatgctgggattacaggcgtgagcaaccgcgcttggcctagcctcccaggtcttaactcaatggtacctacatgaagcgacaaattctgaggctaaawctggattcaagaagaaaagt

SEQ ID NO: 834803 - DNA, 547 bp, Homo sapiens
attaaggtctagattttgctttaaaagtctcctgaaaaatcttctaatactagcttataagtgagtagctgcttcctactttaacatgggcaaaatctgtccagttctcatckaggtttgcaacccggcattgttctgtcccatctttgcttcaacaaaaatgtagctcatttactatttataataatcaggcagaaaaaatattgtgccttctgctttcaatactatctctgcaataaggagaaattaacatttatccttatcttacatatggaaaacttagtaattgtagagtttttttgtcagattcttctgggtattttctttcttataataaaaattagaagcactggtaaggaacaatcagaactgatattctttttctatctttgttaggagacttacatggccaattggatgacttaatatttatattttataaggtatgaatgttcaaattaagttgctttcttgctctgaggcttaatttagaagctcaaattcagtatcaattgaacaaatgcttaaatattacttgaatttttaa

SEQ ID NO: 834804 - DNA, 263 bp, Homo sapiens
tccaaaatgaaatggaaaatagaaatctattgttattggtaaatcatacattctgtctcatactcttccacctccaaccccaacacattctggttattttgtgttcctttagggcargcaccatctctgtttcatctttttatctctgtaacactttctttgcacatagtaagcactcaaagcacatttgttgagtttaactgaaattgatcttcatcttttttttctgccaactagcacgctctctggatgtagtagtaggc

SEQ ID NO: 834805 - DNA, 263 bp, Homo sapiens
tccaaaatgaaatggaaaatagaaatctattgttattggtaaatcatacattctgtctcatactcttccacctccaaccccaacacattctggttattttgtgttcctttagggcaggcaccatctctgtttcatctttttatctctgtaacactttctttgcacatagtaagcacycaaagcacatttgttgagtttaactgaaattgatcttcatcttttttttctgccaactagcacgctctctggatgtagtagtaggc

SEQ ID NO: 834806 - DNA, 614 bp, Homo sapiens
atgttaactcattttttaagagttggggttttgctctgtcacccaggctgatrtgcagttgcacagtcacagctcactgcagcctcaagctcccaggctcaagagatcctcccatctcagccactggagtagccaaaactgcagtcatgagccactgtgcctggcaactcatttaatccatccaacaaccttctgagactaagtgctattattacacccattttatacatgaggaaactgaagtctagtgagattcagtaactttcatggcaagtgagaacactagaattcaaacctgggcaatgtggttccacatttttaaccactgtgtttttaaattgtgtactcactgtgtgcaattctaaggctttgctagatgcttcaaatttattgtctcatttaattaccatagcactgtagatttccacaccccaatttacagatgaccaactacagatcaaagagaccaagtaactaaacaaggggcacacagtaggcaagtagcagaacaaagattggaacccaggcctaccaggtctcaaagtttatatgaagttacgtgtcaagtaccctgtgctaggagctaggaattcatagtaaacatgtgacatggt

SEQ ID NO: 834807 - DNA, 490 bp, Homo sapiens
gatactgaggctcacaatccagattttttaattacatacattagcaactaaaggacttttctgcttattatcatttgagttgcattaccatctcacacaataggattttttttttttttttgagactgagttttcactcttgttgcctaggctggagtgcagtgccacgatcctggctcacggcaacctccgcctcctgggttcaagcaattctcctgcctcagcctcctgagcagctgggattaaaggcacccgccaccataccaggataattttttgtatttttagtagagacagggtttcatcgtgttggccaggctggtctcgaactcctgacttcaggtgatccacgcacctaggcctcccaaagtgctgggattacaggcataagccactgtacccggcctgatttttttytaaaagttttattagaaaaaatgttcttttgacatagatttacactctacctggaattattttttatatggtg

SEQ ID NO: 834808 - DNA, 590 bp, Homo sapiens
agaacagagtggcagctagtatagtttggtgccactgctttgaggtgtgctaaaacacaagcagttgtaccaatcattgattttcatcatcagtgaaaacagactcagtgaaaaacacaaatattgtcttaaaataaaaagaaatcaaccattttcttaacatcaaagacccctcaaagggtctaatcaaaccccacagtctatagagcacacgttgaaaactattgttatagagaatatacttattttgacaatttaagtataggatttataatgtttacatcattcaggaatgaaagaaagatgtataggacttgtatgtttttctttgcgtggtttcaataaaatgtttcttgtatctaatatatcttatttagagatatatacacacacacacacacacacacacacagagagagagagaggtgagcatatgaatatttacatattgttaggcaggcagaaaaaatatgattaattttacctccaattgatcagctatttcttataaayttcttcaccctagatatcaggtaaatcctacatttttagtataattaaataaatataatctaatccaacaatttaaa

SEQ ID NO: 834809 - DNA, 541 bp, Homo sapiens
gcataaacaataatgacaatgcctcttgtgttgtacacgaaagaaagaaactaactctgctggggccaagacatgaggacgatggacaggaggaagtggcagactataaagcttcataaattgacgtagcattccagacttgtcttgaaggatgactaggctttatctggagaagaaattttttaaatgtatttcaggaaaagaatagcacatgcaaatacaaagagcatgatagatgagaaagggagctgcctgggagacaggggaaaggatttgctgagcagtactcaaggttcggctgaggctaaaaaccttatatgtgtaatagcactgatccacaagtctgtctgatttttcttcagctgtccttgacagtctggcaatggaagcagaagtaaagacagcaaaattgaatgtgcttcagagagaagakgacaagaaggaaacaagaatgcacaagatgctgtctcctcatttcctactgcccaacccactcaccagtttgcagccccgttcttcatgccagtatctacagatagag

SEQ ID NO: 834810 - DNA, 483 bp, Homo sapiens
tttgcctgaaaagagtcaatatctaattaccattcggggtgaggagagatgggcaactttgaattgtggcaatacatgggaaataagttgaaaaacaarccctttgaaatgtgtctaactaccatcacaaccaatgcagataatgattttatccaagatttacaatttgtgctgtcaaaaagtgaatgccccaagaactttcagaaaagagctaagtatgtttatagaatctacattacaagaattatcacatatatcttggtctgtctataggagaacatacacaggcagggtttctatttataaaaacactctctgaattgcaacagaatgcaatgaaggctctttatgtgttgtacccagcaccctatccccaggatgtagctcagtgtctgaaactttatgagaactcaataaatatatgataacttaatggttaaatgaatttagctaaaaaaaaagtgactgcttttcatcatggtt

SEQ ID NO: 834811 - DNA, 491 bp, Homo sapiens
agtttctacttctcagagattggctccaaatttcctatgcaagatggccttggaagaggcaaactggttggaagagggggtttgacattatcayggggctctctgcagaagatgagaaaatgtctacaatttatatcagagaaaaatagaaacaggtgaagactgctgtggctctctgagcctttcaagcaaggtgatgagcagctgacttcgtgtaggggtgaaggccaaagactgagctaaacaagtacatgcaaatgtgttatcaaaacagggtgcaggagagactctcttaagcagaggggcagaactgatagggtccgaaaatctcatcgcagggcaggaactgcagatcagaagagggacaggaatccgacggcagcattctgagctggtttcttacaggcttcttccatgtgtttttgtggacagcatatgcccttttaaagacactaagcaccaagaaagaagagccacaaatacccgacctg

SEQ ID NO: 834812 - DNA, 574 bp, Homo sapiens
tgccccatctctcttctgtgttatggcccctggccctgctcccctccacagcatgtctctcctctaggttggcaagctttatattaataacataaaacctttgtcacacatgagatggaatgcaaatcatcttacatatattatcacatttaattaacaacattatgaggtaggtactattattaccactgtctatctagacgggaaaattaggacttggggaagtcaagaaacttataaacaaacagcaggctggagtttgagccccagcaggctgactcagtacctgtgcacataaacaccagaccatcttgtcttgtctatatatggttagtacttcaccttatgcctttgtttcctctgtcctctgagtcagcctggcctccatgtttctgactctagactgatcacttaatatttggtttttaattattttctctgtcacagatgctataaagggaaggccaaatgccgcttgcctggcttctctcttctcctaagaaaagccagtcagggggccatctgcagggcaatcagtcctggtcrggaagaggaaagcgcccaggcctgtccc

SEQ ID NO: 834813 - DNA, 613 bp, Homo sapiens
ttctctcaatagaatatgtggttaaatgtatatgagtgcatgtttggggttgaatgggratggggcagaaaatgataaatatcaatttctaatatatccattaaagaaaatctaagatgaaaaattatctttcttcaaggtttcatattgtttgctcaaaccctaggtttctagggggcacttctagcatatgttattttaaagtttagtgaaagactgtgtgctaaaatgtctgttctctgccccacaaactgcttcaagacctagggcttaaggtagtgaaaaataatacataagagcagcatagaacttaacaataaattatgtcctaagagtttcttgatgtattagtttgctatggtatctctaacaaatgaatacaacaataaagaaatgtattttctcacaattctgggagccagaaatcaagatcaaggtgtgttgcagggtggcttcttgtgacctttctcccgacttgcagatggctgtgttctccccatatcttcatatggctttccgcgcacgcgcgcgcgtgtgtgtgtgtgtgtgtgtgtgtgtcctaatgtcctttccttataaggaaatcagtcatattgcattagggctaacccta

SEQ ID NO: 834814 - DNA, 606 bp, Homo sapiens; identical to SEQ ID NO: 829111

SEQ ID NO: 834815 - DNA, 588 bp, Homo sapiens
aaacaattgcagccagtgagacatcaggggataaatagagtatcctaaggagccctctgggaaacctttcttcagttttaaaatargacacaaggaagggacggtccctttttctgcatttggacattgtcatctgcacgtgatacctagaaatacatggccatattagactagctcccctcatggtcccaagaggataatcaacaggctgagttcagcagagtataaagatggaacaaatctagatccctgaagatataattgagctgtgaaattaaccagttttgaactgtactacttcaagacttctagtcatgcaagacaaattttcttattgttcaatctactgctagactggattctaattccaactagagctggatattctgttatcacaggcaaaggcatcctaactgacacacggtactggattagaaaattcataactcttacagatacaaaattttctgtagaattggattgctttgaaccatctaaaaggagcccaatttactcaggactggctattctgtaacatcagtaccacaggaaataaaatactaagaatgctcctaaaaactatacaaa

SEQ ID NO: 834816 - DNA, 553 bp, Homo sapiens
  misc_feature 396: n = A,T,C or G
aattgcaagagtaaattttactgtatgtaaatatcttaattttttaaaggaaaaaaaaagtccaaaataagtagctataattaccttttccttttagaaaaaggcattcatattttctgagcatgagagaactacaggctcattgtagacatttgggaaaatgtacaaaggatgtacattcatcacgtgcagaaaagtaatatttccttgctgtgagctttattggcacagaatacacacaaagctgggaccatgctatgcattttttaaatgaaattatacattttgctttctgaaatatattgtgcatatttttcatgtcattaattttcaaaatcatgattttatgaatcaataatattctatgtttacttaagagacagagtctccctttgngggcccaggctgagagtgcagtggcgcaaaggaatcattsctcactgcaacctcaaactcctgggctcaagcgatcctcagtggtgggatgagatctagacccctgatattcaatctcagaaagtgaataattccctgcctcagcctcctgagtagc

SEQ ID NO: 834817 - DNA, 530 bp, Homo sapiens
gagatattttgggaaatgggcagtaatgatcacgggaaatttgactttctgcaaaccaaaactgaaagagatctaaaagtcagaatgccactggtctctgatgtcgcaagatgctgctgaagaggcctaagagtgggaatgccaccagcctctctcctaagagttggaatgccaccagcctcactccacatgtgccactcttccctgactccaacctctgggattcctgttcttaaagtgctatgtttttgccaaatagtgtggtctcccttaacacataaaaccaggttccaagccacgacatgtgtttcacaatagtgaactacctagaaaggcagccaaagagaaaatgctgtgatactggcctcctgacctgagcgaacactggaaagataccaggygctgtactgacgcatcacgacgggaaggtctttgttaccaaaagcaattcaatgaccaaagttttgctgagactttctttacagtacgtcactgagtgaacatgactggctaagtggactacagtaaaa

SEQ ID NO: 834818 - DNA, 517 bp, Homo sapiens
  misc_feature 476, 507: n = A,T,C or G
ctctgggcagctactgagggtaatccctgaacactcaccagctgcctgttatgtgctgacagtcatctcattcatcctcgcagcaattccattctgcatcttttctgatcacctccgtgaccacacaggacaaccccatcagggccctgtcaccaggcccagtctagctccatgataaccaagacacaggtccagagacaatcgtcctacattgtgcctgcatctgaccccccttggtaggtagtgaccagcacaacatggaagaagccagggcagcatgcagccagctgctctgcagccccaaatggctcctgggccttgcaagtcattcataaagggaaagctggtcactttgaggtctctgaagggaagggtgaacgtgyatcccaacagccctggcagccagcagcatgccatatatcttctcacccaacctgtgtgacagaggtcccctcctggggcacaagtcccatacntaaagcatcctgtcccagtcggacctcatcntgagccctgg

SEQ ID NO: 834819 - DNA, 584 bp, Homo sapiens
gatattctcacaatttaaaatgaattttagactaataggcactagttttcatgtacgtcatgaccatgttttttttctactcttttttcattatccatcactacattattcagtttattctcttctttttttaaatgatttttatgggattgtttctataatcattttatgttgctcatgtttatatgtgataagttctaccaaaacttttaagacaaactttctgaatgatgaaagaaggtagtagattttctagtttcactgatcaagaactacatcttccgttattaatatgaagcatttttaaaacttctcacttgtagccacttttatacttctgagatctgattcttatggaatcttctatccaagcctcatgtctgaatcttttctcttatttacacccagtgttcccattgtgctttttttaattgcgaaagtttttcgtgcatagtcttagttctttgtccktttgaataaaagtttttggaatatttctaatgtccttaatgtagtgtaaccaactatcctggtttgtctgggactgttttagtactgaaaatcttgcattcaagcaaacccct

SEQ ID NO: 834820 - DNA, 547 bp, Homo sapiens
  misc_feature 1: n = A,T,C or G
nggacattataaatatggagatagtatgaattatgaattgttctttctccagcccacaaactgaagccccaaactatccctgttctctaatctattgtgcaactgagcagctatgtctaagtttactaaaagtaccattgctgggtaaagatatattctttatttgctgaaaatttggtaaatagcccgggctcaatggctcacgcctgtaatcccatcactttgggaggccgaggagggctgatcacctgaggtcaagttcgagtaccagcccggccaacgtgacgaaaccccatctctactaaaagtacaaaaataagctgcgcttggtggtgggcgcctgtaatcccagctactcaggagcctgaggcaggagaatcgcttgagcctgggaggccgaggttgcagtgagccgggatggagccactgcactccagcctgggcgacaagagccaagagctgactctgtctccgaaaaaaaaaaaaaaaaattggtaaataacttkagggtattctgcaaaaaggctataccagtttatactttcat

SEQ ID NO: 834821 - DNA, 654 bp, Homo sapiens
tgaatttggttggtgatatcctaaaaagtaacacctaaaataaaaagaagaaaaattttacaacaaaattgtartgcccaacttaaacactacgaagttcacaaaataccttttcttgacaaaaaaattaagaaaagtataaaatataatgcaactcccaggaaaattaaatctaatttaagaagcatttgtagaagtaaaatgaccagaaaaatagtaacgttttgctattttgttttgcccttttcatgttacacctatttttctctaagaagatcttcagtgtaatgtgaaaacacagaatatttaattttgctaaggagactgtaatccagcaaaattgtataagagagaaaccagtacattattctttatagacaactataccttgtatccaagccatccccaaatcctgagcattgcattttttcctctatcctatgcctcacattcttttctatctccacttagagcttcaacctctaatcctccatcatcttttgcctggattgagcaaaagcctctttcttatttgatttgtccgcattcaatcatccactccacttccaatccagtctccagagtgtaacctcaattaccttcaacatttcaagcacatggtatcccccagcccctcgacacaaatcactcagc

SEQ ID NO: 834822 - DNA, 544 bp, Homo sapiens
ccgtatcattgcacccctaggcccaccaaaatctcatgtcctcacattttaaaacacaatcataccttttcaacagtcctttaaagtctcaactcatttcagcattaactcaaaagtccaagtccaaggtcrgacaagccaagtcccttccgcctatgagcccacaaaatgaaaagcaagttagttacttcctagatacagtaggggaacaggcattgggcaaatacacccaatgggaaaaatttgccaaaacaagagactacaggccctattcaagtctaaaatccaaaaggaccgtttggaaccttaaagttccaaaatgatctcctttgactccatgtcacacatccaggtcacactgatgcaagaggtgggctcccatggccttgggcactgggaaattcataaacgaaagagatttaattgactaatagttcagcatccctggggaggcctcaggaaatttataatcatggtgaaagcagatgtgaacatgtccttcttcacatggcagcagtagagagaagaatgagaactgagaaaa

SEQ ID NO: 834823 - DNA, 609 bp, Homo sapiens
tattcctcaaacatacggtttcttatttcgatgaaaatatatacttacgttagtcacatgaaattcttacgatgatttttaattatctctttattttgacaggccagaataacaaattcagattgatttataccagtttattctacagaatcttatctctaagttaaccttctctacttcctaaattttaactgttcatttccttaatatttatataaagccatgcttccattttgctacattgtgtaaataaacataaaatattttttggtcaggcgtggtggctcacacctgtaatcccagcactttgggaggccgaggcgggcgaatcacaaggtcaggagttcgagaccagcctggccaacatgatgaaaccccgtctctactaaaagtacaaaaaattagctgggtgtggtggcgggtgcctgtaatgccagctactagggaagctgaggcaggagaatcgcttgaacctgggaggctgaggttgcagtgagctgagattgtgccactgcactctagcccagccaacagtgygagactccatctcaaaaaaaaaaattcatatattccaataaaatgtcttacatagtcaataaatatgtgtat

SEQ ID NO: 834824 - DNA, 633 bp, Homo sapiens
gaaacgatgtttgcttcatttattccactcacttaaaccgtatttgttgtctactttgtataagacaatgttctaggtgctcgaaacacaatgataataattccgtaaggatctctccccttgaggaactcatattccagtgggagtagacaattcccaataatacctagctttcgatctaaatgcagctataaatgatagagtgacaaaaatagctttattgctaatgcactttgttcttccatctattattcatcagcaaacaatagttggacacctatttgaaaaggtctcctgccaaatgctaaaaagatacaatgagacatggtttgtctacaaactgctgaatatcctggaggtcagagatagctacatgttcaaagtattaggcttctctagaactgctaccctcttggacagctggtttttgaggacatgctcttcatagtgaaataaagccaaagttttttcttttctattgattagaaaacatgaatgtgtaatacaactcttccattattgggcaggtttaattatatamtgtcatatatatgaaaatatttgtatagagccaaatacaggaattagaattactgggttaaaaggcactttgaatttgcacatctaagagag

SEQ ID NO: 834825 - DNA, 541 bp, Homo sapiens
tcaagcacttgcttcaggcctcctccatagctctttcacaagcagaccctgcctacccaccagagtgcttttgcagaaagacccctgccagtgcacacctgcctgcagatttttcccaccagtgaacactcacctagagcctcacccctgtcaccctgccaccatgcacatgcatggggacccctgccatcccactggagcacttctgccagcagccaccagccaaattgttgttgccagtggattgtgaacacctagtcccctccagtgcagcaaatgcttaaccttgagaagccagaaaacaaagccggtgacctagtcccagccccctagggtaagagcacacatcctaggcatgctgagctgcgctttggccccctgaaaacattcagaaataaagccaatataccaaatccaacttataccacagtcaaaccckcaagggcatcaaagaatataaaggcaaaaagccttatccaaggcagcagcttcaaagattaaagaacatcacacagatgagaaaaaaatcagcacaagaact

SEQ ID NO: 834826 - DNA, 658 bp, Homo sapiens
tgctttgaacatcaagcagcatccagttgtaattccgtaagaccagggaaaatcctgaagtaagttttctgcctgaggacactttctaattcccagcacatggaygtgaagcccaaagagaaagcagaattattctggccagaggactcaaggcctgaaacaaaagttctactgggtaaagcttatctaattaaattgatttcatgccagaacagaactcaataatctttttaaaaatataataataatgagaattgtaacattgtacccaaatacatgatataaacagaaaaatcactacagatgtgaagaagctggaaaaatgtttctcataatcaaaaatgaaaacatacatccacaaaaagatttttataagaatgttcattgcagctttattcatagaagtccaaagtggaaacatctccagtgcctcccaaaagatggtagataaatttgcatattaatacagtgaaactctcctaaaaatgaatgaataactaatacacaaaatacaaaaactctcagaggcatcatactaaatgtaagaaacaaaatgcaaagggcacatatacataattctgttagagtaggtagttaggcatacatgagcagggcaggagaatccccctctgtcctccaggaatgtcaggcaaccatc

SEQ ID NO: 834827 - DNA, 497 bp, Homo sapiens
ctgtcagcaaagagtgcaaggtagattaatgcaaacaaaatggcagttaacatcccatagtgccaaatccacccttagacaagacagactttactgagagggwcctctaacccactaaatcttaggaagattctaacctttgtaagttgggcctcgaaaccatatttggtcaagcatccttgtcttttattaagagggacttttaacccactctgtcttaggagagactctaactcccctaagttgggcctctaactcaatcccatcctttacctgggtatcctaccacttacccaaagttggccaattggtgctgcagtctatttcctttgggtcagggtctcttcagtatcacccctttgtggttccccaggatggtgttaccagaaaggggtcctgattcagacctcaagagagggttcttgaatctcacacaagaaagaattcagggcaagtccatatagtaaagtgaaagcaagtttattaggaaagtaaag

SEQ ID NO: 834828 - DNA, 578 bp, Homo sapiens
ttaatactatcaccttgggggttaggggtttcaacatatgaattttgggagaacatcaggagagatcagataaacataataaaaatagttttttctaggtatctgtatacactctgttgactcaatcatgttttaataatgaaaaagtaacatctctattgtatatttatttctttctaaaatcatcttgaatttatgtaatctcatagaaattgtggctatttcaaaataatcagtagataaaatttattttggatgtttcaccaacagatattctgattattaatttatgaccatatattgagttatttttcttttagaagttataaagaaatattaattgtgcctaagtcatctaaagatgctctagctatcaaaatagagcattacatagacacacattttcatgctaaattaagattaattgtaataatgacctaactcttgacctttattttaagaattataaattgcatggggcatattttagttgttcagttaactctttagaaaataatrcatgaaccaactaatgagtattattagacaattattttttcacaaataagttgtatact

SEQ ID NO: 834829 - DNA, 454 bp, Homo sapiens
tttcatataatcttaatattcttgactatatattttaaaaattctgtatgtgaaaaaatgattggctaaattatagatataaatgttttattttactttgaatattttgatggaataaagtttttcaaatttatgacagagaattttgagtgcaaaatgtatgcattcaggattttcctgaatactttgctaaaatgatatagtgagatttgaagatgtattttccctacataactgctagctaaaatattattgtattgagagatacatacattgtatgcgttttgagaattaaaaacaaagaggtggtctgctctgaagatattatcacagttttctgcaagacatgcctctataaatgcttttattacttcttacttgaagtcccyagagattttaatataggtttacattttgcatgtgtgtatgatctttacatattagagaagtaatg

SEQ ID NO: 834830 - DNA, 454 bp, Homo sapiens
tttcatataatcttaatattcttgactatatattttaaaaattctgtatgtgaaaaaatgattggctaaattatagatataaatgttttattttactttgaatattttgatggaataaagtttttcaaatttatgacagagaattttgagtgcaaaatgtatgcattcaggattttcctgaatactttgctaaaatgatatagtgagatttgaagatgtattttccctacataactgctagctaaaatattattgtattgagagatacatacattgtatgcgttttgagaattaaaaacaaagaggtggtctgctctgaagatattatcacagttttctgcaagacatgcctctataaatgcttttattacttcttacttgaagtccctagagattttaatataggtttacattttgcatgtgtgtrtgatctttacatattagagaagtaatg

SEQ ID NO: 834831 - DNA, 588 bp, Homo sapiens
tatttggggcagctggagaagagtctcagaagtacaaatggggacaatgttgctacctaggacactgtggcaattgcctcaagctttaaataaacttcgaggcacatgaattaatggtcactgaagaatgagtttctcatgaacatatattctgtggtacggataaaatattttccctagtttttgtatagaaagggctttttcgaactgggtatttattgctcccttaccccactaaaaacaccttctatatttctatttatttattcaatattctatgttctatgtatttattcaataaataaatgttgaatgaagcattcatttaagaatgggacaaggacaaattcgactttgcatctgaagaattacctattcagagagatacccaaacatcaaaaccaagagttcattttgtgagttaaaaatgtgcattccggaacagtataactaagtcaaagcagacagataaagaacatagtctgataataatgttgataaaggtgcttcctggttctattttatggtcagtgtcattacatatctataaygcaatcatgatggatccaaaaatgttaaaacaataat

SEQ ID NO: 834832 - DNA, 623 bp, Homo sapiens
gtaaccatactaagaatgtacccaccaggaagaaatatttatctgcctaaacattaaaaggggagcagatgattcaatctgacacctggaaatgaatttaaaacaactataaattagaattgataggaaagcgtaccacataattaaagcttcatcactgtaagataaaaaaataaggagcatgcaaataggtgtctttaaggagaaatgaaacttaagcactcatttgcctttgtcagtgtacgcataaacaatctatgcctgctttctagttccctgcctactgcttgcccgaaatgtcaaacacccttggaggaagagcatgctggttctcaattagtaatttcagtttgcttgacaaagtaggatacttctattcaacagactcatcttagaaataaattagaaagtgtgaatgaatcactgtttcatacatttaaaatatagaaattcacttttcaattttgaaatagacccaataaatcttgtcctaaaaatgatttctgagcataaacataattccagagaaagcacgattaacttctgtatgtagggaactgaatataaatttgttgaatgaattaattactkatgttgccatataatcaatttttgttttaggg

SEQ ID NO: 834833 - DNA, 618 bp, Homo sapiens
tattgtactatacattcggagttggaggtagatttaatttacttattraatgtgtcatttgtaaatggactgtattttagacacatgtgtatatatattcctgaaaatgtaaaatataatactactcccaaaggaaatttattactgataaaatactttttttctccagtaatagttttgctcattgtggattatgcaattaattagttatggtttattgtgctgaatttgcatgttcattctcctggtaaaaggctcgagctaagaggtggtcaaaaatacttgtaaaatgtgaaatttaaattttaaacagcacacacctttaaacttgttctaagaaatatgcaggattattattggttttatttttcttaccaatattaaaggtaacctggagctgaaacctaattaattgaaaaaagcataagcacatgccttgccctatgagttctggagcccagcaccacagcagcagacctgatgggcatacgttaaatatctaatcaaaaactgtcacaaatatataggtacgtgattagtgtgctcaagaaaattctatatgaattttgaaatctttccaaatacatgcttttaaacaatttaatttgaatcatgcac

SEQ ID NO: 834834 - DNA, 595 bp, Homo sapiens
agaaggtagctgtaattctaatcttgttctgctataggtattttttcctctagcttatttcaagatttttctttgtctttgctcttctgcagtctgacaatgatatgcataagtgtagtttttttttttttttggtatttatcctgcatggtgtggtctgagcaacccgaacctgtggtttggtgtgtcattacttttagaagattcttggctattaattacttcacctatttcttttgctctgttctctcttctccttctgatactctaattttccttatcgtctgctcttgcagtttgtttgcttacaatgctccactattatattgagccctggggtgtggtggtaaagtgctgaggtggggggaagcattctaaaattttatgattttagaataatcagtcttgaaaaccaaaaataaaatcccaagccccgcaaccaactgaactgagccctcctgggccacaggaaacctgaaaacygaattcccattcaagattggaaggggaggttgcccacgctttgctgtactccctcccttttggagtttaggcacaactgatcagcattaacattaaaatagggatcctggcc

SEQ ID NO: 834835 - DNA, 317 bp, Homo sapiens
ggcgcgggacgtcccggaattgcaggcgcgcattccttcccgcctgagggcccgcctggccgtgactcctgcccctctcctcctcagaagagagatckgggccgccccaggggccgtctgcagccaccggggatggggctgagggtcggttcctgccccggtgcagccgcccctgggcagaccgcctggcttggtcacagccacggcgacatctagcctcagttctgcgaggctgggcgcgccagccagcttgggagtcgcccggcgcctgtagctgggtgcccaggtggtggagcatgccctgggccgcctctgga

SEQ ID NO: 834836 - DNA, 562 bp, Homo sapiens
gaagtagctgcaatgctaaccacaaagagaaaatctatccgacacacacaagagatgggattcaagtatgttactatgatgaaacaagcaaaatactacaaaaggcagtaagaaagacatgtaggggaaaaaaaatctacaagatttaaaaaatctacagataataatctaatatgtattcttttgtttttaatagttactatgtttgatattctccttttcatgtaatgttggcctgatttaactttgcaatcagaagaaaacaagatttactaaatcccatctgcaagaaactccctttaattctaaggacacacacaggctgaaatggaaaggatggaaaaatattttccatgcaaacaggaaccagcagaaagtacaggtagcagtgttaatatgagagaatagacttttattcaaaaaccataagagacaaagattattataaaatgatgaaagactcaattcaccaagaagatacaacaattataaatatataaacaccaagtgtcagagctcctaagtacagaatgaggytggatgcagtggctcatgcctgtaa

SEQ ID NO: 834837 - DNA, 520 bp, Homo sapiens
ttgctgcacctatcaatctgtcatctaggttttaagcccacatgtattaggtatttgtcctaatgctctccctccctttgccccccactccccgacaggccccggtatgtgtagaaaacaaaacaccacattttctcactcataagtgggagatgaacaataagaacacattttcttcttacaaacacactaccaatttgccaggtcatattcccaagaggctaagatgccttttttttttttttccttatttattctcctatgcccaggcttgttatgtgcaagcttcaggcccttatttttctgggtttgagtcaaatctttatttcatggcccaatatggaaacttctttatactctgggtcagagtaattgcctttagttgaatatttgtcagctttctttttcctgatttgaatttaccagaattccaygcagtattctaggcataatgtacccattgtgattataattttctaatgattttcaggatttctatttcttttaggttatgccagcc

SEQ ID NO: 834838 - DNA, 647 bp, Homo sapiens
cacatattatgtaggtaatgcttttgtaacagatacagaggggcataattaaaagtggcccagtcttctcaggagggtcargtttatgctcctagaactcttattgaaggagaatagttcacctgttttaaaataaacaaacatgcaaaggctttcaaagaaaagaaaaatcaagtgtggaaacatagaaacgtgagacaatcagaagtcttttaagtcactgtggtggctgaagcataggttgagaggaagagaggagcaggagacaggtctataaaagaaggctaggaccttctaggtttctaacagccttgtaggcctgacaaggagtatgacttcatccaagaggcagtgagaattactgaaagactaagcaggatacagacacatgccgggtgttaggaagatcattctggcagcagtgtggagaacgaagtgaagaagagcaggactacagacagagagatgagtagaatatttttgtctcttgagggtttgagctaaacagtacagcttggaataataagattgataacacatactgagaagttactaaagccagtcatcattctaagtctgtttattatttaccttaattataagaataactcactgaagcaggtgatattattgttttcattttaaac

SEQ ID NO: 834839 - DNA, 596 bp, Homo sapiens
tccccacaatatagagttaacattcttcattaaaattataaatagaggaaacattcactaagatagaccacattctgggccacaccttaacaaatttataggaatagaaatcataaaatgtctgctttcagaccrcagtggaatttaaccagaaataagtaacagaaagataacttgaaaatatcaaaatgtgtggcagctacacaacacacttctaaataacatataagtcaaagaagaaatctcaagagacacgtaaacatattttgaactaaattaaaatgaaaatacaactcatcaaaatttgtgggatgcagtaaaagcagtaattataaaaaaatttaagtcatcgaatgcacatattaaaaaagaagaaagacctaaaatcaacaatctaattttccagtttaagaaactagaaaaagatcaaattaaatccaaagtaatcaaaagaaaagaaaaaaataagaattagagcagaaatcaatgaaagtgcaaacaaaatcaatagagaaaatcaacgaaaccaaacggtggttctttgaaaagatcaataaaatcaacaagattcgagccaggtaaatatgaaaaagaga

SEQ ID NO: 834840 - DNA, 524 bp, Homo sapiens
acagtgctatggtttggattggtttatttgtccctaccaaatctcacattgaaatctgatacctgacatcaccctaagggtatgaaaaaaaaaaagaagaaacttgatccccagtgtggtggtgttgggaggcagggcctagtaggagctgtgtgggtcataggagcaaatgtctcatcaacggctttgtgccattctcatggtagtgagctcttgcaagattggattggttcttggggagaacggatcagttctcattagaatgggttgttataaagccaggacccctactcactaccccggggatcagtctctcttcacatgagcccacttgccctttgatcttctccttcatattttgatgcagcacaaaagccctcaccagaagctgagcagatgctggtgccttgcttcttgcacagcctgcagagctgtgagctaataaattaccccrcttcaagtatccctttatagccacgtaaaatgggctgagacagacagtctcttcaataaatggtgttgag

SEQ ID NO: 834841 - DNA, 550 bp, Homo sapiens
cagggatttgtttcttcaggaaattcatcctggatcggaattcctgtcgaactaagtatccacggcagcgagcctgcagcctggtgatcaggccttcattggccagccacagctgttctcggttatatgcggcagtcaccccagagatagaactctgaaaaagcagtggtcacattcaaagacattcacaggcaagaatggatgcaggttttcacgaagtatcatccacagcacacaagctaacacctcctgcttcctaagtctatactagatcattagctacataacaggaataaagccctcaggtctgttttttaggactaggttgttctcacacacgtcctcccacctagaaaacacttcataaacaaaaacttgatcttcttttacttcatatgtcatctcacttatctacctayccaacactgactaggctgggcactgtgctggctgatctggggtcactgtagacaagaacagagtgacaggtacccaacagggctgtgtgccacgtaccgagggacccctagaatgtcacaatgcaggacat

SEQ ID NO: 834842 - DNA, 610 bp, Homo sapiens
tttcccctggaccctgcaactaaggaagtgactgtgtgtgtattgagggttggcatggctcctagtcctagtctcagcctccagggatctgtgccaggcctgcccatgtctgcagcaytcttagaggtacaaagatgagcaagcccagttcttagacttaaagatcatataagatagtaggcaatatgaaatgagtgcaagactaaggatcgtacaaggcagaatatggtaagtgtgttagggaagtacaaagcaccctgtgaattcacagaagcaagatttcaatcacattgttgaactgccatggtgaaagcaacatttgagctaggctttcagtgatagatatcaacagacagataaatgaaaagacatggctaggacagggaagcaacgtgaacaaagacacagaggtaggtaaatgataacaagggaagaatatgtagtaggtgggcgagctggagagaatctggtctgcatccagattgtgaaaaacgttaaacgcttggctaggagaaaagcacttactttgatgactatttgagaccagggctatagtatacagccacacaggttatgcacagccaactccaggggtcccattcatatgcat

SEQ ID NO: 834843 - DNA, 496 bp, Homo sapiens
attaggctatgtcttgccgcaaggttttgcaagttatatttttgttgatcagataaaatagagacgtttcttgcgtttgccrccggcccccctcctcactctggtaacgatactctcaagttctaaatcattggttctcaaccaggggcactttctccccaggacacgtttgactatgtctggggatgttttggttattacaacttgggcagggaagaggagatagggaccaaggatgctgctgagtattctacaatgcacagcaaagctccccacaataaagagttttgcagtcccaaacatcaatagcgctgaggttgagaaaccctgttttaaagtgtcatgctgtctaaactgactaaactatcattgctcttaagcagatgatatagtatcagatataggatttcatataggatttgccctcaagtcccagggttttctgtaacttataatagaagagttgggagaaatcaagttaatcctagggatgtgc

SEQ ID NO: 834844 - DNA, 527 bp, Homo sapiens
gctctagaatatggcattccagaagtgggatgctacaaatagtctcattgagagtcaacttgcacaatgtatcgtcctacccttacatcaatttctgaaacaacttctctttgcacttcccctatagttacatgcataataaattctgacaactcttatgaagtcatggaataactttcttcttatgtttcctatcaatgtcattagccctttatcttgtttgagtttccatcagcaatgttttcaagtcccaagatcattcatgtatccacaagcaatgatacgccagatttggacaaataatactgaatactatcttattttcactgccatgatcaaggcagtgtggattgctgccaagtccaagagaagtgaggtcagcagctgcaagccacctccgtcatttagaaaagcttcatgatgtagtgtgtcgtttcgatgtgacactgtctyacagagttaaaatgatgtgcaaggaactgttcaatggaaatttagaaatttctctttttctcaattttagtgta

SEQ ID NO: 834845 - DNA, 527 bp, Homo sapiens
gctctagaatatggcattccagaagtgggatgctacaaatagtctcattgagagtcaacttgcacaatgtatcgtcctacccttacatcaatttctgaaacaacttctctttgcacttcccctatagttacatgcataataaattctgacaactcttatgaagtcatggaataactttcttcttatgtttcctatcaatgtcattagccctttatcttgtttgagtttccatcagcaatgttttcaagtcccaagatcattcatgtatccacaagcaatgatacgccagatttggacaaataatactgaatactatcttattttcactgccatgatcaaggcagtgtggattgctgccaagtccaagagaagtgaggtcagcagctgcaagccacctccgtcatttagaaaagcttcatgatgtagtgtgtcgtttcgatgtgacactgtctcacagagttaaaatgatgtgmaaggaactgttcaatggaaatttagaaatttctctttttctcaattttagtgta

SEQ ID NO: 834846 - DNA, 622 bp, Homo sapiens
  misc_feature 61: n = A,T,C or G
actaatgaaagttttgcaattgtgcatattgactaccaaacagacttaaaatgtcaacttnttatttatgttctatcaaagcaattctatagcatgcttttttgcctccatcaggattatcataaattaaaccagtatgaatgatgaaaaataaattttaaaaaagaaaactgatatgaataagcttaaacaaaagtgccaataacaaaacaacgaaaaatgtaaatgccacttgattcgcctttccttcgtgtccctgccctctccttttcttttccccaaagggttctataaactatactgaacagactaatgctctaaggccctgactcctgctcctcgggagcttgatcataaattacggttgtacaaatttgtaaaaggcttcatctgtaagcttagctaaagcacacatgtaaaaaaatttttaaataacaataattttttagaaggagatataaacaaatgaagaacttaaccatctaaggaaatcacaaaatgaatagattgttcaatattttccttcacattccttaacaacattacagttgaccagaaacaygtatgctatcattcaccaaaatgcagaacggaaatctagtttaatttgaagcagacaggt

SEQ ID NO: 834847 - DNA, 729 bp, Homo sapiens
ctggatcctctgactcagtctgtaacaagactgcartgaagttgtcaggcaggctgcagctctctgcaggctcaactgaaagaggatctgcttataagctcactcccggctgtggacaatatttgcttcctcatggctgttggactgaaaatttaagttactaatcagctattgatcaaaggcctcttttatcttccagccacatggacttcctcatagggaagcttacaatatggcacctcactttcattatggagagcaagcaagagagtaagagaaggtaagcaagacagaagccacaggctttttatgacctaacatcagacattacatactattcacttttgccctgtcttcttttggtagaagtgaatcactaggtccagcccaccctcaaggagaggaattatgtaaggtcatgaataccaagaagcagggattatccaaaaccattctagaggctgcctatcacatggatcatgtcaaagatcaaaggaacagcttgaatgggctccaattgagttgaccatttagggaaatttgaccatctataagaataaatataataatttattatgatataatagattttaaaaatccatgagtccatactgatttttaaaaagtgggaagcagagaattacattcttatttataaaagaattccagctaataaatgtagaagaaatgatagaattagagaatcatcattttataacccccaaatgt

SEQ ID NO: 834848 - DNA, 599 bp, Homo sapiens
acgtgcaggtttgttacatatgtatacatgtgccatgttggtgatgacctctgttttgtgttgtcttcttgtctcatcctgtgacttcaaatgccttaaccatctgggaatgcagcccagtaggtttcagcctcattttacccagctcctatttaaaatggagttgctctgagtcacatggctctgacaagaagagccctggatttcacttcttgccatgccattttccagctgcataactttggacaagttgcttaatcatttagaggctttctcaaaaatgagaatattttgattttgctgggattaaaaatgataaacaaaaaatggaatgcaaagtgtttggtgtaatccctatctagtttcatgacctgttattaagtcttacaagtgttttgtgagttgtcttttttaagccaatattttacttttcttttgtgttggtagatgtttaaatagatttgggaaaattatccacacagctgacgctcctccatttcctcactataaaatctttctataccatatacttaaagtattgcrcctgctctccttctctatagttggtctcccttttaatccatttctcacacttatga

SEQ ID NO: 834849 - DNA, 598 bp, Homo sapiens
ggaatttcgatcaggattagaataaatgtgtagatcaatttgggacatcatttgaacaatattaaggtttccaattcagaacatcgtatggctttccatttatttagatagtctttaattttttcaataatgttttatagttttcagtgtaccatatccttgattaaatttattcctaggttttttattgttttgtttgccatggtaaatgtaaatttcccccttattttgtttggatttgcttttcaaattgtgcgttgctggtgtataagatacaactgatttttgcatgttgatcttgtaccctgcaactttgctaaattgattaactgtagtggcttttttggggggagggggatttttggaccatctgcaaatacagatagttttacatctttcttttcagtttgtattttttaatttatttttcttgcctcatttttctggctggaacttctagtacagtgttgagtagaagtggtgaaagcagcatctttatcttgttcttgatacttgcrtggaaactttagttgttcaccaccaaatatgatgatagctatggattttttcatatatgccttttatcagcttgaggaag

SEQ ID NO: 834850 - DNA, 591 bp, Homo sapiens
tgctataagtctgctccgattttatattccttctggagtcagttttgataatttgtatgtttctaggaatttattcatttcatccaggttatctaatttgttgatgtataattattcataatattcttttctaatcatttttatttttgtaaggttggtagtaatgtctccattttcatttctgactttagttatttgcatcttcttcttgatttctttctcagtgtagctaatgtttgtcaatcttgttgatttttttctgggaaaaaacatttggtttcatttattctctgttgtttttatattatctctttaatttatctctgctgtaatctttatatttctctctgctatttttggttttaatttggtctccttataaaaaatgtttgagtatgtattctgaactaaattatgctcccccattcatatgttgaagtgctaatccccagtgtgactgtatttgaggataaattcattagagagacagtcaaggttaaatgaagtaataagsgtggggccctcgtatgataggattggtgtccttataagaaggagagacatcagagcactctcttgctctctgtgcat

SEQ ID NO: 834851 - DNA, 410 bp, Homo sapiens
ttccacctagatttcaaagaaagtcataattgtaaggtcagctgagagagaatggacaaaagagagaggagacccaagttcaggcaagcctttattaacctgctggctgccctcttaacagtcagaggagcagctctgagcttacaaaatgaggggtttatattgggtaggggagtttgggggagttctttggtatggccacatcccggggttgtttgctggttaattttgccacatatcactttgtgacatttatggtagaatttacaggagggtgtaggtaaaatttgtttatgcttcccatgacatccccctgtgcagtctggatggcttgtaattagggttacaagcaagggtttgcagcaaggcctgataggtaaagtstgctggcttcactgtggcacctacat

SEQ ID NO: 834852 - DNA, 608 bp, Homo sapiens
gctgctacagccaaaactgattctaattgataccagaaagaaatttgaaaaatctgttaaataaagttagtatgtgcatacgtttggagaygagggaaggcaggagatttggaattggcaagaaggttgaattggggaagagaggccagaattcaaaaagagaagagacatggtggagattttaactctcctctcttcaaaagatggagtctaattcccctcaccttatgtaggggccagactgagtaatttactattaataaatagattgagtgatggcatgtgggttataagattaggttataaaagacactgtggctttcactttgatctcccttgaattattagcttcaagcaaagtcaggtgctatgtagagtggacactcaaatatccctaggaagaagtctatgtggtgagaaactgagaccttcaacaggctgcatatacttgccacgtgaggacatcattttggaagaagatcctcaagccccagtcaagccttcagatgatagtggtcccaggccaacatcctgaccaaaaccttatgaaagacccttacgccagacgcagctagctaagctgttcctgaattactgatataaaaact

SEQ ID NO: 834853 - DNA, 639 bp, Homo sapiens
ttctaaatataaattactgtcttagcttgggatgctataacgaaatactatakactgtgtggcttaaacaacacaaatttatttctcagttctggaagccaggaagttcaagatcaagatgccaaaacgtttgatttctggtgaaggctcacttcctgatttgtagacaactgtcttctcactgtattctcacatggcatagaaagctgagagctctggtctcttcctcttttcagaaggactctaatttcatcacagcagctttatcctcatggctttatctatgcctaataacctccaaaaacccctcctgcaaataccaacacatcaagggttaggacttcaacatacacatgttgaccagagaaacaaacatttagcctataacaatgatttggatttatttatggagaaggaagctatagaagaataactaaaatgcataaaggcaaattgaatgttcaaagggtaagcatgggtctgattgttaatatcactattagctcagctacaaatgagcatctggagcaatagcatctctctaggtttgaagaggtgagcggcggtgcctcagcgatctcctctgcagcataggaaatgatggctgtttctttccgctggaagcatggccacgaaagc

SEQ ID NO: 834854 - DNA, 547 bp, Homo sapiens
tcataggtttctaggtgtttggtatttttattactctatttctacagggtttgtttgttttgatagytgtcattttaattgtttggctttatcatacattatctccactcccctttagaattgtgccagactagaggaaatgaggataaatctggaagagagagaagaagagagaggtagaggaaataaaattattgactttggatcatttttgatacaaatagtaacagaaagatatttttattaaacattcctggtacacgtgaacttaaaatgtggcatatatatatgctgacatcctattaggtatttttcatatcattcatgtgctagatgaaatagaatgagaattagaatgaagcaaaacataccagattatgtaaataacagtgagaaagattgtggagtgagtgagttaataaaaaatccctgagcaccaaatctgcttctgagccttaggttaagcattggaatgatttcatccagagttaaaaatttatctttgaattaaatatctaaagggatacctcagaagactaaaattaga

SEQ ID NO: 834855 - DNA, 600 bp, Homo sapiens
atatatatataatttatacatttttctatgtataaatatgtataaaatttataaatgtattttaatattaagctcaaaaatggaaacctgtgttattgctcctaatcatgattccccytttccagtagaaggttttatatttatcattgtcctttgtcatgtgacttgcactaccgtaatatagggaggatgttattctccacctccttgtcaggttgatcatgtgatttgctttgtcaacagaatgtgtgtgaaagtgatgtacacgaggctgggcgcagtggttcacgcctgtaatcccagtactttgggaggccgaggcgggtggatcacgaggtcaggagatcgagaccatcctggctaacacggtgaaaccccgtctctactaaaaatacaaaaaaatagccaggcatggtggcgggcgcctgtagtgccaaatactctggaggctgaggcaggagaatggcgtgaacccgggaggcggaggttgcagtgagccgagagatcgcgccactgcactccagcctgggcaacacagtgagactctgcctcaaaaaaaaaaaaaaaaagtggtaagaaagtgatgtacacgagttgtca

SEQ ID NO: 834856 - DNA, 615 bp, Homo sapiens
aacaaacctttgccattacgtactctgtggaaggcactgtgtgagatacttaatatattagtgtcctagggctrctgtgacaaaggaccacaaactgggtggcttagaacaacagacatttattctctcgcagttccttcctggaggctggaagtctggaaccagggagtcagcagggctgtgctctttctgaaggctctaggggagatctgctccatgcctttttctgagcttctggttttgccagcagatctggagttccttggctcatgcgagcatcgtcactgcaatctctgcttctgtgttctccctgtgtgtcttcacatcatcttccttctgtgccagtctgtgtctgtctctcttctcttggattagggctcaccctaatgacctcattttaacttgattacatctgcaatgaccctatttctgaataaagtcatacaggtactgaaggttaagacttcagtaccctttggtgggtacacatttgaacccttaactagagataggtgagagaatcagattcattcttgaccttttataatacaaaccatgctgactagagacccatgcataactagcaataacccacattgcaagggcaagcacaat

SEQ ID NO: 834857 - DNA, 615 bp, Homo sapiens
aacaaacctttgccattacgtactctgtggaaggcactgtgtgagatacttaatatattagtgtcctagggctgctgtgrcaaaggaccacaaactgggtggcttagaacaacagacatttattctctcgcagttccttcctggaggctggaagtctggaaccagggagtcagcagggctgtgctctttctgaaggctctaggggagatctgctccatgcctttttctgagcttctggttttgccagcagatctggagttccttggctcatgcgagcatcgtcactgcaatctctgcttctgtgttctccctgtgtgtcttcacatcatcttccttctgtgccagtctgtgtctgtctctcttctcttggattagggctcaccctaatgacctcattttaacttgattacatctgcaatgaccctatttctgaataaagtcatacaggtactgaaggttaagacttcagtaccctttggtgggtacacatttgaacccttaactagagataggtgagagaatcagattcattcttgaccttttataatacaaaccatgctgactagagacccatgcataactagcaataacccacattgcaagggcaagcacaat

SEQ ID NO: 834858 - DNA, 545 bp, Homo sapiens
gtggtgataagctccctcagccattttaaaaataaattttatcatttatacttgaggtttacaacatacatgtagatagtaaaatggttactacagtgaagcaaattaacatgtttatcctttcacatagttacactttttgtaacaagaacagctaaaatctatttaacaaaaatcacgaattcaatacaattttattaactacagtcctcaaattgttcattagacctctcgacttgtttactctgcatatctgctactttgtatttttgatttacatctccccctttccactgttttattctctatatctgtgcatttgaccttttttgtttttagattccacattaaagtgagatgcaatttaaaaaaaaaaaaagagttaaccagaaaccagcactttcaaaagacttgctctacctccaatttaaaccactgactagcttctcttcctgataagagactaccgatcwtggactggttctggctgggttacagggactgtatacaggatgcctctgtgtcctctgtttacaccttttgac

SEQ ID NO: 834859 - DNA, 610 bp, Homo sapiens
actaacaccccaggagaaaagaagggggtacacagaagtaacaatgttatattaaaattttataagattattgtgacgggaccaaggaaaaagaagttgaccctcactgccactcagatgtctgtggtcatctgtcactttttggcctcagccccctgcatcttctccatttccctaaaataaagggagccctaaattcatattagcttaacatgtttctttaggacactagtctgccatctcagtttgctggccctccaaaataaaatctctttccttgccccaacatcttgtctttcgaccaatagctgtcatgcagtgagcagtacaagctttggacttgacaacagttggaggagactttaataaaggaaccatttgcaaagtcgtaagtaggaaagaggaatcccacaaggcatcgtgcagtgccagagggctggtaactgaggggttgtcaacccattaggcttgaaggagtgatgaaaggaagcaggttcctgcaggcagagggaccaacttacatggaggatgctcggatgcctgtccccagataygcttcagtgaaggattcactgcccagctgctgacagtggtgtctgcagagagcttc

SEQ ID NO: 834860 - DNA, 327 bp, Homo sapiens
gtgcaggaaaaatatcttttccttctactcctctaagactcatctggggcccctgtaacagaaggcagattaacaagagaaacacatactaatttatttaatatatgtattttacatgacacaggagagtatgagaaagtgaagacccaaagaagttgttaaacctgaatgtatttatgctaggtttgatgaagaatggagattcttgggaaaatgtgacaggacaaaagaaaggtaggaagtaagagtggtcagctggggaagacarcaagcctgcatctaggttcctctacatgtccttgtgacttggagataaggatcctcctc

SEQ ID NO: 834861 - DNA, 643 bp, Homo sapiens
aattgcacacatctgcaatgaaaaccccaaaatgaatttaagaaaacacttcaatttaaaatagcataaaaaaaagaaatattaattaatttggaaaatgtgatacaagattttactctcaaaattaaaaattattgtttaaagaatatttaaataattagtaaacaccttacacccatgaattggacgatttgatattgtagtactttacaatttgaactacagatttgatgaaatccctgcaagtatcccaacagacttgtgtctagaaactgacaagctgattctaaaatacacatgaaattgtaagggactcaaaatagccaaaataatcttgaagaaagaaaacatattaggataattcacaccccatgctccaaaccttactgcaaagtatcagtaatcaagacaacacaacattgatgaaggaaaaatatatagattgatggaagagaattgagagtccatatataaaactatgtgtctacagtcaatggattcttaaagtggtgccatgtgcaattcaatgaggaagagacagtctttgaacayactgggtcaacaacgtacacgtggatcaccacttgcaaaataataaattagaacccttaccccaaagcatacaaaaatattaactcaaatg

SEQ ID NO: 834862 - DNA, 565 bp, Homo sapiens
  misc_feature 480: n = A,T,C or G
acggatccaagaaactcagcaaaccccaagcacaagaaacatgaagaaaattacactaagggataacataatcaaattgttcaaaatcaaggaaacattattaatagcaggtgtataaaaagacatgttacctatagaagaacaaagataagaacaacatcagatttcttttgagaaacaatgcaagtgagaagacagcggtacatctctaaagttctagaagaaaaaaggccaactagaattctatgcctagcaaaaatatctttcaaaaatgaaggtgaaataaagacacaccagaaacataaataatgaaataattcatcaccaggagaccttcactgcaagaaatgttaaaggatattcttcagaaacaaaatgatgtcagatgaaaatctggaccaatacgaaggaataaagagcaccaaagtggtaactatatgagcaaacatcttttaaatttttttattatttaaatctctnacagagatacatgtttaataaaaaaacagcaaaatrttacagagtttataacatatgtaaaagccaaatgcatggcagcaatagc

SEQ ID NO: 834863 - DNA, 598 bp, Homo sapiens
  misc_feature 513: n = A,T,C or G
aaatgttctagccataacaagacctattaactcacggatccaagaaactcagcaaaccccaagcacaagaaacatgaagaaaattacactaagggataacataatcaaattgttcaaaatcaaggaaacattattaatagcaggtgtataaaaagacatgttacctatagaagaacaaagataagaacaacatcagatttcttttgagaaacaatgcaagtgagaagacagcggtacatctctaaagttctagaagaaaaaaggccaactagaattctatgcctagcaaaaatatctttcaaaaatgaaggtgaaataaagacacaccagaaacataaataatgaaataattcatcaccaggagaccttcactgcaagaaatgttaaaggatattcttcagaaacaaaatgatgtcagatgaaaatctggaccaatacgaaggaataaagagcaccaaagtggtaactatatgagcaaacatcttttaaatttttttattatttaaatctctnacagagatacatgtttaataaaaaaacagcaaaatgttacagagtttataacatatgtaaaagycaaatgcatggcagcaatagc

SEQ ID NO: 834864 - DNA, 403 bp, Homo sapiens
ttgaaattcttccctcaggcatccccccttcctcagatctaggcactttgatttttctttgactgcagtgcacatctccatccctaggaccttcctaggctgtgaacacactgcataccttgcatattttcctacctttcccttccatgtaaaatatacttgtcctatgttccacttccctagattctgtcctcaaccaaagtcacaatgaattaatcatataaacaaattagttagcccgtgcgctacacctctcacctagaaaaatatgtctgtaatcttgtttaaatgcttattttcatcaaaaaacatttgactggactaggtaaccttcaaattgtctcccaaygctaacattgtaaaattatatgagtaactccaaccagaaaaaaaaaaaaagtaa

SEQ ID NO: 834865 - DNA, 637 bp, Homo sapiens
tcccttaacagcctgaagctaagagggagcgtggggatggcttctcaaattagwgacacttatttaaactgaatcatcaaggaaacatagcagttagccagtgatatacaaggaaatgagcacaccaggatgaagaaacagcctacgcaaagccgtggaggcctgcacagcacagccccatccaagcagtgtgagtagttcacatgctacagagagcaaactaatatcagaactaaaagtgtctgtgagatttttagtatattccatttttacctacgcttgagtcatttctgacaaataacaaaggcaaaagccagatggtcacatgctaaggaatgaatgggaggtgagaaagtgttgaaagtaaacacagggaggggaacatcacacacagaggcctgtcagggggtggggggcaaggagagggagagcattaggacaaatacctaatgcacgcagggcttaaaatctagatggcaggttaatgggtgcagcaaaccaccatggcacatatatacctatgtaacacacctgcacattcttcacacgtatcccagaacttaaagtaaaataaaaaataaataaagtaagcaggaattcaagaagtgccgataaatagtgaaaagggagaggggta

SEQ ID NO: 834866 - DNA, 556 bp, Homo sapiens
gttacagagaatctttttgtaacagctttctcagatgctggttgtagtagtgatgtggtgggtatgtaagcgggttcactgtttcctgtggggctggaatggcaraggtctcatgaagcttattttgttccccagtggtgtctactttgttttttttgtttttttttttgagacagggtcttgctgtcacccaggctggaatgcagtgacacgatcatggctcattggagccttgacttcccaggctcaagtgatcctcccacctcagctttttgagtagctactataggcatacaccgccatgcctggctaatttttgtattttttatagagatggggtttcaccatgtttcccaggttggtttcttttgtcccacggggtgttctgttaatgtggtgcactctgcctaggagtagcagcccctgagggccagactactgtgaatcctgctgctcctctgggtctagccacccagtggggctgccacactccaggctggtgctggggaatgtgctgtgacctgtcctctagtctcccagtagcaggtaccagtac

SEQ ID NO: 834867 - DNA, 610 bp, Homo sapiens
taagaataatttgggattaaaaataagaaataagaaagggactgagaattaatataaaatggaaaacctgaaatattatgtggattttattttgaatcagggagagaagacagctaaatcagttaaatttactrttttcattggggcacctactcttatttttgtgctaaagaaatgaaagtgaaggttgaaattataaattctttgaagagtttgaccatttatttgagggacatgtgactaaggaaagccgtaaccatggatagaagactaagaattactcacatacattttagttgcttgcaaaaggctcttgcatacaacaaaagagtctttaaattgtacaaattgtagaaagtctttaaattgtgtaaactgctgattcttcaccataaataggttcttgttttatatatattaatattataaataaggttagagtctattcttccaagcttggaaaattaggacatttttcaaaactttgctctgatctcttattagtggatttcatagtctatgtctcagaatacctggaaaagttgcttttcctctaatgtccattgctttgtttggttaaagaaagtaacatgtttttaaaaaaataaaa

SEQ ID NO: 834868 - DNA, 578 bp, Homo sapiens
gtttcaaatctatttcacgggaaaaggctttttaaaaaaattctcatactttcctgatttgacttaaagaaactactggttcttcattgttgttatttcaaggcctacggctgccctcttcactttgtttttttttaaaactttgatgaaagtttactaaattccttttttaaaaaaagtttcccctgtttctgggacaaagagaaaagcaaaacaaacaaacaacaaaaatcaaagtttcttgcttttctgggtcatcacaatttgaatgtaaaaacaagattttcaaatactttttattttgaatgaaattcaaatgaataatcatcttggccttctgcttttttgtaaagcagcagaggaaaattctaggagaacttagcaactcatttgaatttcttcccctcctttgcctgaatctttgcctctcgtgatctacatgtcagagctcctactgtcttgtttctccaagtagatgtcttctctttggaaaggccctcaggctccatagttgttttctttgcatgatttcctayagagcttgagcacttagcaaacactcttgatgatgcccctct

SEQ ID NO: 834869 - DNA, 666 bp, Homo sapiens
catatttttcattagcctaaaaagttatgagggatatgaaacattctgaaaagggcaacattttttgtgtcaataaggactaggataccatctaagaaagactcttccacattattcagtctatctttttttattttctcagaaaccacttttattcccatgaaaaagaagatacagcctagattacaacacacaagtccttttaaatatctggaaagccttctcaaggaagacaggtacaaacaagctcagacagtgaagactataataaatacataattcttcaatggccagacacagatgaacatctaccagtatcaagacactccaggaaaacatgaccttaccaaatgaactaagtaaggtaccaggtaccaatcctggaaaaaagagacatgtgaccattcagagagagaattcaaaatagctgtttcaaggaaactcaaagaaatacaagataatgcagagaagtaatttagaattccatcatgtatattacacaagaggttgaaataactaaaacgaattaagtagaaaaatgcaatgggcatactgaagaatggcattatagtcttttaataccagaatttaccaagcagaataaagaattagtgagcttgaagataagctctttgaaaayatacagtcagaggagacaaaagaaac

SEQ ID NO: 834870 - DNA, 601 bp, Homo sapiens
atatataatgtatatgtattattaaagctggaacagatttgaacactataatcagtaagatttttttaagggaactgcaaagaacattacagccaraaaattgggagatacaaactcttctcaagtgtacatgaaatatttataaaaatcaacaacatattgggccataaagcaaatttgaacatattttaaagatttgggttgtacagaccagagtgcaattgttagaaatcaaataaagagataagaaaaaaatattttatttgtataaccatagagttcagactgccataaatttagttatagtctggcaggacaagctggccatagagaatcctctttagggttctaatagatgagtatcagtgaacgaccaccaatcatccaggacaaaattaatgtttgagtttgtgcataaagggttgatttggacttcacaggattatttcttctttgaaatgtgggaaatcatttgttcctacgcaattcacaaggctatctggttcaacccatgctttcccaagtcaaaatgttctttcccacagcccagcaagataaagtactcaggacagctggattttaagaacacctttgtgagttg

SEQ ID NO: 834871 - DNA, 630 bp, Homo sapiens
gtttctccaagatcacctaatgtgcaatatgtttttagaatgacaattttctgaatattgtgactcttagctgttatgcatgccaccaatgtcatgaatattataaatagttgggtgggtttctggtttccaaagcattttctatccagtctacagcttcctccctcttctttcagtttacatctttgcattattcaatttttctattttgcttcagcttatctatggacggtttgaaataatttgtggagatgcaagctaggcagctccagtgtaaaatgaatataaattaagcagaatagatacactgcctagaagtagctgctgtcactccatcttttcttcaagtcagttcaacccctcttctcccaggcaggctgcaaccaggagaatgaccttgttagtttttcttgaatagcaccatctttaatctctctctctcattcctctttctggggatcttttccttgcatccacttccacctatcttagaaaccagtcaagcccctattccaggtatcctaaatttttatctctctttatttgataactactcaagattgagggctgtgtgtttgttgctkcaacactcattccaatccacatggaagttgctttcctttattatag

SEQ ID NO: 834872 - DNA, 551 bp, Homo sapiens
attcttatttaaaaaataaaaatagactrggcacggtgactcacgcctgtaatcccagcactttgggaagctgagatgggaggatcacttgaggtcaggagttggagaccagcctagtcaacatggcgaaaccctgtctttactaaaaatacaaaatttagccaggcatggtggcctgcacctgtaattccagttacttgggaggctgaggcatgagaatcacttgaggctgggaggcagaagttgcagtgaattgagattgagccactgcacaccatcctggatgatggagtgagactctctcagaaaaaggtaaaataaaacattatggactgtgcttataagccagaagacttttattttaaactcacaattaggctaataacacagctcggtttatagcacattgtcatttattttgctttgcaagggaaagagaaaaattatttataattttttttctttctccatccccattcccatttcttccattctccagctctcattataatacataatatattccaatccaactttataaacttatttag

SEQ ID NO: 834873 - DNA, 502 bp, Homo sapiens
tcatattacttctctgcttaaaagcctcaatgaatctgctgcctacagaatgaagtcccaagcaggccagatgtgatggctcatgcccataatccragcactttgggaggcaaagcggagtagatggcttgagccctggagttcaagactggcctggacaacaaagtgatatcctgtctatataaaaaacaaacaaacagcatgaagtcccaacatttatgcatttcttataaggctctttattgtggggaaaggactccctattcagcaaatggtattgggataactggctgccatttgcagaagaacaaaactgggctcctactttcaccacatgcaaaaattaactcaaggtggattaaagatttaaatgcaagacttcaaattataagaatcctagaagaaaacctacgaaacactattctggaccttggccttgggaaagaatttacgatttagtccttaaaaccaattacaacaaaaacagaatatgacaaatagg

SEQ ID NO: 834874 - DNA, 588 bp, Homo sapiens
aatgtgtgacctcgaccatattgtttaacttcttttcgtctgagtttacttcgtttctaaagggaagattttcattgtatccatttcataggatttgggtacacattaaattagttgaaagttgtaaattgcttaccacaatgcattccacataaactgaataaacattagctgttattattatcaggtggtttatcacagcatcgtttataagaataaaaaattgaaatgacataaatatctattttaagagactaaagaaaccattatataatgattcttccatgtaatgtgagactttacagctattaaagctgatgtttataagactctttaatggcatggaaaaatattgcttaatggaaaaaaacaagttacagatgttattcttagggcaattccatttgttaaacatattatgtagatacatacagaaaaagaagatagtatacacacacagtgttagccatacgatcacagatgactttttttttgtccttagttttgttttctatcataaacaagtgttawatttgcaatcagagaaaagcgtatatattttattagggcaacaacaatttggtttca

SEQ ID NO: 834875 - DNA, 616 bp, Homo sapiens
agggccaaaagatgagaaatattttaggttttgagagtcaagaggatattatgtacatacttataaaactacttaaaatgtaatccttaaaaaatgaaaaccatttctagttggtgggtctataaaaactgtcagcagaccagattaggcctgtgggggatagtttgctctaccttggttagaaggttcctacctcttagacttgatcttctaatatttccctcttccacaccatctccgaacatgctggccttttggtctgatttttaatcatttcacactatctcactcagggcttttgtacctgctagtttctatgacaaggatgcccttccctgatcttttcttgtgtgcttctttctcaacattttgttacctatgagctatcttctcagcagaggctttctcagacaacctgatctgatgtttctttttccctgtgaacccagttactttctaccacatcaccctgcattaaatacatgtatcctttactgtacttaycattcttggaaatgatctcaatgattagtttttattggtttattgtatttttctctaactagaatgtgactaccatgaaattaaaggccatatctgtctatttgcttctata

SEQ ID NO: 834876 - DNA, 616 bp, Homo sapiens
agggccaaaagatgagaaatattttaggttttgagagtcaagaggatattatgtacatacttataaaactacttaaaatgtaatccttaaaaaatgaaaaccatttctagttggtgggtctataaaaactgtcagcagaccagattaggcctgtgggggatagtttgctctaccttggttagaaggttcctacctcttagacttgatcttctaatatttccctcttccacaccatctccgaacatgctggccttttggtctgatttttaatcatttcacactatctcactcagggcttttgtacctgctagtttctatgacaaggatgcccttccctgatcttttcttgtgtgcttctttctcaacattttgttacctatgagctatcttctcagcagaggctttctcagacaacctgatctgatgtttctttttccctgtgaacccagttactttctaccacatcaccctgcattaaatacatgtatcctttactgtacttatcattcttggaaatgatctcaatgattagyttttattggtttattgtatttttctctaactagaatgtgactaccatgaaattaaaggccatatctgtctatttgcttctata

SEQ ID NO: 834877 - DNA, 596 bp, Homo sapiens
ttctaagtacattaacccagttacaaataaatctgtgaattaaataatatgtaaaattgctggatcaaagaatatgtatatttgtaacttcaatagatattgccaaattgccctgtagaaatcctgtgcccatttatactcttatcaacagtctataagaaaagattgtttctccacattttctaacaaaaattattaccaagacttcttatgtttgctaatctgaaggataaataatgagagctcaatgtatttaaacttgtcctgctcttgtgagtgaagttgtacctcctttcacatgttgaagaggcacttatatttccttttccactatcttctcatctcttttacttatttttattggctcatcagtctttgccttattgaatgtgggagcttttccctccttttattgatatataataatttatgtatttatgaggtagatgtgtttgtaacatatgttgaatgtgtaatgaccaagtcaggttgtttgggctatccrtcttctcaactgtttatcatttttatgtgttgtatgatttcaagtcctttcttctagttactttgaaatatgcagaatattgttgtgaaga

SEQ ID NO: 834878 - DNA, 537 bp, Homo sapiens; identical to SEQ ID NO: 828925

SEQ ID NO: 834879 - DNA, 604 bp, Homo sapiens; identical to SEQ ID NO: 828924

SEQ ID NO: 834880 - DNA, 619 bp, Homo sapiens
caacaatagcagtagcattcagaatttattaagtgctttctatgcatcaggaagtgcaaatggattatctcctttatcctcaggaaaatttcattatttcactttgtaggaaaaggcaatgaagtttagaaagattaacaaattggtctaaatttccctagctagttttctgtagagaacttgcattcttcatagaaatgtcttctctgttttttttcctctcctcatttagctcctatttttgtcctggtaaaagtatagaaaaagaaaaaaaaaaaaagtgaacacaggcgtggcctatgcctgcttgaaagtaggaaagaaggattatcgaaaggggagaaaatgacatagaaaggaatttttcaggttatctaaattgacgctttcattttcaaatgggttaactctagtttcaagataacaaagtaaaacatttgctaaaaaataaatctgtattagaactgttacccactctcagcccagtccctttcatatatcacgttgcttttcatccagtccgggaaatgcccgtttttcccttttgagaaaaatctatgtcrgcacttacctgtctgaggttatcttttggtaaaggaatatactgcttaggaacttc

SEQ ID NO: 834881 - DNA, 641 bp, Homo sapiens
gaaaacaaattttaaaaatggcaagcataagtccttacttatgaatgataacactgaatgtaaatggaccaaactctccaataggacataaagtggctgaayagattaaaaaaaaagactcaacaatctgctcccaataagaaacacacttcacctataaaggcacacatagactgaaactaaaagggtggaaaaagatattccatgcaaatggaaaccaaaaaagagcaagaatagctctatttatatcacacaaattagatttcatgacaaaaaccataaaaagacaaagaaagtcattacataatgataaaagggtcaattcagcaagaggataagaagggtcaattcagcaaggtgcatataaatataaatgcacccaaccctgaagggcccagatatataaagcaaatattattcaagctaaagagagagatagaccacaatccaatagttggagacttcaatactccactttcagcactggacagatcatccagacagaaaatcaacaaagaaacattggaattaatctgcacaatagaccaaatggacctaatagatatttacagaacatttcatccaatggttgcaggatgcacattctactcagcccatggatcattttcaaagaatgatat

SEQ ID NO: 834882 - DNA, 612 bp, Homo sapiens
gttgaaaaagatgttttcaactatggattctgaaggcatctatctaataggtctaaagaaaagaaaaagtgggtctatagtggatctgcctttgagtaatggagcaggatgatgagccctgataccagggagaaagcatgaaggagaagaatgggacaagagattcattaaaggggcagactctctaacgggaatatatgagagtatagaatgcagtgccatttaccagagctccaaactaactatgagggctgtgctaggacatcccagagatattggaagggtgcttaagagaaggtgagactgaagtctcctccttgacaggatttttgctgagctacagaaaacttttaggtccatcacgcaagatagagaatgagataatagtggaagtggtcttgggaaatcttgacatgtatttccctagagtgtagggacattagaaactagcgcttgcctcttctctggagaattctaaagcagcctttaataacagggcaaggaagaagtgcaggaatacatggttatcttagaccagtgattttcaaccagcggtaatttttttacctctgggagwcatttcacaaagtctggaaacatttttacttgtca

SEQ ID NO: 834883 - DNA, 580 bp, Homo sapiens
cctgagctccaggaaggaactagattttcaagactttgcaaagaaaaaaaaaaaagaggaagaaaaagaagacagtcataaaagcccacgttgctgagctgctgaacacagtattaagkcaattccacaataagaaaataactaaacaatacatgtatgttgtaaaacactgtttagcgtaagtgatataaatttgcaaagggttttcagtaatatgggaaatgcttataatatcatgtcatgtaaaaaagtaggaacaaaactttatgtattttactgtcacagctatggaaaaattgcatagaagactcactggaaagaaaactgcagtgttaagaataattgctcctaagagagcagagcaggacttttttctctcttttttgacagtattttattattttcaaattctctataaagagaacatattaatttaataagccaggaatgtttaaaactggagaataaagaaaacatacccagtgaatatttcactcagcttacaaaaaaatcaacctaaagctacacatctcagcattccttcacgtaggctgcagagatttttcattaccttgtgcta

SEQ ID NO: 834884 - DNA, 580 bp, Homo sapiens
cctgagctccaggaaggaactagattttcaagactttgcaaagaaaaaaaaaaaagaggaagaaaaagaagacagtcataaaagcccacgttgctgagctgctgaacacagtattaaggcaattccacaataagaaaataactaaacaatacatgtatgttgtaaaacactgtttagcgtaagtgatataaatttgcaaagggttttcagtaatatgggaaatgcttataatatcatgtcatgtaaaaaagtaggaacaaaactttatgtattttactgtcacagctatggaaaaattgcatagaagactcactggaaagaaaactgcagtgttaagaataattgctcctaagagagcagagcaggacttttttctctcttttttgacagtattttattattttcaaattctctataaagagaacatattaatttaataagccaggaatgtttaaaactggagaataaaraaaacatacccagtgaatatttcactcagcttacaaaaaaatcaacctaaagctacacatctcagcattccttcacgtaggctgcagagatttttcattaccttgtgcta

SEQ ID NO: 834885 - DNA, 594 bp, Homo sapiens
aatctttttttagtttttgttactctttttcattaatggatgtgctagtctatctgtaaatctcagtaattcagataggtatatttactgcagaagatgattaatttaccgctgaccaaaaattctaatcatgaaaatatttctaacagggcaaactacaggctggatctctggacaaaagagcattcttagtctgtctaaattactagttaaccaccacctaacaactgagagactaggcatggggagtgcctttttaaaaagataagcgtatgttaatcacttcaaggtattaatatatataatttactccaagagaatgaaaaagactttccctctgctcaggtgaaggtgtgttcacctctatttacagagtagaaaatctggcagagtaattacagatggaataagagctataagctccagattactctcaggaaacatttcttagtctaaatgcactttttaattagctcttccaatagcatcatgctaattggctaattygggaatgatatgagaccccatgtgctttaaagaaaatctgtttgttgatatatttatttgcaactgagactgtcttattgctggcag

SEQ ID NO: 834886 - DNA, 404 bp, Homo sapiens
aataatactgtctttcaggcagaagagatatgtgcctgtagcaacccaataaaagagaagatttatgctcatctcaggtttttttcttgtaatttaaagaagtcaccttaatagacaaaacattggtctccttatgtcctgcactgggggctggaactctaagtcaacaggagacgtctagtgaagcaatagagacacgttcacttcctaataggtagcatatttatcattctctgcttgattttagctgtgaagcaacctactcacacagcaacactggggaggacattcaaactgtccagyagtgaacagtcttaatgatgaatgcaactgtaccatgaggacgatgacaataatatttaattgaattagaatctcaggcagacaatttttgtcaataatta

SEQ ID NO: 834887 - DNA, 404 bp, Homo sapiens
aataatactgtctttcaggcagaagagatatgtgcctgtagcaacccaataaaagagaagatttatgctcatctcaggtttttttcttgtaatttaaagaagtcaccttaatagacaaaacattggtctccttatgtcctgcactgggggctggaactctaagtcaacaggagacgtctagtgaagcaatagagacacgttcacttcctaataggtagcatatttatcattctctgcttgattttagctgtgaagcaacctactcacacagcaacactggggaggacattcaaactgtccagtagtgaacagtctyaatgatgaatgcaactgtaccatgaggacgatgacaataatatttaattgaattagaatctcaggcagacaatttttgtcaataatta

SEQ ID NO: 834888 - DNA, 447 bp, Homo sapiens
tttatgaccagaatttggaagcctttgcctgcataactaaagacactaagctgttgttgtaattacartctctttaatactgctattgatagacattttaactgaaaaatattttaaaaatgcagaatcacatataataatcatttggaagacacgaatattgtcctaaagttataactaaaagttataattttatattttacagagtaattttacaatctggtaatgttgcttctctcaaaccaattaatttaaatagaccaaagtccacaaacagatatacagacagtgcaactcaacatatcagaatccagtataatgcctgttctgcgttgagataatttgtatagtgacagaaagtggtttagtggttgcctagggctgaggatgagaatagggtgggtggtaactttcatcgggtacaaggcccatttgtagggtgatgag

SEQ ID NO: 834889 - DNA, 614 bp, Homo sapiens
aaatctagtacccaaaactgtaacaattctagatgataacattggaaaaactcttctagacattggcttaggcaaagaccaagaacccagaagcaaatgcrgtgaaaacaaagataaatgaaataatcagcagagtaagcaacctacaaaataggaaaaaaatattcaccaactatgcatccaacaaaggactaatataaagaacctataaggaattcaaacaaatcagcaagaaaaaaacaaataatcccatcaaaaagtgggctaaggacatgaatagacaattctcaaaagaagatatacaaatggccaaaaaaacatatgaaaaaatgctcaacatcactaatgatcagggaaatgcaaatcaaaaccacaatgtgataccaccttactcctgcaagaatgactataattaaaaaatcaataatacatgttggcatggatggtaaaaagagaacacttttacactgcttgtgggaatgtaaactactacaagcactatggaaaacagtatagagattctttaaataactaaaagtagatctaccatttgatccagcaatctcactactgggtatctatccagaggaaaagatgtcactatatgaaaaaga

SEQ ID NO: 834890 - DNA, 637 bp, Homo sapiens
cagttatgcctgtggaactatgagtcaattaaacctcttttcttcataaatcacccagtctaaggtagttcttcatagcagtgtgaaaatggtctaatacatacactwttctgtgaaacttttcttttagtttacagggtgtgaagatttcaccaagattgatatggaattttataggatactacatcttaatcaacttagatgctggtgttatatatttttttatttttttaacttgctggcattagtttactaatatgttacaattttttaacttgctggcattagtttactaatattatgtttagaatttttatattcctatacatacaaaaggttggcctatggttttatttccagcaccatattttttggcttggtatcaatattttaaaagtctgttttttatttcctgactgatataacagaaactttgaactgcatatttacagtataatacagatatgggccccagtacccttctttcatggaacatgtctcaggcttcctgattcagggagcgtgcacattaccgacactggtctagaggagctgctctcctgtgggggtgacctataggtaaacatatatacctatacacatatatacacattcatatatatatatatacacacac

SEQ ID NO: 834891 - DNA, 561 bp, Homo sapiens
ttagaatgaataagaaaacctttgagcacggaggactgcaacagtaaattatgtcacacgaggttcttagattcaccatactgaatacatkgtgacaaggaaccatcacagaccacatgagaaaataacccacaccaccacagaattgtttgggtttttttctttagtctattgttattgattttattttgcttaaattttaagcaaatatacattattttttccacagtccaagttgcctttttagtagtattgatattttcagaagaaatagaatgattgtactggaatggtagatgtttttcacatttcaaaatgtgatgaagaaacataaagttagaacttcatttctttgtcagtgttcttatcaactaagacaaatatcttccctagaactaatataaactatattcattgtgtgataaacgtttctatatttttgaagtattttgtgaatattcatttgtataaactttacttgggcaaagtgttttaggaaacttggaaataagatatatgccaaggtacacatgactatacagatacaatatggcatgtgta

SEQ ID NO: 834892 - DNA, 500 bp, Homo sapiens
ttttcaattagatgaattgcacttgtaattttttaaaaaatacttccccatagtctcaacagcaatatacaaattattttaaagaaactaaaaaataactaatgataaatgaaagaagagataattactcttcacaaaagggaatacaaagtgagtaagaagaacttggaaaaaatttacagtaaaattaaatcatttcaaaaattaatgtcacattagaaggaaaaaggagtaaaataaatttcgctgaaaattgagttaggcacagataagtaaagtcacatttaatgaaatagaaaacaacagaggaataatgcataaaagtgatacatataaaagtcaaaagaggtctattctgtatagttagcatttctacaccaaagaacagtgttgaagaaaaatatttacaakaatggttttcttaaataaagaatggaatatttaaatcacaatgtacaatgtgtactaggaaaattactaataattacttctcatacatt

SEQ ID NO: 834893 - DNA, 641 bp, Homo sapiens
ttagcttgctggggcccatgggggtgggatccactgagcaagaccagttggctccctggcttcagycccctttccaagggagtgaacagttctgtcttgctggcattccaggtgccactggggtatgaaaaaaaaccgctgcagctagctcagtgtctgcccaaatggccgcccagttttgtacttgaaacccagggcccttgtgctataggcacccaaggaaatctcctggtctgtgtgttgcaaagaccatggaaaagtttagtatctgggccagataataccatccctcacagcatagtccctcaaggtttcctttggctaggggaaggagttccctaactccttgtgcttcctgggtggggcaatgccccactctgcttctgcttgccctccatgggctgcgcccactgtctaaccagtcccaatgagatgaaccaggtaccttagttggaaatgcagaaatcacccaccttctggattggtcttgctgggagctgcagactggagcttttcctacttggccatcttgctcgggaatccccccagttaaccatttttatagcccatgaattttagatgtttacttaagtaagaaacttaaggttaaaatgtgggtattttgccaatagctcaggatt

SEQ ID NO: 834894 - DNA, 642 bp, Homo sapiens
tgtactttgtccacattatttaaagggtaaagctaagagctcagcatgtttttcagcctacacatgcctttcagccttcccagcacaattttatggtttctcttcttcttttggtctatctttgatgtttattataacttgactatagtcctataaatatttttggtacttagtatatattctttctggtgaatatattattttgttaaaacagaatcataatacatgtgttattttataatctcattttttacttaggaatgttgaacatccctccacattttatacacacacacacagacacatatatacatgcatatacatttacactcagtattaaaaagataaactaaggtgcaataaaattttaaagagcttatttgagcaaacagcaattctctaattggacagctccaacctagaattccaccaaggagctccaccaaggaaacacaaagaggaggcttttatatgataaacacaaaagtaaaacaaagaaaatatttgatttatcacagttaagacagtcaycttaattgttctatccctttagaaattctctacttatatagttgttgtataattataaggtttttggttgcttctgattggttaaacttaagttctgtttttctttaacat

SEQ ID NO: 834895 - DNA, 642 bp, Homo sapiens
tgtactttgtccacattatttaaagggtaaagctaagagctcagcatgtttttcagcctacacatgcctttcagccttcccagcacaattttatggtttctcttcttcttttggtctatctttgatgtttattataacttgactatagtcctataaatatttttggtacttagtatatattctttctggtgaatatattattttgttaaaacagaatcataatacatgtgttattttataatctcattttttacttaggaatgttgaacatccctccacattttatacacacacacacagacacatatatacatgcatatacatttacactcagtattaaaaagataaactaaggtgcaataaaattttaaagagcttatttgagcaaacagcaattctctaattggacagctccaacctagaattccaccaaggagctccaccaaggaaacacaaagaggaggcttttatatgataaacacaaaagtaaaacaaagaaaatatttgatttatcacagttaagacagtcatcttaattgktctatccctttagaaattctctacttatatagttgttgtataattataaggtttttggttgcttctgattggttaaacttaagttctgtttttctttaacat

SEQ ID NO: 834896 - DNA, 690 bp, Homo sapiens
tcaaaagagtcagggataaagaaaggatcctaaaaacagcaaaagaaaaaaacaaaagacatacaatggagctctaacacrtctggcagcagacttttcagtggaaactttacaggcaaatgtggtttgactgtgtccccacccaaatctcatcttgaattgtagctcccataattcccactcattgtgggagggaccaggtgggagataattgaatcatggggcagtttcccccatactgttctcatggtagtgaataagtctcacaagatctgatggttttataaggggaaatccctttttgcttgattctcattctcttctcttgtctgctgccatgtgagatgtgcctttcaccttccaccatgattgtgaggcctccccagccatgtggaactgtgagtacattaaacctctttcttccgtaaattgcccagtcttaggtatgtctttatcagcagcatgaaaatggactaatacagtaaattggtattggtagagtggggcgctgctgtaaagatacccaaaaaatatggaagcaattttggaactgggtaacaggcagagtttagaacagtgcagagggctcagaagaggacaggaaaatgtgagaaagtttggaactttctagagacttgttgaatggcttcaaccaaaatgctggtaatgatatggacaatgaaatccagc

SEQ ID NO: 834897 - DNA, 518 bp, Homo sapiens
aactaaatacttaatcctctgacagaacagttttactgttaggtatttacccaggagaaattaaatatcttcacaaaaagacatgtaagaatgttcaattttaatcacaataactctaaactggaaacagcccaggtatccccatcaatatgagaataatcaaactatggtatatccatacgacaaatcactattcaacaataaaatggaatgagctactgatacaggcaacaatatgaataattctaagaatgttattttgagtaaaagaaatcttatacaataaagtatatattgtctggttctgtgtacataaagttctagaataggcaaatttttctatggtgaaaatatcagaacagtggttgactgtgatggggggcaagagttggtgaggaagggtcatgttctacatcytgataaaagtttggtttacaaatgtgtatgcatttgtcaaatttgatgcacgtgcagttaggatttatgcatttaattgcatgcattacatgtattcatgt

SEQ ID NO: 834898 - DNA, 600 bp, Homo sapiens
atctggatagcaaacatcccattctccctctcatgctgcttgtctagcatggaggtggtctgctcatccagtccctcaggatcgaaggcagacactaactccatctcaacacatgcttccacagtcacccacaagggtgaagagaaggtattgaactgtcccctagcttttaagacttctgcccagacacacacacacacacacacacacacacacacacacacacacacacaccacaactgaggttaaagagaaaagcctgctgcagaggctatatccaggaggataatctgccttggccactgttgtcatctgctctggctgccataacaaaatgccacaacataaatttctgttaaagaaacagaaatttattttctcacagttctggaggccagaagtccaaggtcaagatgcctgcatggtcagcttccagtgagggctgtcttcttgcagatggctgccttctcactgtgtgctcacatgacctcttcttgtaaacaaggagaaaaatagtgctttctgaaatctcttcttaaaaaggcacgaatcctatcaaatcagrgccctatccttatgacctaaattaaccttattatg

SEQ ID NO: 834899 - DNA, 641 bp, Homo sapiens
ttcttcagggttggataatgcatttcctaaatcaaaacaagtgtacttagctcttatatgtttgccaggaatcattttctaggttttgaatatattcyataaagtgtaccgcttaagatttatagtgatctttaaaagtaaacttattggacaatgacttgaatgttcttacattatgcgtgaaagaaaggaacgtcctttccaggtgagcagttagtacttatctacactgggtgtgcagggtagctgaaggatttggtatttggtgagaattagcttcagcttactagcttagtgaaattcaatcatttaaatggaaaacttgtttgttttcaatatgatgattaatatagtatcacatttccttcaagctcaaaaatgtaatatcaactggctctctttttattgggagaggaaagatttgtccctgccaattccagaagtccatattaatttctgacagctgggagacggagagatctaatgagaattgtattaattcagagtgtagcctgaactaaactactcatgaaggaagcgtggcggagtgaaatgcaatgtgatcttctagataaagtctgaatttgagctctggcttggccactagtgactgtggttttaggcaaatgatttaacctttg

SEQ ID NO: 834900 - DNA, 575 bp, Homo sapiens
aactctaggacgcctttaactttaatcagggtccccttcctccaggactgctttgttgaaaaccaaggaatttgcatgtttagagatggtacactgtgctagagacaggcacagtgatgccgtgtacyagataattatttcagaagttaaaagttaaagtcattccaggtctgtcataggagccactgaattgttcattttcaaaaatttgttttaaagtgaggcaggcaattttggtggcagggaagggttctttcttttaaagttctttgagtgcaaaatgaattcagcttctttgggggctattgaatttggaacagcacgatgtccactgggcaagcttcaatttctgaagtgcctacagacgcatgcatgtgtgcatgagtgtatgtgcttccagtaaagaattttaggatttatcctacgtgtggtagtagaaatccaggtcgacgatgctttcaaatatgcacatgcaatctttttgaacaggcattatttgagcatcactgattcagaaagcatcaattgaatatggttgtaaaacaaatcttactgctttctgtgtcccatcaacc

SEQ ID NO: 834901 - DNA, 507 bp, Homo sapiens
aatcttgctactgctcactctttgggtccacactgattttatgagctgtaacactcaccgagaagatctgcagcttcactcctgaagccagcaagaccacgrggccatcgagaggaacgaacaactccagacgcgctgccttaagagctgtaacactcaccgccaaggtctgcagcttcacttctgagtcagtgagaccatgaacccaccagaaggaagaaactccgaacacatctgaacatcagaaggaacaaattccagacgcgccaccgtaagagctgtaacactcaccatgagggtccgccgcttcattcttgaagtcagtgagaccaagaacccaccagttccggacacaacggttcggggattggaaaggaaccagtccgagttcacctgaactaaatcatcagagctgacctgcccctgccgctcagagctcagctatagtgaccattcaggactcagttgtgttgatcaatcagctgaatttgaattctttttttacat

SEQ ID NO: 834902 - DNA, 507 bp, Homo sapiens
aatcttgctactgctcactctttgggtccacactgattttatgagctgtaacactcaccgagaagatctgcagcttcactcctgaagccagcaagaccacggggccatcgagaggaacgaacaactccagacgcgctgccttaagagctgtaacactcaccgccaaggtctgcagcttcacttctgagtcagtgagaccatgaacccaccagaaggaagaaactccgaacacatctgaacatcagaaggaacaaattccagacgcgccaccgtaagagctgtaacactcaccatgagggtccgccgcttcattcttgaagtcagtgagaccaagaacccaccagttccggacacaacggttcggggattggaaaggaaccagtccgagttcacctgaactaaatcatcagagmtgacctgcccctgccgctcagagctcagctatagtgaccattcaggactcagttgtgttgatcaatcagctgaatttgaattctttttttacat

SEQ ID NO: 834903 - DNA, 315 bp, Homo sapiens
ggaggtcaaaagtgacatcatagcatcataaaacaatttggttttggttatgcttctaaagtgataaataagtcagcacttcccttccccacatgtttggagtgagtactagtttggacttaatastaaaggtatagggaaagcagacagatgtcaacactaaccaaggagaaaagagcctgagaatgttatgtctcaaaaatacaaatggcagtggaaataccttcaagaaattctcagggagggcacaggtgtagacaaaacctgcaactgtttccactgttaaaattattcatttaaacgtagagagacttc

SEQ ID NO: 834904 - DNA, 617 bp, Homo sapiens
ttaaaaaaaatttttttttagtatattctgtatgtagttatattttattcaattttgttgttgttgttgtggcaggrtctcactctgttgcccagcctggaatgtagtgacacaatctcgactccctgcaacctacctcccgggttcaagcgattctcatgccttagcctcccgagtagctggcactactacaggtgtgtgccaccatgcctggctaatttttctgtatttttgggagagacgggggtttcaccatgttggccaggctggtctcgaactcctgacctcaagtgatccacccactttggcctcccaaagtgctgggattacaggtgtgagccactgcacctggcctagatctatttcagatttttcagttccatcatcatgtcaagctttatatctgtactcaggtctatatttaggtaactgaaatttatttctcatcctaaggaattggaaggttcttcaggattttcaaacaaggagaggatatattcctactcaatcaaaatgttcctttttctttcttctccaggtcaaagcttagaatgtttagtggtaagccttttccccccaagatttgaccttgtactcagctattgcatcaattttct

SEQ ID NO: 834905 - DNA, 617 bp, Homo sapiens
ttaaaaaaaatttttttttagtatattctgtatgtagttatattttattcaattttgttgttgttgttgtggcaggatctcactctgttgcccagcctggaatgtagtgacacaatctcgactccctgcaacctacctcccgggttcaagcgattctcatgccttagcctcccgagtagctggcactactacaggtgtgtgccaccatgcctggctaatttttctgtatttttgggagagacgggggtttcaccatgttggccaggctggtctcgaactcctgacctcaagtgatccacccactttggcctcccaaagtgctgggattacaggtgtgagccactgcacctggcctagatctatttcagatttttcagttccatcatcatgtcaagctttatatctgtactcaggtctatatttaggtaactgaaatttatttctcatcctaaggaattggaaggttcttcaggattttcaaacaaggagaggatatattcctacycaatcaaaatgttcctttttctttcttctccaggtcaaagcttagaatgtttagtggtaagccttttccccccaagatttgaccttgtactcagctattgcatcaattttct

SEQ ID NO: 834906 - DNA, 583 bp, Homo sapiens
gactttattttataaaacactccacccaacaaatgcagaatatatactytttttacaggcatgtagactaagatagatcatattatggataaatcacagtaattttaaaagaaaacaaagaaaagagtctgcaagattcaagatggggaaactaactattacaataaatctgagtggtgatttactactcaatagcatagtttccatcctggaatcccatactcactccaaatatcgatcaatcatgagaataaactaaatacatttttaaataaacgacatctaaaagactaccttgttatgctgtttctaagaatgacagtgaggaagtgatacacataaagaagagagtaattgagaaaaaaatgaaacgagagaagaaagaaaacaaaaaaaattcaatgctcaagatgaaataaatgtataagatgatggattagtgcaattctgggataacggctatgttgctgacttgacagagccaggaggtcagataggagcatgaagatggtgagctcttcaaagaatatcactgaaaatagacaaaattaataattatgagggatttttaatgtactgactg

SEQ ID NO: 834907 - DNA, 583 bp, Homo sapiens
gactttattttataaaacactccacccaacaaatgcagaatatatactctttttacaggcatgtagactaagatagatcatattatggataaatcacagtaattttaaaagaaaacaaagaaaagagtcygcaagattcaagatggggaaactaactattacaataaatctgagtggtgatttactactcaatagcatagtttccatcctggaatcccatactcactccaaatatcgatcaatcatgagaataaactaaatacatttttaaataaacgacatctaaaagactaccttgttatgctgtttctaagaatgacagtgaggaagtgatacacataaagaagagagtaattgagaaaaaaatgaaacgagagaagaaagaaaacaaaaaaaattcaatgctcaagatgaaataaatgtataagatgatggattagtgcaattctgggataacggctatgttgctgacttgacagagccaggaggtcagataggagcatgaagatggtgagctcttcaaagaatatcactgaaaatagacaaaattaataattatgagggatttttaatgtactgactg

SEQ ID NO: 834908 - DNA, 583 bp, Homo sapiens
gactttattttataaaacactccacccaacaaatgcagaatatatactctttttacaggcatgtagactaagatagatcatattatggataaatcacagtaattttaaaagaaaacaaagaaaagagtctgcaagattcaagatggggaaactaactattacaataaatctgagtggtgatttactactcaatagcatagtttccatcctggaatcccatactcactccaaatatcgatcaatcatgagaataaactaaatacatttttaaataaacgacatctaaaagactaccttgttatgctgtttctaagaatgacagtgaggaagtgatacacataaagaagagagtaattgagaaaaaaatgaaacgagagaagaaagaaaacaaaaaaaattcaatgctcaagatgaaataaatgtataagatgatggattagtgcaattctgggataacggctatrttgctgacttgacagagccaggaggtcagataggagcatgaagatggtgagctcttcaaagaatatcactgaaaatagacaaaattaataattatgagggatttttaatgtactgactg

SEQ ID NO: 834909 - DNA, 635 bp, Homo sapiens
gagactacaagcgcatgccaccacacccagctaatttttatattttttgtagcaatggggtttcagcaygttgcccaggctagtctcaaactcctgggctcaagcgatccttctgcctcagcctcccaaagtgctgacattacaggcgtgagccaccgcaccctgccagtactattaataatacacatgtaatcaatatccaaagctttcataaagctaaaataatatacaaaaagcatctaaataaagtttaacagagatatgcaagtacacatttaggctttaaaaattgtatttcactagtttaaggtgaagaagaagtggcttgtcagcagttcatatgagaaataaagctttagtgcaaataagtttaacaaaaaccaaaagaacaacaaggtagctataaaaactaaggcaattttaggtcacagatagcaaagaatgcatccaaaacaagtatcctaagagtagtgaagtgtctggaaatcatggagcaaactgaaagaactggaggtatttaacatggagacgagaaaagggaaacatcacggcagtctgaatatttgagatactgtcatgggaataaaagtggacacatatgtcctctactggtattcctcaaaccatctgtggta

SEQ ID NO: 834910 - DNA, 530 bp, Homo sapiens
aataaaaaaggtttaactctgtgggatgaacgtaccctttgtgaagcggtgtctcagatatatttcttctagtttttttcctggratgttcacttttttgccattggcctcaccgagatcccagtgttcatatgcagaattgacaaaaagagtgtttccaaactgctgaatcaaaagaatggtttaactctatgagatgaatgcaaacttcacaaagcagtttctcagaaagcttccttctagtttttatctgaagatattttctttttcaccatagtcctcaatgagcttccaaatatcaaattgcatattctttaaaaacagtgtttccaaactgctgaatgaatagaaaggtttaactctgcgaggtgaatccacacatgacaaagtggattctcagatagcttccttctattttttatcatgggagattttatttctgaccattggcttcaatgatctcccaaatgtccattcacagaatggacaaaatcagtttttccaaactactgaatcaaaagaaaggttta

SEQ ID NO: 834911 - DNA, 608 bp, Homo sapiens
caaatctcttctgatagttttttattttggttcaartaaaaattgcaacttggaaactgcacaaaataaatctcatccacgttaacgcaaatgtcgtctaaaaatgaacaaatttgccatatgttaaagcaatttttagtattacacatgatgtttttatactttgctttcttacattgttaatttttatattttcacaccaagagtatgttggagctttggaacaaacatggaattcggaatcattagagctgtttctggctccagacccatttctaatgagtcaagcctgagctaagtcacaatcccattcagaatctttgtcttcatctgtaaaattagaagttgacttatgtgacctcaaatagcttctccaggcttgagtattaggataaactggggagatgacatgccccaccctgctgcctaccattggcatatcaagagcaggtgcatgtttgtgagtcaatatccacaaccttgcaataacaaccttttgatttgtgtgcgctgcattgcttacactagcttactcagctgactttatttggaatttgttgacatttaccatttatagtgtcaacaaatttacataagaaactgtcaca

SEQ ID NO: 834912 - DNA, 608 bp, Homo sapiens
caaatctcttctgatagttttttattttggttcaaataaaaattgcaacttggaaactgcacaaaataaatctcatccacgttaacgcaaatgtcgtctaaaaatgaacaaatttgccatatgttaaagcaatttttagtattacacatgatgtttttatactttgctttcttacattgttaatttttatattttcacaccaagagtatgttggagctttggaacaaacatggaattcggaatcattagagctgtttctggctccagacccatttctaatgagtcaagcctgagctaagtcacaatcccattcagaatctttgtcttcatctgtaaaattagaagttgacttatgtgacctcaaatagcttctccaggcttgagtattaggataaactggggagatgacatgccccaccctgctgcctaccattggcatatcaagagcaggtgcatgtttgtgagtcaatatccacaaccttgcaataacaaccttttgatttgtgtgygctgcattgcttacactagcttactcagctgactttatttggaatttgttgacatttaccatttatagtgtcaacaaatttacataagaaactgtcaca

SEQ ID NO: 834913 - DNA, 609 bp, Homo sapiens
ccctgaaaaagacttaatgaaagatctaatagacaaagacttttaaaaaattactttaaagatgctcaaagaaggaaggaagagtgaaaacatcaagaaaactgtgtaaacaaaatgaaaatatcaattttttttctacagaagacaacctaaaaagaaacaaacaaaaaattctggagctgaaaaatacaataactgaaataattcaccagagggcgcgggcgcagtggctgacgcctgtaatcccagcactttgggaggccgaggcgggaggatcacgaggtcaggagattgagaccatcctggctaacatggtgaaaccccatctctactaaaaatacaaaaaattagcctggtgtggtggcggagcctgtagtcccagctgctcgggaggctgaggcaggagaatggcgtgaaccccggaggcggagcttgcagtgagccgagatcgcgccactgcactccagcctgggggacagagcgagactccgtctcaaaaaaacaaacaaacaaamaaaaaaaacaattcaccagagggactcaaaggcagatttaagcaggtaaaagtaattattagtttatatttttggtcacagaagaaataaaaat

SEQ ID NO: 834914 - DNA, 618 bp, Homo sapiens
tagctctgttttaaagccttattatgctttgcctaaatgttttaaaacattatgttccagcratgttggatttaattgaaagctgtcttataaaattaattcagtcaaatgcaattggtgaaagttgttgagagacagtggtgttcattttttcaagtgctgaaattctgatggagtttggggcagaggaaaaagagtaagacaatcagtaggaagacaaatatttccattttctttttaaataactggttatgatatgcattttagggtcatgtcccaccactcagcaacaattaatgctagaatattggttatgttagtgaatatgcttctttccacttttttcccagaatatctacaaattatatcattgacaaattgagatgatattcttacaatttactgagtcctttttaaaataaaattttatattctatttagtttttttataaagtgcttctcaaactatctgtaataatcatttatttttgctttaacttctagtctgtcgtaaaccaatacttttgtaaaacacaatgaaaactttctagatgaaattaaacagacacacaatttaagctccctatttttaagtattattaaattcaactgacatta

SEQ ID NO: 834915 - DNA, 517 bp, Homo sapiens
tgcttgcacctgccataggagtacaagagggcaggctagcctaatccagttctacccagctttgcccccatgtgcagttgaaagtggaaccagttctctgcagacaagtccgtggcctgaggcatcatagaactgcatgtaaactaagatcaaccatataccatactactaccaccttagtcaactcttacctgcagggaccacctactggcctggaggttgaaatgcacaacccaataaaaaatccgctgacacaaatgcacagtgcttaggagcaagataagtttcttaagaccaccacctccccatttctgtaggaggcggagagcctactcacacacccagaatgccactactacagttagcatttgagaaaaccacaaacttaggctatctataaccaagaaattcatacaaagttttggcttcctgaaagcacmcagaaacaaagctaaataacctgacttaacacatgttactgttacacccttaagaagtaaaaaactctcatctagac

SEQ ID NO: 834916 - DNA, 559 bp, Homo sapiens
  misc_feature 1, 2, 3, 4, 5, 6, 7, 8, 9, 10, 11, 12, 13, 14, 15, 16: n = A,T,C or G
nnnnnnnnnnnnnnnntttaaaaatgtgttttatttggtcagaaatgtgtctagtaagatgtttacagtcaataaaatttcttcaaattctacaagttgaattaagctttgtataatccccattactctgtggccctagccatagatagtttgatttctatgtgcctgatagacaactagatgaaagcatcttactggtagctggaaatgtagaattcaggccaaggaataagtttaaagaaaggaaaaagtgagttcattttgaggagaaaattgcatgtaattatttatccaaagattgtattgcagtgcctggaaaaaagtgagaactacactaataatacaagggtgattatgaggcaatcagcagaaagtcatttgtgattaggaattcagaaccattaaatttatatcttaaaattacttcaaattttatctgttatatgcgtcygtacttttgcttacatagtaactattttaaagttaatatgtataaggccataatcactaggatatatgaatatatgtgtgcatgcatatttacattttttacaaagat

SEQ ID NO: 834917 - DNA, 618 bp, Homo sapiens
tgcataaaatttgtatgcttaaaattacaaaatgataattttactgatcaaaaaagtgataaataattgaagagatttaccaggtacattgattggaaaactcaacatagtaaagayatcaatgctcctgaaatttatctactggtttaatgtagttcttatcaaaatcccagcctgtgttttgttgttgttgttgtttgggtagacttacacaaacttattctaaaaattatatgggaagaccaaggacctaaaaaagttaagacaactttttaaaagaataaaatggaagcaattcctctttttgatgttaagttacagtaagttgctgtaaggataaatacatataacaatggagcagaatatagaacccaaaaatagacccacacaaatatgcccaaaccttttaacaaatggtactgaaacattaagaaaagctcccacctgaatttcataccttataaaaaaattaattaaaaatatatcatgaacttaaatgcaaaacattaaacttatttaaaaattaattggagtaaatcttcaggagtcaatactaagtgggcagttattatacttgataccaaaattatgatccattaaaaatcaataaattaaacc

SEQ ID NO: 834918 - DNA, 631 bp, Homo sapiens
atatatcatgaacttaaatgcaaaacattaaacttatttaaaaattaattggagtaaatcttcaggagtcratactaagtgggcagttattatacttgataccaaaattatgatccattaaaaatcaataaattaaacctgatcaaaatttcatcttttgctctgtgaaagatcttaagagggtaaaaaacccagctatagaatggggaaaatatttgcaaactatatattataaaaaggaccaatacctagagtatattaagaactatctggctgggtgtggtggctcacacctgtaatcccagcactttgggaggctgaggtggtgtggattgcttgagctcaggagtttgagaacagcctgggcaacatagcaaaactctatctctacaaaaaatacaaaaattagctgggcatggtggcacaggcctgtagtccctgttactccagcagctgaggcaggaggattgcttgtgcctgggaggtcgaggctatagtaagatcaaggatgcagtgagtcaagatcacaccaccgcattccaggttggacaacagagtgagatcctgtctcaagaaaaaaaaaaaagaaaaaaaaaagaactatacaagccaaacatttaaagaaatccaa

SEQ ID NO: 834919 - DNA, 594 bp, Homo sapiens
ccatagcatctgtgtgtgtgtacattttatagattttgtctttrtatgaagaaatatattgaatatccaaataagcataatttctatacaagtgaggtatgtgggttaaaatctagtgaacaaaatataactatacattcatgatttggaaaccttttaacatgattcctgaggaattactcaattgttaattgtttctgccttctctaccaaatgactaatatttggactgaaaagaaaaaaagagaacctcagtaaggaaaagtggaatttctgtaggtggtaactctggaatatcccaccaagagaatgaatcagattaaaataatgactgtagaaatttccttgttagtgaatattcagcctggccttaaggaaaatgtagctctctcttactgctttgtatcttatttcttttactatgtcaattctcaccttagtagaactactactagttctagtaccatggctatcatagatgcaaccattatattccatttagtttcttcctcaggttccctaacaattgtttgaaactgaatatatatgtttatgtatgtgtgtgtgttcactttcatgtatatggtgtatatg

SEQ ID NO: 834920 - DNA, 594 bp, Homo sapiens
ccatagcatctgtgtgtgtgtacattttatagattttgtctttgtrtgaagaaatatattgaatatccaaataagcataatttctatacaagtgaggtatgtgggttaaaatctagtgaacaaaatataactatacattcatgatttggaaaccttttaacatgattcctgaggaattactcaattgttaattgtttctgccttctctaccaaatgactaatatttggactgaaaagaaaaaaagagaacctcagtaaggaaaagtggaatttctgtaggtggtaactctggaatatcccaccaagagaatgaatcagattaaaataatgactgtagaaatttccttgttagtgaatattcagcctggccttaaggaaaatgtagctctctcttactgctttgtatcttatttcttttactatgtcaattctcaccttagtagaactactactagttctagtaccatggctatcatagatgcaaccattatattccatttagtttcttcctcaggttccctaacaattgtttgaaactgaatatatatgtttatgtatgtgtgtgtgttcactttcatgtatatggtgtatatg

SEQ ID NO: 834921 - DNA, 575 bp, Homo sapiens
tagctggggaagcctcacaatcatggtggaaggcaaagaggagcaagtcgtatcttacrtggatggcagcaggcaaagagagcttgtgcaggaaaactcccccttataataaccatcagacctcatgagacttactcactatcaggaaaacagcacaggaaaagcctacctccatgattcaattacctcccaccaggttcctcccacaacgtatgggaattcaagatgagatttgggtggggacacagccaaaccacatcaatgaagctctctgttgtatatgttaatgctgataatgtttttttgttttgtttttgagatagagaaggagatcttagagacaaaaaaggggaagctccattaaaattggtaaaggaagaaacataatatgaaaggagggaaataataaggtaaaagatgcagagactgctttccagacaaagtaagaatgaacttcactttggaataacaaagcagtgcttgcttggcaaggtgagtcttagaatctgactaacatcaacagggcagagtctcaggtaattaacaaaaccaggaaggaacagggagcagcaatg

SEQ ID NO: 834922 - DNA, 609 bp, Homo sapiens
gaaaaattccacataaaatcaggaaaaaagaaataatgttcatctcactactgttcttctacacattactgtaagcactaaccattataaaaagaagaaaaataaagggcataatgatygaataggaaaaacaaaattgtctttacttgaaaatgagatgattatggaaaaaaacctaaggaatacatttcaaaagctactagaactaaattatatatatatatatatatatatatatatatatatatatatatatatgaaatttatagcaaacaaggttaatatatgaaagtgcatgttgagtgttccttatccagatatctgaaatctgaaatgctctaaaagctgaaactttttgagagctgacgtgatgctcaaggaaatgttcacttaagcattacagattttggatttctggattagcactactgaatttgtaagtataatgtaaatattctgaaatctgaaaatgatttgaaatctgaaatacctctggtcccaagcattttttaactcactatatgtgctcatttttttttttaacaaatacctattaagcagacactatgaacaaaaactgtgcaaacattggaaatacataagtaagca

SEQ ID NO: 834923 - DNA, 641 bp, Homo sapiens
tttccaatagcgtgtgctcattttgtgtccctgtgtcacactttagtaattatcactgatatggttcagccctgtgtccccacctaaatctcatgtctaattgtaatcgtcacatgtcaggagagggacccagtgagaggcgattggatcatgggggcagattttccccatgctgttcttgtgatagtgagttctcaggagatctcatggtttaaaagtgtggcacttccaccttcgcttactctctctcttgctgccatagtaagaagtacttgcttccccttcaccttctcccatgattgtaagtttcctgaagactcccagtcatgcttcctgttaagcctgcagaactgagtcaattaaacctctgttcttcataaatcacccagtctcaggtagttctttatagcagtttgaaaaaagactaatacactcacaatatctcaagctcttattattatatctgtcatagtgatctgtgatgagtggtctttgatgttaatatggcaactcttttaattaatatgttaatatggtaactgtcaccatgcaccacacccaaataagacggcaaacttaattgatgaatgttgtgtgtgttctgactrccctgggactgaccattcctcatctctctctct

SEQ ID NO: 834924 - DNA, 620 bp, Homo sapiens
aagagatccttaaattttgttgagaggtagaaaaaagaaattgcatcgtggggcttaacattcgtgaaattttcaaaatgtcaaaaaactgttcctgtgggyctccttattaattgttttgattttcttaaaagccgaccaaaggaaaattgtcctgatgcacttgaaaatgcctctgctcatgcccaacctttttcctgtctaagtattcaatgcagtgagggtaacttggaatgcaaacaaaagttgactgtggccagaaaggcacagcacacttccaatattatgtttgttttgaagcgtctttatatctaagcattatttttaagcatgtgtttatttcataacgtagatttttaatgtggatgatcattcatctaggactgaatacccaatctaactatgtcatatgcattaagtagctacattaatgctgcttcaggtacatcaagacaggcaaacgaacttccattgctgtgccccttaaggaatttaattagacactgcaagccataagagtctggtaagaattttcagagggcaggtgtgtggcattcatgataccatccacagttttatggtagaacatgccttgccttttttttccagtttcctcagtt

SEQ ID NO: 834925 - DNA, 572 bp, Homo sapiens
cttcaggacattggaatgggcaaagatatcttgaataataccccatagcacaaacaaccaaagcaaaaatggacaaatggaatcacatcaagttaaaaagcttctatacagcaaagaatacaatcaacgaagtgaagagacaacccacagcatggggagaaaatattttcaaactatccatctgacaagggattaataacaagaatatataaggagctctaacaactctataggaaaaatttaatagctcaatttaaaaatgagcaaaagatctgaatagatatttctccaaagaagacattcaaatgacaaacaggtatatgaaaaagtgcccaacatcaatgataatcagagaaatgcacatcaaaactatagtaagtagtcatctcattccagttaaaatggctgataaccaaaagtcaggcaataacaaatgctggtgaggatgtgaagaaaagggaatccttgtacactrttggtgggaatgcaaattagtacaactatggaggacggtttgggggctcctcaaaaaactgaaaatagagctaccatacaatccagcaatcccactc

SEQ ID NO: 834926 - DNA, 572 bp, Homo sapiens
cttcaggacattggaatgggcaaagatatcttgaataataccccatagcacaaacaaccaaagcaaaaatggacaaatggaatcacatcaagttaaaaagcttctatacagcaaagaatacaatcaacgaagtgaagagacaacccacagcatggggagaaaatattttcaaactatccatctgacaagggattaataacaagaatatataaggagctctaacaactctataggaaaaatttaatagctcaatttaaaaatgagcaaaagatctgaatagatatttctccaaagaagacattcaaatgacaaacaggtatatgaaaaagtgcccaacatcaatgataatcagagaaatgcacatcaaaactatagtaagtagtcatctcattccagttaaaatggctgataaccaaaagtcaggcaataacaaatgctggtgaggatgtgaagaaaagggaatccttgtacactgttggtgggaatgcaaattagtacaactatggagracggtttgggggctcctcaaaaaactgaaaatagagctaccatacaatccagcaatcccactc

SEQ ID NO: 834927 - DNA, 493 bp, Homo sapiens
gagggaacacttaaaccagccctagccagaagggaattgccagtcccaaaggtccaaacttgagttcccacaagccttgctattgttggctaaagtgctctggatccaaactaaacttgaaaagcagtctaggctacaaaaactgcaactcataggtgagccccagtgctgaactgggccaagagccagtggactgggggagcttataacctactgagacaccatccagggcagctaagagagtgctggcattatccctctcctaaccccagactgcatagctcgcttctctgacagagacaccttccctatgcttgaggagagaagaaggaagaatggggaggactttgccttacatcttggatacaagctcagccacagygagatagggcaccagtaagagtttgaggccccctttccaggccctagctcctagatgacatttctagacacaccctgagctagaatggaacctgctgccttgaagggaagg

SEQ ID NO: 834928 - DNA, 633 bp, Homo sapiens
atgtaattgagactgatctcctgttttggctgcagcatgttattaaagccttcttccttggaaattgttgttgtctcagtggttggctttctgtgtggtgagtagcaggacctaaaccaaactcctggtgttttggtaacagtggcacgatgaatgggactcttaatagaccaggtcaccaggaatccagatctccataccccaggatttcccccactcaaatgtacccttaaaaattgaaataaatttgactttcaaaccctaaaactaaaaagataaaactaattttcctttacataactatgaaaatcctggccaaagaatggaagtacaaattttaatactatccttcagatggaccttttctgccaccatcaggacaaatagtcagaggtcccatatttacaaaccttcatggtcttaagggaagaccctcacctttgtaaagcttgtaaagtagatgccactgtcttaactatgcttagacacctgatccagagcccatggagaagacttggaaactctcatgcacactcccctcagcctcctcctccagaggccaaagagggagaaacagcyaccccctggctcttcctccaggctctgcccattacaagaggtaagtgaaccaac

SEQ ID NO: 834929 - DNA, 595 bp, Homo sapiens
aactctgaagctggtgcactcatgccgagctgtcctctgggcctactgccttcgagcctggagtcctcccattgctgtgtcttggttggttttatagtttctttaagactaaaaataccttgaagtggccccttgccctttattcattggtcagtccaaacctgtggtccaattgcttctctaatgagaggtaatgaaggaggaagtggggaagtcagccatctggactgcaggcaggtgcaggtggccctaggagaagccagaagggctcctgccattgcaactttgcttggtgaatgtactagggaaggacaaggaacagaaacgcaggcatcagctaaagaacagaagatctttagaaacaaagtatttctaatccttatctttcgttgagacatcattagcccaagaaccaggacattttgtcagtggcaaaattcaacgatatcaaggtaaagggcraggtagacatgttgttctaacagtttctaagggcaaatgccaggggtgtgtgggtgtgtttaaaatagatcttggccagacacggtggctcacgcctgtaatcccagcactttgggagactgaggcgggtgga

SEQ ID NO: 834930 - DNA, 644 bp, Homo sapiens
tcgagctatggtcgggcctggtcttcatgagacagatctgtttcattcctctttttaaaaaaattttaaacatttaccattattaagacaattaaaaataaactctagtcagggtsaagtggttcacacctgtaatcccagcactttgggaggccaaggtgggcagatcacgaggtcaagagctcgagaccatcctggccaacatggtgaaaccccatctctactaaaaatacaaaaattagctgggcgtggtggcggctgcctgtagtcccagctactcgggaggctgaggcaggagagtctcttgaactcgggaggcggaggttgcagtgagccaagatcgcgccattgcactccagcctggcgacagagcaagactccgtctcaaaaaaaatcaaaaaacagaactctaatctgcttggatcactctctgttccctttccatttcgctggaaaattagacacagctggaagctacatgtataggaggacatggacgttggcatcagagagatccagtcttgaattccaatttctctccaggcagggcaataaacgcctcgagcctcagtttcatcatccttagaaccaggtttggagtgtcttacaagcaatagacaataaatggtgagttttcgggtacg

SEQ ID NO: 834931 - DNA, 561 bp, Homo sapiens
attcatcttcggacttgctagtttagcaaggggctgtatggttcagggaggatctggttagccaaatcatgggctggttatctcatatttggattggaaattgtagttggttaatgtacttgtagaatcattaactcaaactggttatagtgctgggctttgaaagaaaaactctgatatttctttccctgagaggaaggcagtataattctgccagaggcactaactacagacttcaggactaaccccagctagcaaacataccagtgcaaagagtatgaatggatcactgcagtatatcagcatcataggaagaccagctctaagcataagcccaacctttagctcatatctaggacattaggtctatgttgtctttgaacctcaagcagggtaccagtagagagaatagtgaggaccaaatgagatcatgttcacctacgtacttattcagtgatgtttctgagtatccactattgcccagaygttgtgcaaggcactgggcactgaggacacagacaagatggaattgtgcacactgtttgaggatgcctcctagcc

SEQ ID NO: 834932 - DNA, 584 bp, Homo sapiens
aaggaagaagtcaaattatccttgtttgtagacgatatgatcttatatttggaaaaacctaatgactccaaaagaaactattagaactgatcaacaaattcaataaagttgcagtatacaaaatygacatgcaaaaatcagtagcattcctatatgtcaacagtgaacaatctgaaaagaaattaagaaagtaatttcatttgcaatagctacaaataaaactaaatacctaggaattaacttaaagaagtgaaagatctctacaatgaaatctataaaacattgatgaaagaaattgaagagcaaacaaaaaatggaaaaatattccatgtttatggattggaagaattgatattgttaaaatgtccatactactcaaatccatgcaacccctgtcaaaataccaataaaattcttcacagaaataagaaaagtcctttaatttatatggaaccatgaaagacccagaatagccaaagctatcatgagcaaaaagaacaaaactggaggaattacattacctgacttcaaattatactacagagctacagtaaccaaaactgcatgacactgacataaaaaca

SEQ ID NO: 834933 - DNA, 584 bp, Homo sapiens
aaggaagaagtcaaattatccttgtttgtagacgatatgatcttatatttggaaaaacctaatgactccaaaagaaactattagaactgatcaacaaattcaataaagttgcagtatacaaaattgacatgcaaaaatcagtagcattcctatatgtcaacagtgaacaatctgaaaagaaattaagaaagtaatttcatttgcaatagctacaaataaaactaaatacctaggaattaacttaaagaagtgaaagatctctacaatgaaatctataaaacattgatgaaagaaattgaagagcaaacaaaaaatggaaaaatattccatgtttatggattggaagaattgatattgttaaaatgtccatactactcaaatccatgcaacccctgtcaaaataccaataaaattcttcacagaaataagaaaagtcctttaatttatatggaaccaygaaagacccagaatagccaaagctatcatgagcaaaaagaacaaaactggaggaattacattacctgacttcaaattatactacagagctacagtaaccaaaactgcatgacactgacataaaaaca

SEQ ID NO: 834934 - DNA, 494 bp, Homo sapiens
acaggcgtgaaccaccgcgcccggccccaccctccttctttacattggctcatatggaaraccaaaggcacttggattatacatcgcagacagaagcagccaaaacctacatggcaaccagttgcgacaaatttccaaggtaaaccacaaccgctgggggcctgggtggttttcagctcaaagcgatgaccccaggaacgacaagcggccgccgctagggggcgccgccacttccctgccaggcgaccacccgcggaggcgcgcgcgctaggcctcccaccgcgcctgcgctgaggatggacactagctcgcctttcctcgacgcccagccgtccgggccggggtgaaaaactgcgtgacacgcagtgagcgtggcggccatcttcgtcttctgggcacgtcagctgagccggttagggctgaagaggagcgttgcgcaagcgcacccaagacggtcacaggtaactcccatctgacgagcgaggcgtcgccgt

SEQ ID NO: 834935 - DNA, 520 bp, Homo sapiens
cactatccttaatattctacaatttttcscaggggtctattacttcccactgactgataaatgtctgtcaagttaccatttgatagtaaggcacacaaactcatttaacttaaacaaactgtaaaatgcatcagaagaataccagagacatagccaaacctctcaaagagtagaatcagttgagaaccaaattcgtttcttcacctctctatttctctctgtaaatctagttatccttctctctctttcaatagtggctatttctctgattcttcattaacacagcagagactgactatataagtttcctgtttcctgctttttatcatctggtaattgaagtcctaacaaaaactcaatcaattataagttcaaatttaaaagtcctggtaagggaagtgtattgtcttagcttggctcatgagaatacctgtggtccaatggttacattttggggtcacctgatccactgactatatagctgttgctctgagtataggctttctgagaagagggcaaa

SEQ ID NO: 834936 - DNA, 593 bp, Homo sapiens
taaatggctatatattgttatttgcactacaaattccaggactatgaaaataatgggtgaggcagctagtaaggaacaaaatgactttttaaaaattgtccctggggatgggtgggggtatcagctagactccagggtaagattgtcttccctctctgtccccttctcatctccctttcctgctgagagctactttcatcagcaataaaatcccctgcatttaccatctccaatttgtttatgtgacctcattcctcctgaatgccagacaagaactcaggagcgggtgcaaaaagctgttgcactgatcctccactgagctgttaacacttaagtcatccatagatggcaaagctaaaacagcgctgcctgtaacactctttctggggcttcagggatcaagggcacctccctagatgctgctgtggtggtgcagggagttttgctcttgttggcacccaaaaccagcagccctggctcctgcacctgctcatmtgtgctcctcctcctgcaaagggtggaatatagtgggaccgagcaagtggtatccatctctgctgcagtgaagcagctggctagttctagcacccatg

SEQ ID NO: 834937 - DNA, 590 bp, Homo sapiens
aaagccaatttaaaaagcctctataaaataatcattcttggatttgatggcaagatggccaaataggaacagccctggtctgyagctcccagtgagaccgatgcagaaggtgggtgatttctgcatttccaactgagtacccagttcatctcattgggactgggtggacagtgggtgcagcccatggattgcgagccaaagcaggctggggcatcgcctcacccaggaagtgcaaggggttgaggaattctctcctgaactcaagggaagccatgagggactgtgctgtgaggaatggtgcactctggcccagacactgcactttttctaagaccttcgcaacccgcagaccaggagattccctccagtgcctatgccatcagggcccagggtttcaagcacaaaactgggcagctggttgggcagacaccaagctagctgcgggagatttttttttttccatatcccaatggcaactggaattccagcaagacaaaaccattcactcccctggaaagggggctgaagccagggagccaagtggtctgcctcagtgggtctcacctccacagagcccagcaagccaagat

SEQ ID NO: 834938 - DNA, 493 bp, Homo sapiens
agagttactggattctggagtcacaggcttggaatcagataagacctgggaaaccttattctatagataaggaaactgaggcccagaaraagaaaatgactcctccagagtcacagttaggggtggcattggagttttaaaaaatcctcaaatgtttatcacaccccacactatgtcaggtcctaggctagacattcaacgtgtgttaactcatttaagcatcactgtttcattcctccctttttgctttgggatgggaatccagggttgggaaatggaaggatcaggatctcggaatctgggaaggattttcgtgcatttatgcttgaacagaaaatgagctataaatattatataaatgatcacagtctgttccctggtctcgccaaccgttctcagcagtagagaaagcaacaagctctttcctcatggcctaggggaagaccttggtttcctgaactccagacctattccatgtcattaagagagactg

SEQ ID NO: 834939 - DNA, 627 bp, Homo sapiens
aatgagatgtaagcaatgtgatcactgcttcaccagtgagaaacctaaggtgccaagaaatgaagtgactcacyaagctgcactgcttacaaatggcagagccaggatttgaaccaacagaactcatgagtggtgggatgagaatggtgtgtgtgcatgtgtgcatgtgtgcatgtgaagagggtgagagaagaccaattaggttaatattttattggctaccatttatttaacacttaagtaagggttaaataagtgtcaggtcagaacatcagagcctcagcatttagatccactaggctatattcagctcagtgcctgaaataggtggtactctctaagtgctgatcttaggctgatggaaagtagagtgtggttgcttaagaacacagattttaaagcatagtagatttgggtccaaatcctggttctgacacttgatgtgcttttattgtcacaggtaggaatcattatccccattttccagatggagccttattcttctctcagagccttattattccaactagaaaatggggataataattcctacctcaaaggactgttgttggaatcaagcaagaaagtgttctaaagagattagagagaggtactaatgccatatcc

SEQ ID NO: 834940 - DNA, 523 bp, Homo sapiens
ctcacttaccataaggtagtaataaaattaataatagttactactatatgatcattatattataagcaggtattacacatamagaattttcaacatttaatcctcccaataagcctatgtggcaggttttattatttccattttatagatcagtaaactgaggcgttaaaatgttatgtaatttgccaaagttcaaaaagctggtaagtctggtactaggattcagtaccaagcagtctgttttaagacagatgattcaagagtatgatagatattagaaatacagatatatctgccagaataacaattaaaatgatagaaaaggctcttacttgggacagcaaccaggacagggatggtagagggaaggtcagagactagagactactctttgctttttttgttttctttttttttcttttaaagctattaacactactcaaattttaaactctggatacaaatgactttgataaaagtccttaaaactattttgacattaaattatttggtattccacaaa

SEQ ID NO: 834941 - DNA, 603 bp, Homo sapiens
ccaggtacattaaagtgctcaaataaatttcttctaagtggaggagaagagggatgtatrggtggtggaagggttcccatgattctaagtggcttccctgggagggacatgtttagtcagatttaggagatagtttatggaaagatagggagcaaaatataactcaggataccatgtctcactccaaaatcagccataagcctcccactgccatatctacttaacactccacagtcagcctcagaccctctccccaccatttcacacttcatcataaacacaaatcctcctccatacaaccaattcacattccacatcaagcaaaaattgtccctccttacaatcactacatattctgcagtaaatccaatcgtctgacccaacaggcattttacagtccacagcaaactacaatcttacccttctcagacctcctcacctcccgtgggaagccctaacctcctcccccacagtaattcacctttccacaggaggcccaacgcttcacaccccatagtaaaattctcacgcctacagccacttcacacttgctagcaatcctccatgatccctgcccacaccacctcatgttccaagaagaac

SEQ ID NO: 834942 - DNA, 626 bp, Homo sapiens
tattccttaaatgtcctggcacattctggttggacaaattatatgtttttttaagctcattaagtcattattgttttcaaccaatacaattagttgaaacartaatgactgctaattaagtcaggtttgtccaaagacacctatctatgaaataaaaactcctagcgattgaaatggtagtgtttgctagtcataattacttgattagctagggttcggtactcaacaaggcaattgttgtttctttgccctttttaaaaaaatactttaaattctggggtacaagtgcaggacgtgcaggtttgttacacaagtatacatgtgtcatggtggtttgcagcaaaccaccacattcatcattttcttttttctatttttttatgctcttttaaaaggccccacatccccaacaattctttataataaattcttattttaataattctggatttttaattacttaaataaaattcagtctataaaataatattcataaaatatatgtacaaaagacagtgcatgtgtacccatctcatagctttaagaacagaatattgccttttacttggcagtctcctatatgttcacccaaattctaatcttttatttctacccccatccaaaat

SEQ ID NO: 834943 - DNA, 571 bp, Homo sapiens
tcaataaatgtatcaaatggatctccatggaggaggatgtcatgagtatgatgtcatacctgtgcttctgagtaaagttggatgcaattaagatcttacctacaargattgtgtgtgatcacaagaatgttgatgtagcccatagatagctaggtaagcaccttcttttgtgtcacttaaaaagtgaaagcaaacgacatccaagattctattgaaataaacactaaatggaatgtaatagacaaatctacaactacagaagagtcaaagtatttatctgttgctggttggatggatttggtaatttaaataatcgtaggtatgggcaccttaattggtatgactagagcattagccttatagcaatccactatgaggtgccatttattttttcaggtttagaagtaggtcaaattgggctgttaattagagaagcagcagggataaccaactcttctttaaatgtcttgtataatagggtttaatccttggaggttctgctttactttatatacagcttgataacctgttttatctgcagtaagatccatagggtgccattttatcaaac

SEQ ID NO: 834944 - DNA, 571 bp, Homo sapiens
tcaataaatgtatcaaatggatctccatggaggaggatgtcatgagtatgatgtcatacctgtgcttctgagtaaagttggatgcaattaagatcttacctacaaagattgtgtrtgatcacaagaatgttgatgtagcccatagatagctaggtaagcaccttcttttgtgtcacttaaaaagtgaaagcaaacgacatccaagattctattgaaataaacactaaatggaatgtaatagacaaatctacaactacagaagagtcaaagtatttatctgttgctggttggatggatttggtaatttaaataatcgtaggtatgggcaccttaattggtatgactagagcattagccttatagcaatccactatgaggtgccatttattttttcaggtttagaagtaggtcaaattgggctgttaattagagaagcagcagggataaccaactcttctttaaatgtcttgtataatagggtttaatccttggaggttctgctttactttatatacagcttgataacctgttttatctgcagtaagatccatagggtgccattttatcaaac

SEQ ID NO: 834945 - DNA, 612 bp, Homo sapiens
ctgtttttaacatctcaaacaaaagcagtttcataaataagaaatattgcaagtgatgagtatttaatttttaaaggaacaattgtttgtcatttctaataaagccagggaaatatgtctaaaatcaaatgttaaattgcatttttaaaaataacaaaaccaattaccatatgtgcattatgtaagaatcatttttccagacacataaaattacacagtatcttttcttttctaaggaatagtttctacccaaaaagaaggcccaaatttatatagtcaggtttaaaaaaaaatctcattcactctaaaaggtatcttcttgatgttcatgagaacttcaaataataattaaaatacatataaaaataaaaagaaaactaagtttagtgattggctacttcactgaagaaataatcaaacctccacataaattataaatgagcttaaatgcactgataaacttacaaaaacatgaactataatccaccaaaaagtttatgtgaagaaacaaaccaagacaagtkgctgagtactttatttgacttttgtttgtggtcatttgatgaaccaggtgaacttactttgatttttaagagatattgaggacaatat

SEQ ID NO: 834946 - DNA, 632 bp, Homo sapiens
agttctgaatgcttcagtttacttttaatcagcagcatttgtgcaaattgctgagatttcagaagtttccaagcataatgacccagaacttgagaagctctgacatttttgtactgcctgagtgtgcttctrgaaaggaaagtaacaagtgatatggcctccatcaagttctctggatatgaccatcacagtgaagccttctgacctcaactggtctgagaatggcttgtcatgagtccacgataagaacagaagtcacgtgtgagcatttagaaacttttacagcactttgacattgccgctatatctgagcatgtgatcagtgtgattgtttgtcaaatctagttataaataattgagttcattttctttatattttgctttactttttcacttcctttttgtaatgctttatttttattgcattccacaaagtgtgcaatggattggaaattaaaacaaacataaaggatagctcttcatcacaaatagaatgagaagtactgatctaaatgccaaccacttggagagttgtgtagtctgttaccttctgttcagaatccatcatgaacgtgtcacactttcagtgactacaccgaactactagatgtttggcttcactaatgccaaca

SEQ ID NO: 834947 - DNA, 592 bp, Homo sapiens
tccagtgtaagaggatttcaaatcgctgctgaaaaaagggcttgttacagatttctaagcatcctgtatcagaaaggcccagctacttacacartcgctgaaactaaaatgggacaggaccagacacatggaatgaaagagaccaatttagaccaagtgaaaggtatcaacttctcttaaaattagccttttattctagagagagatcttacacagctccaaaagcagatagaataatcagtatttacatagttatggatctctttgtatatggagatgggaattattttgtaaagatttccattgtttaaagcagttggagacatagtgttgggaagagcagttatttgggtgtttatagacatgcagttagagaccccaaatacttacttacaagtcacgtgaccttgaagcattcaaaataacctttatttcccctccataataacattttcggatctcagtcctgcactctcttgggattgttctgaagatacagtgagagaataccaaaatactttacacactacaaagcattatgttattaaaatttatattatcactagtaacaataaaaataaaacatgactgg

SEQ ID NO: 834948 - DNA, 608 bp, Homo sapiens
tgcctgacttgatatgagcctatccagtgagctcagtcatccagcaattagagactaactgtgatggatgaacacattaattatttggcaactctgccaggcactgttttggacattaaagatatggaggcratcaagatagatatggtctcttccttcatggaacttttggacaacaggaggctagagacatgtagcagaaaattttatcccaactctgataataactcagacggagaaagcatgcttttgacatattatacaagatcctcctacactagctgcagataataaaatatgcatttagaatcctttccatagtatttaaagtgccgatgaaatggttattcataatgttttatctgctatctttattttattctttttaattttccttactattaatattaacttctctggtaaaagaagaaaaataaaataaaccccttccaaatttttgtgaagccaggagaaaaaaaaaaaaaaacagagatatccactagcaacttgcaaagacaaaagggagttctaggggtaataaaacatacacttgacaaccgatattatccactggtgagatattgttcataaatccacagcctgaaatt

SEQ ID NO: 834949 - DNA, 641 bp, Homo sapiens
ttcaagaccagcctgggcaacataaagagacctcatctctacaaataaaaaattatctgggtgtggtggcgcatctctgtagtcccagcttcttgggaggttgagggggaagaatcatctgagtccaagggttycaggttacagtgcactatgatcatgccactgcactcagcctggacagcagagtgaaatcctgtctgaaataaagaaatgaaaggaaagtcctagttttatagaattcttgggatatagtacctaagtaagagctctctatagtaacatgttctgatgacacctgttttgctatggcacgccacctcccacctggttaaaagcatgtattttgcttatattttttaatcaggattgagtgaccaagtctattggaagggaatatgttgatcccttttccaacaaagaagacagggtcatagttagacctagtcatgggaaggaaagaccgcacaggagtctaggaaagtctagccgaggaaagactgcacatttattgtaaataccatgatttggggtaaaactctatagcttccaaattttattataagcgtagacattaaaaaaaaaagatgaaaatcaccccagggtccaagaaaatcaactgagggagtgaggcatctcagtct

SEQ ID NO: 834950 - DNA, 651 bp, Homo sapiens
attatattaaataaaaaggctggattaagtaaaaaaaaggtaagagctttgaacagtatctgtgcaaagtaaatgtgtaataagagtgagatattattaataccattattattgttatggtaatttatagttgaaatcaattcagtgtgactgaactataatagtatgggctgttaggcccaatataaaaatatattttatggtaatatgacaaatatctgaaaatccagatgttttcatttttttcaactatgaattcctacagttctatacttacatagatactctatataaagaacagttttttttcccggacttttttttcttatcattggttttagccaactacaggatgttgtgcactctgtttaaacttgtagggaacatggcattatttctcaggtgttgtggccatataaagaaggcattttaactttattcaaaattcatattgggaaaaacatgaatacatatatatataatacaagcagaatgtcatgagttttatgagaggtttgaagagccatggaaatgctgagggcaaagatgaattctgtttgaagggatcactgcctccagatcgctaaaatagtttaccagttgaaattaattattcctaatgaccmtcaatacattttttttgaccaagtc

SEQ ID NO: 834951 - DNA, 577 bp, Homo sapiens
ataatatatcattattcatattaatgaattatatcatatacttaatatgatataattcgtagtatcctaaggagatgttacttctaatatcacagagggtgtattcccakttatattattggtaatattctactgaggtgttacacctaatgtcacagtgggggtacaccatgtgaaattattcaaaatattataggtaaaatgttactcctaattccaaagtagatattacaaaggattgtacaatccccgcgatatggggaataatatcaccctctcacccgcggatattacgaaccatatccagacggttgtacaccccccgagatacggggagtaatatcacctctcacctcctggatattatgaaccatgtcacagggggtgtacaccccccgcgatatggggggtaatatcaccctctcccccctggatattatgaaccatatcagaagggggcgtacaccccctacgatatgaggagtaatatcaccctctccctctctggatattaagaaccatatcacacatcactggtttcaggactatttcaaatgactgaccattagtgtcttat

SEQ ID NO: 834952 - DNA, 602 bp, Homo sapiens
aagggaagggatagcattaggacaaatacctaacgcatgtgggtcttaaaacctagatgaggtgttggtaaatgcagcaaaccaccatggcacatgtataactatgcaacaaacctgcatgtcctgcacatgaatcccagaacttaaagtaaaataaaaaaattattctgcatgaagaaagcaaatctgaaatgactcttattgcaagattccatctctataacaatcatgaaataacataattatagaaatagataatggattagtggttgccagtagttaggaataggaagggagatgggtatggccataaagaggggacacaagggagtcgtgtagtgatggctcagttgagtatcttgattgtggtgatggttacacaaagctacacgtgtgacaaaattgcatagagctacacacacatacccagcaatgatgcatgtataactggtgaattctgaataaactctggattgtgccaatgttctgttcttaatgttgatattgccctgtggttttgtggaatgttgacagkacttctttgtacatttctttgaatccataattatttcaaattaaagtttttaaaaactaatgaaaca

SEQ ID NO: 834953 - DNA, 589 bp, Homo sapiens
tgctaagggccaggcatctgtgggttctgccctgaaggcttccctggcccactggctgtagcaggccagggttgggggaaggctgtgcaggccagtgagcacacggagcccaggacctgcagctcagaccagyttggtcatgttctcctcgcccagtgactggggcccccgcttggattctcacagatgttccctgacatcagcaactgcagtcatggctcaggatttaggcctgcagaggttttcagccttgtcccagggcagggtgcgccagatgggcttctgtggccgccagcacttccggtagctgctgaggccttctgcacacccagccctgtgggcatcctagccgccccaacaacacaggctgagcccttttctggtagtagttgggtggtgacaccacccccatccactggtgacatcatgcttacagagtcaaatgcccagcccccggctgccaggccaatgccacctgctggctctaatgccaggcccaggttatgcacgaaggtcccatccctctgcagctgaccgaggcataaacagaagccctcatgactggggatgagctgctttctctgtctgt

SEQ ID NO: 834954 - DNA, 646 bp, Homo sapiens
aatgccattccagggtcaggaaactcaatttgagcagctgcttatcctgtggcccaggtttattttcttctttatatattcagatttatttattttctttttwaaaaaaaattatttgttttgagactaggtctcgctgttgcccaggctggagtgaagtggtgcaatcatggctcactactcctgcgctcaaacaatccttctgcctcaagcctcctgagtagctaggaccacaagcgcacaccactatacccagctaatttagagatggggtctcactatgtttctcaggctggtccccaacacctgggctcaagcgatccacccaccttggcctcccaaagtgctgggatcacaggtgtgaagcaccatgcctggcccagatttatttctgattcacagaaggggaaaaacactgcagaataataatttcccccaaattggcttctctgctcaagtaatccatatgacagaataactctaccatgcttccagtatcaggtgggtgtcaaaacaagacttttttttttatttttttgcatatcctttggaattctacaatactaattcctaggatggaaacacagagattatcttagatttgtctttacccttatgtctaatatgtactaaaaagttttacttt

SEQ ID NO: 834955 - DNA, 610 bp, Homo sapiens
aattaggacatacatttcattaaacatgaaatcatcagttactctagaggttttgcctttatttacaaaactcactgcccttagccttggtctgagacccacattctctgaaaatgtgtccttgactttatgcaacatccttctgctaacattacctcactgcacctctaatacccagggaatggttagcataaaggttgcaaactatagctattaattgttctcattggcagatctcagttccatttttcatttagagtaataaaaaagtactcatggccaggcgctgtggttcgcgtctgtaatcctagcactttaggaggctgaggtgggtggatcacttgaggtcaggagttcaagaccatcctggctaacacggtgaaaccccgtctctactaaaaatacaaaaatcagccaggcgtggtggcaggagcctgcagtcccagctactcgggtggctgaggcacaagaatcgcttaaactcaggaggcggaggttgcagtgagccragatcatgccactgcactccagcctggacgacagagcaagactccgtctccaagaaaaaaaaaaaaaaaaaaaattgaaagggaaaaaaaaaaacaaaaac

SEQ ID NO: 834956 - DNA, 617 bp, Homo sapiens
tgctgtcttaatgaaatggttatgcctcattttttcctttttatctgccctattgccaaaagattcatgactctttcgcaactgaggagtgctgctggaggtatttcggccagacctctgaaaatgagatcttattagcttttatagatttaaacgtgctgacatgttataaaaattcaagaatcaatttatatatgtgtgcaaatgtgtttgtgtacacacacaaaatatgactgatttaggattttgacgacataatatttctaattgctcttagttgaaaatgttcaactttatgacagtgtaaccttctccgttctaatgttaattcttaacaattaaagtgcatgtgttaatattaaagcatatatatagatttccccacaaattttacatacccgattatttccaccaagactattatatattaatcgaaaacgtttcctagtataggtgcatctgtaggttcctcccatgagatattcaataacaagtcctatatcaatcagagtgatcttatatcctggaggaagatttccctagaaacaaaacatttgttttaaatagatcagatagsacttctcaatattgccatgccctgcctaggaacaggccta

SEQ ID NO: 834957 - DNA, 556 bp, Homo sapiens
acagggtagtaagtaagcccttaatcaaaaggcctttgaaagcagaagaagcaattttcattccartatgagattttaagttctccaactcttaaggatttgaaatgcgaaatttctttatgttaagaaattgtttttaagaacatgtgcctggcatatcccatgtcaggggaacataccagaggaactatagacataattcctgatgccagtaaaagcaaaaacaaataagcaacagaacagatgctagagtgtgctcaagttattcagtagcttgatgaggtacttttttctcatattgggtttttttgattgctgttttgctttgttttaaggtagtgtctcgatacattgcccaggttggtcttgaactcgtggacccaagcgatcttcctacttcagccttctgaatagctgagactacgagtgcacaccactcacctggctcagattagtttttaatcttcttgtcttttcttttctttctgaaactgggtcttgctctgtcacccaggtgcagcggcatgatcttggctcactgcaatctctgcatcct

SEQ ID NO: 834958 - DNA, 625 bp, Homo sapiens
gacactataaacttcatcaacaggaaagccctcgccaaaaaagagcagttgaggaaattttaggcaggaatataaaattataataaatcagaaatgtagataagaatatctgggaaggarctttggccaaagacaatggctttgtaaaagaaagaacattttctaaagctatggttgctgtaacaactagcccaataaggtttactttccagcaaaagatttaaaagttcaataagctaggaaattacttttagatcctgaagttaaaagttaaggcccacagagattaaaagttaataatactaagagtcttaataaaaatttattcaaaaatctttttaagaacatttcaacactaaaaatagcagcaaataaagtgagaagcatgacacaagcagaaagcaagaagatgggtgcagttaggaaggcacaaacagcctgaaagaagtttcagctttccacaatctacctcaaatatactcttacaaattgtagaggacagagaagattgaagaaaaaaagcctgaagcaaaactccacttaaaatgtctttattctaatgtgaagttgaggctataaagacattgccagcatcacagattcaacaaatttatttagaattcag

SEQ ID NO: 834959 - DNA, 625 bp, Homo sapiens
gacactataaacttcatcaacaggaaagccctcgccaaaaaagagcagttgaggaaattttaggcaggaatataaaattataataaatcagaaatgtagataagaatatctgggaaggagctttggccaaagacaatggctttgtaaaagaaagaacattttctaaagctatggttgctgtaacaactagcccaataaggtttactttccagcaaaagatttaaaagttcaataagctaggaaattacttttagatcctgaagttaaaagttaaggcccacagagattaaaagttaataatactaagagtcttaataaaaatttattcaaaaatctttttaagaacatttcaacactaaaaatagcagcaaataaagtgagaagcatgacacaagcagaaagcaagaagatgggtgcagttaggaaggcacaaacagcctgaaagaagtttcagctttccacaatctacctcaaatatactcttacaaattgtagaggacagagaagattgaagaaaaaaagcctgaagcaaaactccacttaaaatgtctttattctaatgtgaagttgaggctataaagacaytgccagcatcacagattcaacaaatttatttagaattcag

SEQ ID NO: 834960 - DNA, 554 bp, Homo sapiens
tatctatcttcacggttgtgcattgttattgtatatacatttttaagckcattgaacgaaatcacgcatctttataaaacagcatagaagtaaactttttggtatatatgtatgtttgtgtgtgtatatatatatgtaaaactgtggtggacagggattatttcattagagagagttatgaagacaattgtcctattttaccttcacagtctagggaaattgggcactggccatgcagttgtgttccacaattcctgctaagtacaataggaagggtcggctttatgagtaagcgggaaggcagagctctgtactgtacaagggccttgtagtgttttttgtcacactgcccgggagctacatttacaggtctaaaaatttggggttttgaatttttttttaagtgctcccaattcaaatgccagtaacactaggaatccatatcacacgactctggagtggggagtgcctcattaagccaagtacaaagatgtacagaaagaagatatagtctctttctggtaggaagtcagagtcaatgggggttgcagaag

SEQ ID NO: 834961 - DNA, 554 bp, Homo sapiens
tatctatcttcacggttgtgcattgttattgtatatacatttttaagctcattgaacgaaatcacgcatctttataaaacagcatagaagtaaactttttggtatatatgtatgtttgtgtgtrtatatatatatgtaaaactgtggtggacagggattatttcattagagagagttatgaagacaattgtcctattttaccttcacagtctagggaaattgggcactggccatgcagttgtgttccacaattcctgctaagtacaataggaagggtcggctttatgagtaagcgggaaggcagagctctgtactgtacaagggccttgtagtgttttttgtcacactgcccgggagctacatttacaggtctaaaaatttggggttttgaatttttttttaagtgctcccaattcaaatgccagtaacactaggaatccatatcacacgactctggagtggggagtgcctcattaagccaagtacaaagatgtacagaaagaagatatagtctctttctggtaggaagtcagagtcaatgggggttgcagaag

SEQ ID NO: 834962 - DNA, 472 bp, Homo sapiens
accctctgattactgcagagtctccaaacttcaaacagattttcatgccccgaaccttggcctataccagtgatcctcaaggttgtgttcctcggtcagcgacatcaacatctcccrggaacactgcagaagtgaaggctgagattccaggccagggccaccgtccttcagtgcgtggtaccctgcagtccttctctaacgagacgtctggatgaacctgagctgcacagaggtgctctgtccaaagcaccctggcacagacattgatttttacccagccattagtcacccatccctcaccccttcatccctgctaacaaaaccctggtgtctctcaggcggtggtgaccttgatttgagctcccctgagctgagaccagttctggcctcccattctcccttccccgatgcctcttccccacttgccttgagactcaaactaagggtaaccagttgccagggctctggctgg

SEQ ID NO: 834963 - DNA, 658 bp, Homo sapiens
ccctgagctgagaccagttctggcctcccattctcccttccccgatgcctcttccccacttgccttgagactcaaactaagggtaaccagttgccagggctctggctgggggtggctgggaagcctgccacatctcttctgtgacagctttttctcctcagcaaaagcaaagcctccttttctgcctggcccacttctttccttcccgagcagcttctgcatgaggacagggtgctggaccagcagtggcttcatgcaacatcgagggaaaagcctggaaccccaggatggccaagctgctggagcaagcctggcattgccagacccagtgcctcttgttaggagggataaccaggctttctccttaagccctgttaattggatattctgttactagcagctgagcacatcccaaatcatataaaccttgcaccttctatagctactgaaattctaactatctgtgaaggtccacgccacagcgctgtccactggcaatcctggcttttaccccagccgtgatgctggaagatggtcacagctaaagaacctccccatcccaaactgtgtgcgccaggaaaccacttatagcaagaagcccycctccccaaataaggcgcatagatgccccctgtttacctatggcaagaccaggcac

SEQ ID NO: 834964 - DNA, 607 bp, Homo sapiens
acaaatctcaacctgaattgtatctcccagaattcccatgtgytgtgggagggacccagatggaggtaattgaatcatgggggcaggtctttccagtgctattctcgtaatagtgactaagtctcctgagatctaatgggtttatcaggggtttccacttttgtttatttctaattttctcttgccaccgctatgtaagaagtgcctttcacctcctgccatgattctgaggcctccccagccatatgaaactgtaagtccaattaaacctctttttcttcccagtctctgtatgtctttatcagcagcatgaaaacagactaatacatagctcattctacgtaagtttacagtacttgtgttttgctcttctaaaaagtcaacagaaatatattcatcctcctgttggttattttctgcttgttaagacatatgtaaggcattgtacactgtgtccattttcaatgttgtttgtcttaataataatacttttcagattacagttacattttctctcatttgatccttctcataaccctgggaggaaaatttatgatctttatcataaataaactgttattattcccagtttacaaagaagggtgtg

SEQ ID NO: 834965 - DNA, 653 bp, Homo sapiens
caaagctgatttgaacttccttatatttgctccttgtatagcagtttctctcctggctcatcagctatgcaccttcttatttttaaaaattatacctatcttccctctggcagctgtactgggctagcctggctgaaccatcagcagttcatccatggtcgcctattccacatcccctccaacattctaaagtgtacttctttgtaatttttgtcacagtaaatagagttgcacctttaattatttgaattagcatttttaaattactgagtttgaacacttttaatagacatgttagccatttagacttctttatctgtcagtaggctatgtatagcttcagctcttatttctactccatttagtatatttttttcagaaatcctattttttattacagctataaattatgtgtcagtttcagaaagtgtggaaaatattttcctggctcatcattaatttaattgctatgatttttaataatagtgacacagttaggctttgtgtccccacctgcatctcatcttgaattgtaattcccataatccccataatctccacatgtcaagggaaagactaggtggaggtaattgaatcatgggggtggtttcccaatgctgttctygagatagtgagtaagttctcatgagatc

SEQ ID NO: 834966 - DNA, 620 bp, Homo sapiens
ttgtatatttcaaaatagctagaagagctgtttctgagtgttctcaccacaaagaaattataactgtatgaggtgatgaataggctaataattaccctgatttgatcattttgcaacatatacacatataacattgtaccccataaatatttacaattaccatgtgtcaattaaaaataaatgaaaatttcaaagacaaaaataactgcaaattaagaagactaaatccatcaaaatattatttataaattgaggcaaaacaaagatattttcagataggtaaagcctgaaagaattcacatccagcatatttgcactataaggaagctaaaaagacgttcttaagcttgatggaaaaagatgccagaagaaagcccagatctataaggagaaataaggaaaatgagaaaagaaaaatatgtgaataattatagggcacctttttatttatttatataggtatctgttttgacaagtgtgtacacacacacacacgcgcggaggcaattggctgttaaaagcaaaagtaagcatggattttaagtattcagaattttaaaacaatatcagaaragcacaaaggataaaaggtattatgaatggaattataggtcctatcc

SEQ ID NO: 834967 - DNA, 514 bp, Homo sapiens
cttctctctcctgtctctaccctggaggaatttcctttgggtctgagacaattctttccccacctctgcttccttcaaagtccstctatcttgtctcaataagcctatgcttttggaaataaaagccaggaaggggccttgaagggactaccacttcctgccctgcctcaaatctcccctgaggtaaggaggccaggatctcctatctgctcaaatggcagaaaggaaggagaactccagagagaagaatttaaactgatttcttcaaagcttctcctgccagaattgaatatgccgaggagctgtatcacttctgtagcattcctgccaatatgccctaatctgaatctaaccatgaagaaacaaccaaattcgaattgaataacagtctacaaaatgtctgcctgtactcttcaaaaatgtcaatgtcctgaaggaaaaaggtcaagcaagtcttccaggagaaaggagactcagaaagacatgacagctcagtgcagtggggatcttgaac

SEQ ID NO: 834968 - DNA, 654 bp, Homo sapiens
cccttgaaggcaggcttccttcagatcttcattgccttgcacaatgcaagggtaggtacttccatcttaattgaatttttacttcccataaaaattcttcatggtgacttacattagtcatcattacacatcaccgtcagttttgtaagcacagtgtcattcaaggtattgtaaaattttgagtttgatgatgtgtgacagtttcaattattttagtacagccctaatgagaacaaggccgtagtattgattcccttcaaagttggcgtctaagtgaaggtcacattcacaaggagggcctaactgaaagcatgtggaagcatcattataaactgttgctaacacgcacaaataaaggctattaataggtattgtttttctttttctttttcttttttttttttttttgagtcactctcactccatcgcccaggctggagtgcagtagccccatctcggctcactgcaacctccgcctctgtttttcagctccttagttaagcatacagctccagtcaaaccaaactagaggtctgtctgtccttccattttacttgctgttttatgtcttttaaaagcaaraaggttttcaaactgttcttaaagccacggcttaaccaggagtccctttaattaaagcaactgtacctttgt

SEQ ID NO: 834969 - DNA, 672 bp, Homo sapiens
ggtacacagtgaatgaaactgttgatgcaacacctttgtgctgcttgtgctgtgagttactccactcagcagtgggaaaagccttcatccaagcagcacatccaaagagacctatcaaggtcactctrtgaattttgtcatgattgtctgtaggaattggccgcatgaggctggctccatctatggccttgatcagttgcagcaatctgccataataaaatgcatgccaacttgtgagctgaaaaccttcacttagttgcttgtgggattttttttcttcttttgccaaagaaataaatagaatcaaatgtttacatatgtgtgttatttgtctacattgattttgtattttctcaaaggaaaatattgatttctgagttataaacatgggtaacttcactgatcagaataagttaatgacaggcatgtcagtgaaataatcaaggcacaaaaccaccatacatttctgtttaactgcctatgtagcctttcaaagacgtgttaaatagtcttcttttaaatagataaatttataagaaataattctatcgcacagattttaatgtcggtggcatattccatctggcttacttttggcactgaggagatgatattaatctttgctaattgtacttcgtactcactattgcctttagtcaatattatcttgtg

SEQ ID NO: 834970 - DNA, 619 bp, Homo sapiens
gctgggtgtcgcactagaagaagagcagaacttatctgccttgcagccttggttctcagggaagggtgctgacctgcccaaggtcaaagcaggtccagaaaggccacagtcctggctcggtgctctcccagctcctgcatgtagcctgtcctgtagaaaagagaggatagatctggccagagctggggctgtgggcaaagaggactggatgctctcttggcaacatcatccaaggctcaaggaccaggtaccctccagggggagttgggggagggtgctggtccagagatttggaatctggtacttttctgcctctaactttggtcaagtcacagtggactttacagttcttatctataaaatgaaggggttgggaggtatgatatctaagaactttcattcattggttcaaccaatattcaaccaactgcctgccactagttaggcactgttcagcccttgaagatgaaataatttttaaaagtgaacatttacatagcatttactatgccagacactgccttaagaatttatayataatataaatataatataaaagatattataattattatactatgattatatcaatatattataattataatattatataata

SEQ ID NO: 834971 - DNA, 513 bp, Homo sapiens
ggatataaattcttctttactgggaacagctgttgttcactcagatatggcacaggagtaatctgcaaacaaaccttactcaatgactttactcccatatatttgccttcccacagtttcccacctctggaaacctacaactgctttcctttgtcttgtcacttctctaaaatttattgttctttgttgaagataccatataagccagagttcgaagccactgcttggagttacctttgcgaacagaaaatttcaggaccttcaaaattgattatgccaaagggaaaagttaagccttgaaaacggagtcatataacatgcttgtttttcttctctgatgcatggctgtttcttcctgacttttgtgttgagagttatattttactagattttctgttcttcattcaaacctagactaaatgacagagacccttgtgactgttacctcttctyaacagaatattaagcaaactccttaaaatgtaattaagagtagccagtcaatcttatatc

SEQ ID NO: 834972 - DNA, 560 bp, Homo sapiens
acttctcttttcttatctgtataacaggatgaacgatgtttactttatgcagttgctatacaggtgaggtgtacatccagcatttggcacagtacgttcattaagtggatggcagacctattcttagcattycatctttcctctaaatgtccagcgtagcctagtgccagaaattttctgagcttctccttcctcagtattaatccaattcaacaaacattgcccgagcacctatccctgccaggaattgtgtgggagctgcagattaggtgacaaagacaaggtccctgtttctgaaaagcactgacaattacttgtgacttcatacagaattcgtggaatagaaccaaggaactaaagtttacatcaacagaataacaggaagataatctgcttcaaaatgagccccattgttctgtctcattgcttgagtttggtgacttaaaagacaagatcctctgctaccacttagctataggtgggtcattgttgaagccttagtttcctcatccgtgaagttgggattgtataacttgccttgcctgtacctctaagccttg

SEQ ID NO: 834973 - DNA, 594 bp, Homo sapiens
ctcatttgcagagagaacaggaatagcagtttttatagcttaaggcctggaagaaactgctttttttctgacaatcataatccactcatgctttaaaaacatgtttcaaaatcaaaaggactccaagagtctgggatatgctagaaggatatattaagacatagctcgtttgtcaatttatctctaatctagataaatttacctcctatttctcctctcttgcagcttcctcagccacagacccgatgagttgcctggatgtcaaagaattaagcctgccttgaattagcagaagcaacaggaatccagagggaattgacttttttttctttttttccctggtctccactgtgattctctgattcaaatttgcggtggcagaatgaaaggaaggggggtgctcctggagggaagcactgccccagcagaggccctgaggggagcaggtcacgtggccgatgtcccgaaggcctgactgaagcagagcagaagcaaggctggctggrtgtggggggtgctgagcagaggggctttgagtggtgtctggggaaatcctgagccatttaaatgaaccatttaaatctgacagacaaa

SEQ ID NO: 834974 - DNA, 211 bp, Homo sapiens
ttatattccgtttagtactttgtgtctttgccctgaagtgtcttgatgttaaataaaagcatgtgttatttatagaaccactagcgtgtacaacatttttgtgttttgaaaacttgattcaccaatatttttattatattawtgttgactttatgtcaattactgtttaatcatggagagcagtatctcatgatgtccagaaaaaccagtc

SEQ ID NO: 834975 - DNA, 211 bp, Homo sapiens
ttatattccgtttagtactttgtgtctttgccctgaagtgtcttgatgttaaataaaagcatgtgttatttatagaaccactagcgtgtacaacatttttgtgttttgaaaacttgattcaccaatatttttattatattaatgttgamtttatgtcaattactgtttaatcatggagagcagtatctcatgatgtccagaaaaaccagtc

SEQ ID NO: 834976 - DNA, 211 bp, Homo sapiens
ttatattccgtttagtactttgtgtctttgccctgaagtgtcttgatgttaaataaaagcatgtgttatttatagaaccactagcgtgtacaacatttttgtgttttgaaaacttgattcaccaatatttttattatattaatgttgactttatgtcaattrctgtttaatcatggagagcagtatctcatgatgtccagaaaaaccagtc

SEQ ID NO: 834977 - DNA, 497 bp, Homo sapiens
aacagaagggacaaacagctccctcacacctctttgataaggtcacagtcccattcatgtaggctctgccctcatgacttaatcacctcctaaaggccccacatcttaacaccatcccattgatgattaagtttcaacatacgaatttgagagggacacattcaaaccacagccctcccttaagtcggagtggtagccaagacatgactgtttagaggggaggtgtttggggtagagggagggaatcagacagagcagagacatttgggccagtgggggagatgcatgtatgcacacaaggcctctcccagtgggagacagagcctcagaggtaggacaagaaaagggaacagacgggccaggagccggctctccccacgctgctgtgctcccatgcagaaccatgggggaatccaagcagtctaaattcaaacctagcctttcctatcactgtgaagttatattcatcwacagattggacataatggtttggaagc

SEQ ID NO: 834978 - DNA, 523 bp, Homo sapiens
atacacctttagctggtatgatcaacgatayggcagaagtatgcacaggtcatagcagcccagggacagataacaagaccccagagaggcctttccagagaagatttttgtgcagaatcaaagttaatcaggcatgtgagaacaggtggacatctagagagagctaatagcaggtacagcaggaaggagacaagaataacgtttgtgtggcatatcaggaaactcactatgagcagttgctgaggctggagactattgggccccagagcagaagataaggctgggcaggcagagggatcagataatgaactgtggatcctatagatcgtgtctcatacagaagtagtctacactgcctccctttcttatgatgctataggaactagaacattttagcttaatagtaaaataaatatgcacacatatgtactatttctcaatatacaacttttagtcaaattctcttaaactactatacattcctggtgttataaaaggctaagtgatcactaacgtgggatgt

SEQ ID NO: 834979 - DNA, 599 bp, Homo sapiens
tggaaatatacagggaccccctgccaatgacttcatgctgtgttcctgtcctaccatccttccctgttttttcttggcagggctygaagtgccaggcctgccacaagcacccagcaagcaacttcccttatctctctgcagcttgctggtggggcatttatcttggcctatgggtggggagtggttatccaaacctcagactgagtcttccagttgggagtttatagctgagacgtatggtgcaggcatgagggagaaatatccctacatcacaaagtgctgagtttaggagggttcctatacttaaggaaaactgtgctacaaagccccaaatgcggcacagcttgcttcagacccacagcacttttccaagaaaggaaataccctgttcatcatccccaagaagagcaaggaccaagaggggtttatgtgcaggaaggagggtggcattgctgggagttcgtctgagtaaatgcttgtttcaggagcttgtgtcaagcagttagcgcctgttgatagatttcgggtatgacaggtccaaggaaccaggatcctcactgaacctgtctggcctgacctacgatagattttttttttcc

SEQ ID NO: 834980 - DNA, 498 bp, Homo sapiens
gaacctgggaaaatacactacagtcggaatcctgctttgaccgtgaggaacccagaacctttccccgcgggaggtgccagctgatgtggcaggtgtatccccgcgtggggaaggacgcagccgccagytgaaccgccgcctaccgcccccgctccctctcccgcggagctggcgacccgattgcaattccgcttccgccgacagaaactgcctaataatagctcccttgtgtttgtctgcaccccggctaggcacttgcctacagcctaagttgcatttcggcctcacacagcccagtctccaactggggaagcttgcagagctagaaggcacgtccaaggtcaaattgcagaccggaaagggaagagctggaatggcccagctccaggtgcgggatcagctggccaccccttgcctgtcccgcccatacgagcatgcttgggactcttggtagaaattaactaaatgggccttgcggtgtaggcccctgccttttgc

SEQ ID NO: 834981 - DNA, 643 bp, Homo sapiens
ccttttctaagggctgcggtctcccaaaggcgcccagctggtgtggggtacggctgtgtggggggagaatatcaaagcaaacagcggggtttaaygcagaccaaagcttacttggaaaggcaatgtggaaaacagtggggaaccccaaggctgccgctccaacaaggggctactctgacgtttgaaaaccactagacaaagatgtgaggtcaactgtctgaccaggagattgggaaggaaacaaagccgcttacccaagttggagcataacataaaggatgctgaggttagatggcaatgtaggaacccacatctggcaagaatagatgtgtatgttataaacacagactataaaaactgtcagcctttgagggagtcactgtctttgtaatgtagaaataaccagtctgtacagacttggaagtggtaaagctaaagcttaggaaaatatttttaaaatattaacaatttccctagcagaacagcctgctgtattgagcataatgtagcaacattaacttcaggtcaaatcctttggaaatgttttcaatgtgacctaaaagtatatttagagatgtacttctgctcctataatgtttcaatattttaaaagtgtttttcatggaagaatgaaatattaaga

SEQ ID NO: 834982 - DNA, 546 bp, Homo sapiens
gctagttagataggaagagcctgactggtttagatmaaggattcacgccagggctaagtgttgagctaaacccaccaaatgaaatgccgctacacagtgggacacagagaaattggctgttgagaggaaggcacacagtatgtttttgtcactgatcaggttttccaaggcagattctgagagcgaggtttagtttattggcatctctaataaactgtttattagagagttcccttgggatcaacacctgtaaagagaggggaggaaagctggagtggggagagcagcaggcctaatgacaggttttaccgaccctatgaagacttctgaagccagagtcatccttcagtgggtcaaagggtcagacttttattctcccatgtagatcagccaccagatgtggcggactgggaaaggggtgtgactttggtagctctcagcaggtgaggcaattcctgaagcgctgagagcacacctagatgctggggcagcaagtccttcaccaaagggaaatgtgggtagtacctcccctagaaacatgtgaca

SEQ ID NO: 834983 - DNA, 491 bp, Homo sapiens
aacccattagatcttgtgagacttattcactatcatgagaatagcacaggaaagactggccccatgattcaattacctccctctgggcccctcccacaacacatgggaattctgggagatacaattcaagttgatgtttgggtggggacacaaccaaaccattatcagtctggttattagtaacttgtcagatggatagtttgcaaatatattctccaatttcgtgggctgtctcttcactttgttgattgttttcttcactttgtgaagctttttaacttgatatgattcaattttgtccatttttgcttttgtttcctctgcttgttcagtattactcaaaaaattcccccagatcaatgtcatggagagtttckgcaatgttagtggtttcacagtttgaggtcttacctttaagcctttaatccattttgatttggtttttgtatatggcaagaggtaggggtctagtttcatttttctgcatgtaa

SEQ ID NO: 834984 - DNA, 605 bp, Homo sapiens
gggattgtgttcttgatttgagtctcagcttggtcactgttggtgtatagcggtgctactggtttgtaaacattgatttttgtctctcgaaactgtactgaattcatttatcgatctaggagctttgtggatgagtctttagggttttctaggtttatgatcatattattggtgaacagtgacaatttgactccctcttttccaaattggatgccttttatttattcctcttgtctggttgctctggctaagactcccagtacaactttccccattcagtatgatgttggctgtgggtttgtcatagatggcttttattattttgaggtatgtccttctatgccaattttgttgagcgtttttataaagggatgttggattttgtcaaatgctttttctacatctattgagataatcatatgatttttgtttctaattctgtttatgtgatgtatcgcatttattgacttgcatatgttaaatcatgtctgcatccctggtatgaaacccacttgatcacraagaattatctttttgatatgctgctggatttggttagctagtgtagtattgaggatttttacatctatgttcatcagggatat

SEQ ID NO: 834985 - DNA, 575 bp, Homo sapiens
ggagatttttcctttttttatcctttatgctaggacttggtctcttctctaggcactagcagacagctccaaagttcttgttttttgctgtccagagagatttaatttaaaaatrgtcatctaaatagcacttatttggctatatctaaaaatgaggaagtccttgcctttctccacttactctaagaccaagcatttgcttgctaaaagcgaatcatctctgttggagacaaattcttgccactcttagaaagcataagaaactcaaactgttttgtttttttaaataccaaattattttcccttacatttatttctatagacgcaactgcctatagacttacttcttggatgccctgtcactagttacttcaaactacaatgtttaaaactcagattcaaaatgttcaactgaacttatcatgaagaccttcaaaacctgtttctcatcttgaatttcatctcagtgattaagtactcatctagttgtccagaattgttatcttggatttcatcttagatttctccctcttattcaatccccaaattcaattactatatccattctacatgct

SEQ ID NO: 834986 - DNA, 625 bp, Homo sapiens
agttcatgtgttagaaacttgatccacaatgtgggggttttggtaggggagcctaaagagaggtgtttgggttataaggatacctccctcacaaatggattaatgctgtttttgcaggagtgagtttgttgtcattgcaggagtgggttaggccctctcttattctctcttgtccatgtgatgccttttgccatgttatgatgcagcaaaaaggccctcctaagatgctgccgccttgatcttaaacttcccgtttttgagaaccataagctgataaatttttgttttttgtaaattacccagccttcagtattctgtgatagcagcacaaaagagactaagataatgacttaacatttcccccagggttgaatcaaaactcttaacaagaccctttactccaccacccttacttaaatttccatcattgttgaaatttgtttcagcttatcagatgaaccattctctccctttctgccccagatgtttgtacatattctttatagtttacattctcctctggctgcttttctcctcccaacatcctctcctctttttaacsaattcttactcataaatttaagttctggtttaggtctgactatttctgggaagctttccctga

SEQ ID NO: 834987 - DNA, 573 bp, Homo sapiens
caattgaaattacctaaaacatttcttttaaacatcaagccaggaacatccaagttacttgttctttacaatttaaggattagatcaaatcagcgatatcttcacaaatccatccataagaactttgccaaagacttgttggcttcatgtgtttggaaatatttgatgatgtttcgtcatctatattatacattatcctcaatataacctctcaattgcctgtagaaataatacccagcacattttacagtttggaacatgatatccctattttacattacaccctcacagcactcttgtgaattaagttgctgtctttgtatacagggtcagattgttaagcgacttgcccatagtcacctagtaagcaagttcagttctccttttctctacagccatttcacagtaagaattacttaattatgtagtttgactttcaggtacrgtggagaagaatttactgtttttgttttgctgctctccttataggatgatgtgggctgctggggcagtagcagccatgtctagcatcacctttcctgctgtcagtgcacttgtttcacgaactgctga

SEQ ID NO: 834988 - DNA, 640 bp, Homo sapiens
gtcgttaaaaaggcctgaagaatataaagtgtcaagcagtttggctttaactgtggcctttgtctagcagcacatagagtgttgtctttttgttttcttcatttttaaggttgtagtataatatattacagcccaagaccaacagttacagcttccagaggtagctactccgtgattaagagaactcatttacagtatattccatattttttatataaaaaaattaaactgtacttgccttattccacattcaaatggttaatatataacaattatggatatgacataaatagccctaccagaggcaggtcagaatatatatgacagtagggagatgtgaaaaacacagagaaagagaagggaagagccaatttatgcaaaaagagaaatcacaccttctgctattactacatacggtcttggaaatataatattttattaaagtcaaatgaagcatactttgttagagtttagccagttcaactacaaagagtaaatacaaatctaaagtaaatatgcttgctgaccaaagcatccaatgacaatcttatttgaaatcataccacatattcgtatgactggaagccaacttgcatagcgctctttatacgcaaagamtgattttatgctgggcacagga

SEQ ID NO: 834989 - DNA, 596 bp, Homo sapiens
tgataactggggctcttatttcaggaatggagtcttgatgctcaccaaaccaatttttgaataaacatttggacacccacctgagttgatgatcaaagaaagttcactccttttttcacctactgagagttcattacattcatatttcgtttccctgtagaaagaacaattgacataaaattcagctaattcctctattcattgtttatcctgtttgggaggcttttcaagttccccaggtttctcacctccttgcttcctatttaaggtcacagcagaggagcctctattaacatgtgtgaagaaatcagcagagtttttataggatttacactggtaactcgcagagcaaaatatttcaaagttttttatacaggacccatggaacatcacccttccagaagccagcaaggtaaggctatcaaaaggtttgaagatggcctaacagggctaaggaatggagaagaggatgggccttctctgccttgtcatcttcaggagaagaagtgcatttgatgtgctaacatctaagccagtggtgggctyatccagaaacagaacagttatagctctcatcacctccattgcaatgctgg

SEQ ID NO: 834990 - DNA, 565 bp, Homo sapiens
tcatcatcgttattattattttaatttagtgatttcttacatgatgtattagatttctctatgcatttgatagttactagctgcctgattcttgttgcaaagatgcctactatttatataatktaaaggcaatctggcatttggttgtttgttaaaaactgaaaaatgaacattagttaaacagagatcaatggttctgatttacgttgacaataatagacagtaacactttatcaatggacagaaggcacctaacaccagcatgccatagatactgaacttggagacacaagataagtgtccatagcctgtttctgtcattaatgagctgagttaggttgggcaagggccatcctctctaaacctcaatttcctcatctgaactctgagctgcttgacatactgagttgagattaagggcaggtgaagcaacctttaggtaccaaagtcattcccaccatgcagtcaccttgtcattacttacacttttcttctttttcattttacagtaaaaaagtcaagaacatgtaaaaactgtggcttttctggaatggaattggacata

SEQ ID NO: 834991 - DNA, 655 bp, Homo sapiens
catctggaacacccatgaagtctaagttaatgaatggkgcaaattctgaacccctatttggttctgcaaaaatagcttaagccttttagttacacacagaatactactcaagtggtagcatgttctagtaagaaaaaaagctaggtttatattctgatcatgtgggtctctgcaggcaacttgtaaatctctatctaataatccaatgtacacacagcccctgggccaggtgtctgattcccatccctccattcccctcacctctctagcaaccatatttctagatgactcctctagtgtgatctatcagtttttgctcaaagattgtatgaacatgtctcaacatcagcctggtccaagtagagtttggtgtgcaatttgctaaccacactcctgaagaagcagatggcagtgggttcaggtttgcctgtagtttaaaaagactcatgttgctggtccctcagagaaggaagataattaatcattggttctaaaggattctgggtcataacatgtctgagatggaagagaattctgacctgtgtctctgtccacatgtgtgagccattcccagggtggtgtggtctgcggggacctggactccactgcctcctgtggctcagggggtgtggccatcagcagtggtgcactgtgt

SEQ ID NO: 834992 - DNA, 640 bp, Homo sapiens
tttgaaaaactatcaattgctgaagtagtcttcattttaataaagttacagaattatacttaayataaaaaatgcacatagcatattctgccaattacttaatctcattttaaaaaatagttctgtgtatttgacacctgtcaaaaacttagttgacagacttctttattcaatatattacatcttctaggaatctaatcaatgtgtccaatttactattcataatttgcattgcatacttatggctttattccatatttatcttccattttctcatcaccaactttcagtgttcaatagaagtataaatgggaatcatgttattactccaactatacatttgtgtatacaacaatgaatttattaattcacactaaattggaaataaaaaactaagaaaattgtgttaaatttgaaacaatcaaattgaaaagaaagatgtatgtagttttactgtaaatattgtgctaataattgtgcaaatttgccacaaaatctgccctaaataagaaaaagagcctttataataataagagctgacaaatacggtttcttatcagaggcagctacataaactgtgggctcctatgcaaaatgaatatgcctagcttcttattcaaaaagcagcaaggaagtatta

SEQ ID NO: 834993 - DNA, 516 bp, Homo sapiens
attggttatttcaaggttttctatgttccaataaagtttctaactttcttagtgtctatgactaactttcttaacagaccctattaatttttcttgaaatgtgttgyattctccctagagtgctaatgcacttttgtaaagtggtggctagtactctactacacagagtggggaaaactgattaattgcttttagaatagtaaatgaagccttttaatttaatgaatatttcaacagaaccaattcactttgtctctctaaaggcaaaatcccatagggagaatttcttttgggtgacctagagagcaaattggaacctctgtgaggttggcatacaaccatatgttttcacaagcatgtagattgtctgtatacctctaatatattactcctaacctaaaatacattcgatgtcaagagtttagatttacaaattatccttcagtattgtgagttgtgagaccagggcatgggttctctctatttgaggtctgtttatactaagtacactcctga

SEQ ID NO: 834994 - DNA, 530 bp, Homo sapiens
ttgtgttccattgaacgcaagtgacaaatttagcaaacagaacatacaagatatgtagttaaatttgaatttaagattaaaaagatttttaatatagctgttttccattcaatatatgggktatctttatactaaaaattgaaatcttttgttacctgtaattcaaatttaactaggtctgtatttatgtggcaacctatttttgagggattcattttatctgtgctccactaaagctgtttatattaccataggttgtctttttctaaattactgattcaatgaaggtttcaaaaatgctctacacaaagaaatgttacaagttgttaaagattctcttttgaggcactcaaaagtttgctaaggtgaatgcttgctagaaatatcttaaggtcgaacactaaatctatttgttataaaaggaagagaatggtcaatagccaagcaaacatgattttattttcttttaatagattcttttagacagacagagaaatgctctaaataaaaacaaccactttccttttctc

SEQ ID NO: 834995 - DNA, 514 bp, Homo sapiens
gattatttcatcacccaggtaataaacatagtacctaataggtagttttttgatcctctccstcctctcaccctgtaccttcaagtaggtccttcgttgtgtttatgcgttctcaacgtttagctcccacttacaagtgagaacatgtggtatttggttttctgttcctgtgttaggttgtttaggataatggcctccagctccattcatgccactgcataggacatgatctcattcttttttatggctacatagtattctatagtatatatgtaccatcttttcttttttcactctaccattgctggacatttaggttgattccatgtttttactattgtgaatgttgctagaatgaatgtatgcctgcatgtgtctttatagtagaatgatttatattcctttgaatatatatccaataataggattgctatcactaaccattagagaaatgcaaattaaaaccacaatgagatgccacctcaccccaagcagaatgactacattaagaagt

SEQ ID NO: 834996 - DNA, 618 bp, Homo sapiens
caacccacaagccaaggatgcagccagctgagctcagtgtgacttcaatccgcagaaaccctcgggacaacggggtgtggtatgaactcacaccaaacacagaattggaggtttaagaagattttytgagttctaaatgagaaagtaacccttgttgtctattcttctttcaaaaaaaaagtaaaatgtttaaagtattttaatagaggttaggacataatattagaccttaggacgtaatattactaccatattggaccaagaaactaaagcagctgggcgcggtggctcacgcctgtaatcccagcactttgggaggccgaggcaggcggatcacgaggtcaggagatcgacaccatcctggctaacatggtgaaactccgtctctaataaaaatacaaaaaattagcctggcatggtggcggcgggcgcctgtagtcctggctactcaggaggctgaagcaggacaatgacatgaacctgggaggcggagcttgcagtgagcctgggaggcggagcttgcagtgagccgaggtcactccactgcactccagcctgggcgacagagcgagactccatctcaaaaaaaaaaaaaaaagggaactaaagcaacaaaag

SEQ ID NO: 834997 - DNA, 336 bp, Homo sapiens
ggagctggatttttgagaagattaaccaaatagrtagaccactagccagaccaataaagaaaaaaagagagaagaatcaaatagatacaataaaaaatgataaaggggatatcaccactgatcccacagaaatatcagctaccatgagagaatactataaacacctctatacaaataaactagaaaatctagaagaaatggataaatttctggacacatacaccctcccaagactaaatcagaaagaagtcaaatccctgaatacaccaatcacaacttctgaaattgaggcggtaattaattgcctaccagccaaaaaaaaaagtccagaactag

SEQ ID NO: 834998 - DNA, 336 bp, Homo sapiens
ggagctggatttttgagaagattaaccaaataggtagaccactagccagaccaataaagaaaaaaagagagaagaatcaaatagatacaataaaaaatgataaaggggatatcaccactgatcccacagaaatatcagctaccatgagagaatactataaacacctctatacaaataaactagaaaatctagaagaaatggataaatttctggacacayacaccctcccaagactaaatcagaaagaagtcaaatccctgaatacaccaatcacaacttctgaaattgaggcggtaattaattgcctaccagccaaaaaaaaaagtccagaactag

SEQ ID NO: 834999 - DNA, 630 bp, Homo sapiens
aagccctttacctctttatttaacacccttcctctaggcagactcaccctacctcacagattcaattactatccacatatcaacaactctcagatatttttcttcacccagatatctctgtttaaaacctttatctggaggttccaagatggctgaataggaacagctccagtctacagctcccagcatgagtgacacagaagacgggtgacttctgcatttccaactgaggtaccgggttcatctcactggggcttgtcagacagtgggtacagccaacggaccagggtggggctcacctcacccaggaagaacaaggggtcggggaattccctttcctagcaaagggaagccatgacagatggtacctggaaaattgggacactcccaccctaatactgcacttttccaaaggccttagcaaacagcacaccaggagattatatcccacacctggcttggagacttccacccctgtggagcctcactcactgctagcacagcagtctgagatcgaactgcaaggcggcagtgaggctgggggaaggacatccgccattgytgaggcttgagtaggtaaaaaaagcagccaggaatctcccaccacacctcaaggaggcttgccagcct

SEQ ID NO: 835000 - DNA, 642 bp, Homo sapiens
gaggtcccatgcctggcccatgaaaccattctttcttcctaggactctatgcctgtgttgacaggggctactacaaaggtctccaaaatgccttcaaggtctttttctcattgtcttggatattggyagttggttcccttttatttatgcaaataacatgctaaacatgataaatatcctgacttcaaaaatcatgcatattccatggcagacgggaggcaggactagattgcagctccagacagagcagcatgtggagttttgcattgtgaattttagctccaggtctactgcaagaacaaaccagcaatttcgagagcacccagagaccctctgaaagaagagaactgttcttacaggacccaggagacactgcaaatactgtgagtgccccagctagggaagtgggaaacagagactctcctttactgaacacacacccccactggagaagctgaaggtctgtttgtgggagaagtttccaactttatatggagctgaatcaagttagccaagcgaaatacaggggtagaggaagcagcaaaaaggccctgggggcttgctgggtccccaagcagcccattcctgcctgacaccacagggatccatcaggagggtggccagaggagcagcgcataaaac

SEQ ID NO: 835001 - DNA, 631 bp, Homo sapiens; identical to SEQ ID NO: 831323

SEQ ID NO: 835002 - DNA, 624 bp, Homo sapiens
cacttttgcttccccttttctctccctgccaaactcttcctaaattcagttccggattaggaagatcacttctcactccacctggcagggtcatcttcttgactgcacctctccagtttctctctgagactggaaagacactccagagataaggcttgtcctaaccaatcagcactcagaaaacatctattgactggatttgatgtaaggtgggctctaagtaaagcctgaatttattaatcctccagaaagtttactgacctctctgagttggatgaggccagatctaataatgagtatgttccagactactaaagacaagcatatttatgactatattcacccaatttgggattgcactcttagactactgccatttacagattacattagcagatacttttggaaaacaatttggcattgtcattagtatttataaaatgtttgggttctttgactcaataattaaacttcagggaaactgtcctgaaaacaaaccaaaaattcagacaaagctgttgctacaatgatgtcaaaatgatacaagaactgaaagtaatctatatgtcyaacaacagaagaataacttagtaaacaattatagtgtgttcataaaagagacta

SEQ ID NO: 835003 - DNA, 585 bp, Homo sapiens
ttctcccatacctgatttatcccaatgatacattattccccttcttatttcaaactaaatatttcagaccaactggttagaaagtgaacagacttgggaacactctagacccagaactgacaacaatggttattttctagcgggagggctaacagaggtctaaaatgaccacttataggggaacccaatatgaaaatatggacgtgggagaaagctggcccaaggacattttcaggtagccacaaagtcagtcatgcttcattaacaaaaagtttgtgcaccagtcctttgccacatatttctaatccattgcattagtgtactattgattatctaacaaagttgaggccagtgtgtcgcaggtggggctttgcttcttgtaacgaaaatagagagaatccaaatgttgaaatactgtaaagaccccggtcttgatgcacacaaatcttgagaaaggtcactccaaacaacttgcagatacatgycaagtgaggaatacagcacagcggaagaagctgggaggtcaggcatggtcatatactaccttcccccagcataggaaccctctgtccttcttccttgttt

SEQ ID NO: 835004 - DNA, 536 bp, Homo sapiens
ctttcaatcaaatatcagggaatagttttgggtgaaatcaggccccatttgtgtgtaaagttgctatagacactctacaagatattagtatatcaggctgagcacagtggctcactcctgtaatcccagcaccttaggaagccaaggcaagtggatcacttgaggtgaggagttcgagacaagcctggccaacatggtgagaccccatctctactaaaaatacaaaaattatccaggcatggtggcgcatgcctgtagttccagctactcaggaggctgaggcataagaatctcttgaacctgggaggcggaggttgcagtgagccaatatcgtgccactgcactccggcctgggctgcagagcaatactcagtctaaaaaaaaaaaaaaaaaaaaacagttwttagtgtatccaaagagggaaagacaaaaggagattcatcagagggaagggggacaacatgaactacaggttctgctatgcggatcttgtattgtctgtgcgttgtacgtacactagcccgtgtcttccttct

SEQ ID NO: 835005 - DNA, 558 bp, Homo sapiens
tcttgtattgtctgtgcgttgtacgtacactagcccgtgtcttccttctgcagtcccaggggccatactcctatcctaaatgtccctcatcaractctcaaaaactaatgccagtggatatgtggactgtcatttcccttactctgattcatgctcagcatgcactcttgtcattataatttgatttctcctataggatgagaacccactaactattacagtccacgtgtcagtcgcgtttctcatcgtgattaacaccccagccattgatttgctcttcagtgtctagtgagcaaggctactgtgaatctttcctcaggaggactgatggagtcacatttctgagcctacagagctgagggcaagacctgagaatggtgatgtcaaaatgccaaccagcgagacctcttggtggccaggtattcagccagccttttcttgggccattccacaatcttgattgagactttttaagatgtcaccttgagataagctgtgtgaatatccaatttaaaaaggtgcagaaggatactctgtgtgtatatatgtgtgtgtgtg

SEQ ID NO: 835006 - DNA, 558 bp, Homo sapiens
tcttgtattgtctgtgcgttgtacgtacactagcccgtgtcttccttctgcagtcccaggggccatactcctatcctaaatgtccctcatcaaactctcaraaactaatgccagtggatatgtggactgtcatttcccttactctgattcatgctcagcatgcactcttgtcattataatttgatttctcctataggatgagaacccactaactattacagtccacgtgtcagtcgcgtttctcatcgtgattaacaccccagccattgatttgctcttcagtgtctagtgagcaaggctactgtgaatctttcctcaggaggactgatggagtcacatttctgagcctacagagctgagggcaagacctgagaatggtgatgtcaaaatgccaaccagcgagacctcttggtggccaggtattcagccagccttttcttgggccattccacaatcttgattgagactttttaagatgtcaccttgagataagctgtgtgaatatccaatttaaaaaggtgcagaaggatactctgtgtgtatatatgtgtgtgtgtg

SEQ ID NO: 835007 - DNA, 617 bp, Homo sapiens
aatagtagtagcttttaatattcacaaccaaccactctagtgctgacataggaggctacaaacttaaaattttttgatcataactagatgatcaagatggagccctttttgggggtaaaaattccttctactccrtatttgacactgttaagaggatataaaggaaagttaaattatttaagatttttcacaaaagatttaagaatgaaagaataaatcctgctggaaaagaatatgacagccataccatctgcaaagtaaatcttctacagaggtgcagcttgactctttttatagtaataaataaacactgcttagttccataaggcactgtcactgcagctagtgcacactagtgccacccactgtccccagtgtgcaacaggaagggtggaggtgcgttccagtgttactgatgctaagcttcatctcttggttaagtggtggcttccagatgcttccgttgtaagattctattttcccctttgcagttaggaagcaatttaagaggtgatacttctcccaaatcctttcatctaatgattttagcatttgtattagtttgctcctataacaatgtactacggatggggtggcttaagcaatagagatgtgtt

SEQ ID NO: 835008 - DNA, 594 bp, Homo sapiens
gtgatgagaccctgtctcaaaaaaaaaaaaaaaaaaagagttccaaagaaaaasagaaacaggttaaaaaaattaaatataatggctaagaattttccaaaattaatgaaagacaaaaagttgcagatctaagaagcccagagtcccaagaatacctctctccttaaaaaaaaaatgaatctagatacatcacaatcaaactgctgaaaactgaagataaaatatattgaagtcagtgacaaaaaaggaaacattacgtgcagagggataatacatatcacacaatgatacaaatcaaaaattatgtaaggcataagacaaggtactgacatctttaaaataccaagagaaaaaacctgacaactcagaattttatgtctggtaaaaatacctttaaaaaatgaaggtaaaataaagaccttcagacaaacaaaagctgagaatttattgcccataaacctgtgttacaagaaatataaaggaagttcttcaggcagaaggaagatatcaagtggaaattaggatacacacatacaaaaataaagaagctggaaatgaaataataaaggtaaatattaaattatatttcttact

SEQ ID NO: 835009 - DNA, 594 bp, Homo sapiens
gtgatgagaccctgtctcaaaaaaaaaaaaaaaaaaagagttccaaagaaaaagagaaacaggttaaaaaaattaaatataatggctaagaattttccaaaattaatgaawgacaaaaagttgcagatctaagaagcccagagtcccaagaatacctctctccttaaaaaaaaaatgaatctagatacatcacaatcaaactgctgaaaactgaagataaaatatattgaagtcagtgacaaaaaaggaaacattacgtgcagagggataatacatatcacacaatgatacaaatcaaaaattatgtaaggcataagacaaggtactgacatctttaaaataccaagagaaaaaacctgacaactcagaattttatgtctggtaaaaatacctttaaaaaatgaaggtaaaataaagaccttcagacaaacaaaagctgagaatttattgcccataaacctgtgttacaagaaatataaaggaagttcttcaggcagaaggaagatatcaagtggaaattaggatacacacatacaaaaataaagaagctggaaatgaaataataaaggtaaatattaaattatatttcttact

SEQ ID NO: 835010 - DNA, 472 bp, Homo sapiens
aagcaaagcagaagccagcacatcacatggcaaaagaaaaagagagaggaggtcccagacttttaaacaaccagatctcacgtggactgagggagaactcacttatcagcaaggggatggggctaagtcattcatgagggatctgccccattattaccaaaacaccagtggtttgatgtaggtcttgatgcttgcttcacagaaagccaatcactgaaacaacagttattgccaaggaaggctttaatcagttgctgcagccaaggagatgggcgctcagtctcaaatccatctgcctgactaaaactaagagtttgtatagcaggggagaaacgtaacagtgtgtaagaaaacaaaaattagggaagggkcaaggacgcaatcatggtgaatgagggattcatgatgtggtgccatcatctggtgagtttcagttctttgatactttctttgagaggcctgaaggttcttt

SEQ ID NO: 835011 - DNA, 539 bp, Homo sapiens
aattgagcctcaccccaaaaggtgagaaatttccagtaggggaaattgaaccttgaaccttaccccaaaaccatcaagatgggaaatacaccaagcaagagaggragcaaggaggataaagatggtaacaaagatatcactctggatagccccctaggtctcatgctaaaacactggaaggctaatgaaaggactaaacataggaaaaagcaacaaatgataaaatattgctgttttctttggactcagggacccatcctcaaaccctcaatcttctggccgaagtttaggtcgaatgaggatgcaatgtgtcagtttctaatctgatatgttaatgatagaagtccagtgtctcaagaagaactaggctatggaggcaaggacctgccctcctttttcccttaaaaacaaatagggaagaacccaatctggcacctcaaaatgaaaagtcagaggagccagctctcatgcctaaaaattccagcacatgggatcccctagactatcttcccccattcagtgtccccaatttttcccct

SEQ ID NO: 835012 - DNA, 539 bp, Homo sapiens
aattgagcctcaccccaaaaggtgagaaatttccagtaggggaaattgaaccttgaaccttaccccaaaaccatcaagatgggaaatacaccaagcaagagaggaagcaaggaggataaagatggtaacaaagatatcactctggatagccccctaggtctcatgctaaaacactggaaggctaatgaaaggactaaacataggaaaaagcaacaaatgataaaatattgctgttttctttggactcagggacccatcctcaaaccctcaatcttctggccgaagtttaggtcgaatgaggatgcaatgtgtcagtttctaatctgatatgttaatgatagaagtccagtgtctcaagaagaactaggctatggaggcaaggacctgccctcctttttcccttaaaaacaaatagggaagaacccaatctggcacctcaaaatgaaaagtcagaggagccagctctcatgcctaaaaattccagcacatgggatccmctagactatcttcccccattcagtgtccccaatttttcccct

SEQ ID NO: 835013 - DNA, 562 bp, Homo sapiens
  misc_feature 1, 2, 3, 4, 5, 6, 7, 8, 9, 10, 11, 12, 13, 14, 15, 16, 17,18, 19, 20, 21, 22, 23, 24, 25, 26, 27, 28, 29, 30: n = A,T,C or G
nnnnnnnnnnnnnnnnnnnnnnnnnnnnnngcagttgtgagtagaatgttctgtaaatatctgttaagtccctttgttctaggggatagtttaagtctgttgtttctttgttgactttctgtcttaatgacctgtctagtgctgtcagtggagtattgaagtcccccactattatcgtgttgctgtctatttcatttcttaggtctaggagtaattgttttataaatttgggagctctagtgttaggtgcatatatatttaagattgtgatattttctggttggactatttcttttatcattatatcatgtccctgtttgtcctttttaactgttgttgttttaaagtttgttttgtctgatataagactggctactcctgcttgcttttggtgtccattttcatggaatatctttttccacccctttaccttaagtttatgtgagttcttaygtgtcaggtgagtctcctgaaggcagcagcagatacttggttggtgaattcttttcccttctgccattctgtatcttttaagtgaagcatttaggccatttacattcaa

SEQ ID NO: 835014 - DNA, 608 bp, Homo sapiens
tagctggccttgtcagctgaaagaaaactgcttatggtggtctttactaaaaggtataaagaaaaaagaaaacatttgccagcttaatagctgyataccagggaccaagggatgtgttaattttaagcaatgaaaccacatacagcagctgcaattggagtcaccacctggctaagcttatgatagtacactgtcattctccatggtccctctgtcttccacacacaccaggtaggcaacttgaatgagtatgtagtgggaaatccacccttatgtcttctgagttttgatggtagcactaatctcctcaattcctccataattgctatactgcttttgctttactattttccaaagtagaggtagttttattggcttacactctccctttttcaccatactatccgttactctacaagtcagaaaaccattgtagagattctaccagtagctgcatatatctatttcaattacgcattctagaacttaggaaacagccacaaaataggttctggggctcactgggctcactgagaaatggacatgagccaaaaattcataaatcatatgaccttcacaggtccctgctttgatttgtagactaaagt

SEQ ID NO: 835015 - DNA, 567 bp, Homo sapiens
cttaatccacattggtcctttttattttttaattattgagacatgaacttgcccacacatatggttgttattaaatmttgcacagataaaaatatatcctagaggggcacaacagacagatccctgtgggatgtcttatgcattaagagtcatcagtagggaagcactagtaatatttatctaaggctccattattgaatcattgcatggttggaggctactgacaattaagggattaatgttattaatttgtctacaaactgttgaattatctttactttggttttctcagtcaatttctggcataattttactgcaaaaccctcattatagattttgtctactcttagatttaaacagggaatctgaacccataaatctaaaaacctaaccctacataaaggaccagatgagcaatttgaacagatagccacacttggaatatcagtgaaatttgttacagggtgaaccagagaatctctaaggtcacataataatttagatttaacatgatctgcccagcattcagttaagttccctgcagaagctatcaattatgaaatctta

SEQ ID NO: 835016 - DNA, 634 bp, Homo sapiens
tctaaggaaataatcttaagtaaatgtataggattgttcattacagcattatgtagaatcacaaaatatagaaacagcgcttaaatgtcataaaatagaagaatgttaaagctgttcaacgagatgatttaaaatttgatgattatgaagactaacaaaaacttaaaaatgcttttgctataatacagactgtaaagagcagaaaaattctgactataagcaatacaaaattttgtattggtaaaaagacaggaaaggagtatatcggaacaatagcagggattttcctaccatggtgagacccttgctaattttatttttcttctccattttttatgccttcctgaatgtgattgcattactttttttttaaggagtagaagtaatatttcaaaatcaatatatttttaaataactcgtagaaggaccaggccaagcaaacaaactatgaagacaaatgcaaataaacaaagcatttatagttaagagaagggtaacaacagaaaggcaagtaaaaaggccctacaatttacraagatgaaacttttttttaatctggaagaaaacaatatgttgaaacatcaaagaaaagctttgtaaaaagaaatacattcctttagaaggaaatgaaata

SEQ ID NO: 835017 - DNA, 588 bp, Homo sapiens
atagcattgggctttaactctaggacacrtttctacagattaatgatcacattgtgcagctaggatgggcaaacctaattgaaatgatattatcagctaatccagaagagcctggcaggaatcttgataaatgtctgccttgatccatacaggtaggaccatggaaaaattctagtagattaattaataacataaattgagttttctattagcatttaattatttattttatcaatattaaaactaattcataattaaaaaccaattaagcttagaacagtgggatattttctcagtaagaggaggccccagaactgtgactccatctggtaaagatttgggagattcaaattgaaagtcataaggcagaataaagctcttaattgacaggtagttgaacgaggccagcactttggcaatagcaaattctgaagatcatgtaagcaatattatttgttacaggcacattcaatcggaggcagtctcatactatgtttagaaacacatgctgtttttagtcaggacaggactccttgtctgaggcatctgaggaggtttctaagaaagacacaataaaataaaacaggc

SEQ ID NO: 835018 - DNA, 605 bp, Homo sapiens
atactccttgcccctgtccctatgttatacagttaaatctaagtctaagccaatgcaaagctgtgaaccatgggccactcccttccaatggacttctactcgtggggtacactttgtctgagcatggacttgccagcctttccccacgagccccaaatttccctgaattgcaacaggccctgaaacatttgtaacactaaatctgaggctgattattccatgatgatactcagaattttctagggcatgacagactttatgaagcgtttgaacagctccatgtcccacaggaagaaagacaatttccaggctgtgccaggatggagtgtggggagcatccgacagtttttctgaagggaacaattctgttgattggaacagtattttgcaaaagcctacttagttttcataggttgcagctttttaaaatctcctaacatcagttttatatttatccttgttgtcgctttttttaagtggaactaataatcaagccttttagggcragtttattgttttggatacaactgttccccatccaactccacacaactaccttcccactgttaggtgggaagaaaagttttcagttcctttcattattc

SEQ ID NO: 835019 - DNA, 587 bp, Homo sapiens
agtcactgctgattccttggcaaagtggastggatttctcgggggctttggatgtcgtctattaaggggcttgactcactcacagagggtacggcaccaacacttcagcaggcaaattaagccatcacagcaaggccaaggcaagctctgagtcacagatgtaggtctatttgggtcttctgggcctctgcgacagcccatttcccagcagggaggacatggtgcagagtatgataaggcccctaattttccctccttcttctccaggccatcattggtagtggtgatctcagaataatttcacagaatccactgagtacttgtagccttcacccccaggagtccaaatgactcaacttacgttacaactccagaagcataatttttgccgcataaaagggcacaccatggaaagcactctgtcccgggtaactgattcatgtgccacccattcctcctccaatgggactttctccagagggtgaggagattgcaccacacatcaggactcctgggttcctgtctgcggcttgtgatgttctcatcagttagcacacacagacatcactgtcagtaatcatttttaa

SEQ ID NO: 835020 - DNA, 587 bp, Homo sapiens
agtcactgctgattccttggcaaagtggactggatttctcgggggctttggatgtcgtctattaaggggcttgactcactcacagagggtacggcaccaacacttcagcaggcaaattaagccatcacagcaaggccaaggcaagctctgagtcacagatgtaggtctatttgggtcttctgggcctctgcgacagcccatttcccagcagggaggacatggtgcagagtatgataaggcccctaattttccctccttcttctccaggccatcattggtagtggtgatctcagaataatttcacagaatccactgagtacttgtagccttcacccccaggagtccaaatgactcaacttacgttacaactccagaagcataatttttgccgcataaaagggcacaccatggaaagcactctgtcccgggtaactgattcatgtgccacccattcctcctccaatrggactttctccagagggtgaggagattgcaccacacatcaggactcctgggttcctgtctgcggcttgtgatgttctcatcagttagcacacacagacatcactgtcagtaatcatttttaa

SEQ ID NO: 835021 - DNA, 515 bp, Homo sapiens
tgtcttgaatggtattgcttaggttttcttctagggcttttatggttttaggtcttacagttaggtctttaatccatcttgagttaatttatatataaggtgtaaggaggggatccagtttcagttttctgcatatggctagccagttatcccagcaccatttattgaatagagagtgctttctccattgcttttgtcacttttgtcaaagatcagatggttgtaggtgtcaggcatatttatgagctctctaatctgttccactgggctatgtgtctgttttggtaccagtaccatgctgttttggtttctgtagccttgtagtatagttttaagtcaggtagtgtgatgcctccagctttgctcttttttattgccttggctattcaggttctttttggtcccatatgaattttaaaatagtttcttaaaggttaatttcartgtggaatctgaaaccatattagtgaacttttcatactctcttatattaaaattcattaatctaccttcaa

SEQ ID NO: 835022 - DNA, 516 bp, Homo sapiens
aaaaaaagttttaaagaatgaatgaaataaaacctgaaaataaagccctggtcctttgtgtgtgtgtctgctcctgccaagaaatcagaggctmtgggtgctgtgtcctgtcaggctgagcataaacaaaacccttaatcacagtcaggtctggcacatattttaagtgacaacgcaactaattacactggttctaacagtaaacattatttagcaattcagaaaaactacaccttatcagcaccaccattctcccccaattgtagccagaagaccaatttgaaatttatgctttcagaatattaactgtaattcaatagcattcttcctgcttctggaatgggccaaaagtaggatgtgataattgtaccacttgttcagcagtggataagataccctacagaacacacatgctttgtcaacagaatgtcctttcagaggttatgatcttagaaccccaaaaggtatatactgtactttctcatttcatggtgttccgtgtatgcaaggagagct

SEQ ID NO: 835023 - DNA, 613 bp, Homo sapiens
gtggaggctctagaaccacaaatgtcagccacatatataaaagtttagtagtcacattaaaaaagtaaaaagaaacaaagttaattttaattttactartatgtgttctttaacataatatagctaaaatattatcatttcaatatgtaaccaatgtaaaattatcaagattttttaaaaaatcatttttattatttaaaaaatttttcagcacatcacggttgcaaagtagatattttatattcttttttcatactgagcctttacattttatacttacagcacatctcagttcagactaggtacatttccagtgctctaaaccacatgtggccagtggctaccatactggacagagaagctctagatcctgccttctctagattccacggagaagctatgagcaggattctaagaagttagagctcagacctcagacatttcctagtgattctattggtttgttttaataaactttttactgacgtataacatgcatgcagagaacagcacaaaccatgagtgtgcaacttgaattttcacaaacacacctgtgtaatcagctctaagatgaagaaacagaaaattacccacagcccagaagagtccctca

SEQ ID NO: 835024 - DNA, 613 bp, Homo sapiens
gtggaggctctagaaccacaaatgtcagccacatatataaaagtttagtagtcacattaaaaaagtaaaaagaaacaaagttaattttaattttactagtatgtgttctttaacataatatagctaaaatattatcatttcaatatgtaaccaatgtaaaattatcaagattttttaaaaaatcatttttattatttaaaaaatttttcagcacatcacggttgcaaagtagatattttatattcttttttcatactgagcctttacattttatacttacagcacatctcagttcagactaggtacatttccagtgctctaaaccacatgtggccagtggctaccatactggacagagaagctctagatcctgccttctctagattccacggagaagctatgagcaggattctaagaagttagagctcagacctcagacatttcctagtgattctattggtttgttttaataaactttttactgaygtataacatgcatgcagagaacagcacaaaccatgagtgtgcaacttgaattttcacaaacacacctgtgtaatcagctctaagatgaagaaacagaaaattacccacagcccagaagagtccctca

SEQ ID NO: 835025 - DNA, 458 bp, Homo sapiens
cttgccccaccaggcctctttcctttgytttctgcagcctgaatcaattcctttgtgctgatgggctctcctaagagctttcctgagtcagttaactttacctcgtgtctacggtgctattcatgcgatacgggcgaggctgagatgctaagattaaaaagaaaagaatgctgttttagatcaagttgatagcatttgttttccatatgcttttttaaaattttttcataacatacagctcagttaggtgtatgaaagaagtgttattgtattaaataactagagcagggctacagctctggccctcccctagggggaagagattggtaatactccatcttccagggcatttttaaagtgagccaggttagctcttttcccctggcatttctcaggaatgcagtagatagtgctgaagatgcactgacttttttttagtcctaaaaatagaaactcct

SEQ ID NO: 835026 - DNA, 625 bp, Homo sapiens
ttgaagagacatttaaacaaagatatacaactagccattaacacatgaatatgatgctcagtgtctgtgatgattaattttatgtatcaagttgactaagtaagctatggtgcccagatgtttggtcaaacatcagtctagatggtggtttttagatgtgactaacatttaaatcagtaggctttgagtaaagcagattaccctctataatatggatgggccttagccaatcagttaaaggccttaagagagaaaagactgacgtcccctgaagaagaaagaactgtctccagactgccttgggacttgagctgcaacaactcttccctgggcctgcagcctgctggcctgccctgcagaatttggacttgccagccaccagcccacacaagcatgtaaccaattccttaaaataaaatcaatgtgtatcattctctctctttctatccccatctatgggttctgtttctgtggagaaccatgcatgataatacagcatctttagtcatgggagatatgcaaattaaaacaagatacatctcatacattcttaaawccctaaaacaaagactaacaaccccaaatattggtgaatttgtgtggcaactggaactctcaaacatta

SEQ ID NO: 835027 - DNA, 640 bp, Homo sapiens
cgggccccagacccacttccataccaagccagcccccacagctccagcctctagggttgcatccacagaaccaggctttagacccacttcagcacccgaycagcactagtgactccagactccaggttggctcatgtggttccaggctctaggccagcacttacaacccctggttccaagctggtctatattgacttaggatccctgaggactcaaagcctaggataactcaatcaccaggctggttcccacagaacctggctctaggttcatctccatagacccagtctccaggcccataccaggggaccccagtgccaggccagctcctgtggattcagaatggagtcccacacctgtggatgcaagcccgaggctcatccatggggaccaaggctctagtcttgccctcacagttccaggcactgggctggctcctgtagacccaagttccaggctcattcatccactgacccagacacagccccctccagcatgaggacttcaatagcaagcctcactatggacctcattagatggccccacccaaaatctctgtagaagctgactggtgaaggactttacataacaaggcaataagtaaaaactggaaaagatgcctaatttttaaaatgcagac

SEQ ID NO: 835028 - DNA, 590 bp, Homo sapiens
tttgtgagtttagaagaaaggatccacttttttctttatacgcatcaaaaatagaaatagagaaaagggccaggtagtagatcttcaggctagcaggccctctattctctgattcaactattcagctctgctgttgtctcatgatagcaaccacagaccatatgagaaagaatgagtgtggctgtgtttttatgacactttatttatgaaaagaagcaatgggttagatcgggcccatgggcacagtttgctgaccccgtcttagatgatcaattgcgtatttgcccttgaagcctgcccaggaagtgggcttatcctcttatcaatatctctgtgctaaccatgcacatacatgcagcttctaaatctttcacacctgtgctccgtactgacatgtctatagctaaggttgatattaggtttcatactttagattcttggttagacgcaaagccttggtatctcactttgcaaaagccaaacrtcatgaacgtttctaatggtatagagtgatgttaggatcttgattcaaccccaacattagctgtgcatccattccatatgctccatataaccccatgtccacagac

SEQ ID NO: 835029 - DNA, 477 bp, Homo sapiens
tcatgacaccactgttttttggttttgcacctaatctactagcttattgttctcagtcctttgttatgtttttctctttcagagcttttaaatgttggagtgcccaraactcttatttttattttcctgtctattctcatagtctttgtgatctcagttagtcttatagctcgtattaatccattctcatgctgctatgaagaaatacccgagactgggtaatttatgaaggaaagaggtttaattgactcatagttctgcagggctggggaggccttaggaaacttacaatcatggcaggagtagcaaaccttcacatggtggcaggaaggagaagaatgaatgaagagggggaaaagccccttataaaaccattagctctcataagaactcactcactatcatcaggacagcatggtggtaaccacctgcgtgattcaattacctcccaccgggtccctcccaggacacacgggg

SEQ ID NO: 835030 - DNA, 590 bp, Homo sapiens
gaccaaagaggggtgacaatgacaaatattaagtatgagagaggtgacattgctgcagattccacagatattaaaaraaaaataaggaaatataaacattattttaatgattaaaaaacttaggtaaaatggagaaatttctttaatgacaaaaagtacccaaccagctgggcacggtggctcacgcctataatcccagcattttgggaggccgaggtgggtggatcgcctgaggtgaggagtttgagaccagcctggccaacgtggcaaaaccccgcctctactaaaaatacaaaaattagccgggcatggtggcacgtgcctgtagtctcagctacttgggaggctgaggcaggagaatcacttgaacccgaaaggcagaggttgccctgagccaagaccgcaccactgcattccaggctgggtgacagagagagactctgttaaacaaaaaaaaaagaaaaaaagtgcccaatcttacacaagaaacaaataacctaaacagttctatatctatcaaaacaatttaatgtgtatctaaaaactttcccacaaagaaaatttttgagctccagatagtttcattggtg

SEQ ID NO: 835031 - DNA, 678 bp, Homo sapiens
aaataagacatggtcccttcctaaagatgttttcactgtaataggggagctagcaaggtacaaatagcttatacattaatagaacaaactgatacttaatttctctataaagtggtaaattaaaaactagggattttcaactctacattcttcaagattgtttctcattctttaagacatcattttctccaggatatttttgtatacctcatgattggactaatctatgcaccctcagattttaagtatgcctttatcacgtatttactatattttattgaaatcattttccccatttttgtcttgcacatgaaacttttagctctttgagagtagggactatgtgttatttatatttatatttctggcacatagcatattctctggcacataaaaagtccttaacatattattattgatctaaataataattgaatttgataagattttacaaaattctattactgtgcaatacaatggagttcatgaaattttttcacattctttatttcatttgactttcacaacaattatgaaatctagatcctgagattagyttcactttacagaggaaaagagactcataaaactagcaataactaaacaaggaaaatctctaatcatagcattggttttttttttttcttggtaagttatgtagaagtactttgcaaactg

SEQ ID NO: 835032 - DNA, 597 bp, Homo sapiens
aaaatccaaacgagtcaataattgccttaaatacaagtggtctaatcataacaattaaaagactgaactcatcagaaggaatttgaaaaatataatcccactatatgttattaaaaagaaatctacttcaaatataatgaggtaagttaaaggtaaaggattaaaaatatataaaaatatatatactaggtaaacatgaatcaaaagaaagttgaatgtcatatgtgaatgtcagaaaaagcaaactttagagtacaaaaaattatcaggaagaaagaggtacattacagaataacaaaagggttcacaattaagacacaacaatcctaagtatatatgcacctaacagcaaagcatcaaaatgtatgaaacatttacctggagaaagagtaatagaactgaaagaagaagtagacagatccacaattccatttggaaacatctacattcctctttcataatcaataaaaatstctagtcttatctagtttcaacactaaattccaccacatttaaaggataattaatagcaattttacacaaatattccagaaaataaaggaaagggaaacacttcccaacttttcgtatgacatt

SEQ ID NO: 835033 - DNA, 633 bp, Homo sapiens
ggagggtgaggcagacagatcacttgaggccaggagttygagaccagcctggacaacatggtgaaaccctgtctctactaaaatacaaaaattagatgggtgtggtggtgcacacctgtaattccagctacttgggaggctgaggcatgagaatcacttgaacctggaaggcggaggctgcagtgagctgagatcgcaacactgcactccagcctgggtgacagagtgagaccctgtctaaaaaaaaaaaagaagaaagaaagagagagagggagagagagaaagaaagagagaaagagagaaaggaaggaaggaaggaagagaaagaaaaaaagaaagaaagaaagagaaaggaaagaaagaaagaaagaaagaaagaaagaaagaaagaaagaaagaaagaaggaaagaaaaagaaagaaagaaagaaagaaagaaagaaagaaagaaagaaagaaagaaagaaagaaagaaagaaagaaagaaagaaaaagaaagagaaagaaagaaagaaaggaaagacctgagactgggtaatttaaaagaaaataggtttaattgcctggtggttccacggactgtacaggaagcatggcagcatatgcttctgcagaggcctcagggagcttttcc

SEQ ID NO: 835034 - DNA, 601 bp, Homo sapiens
ccactcaccaaggctgacttggctacagtcactgatargtgcccaaaatgccagcagcagagatgaacattaggttcctgatatggtactattccctggggtgattagcctggtggcagaatggctacattggaccatttctgtcatggagagggcagtgttttcttcttactggaatagatacttattctagatatggttttaccttccctgcattcaatgcctctgcaaaaactaccatccatggacttacagaatgccatatctattgccatggtaatgccacacagcattgtttttgatcagcgaactcacttcagagcaaatgaagtgcaacaataagctcaagctcatgtaatttgctggtcttactatgttccccaccattatgaagcagctggtttgacaggatgatggaatgaacttttgaagacaattacagcaccagctagctggcaatatcctgcataactgggggaaggttcactagcagagtgtttctcccacagctaggattcacaggtccagaaatcagggagtgaaaatgggagtgacaccactcactattacccatagttacctactagcaaaaatttgcttc

SEQ ID NO: 835035 - DNA, 631 bp, Homo sapiens
tctttttgaaattcttctgtgattcagcccgtactgcatgagcattcctattagattctcctgtcttctgtgccacgcttctgtgttgtttggggtacgggaggtccaktgcgcatgggcctcatacacagaccgcagatttggcggaaatagtgctggtgacggagcaacaacaccatcacaaagcatcctctcatcctgccatacgcacgagtattttcgagccagtcagtaacttccccggcttcttagggcaaatgcagctgttaattccctgaacgctccggggtgtcatcagctgggaggaacacccacgcaggcaaatgacgcatctttaaacggaagttcctgtctcatctgaattttccgcccagtgtgttgggctgaacagaaaagacaaactttattggtgacatcttcaaattgactgttagaagccttgatcacacctaattccaaatctgtcatggtttggggactctattgaaatccattttcttccacaaagtccaccacatcttcaaataaatgttgataaggtgctgtacttttcccagttgttaatacagaaacaagccaggaaagctctggaatttcctaatccaacaggggcatgaattgtatatagctg

SEQ ID NO: 835036 - DNA, 631 bp, Homo sapiens
tctttttgaaattcttctgtgattcagcccgtactgcatgagcattcctattagattctcctgtcttctgtgccacgcttctgtgttgtttggggtacgggaggtccattgcgcatgggcctcatacacagaccgcagatttggcggaaatagtgctggtgacggagcaacaacaccatcacaaagcatcctctcatcctgccatacgcacgagtattttcgagccagtcagtaacttccccggcttcttagggcaaatgcagctgttaattccctgaacgctccggggtgtcatcagctgggaggaacacccacgcaggcaaatgacgcatctttaaacggaagttcctgtctcatctgaattttccgcccagtgtgttgggctgaacagaaaagacaaactttattggtgacatcttcaaattgactgttagaagccttgatcacacctaattccaaatctgtcatggtttggggactctattgaaatccattttcttccacaaagtccaccamatcttcaaataaatgttgataaggtgctgtacttttcccagttgttaatacagaaacaagccaggaaagctctggaatttcctaatccaacaggggcatgaattgtatatagctg

SEQ ID NO: 835037 - DNA, 588 bp, Homo sapiens
ctcatgggggctggtgcagagcctagacccagccccttaatccgaaggagggtctccttcctcaccagcaccagcaccttgggcagcccctcctggtaggtgggccccagagcccagcaggtgcctgcagctctggcccagcatcttgcagaggagagacgccccttgcctccaacaacttcttttcctctaagtcattaaacggacacattagaattattcagatcacagctgtttacccagagaagggcagagccggtgctgctcgaaggcgggggaaagggcctctcatggccaaggacaaggctgggccccgaggcagggtatgggccgagggtcctctctgttctgggggcagaaaggaccaagcaccgtgggccacgcctggcatggagatgtgatgaggacctgccccaagcctcctccaccccctgcccttgggccggggagacattacagctgttgcsgtggctgttgggctctgagccttcacctgcccaccccacagggacttccgagccccaggggtcactacaggaagtcatttctgagcaagtgacacccacagccctaagcccagcagacaga

SEQ ID NO: 835038 - DNA, 611 bp, Homo sapiens
gacgagggaaaggagccgagcccctggaacttcctcggtgccaggtctgtgctgagcgctttccgtcacgatcgcacgtgctcctcctcctaaccagcctaggcaggtactgatgaagcacccctgatacagacggggacactgagggcgctcccgccgcgccgaacccaggcgcgcacccggtctgcgctcggctccctggagggcgcgcagccagcggctcccgcagccccgcccccacgcggtgacgtcggcgccccgtccccgcccactgtgtctggctcaggctcgcgcgatcgatgtcctcctggacgtgtccgcggacgtccttcacctccaccgcggcctgggtcccgcccaccgcggcctgagtctcacttttgcccggctcctcctcctgagaacgttccctgggagtttttcatcaactcccgtggttcatccaccaaccacgcaggtctcctccatctgaccctgaactccggcttgggcagccacctgctcctgggcgccccctgcaccactgtccctaggcccctctcacttaccgagtcccaactcattgctctatktccccaaaccctccttccctgttcttccacgttcttcat

SEQ ID NO: 835039 - DNA, 461 bp, Homo sapiens
ttcattcaatccatcaccaaggcttgttgattctctctcctaagtgcattttgaacccakgtacttaacatcgtctccacctttcaaccacctgtatccaagtcaccatcttccctcatctagacaacaacaatgacttcccccatggttgcccagtatcttcacatcccacccaaatccagccttcatacagtacctaggttgatgttttgaaaatacaaatcttgttatgttatttctctgactaaggttcaaatagttcttcattatccacaggataaagcaagactcacaatgacatacagagctcgtcattatctggtcccagttaacctctggcctccgagctccagcaataatgccttgggcctttgcacatgctcttttctctacacaacacactccccattctcctcccattttcttctagttaccagaagaaattttcttctagtttacta

SEQ ID NO: 835040 - DNA, 572 bp, Homo sapiens
atatcggtctttcccaaggatagaaattcaccatctctcaggttgttcaaatgcagtgtggatgttcatgtagtggtaattaggcctcaaacactgaggcacaaggtataaggaagggcaggcaatatccttcattctttttttgagcacagaatgtctgtctttgaatgtgcatgacatatatcactacaatacattgatagatacacatacatatatatacaaaaaagttcacatcctagagaaatgagggcaactttgctgtaatgatcacaaaccaaatattttgcttaggacaaactttggggctaacagctggctgtaatttacaaaaatttaccatgtgctaactcttttctaatgctttatgtgtgttaactcatttaaatcccacgatcacctatgagttaggtactattattttaaaggtgaggaaactgaggcacagagagatatgacctacccaagattatactgttggtaggtggcagarccaggattaaagcccaaattgtctggccaacatcctgtatgcttattaccacatgtagatgttcactacatatcaaagg

SEQ ID NO: 835041 - DNA, 585 bp, Homo sapiens
cttctcctacctcctggcaggggctggcaatgtttgccattccttgacttgtaggagygttgcctcgatctctgccttcatctccctgtggtggtctttctatgtgtttgtctatgtcccaatttcccctttttacagacaccagtcatattggattagggtcccaccccacttcagtatgacctcatcttaactaattacatctgcagcaatcatattccaagtaaggtcacattcggatccaccttctcttttcgctcagttcatatagttgaattcaggaaagttaaatgtgtaagtactgcggctcctgagaatattatggagtagaatgcaaaatctgtgggaatttgaaaggaaaaccatgggaaagagacatggcagtgtctctcttgactttacggtaggcccatcccagcttgagaccactgcattctctgtgtgcaaacatcagacacagatgtgcagtaggtgggcccaagtcatgggtcatatttctttttttcaatatgacatcagtgcatgattggcagaggctggcattggcccagaacggtctgagttatggtctcagtcttgaagctc

SEQ ID NO: 835042 - DNA, 618 bp, Homo sapiens
tgacgactgacaattaatgccaaggtattcacaaccttaatggtggactgcatagagctgtgggaattattctggtggtttttggatcaagtgtcctgtgagttttaggactaattggacccttttcaccaatgrcatcatcaaggatatctacaggtggacagcagaactttataaattagaacttctaaaatagcgtctgccttctttacagtgtttactgtttccaattttacaacctcagacttcgcaggttctgagttcatggacaagacatttaaaaccaaagaaaatcctgctacttcacttttagagtcctcagcccatatacattggtaataccatcagcaataaataaaacaagcctaatctcttaaaaatcaacaggggtcaactccaagaatataatcctcaaagttgaatcatgaaagtttcttgttgcaataaaggctgactgccaaggcacttttttttcttggagatccattcagcagggttggaagaggagttggaaatgacagtggctacatgcatataaagcatttttgcagcttatccttgggtgactttgaggaagctactgtccgtggacttctacgagctttttcatcaagtcct

SEQ ID NO: 835043 - DNA, 520 bp, Homo sapiens
atctctagcatctttttttccctcaaacataccagatacttaataattgttcagtgaatgactagcattactatttttcctctaaaggagaaatctgattctgctgatgctttagggaagaacatatcartaattactaacagtaaagatttttttttcagatgaatctgactgttaacctgctatatgcaaatgttgaacaaaatacatcctggaacttccctgatacccaatgaatatagagtagaaatgagaagcttaattctagttgatatttgctatcagccaataaagcagatagccaaaccagatttgggaagaaaatcattatttctgtaatacttgtggtttagaattttgaagtcttgttattatgcactcatcaactttatatgtactgaggaagtctggataacagggactaagcattaactacgtgcattgggccaaggatcctatggtgatgattttatttccatgatttaatttaactggcataatatattagaatgtgtattat

SEQ ID NO: 835044 - DNA, 559 bp, Homo sapiens
aaataaaaaattcactagagggtttcagcagcaggtttgaactgacagacaaaaggaatctatttacttgaagatacattgatagagattataaaatctgaagaatagaaagaaaaaaagaagaaaaatgaataaagcctcacagaaatatgtaataccattaagagcatcaacatatgataataggagtaccagaagaagaagagataattttaaaaaaaaaattgaagaaataatgactggaatcttccaaattggctgaaaatattaatctgcacatccaagaagctccataaactccaagtaagacaaacacaaataaatttacattagtatacatcatagaaaaatgctgaaagacaaagttctgaaagtatcaaagagaaaaatgacaacacatatgacagaattccaataatataaacagctgactgctcataaaaaayaatgagagtcagaaggcagtgggacaatatacagttgacccttgaacaacacgcaagttaggggcaccaatctcctgttaagagaaaaatcctcatataacttttgactttcc

SEQ ID NO: 835045 - DNA, 627 bp, Homo sapiens
tggggtgggggttatgaatctgaaaaaattatagcgaaaacatattctttctaggctaaggaatatacatgtaaatcaagtktggaggaatgggtaggggaagaacgctgtaaattattttgttcaaatgtattgaaaaacatccagctgttacagtctatttctttagtttctgtacttccttaagctagtgagttataaagaatcaccactaaaagaaaaaaaaaaagtttttctctcaggaattcacaggagtgctgttttctcagcctctggggtgtgatcctgtctgcattttgtaaatctttagtaaatggaaaaatgatacccatctcaatctgcctgtggtctgtaagtagaatgggctctgcagaggagtcagactttctggtttatcaacagaaagataagtgacatgccacagaagattggagaattgcaagtaatcaagttttatttgtccctagacatcaagcctggatctttaagaaggtgagtttgcaaaaaggtcttagaaatgtcagtcatggtttctactccatataaaactcccctctttatatgaagcagcaaaccaacagcctctgcaggggatgcaggagcgattctgccctgtgattcctaccc

SEQ ID NO: 835046 - DNA, 610 bp, Homo sapiens
tataaaaaatgatttattatatcggccgggtgcagtggctcatgcctgttaacccagcrctttgggaggccaaggcgggcagatcacgaggtcaggagattgagaccatcctggctaacacagtgaaaccccatctctactaaaaatacaaaaaattagccgtgtgtggtggcgggcacctgtagtcccagctactcgggaggctgaggcagaagaatggcatgaacccaggaggcggagcttgcagtgagctgagattgcaccactgcactccagcctgggcaacagagcgagactccctctcaaaaacaaacaaacaaaaaagatttattatatcataaatttttttcactacaaaaattgagttttctcttggaaaaccaacaacttattagtagcttccttttaagcacaatttggttattagaaggccttcactgcgggagtaatcttgcagaagaatttatgaccttgggaatttgtattttcaaaaatataacctggaggagagggatagctagctgggcaaatttcctgttttttcggtgtgtactctacagagtacatggttacatcatcaaatggaacagaactcttaaaagcaatattt

SEQ ID NO: 835047 - DNA, 595 bp, Homo sapiens
attgaataagcatttttcgaaacgatcctggagtgtaaagttccggtcagtgccccgtacaacctcgaacaaagcgtgcatttcatacctatggcacagtttgctcgtrtttgaccttggggatatcgactggtccgcatgccggagaaaatgattattgtgggtaattattggtcttattttggcgtctggttagtattggccttgtcttggggtactttgggagaaaaagccttttgtctgtgttgatagaataacttgacattcaagtgctgttctaagtatttcctgatttttacagtcctaaatggattggcttctttctggtacaataggtcaggctacatgtgaaacacttctgcagttaaaaaaagaaacaagaatgtaaatcatgtgccctgttaaaagcagccagttcctaagatgatttgattttatactcatcaggctagtctttattacttgccgaaatgttttgtgaactgagagggtctctaagctttcttaactagaagtgtcagagacctagcttactcagttgtggtcacctcagaagggaagggaaattctcattcgtcttggtgcaggatcctcc

SEQ ID NO: 835048 - DNA, 622 bp, Homo sapiens
attaggacttttcaagagagacttagatctgatagaactgatattttagcatttccagctctggtttcttttttctttttttttttgagacagagtctcgctctgtcactaggctggagtgcagtggcgtgatctcggctcactgcaacctccgcctcctgggttcaagtgattctcctgtctcagcctcccaagtaactgggactacaggcgcctgccaccatgcccagctaattttttttttttttttgcatttttagtagagatggggtttcaccatgttggccaagatggtctcaatctcctgaccttgtgatccacctgcctcggcgtcccaaagtgctgggattacaggcatgagccaccgtgcccgaccccacttatggtttctttaagtgtgagtgaagctatgctgggtcacccagatttctgggcaattcaagctgatttttttttttttttacttgccatgaagtctaaaaagacaagaaatgtagactggaaagcttcttttctcatgttttctcatgaaatccatacccataattcattaaatgaacaaacattgcaatataatttctgcaactcctawttttaccctgaacctttctcttgctaatca

SEQ ID NO: 835049 - DNA, 582 bp, Homo sapiens
aatgggaagcctcatagagtttagagtgttgtggtgtgctgtggttgatacaagtgatgactgaacgcactgtgagaagaatctgaatgttaagttattttttgctcatccactgacacatcctctcctgcaaaatgggtttcttttaaaaacgagagtctcacctggtgatggtgattattaacttcatttgggagctctaataaaaaagtgagataaacacctttttctcttgaggtagactctattctctgcttgtctagttctaaaaagcaattcatcaggaaagagaacatcatgagtaatatcaaaagacaaaattacaacaagtttagttatagagtgaattggtttttatttaccattggggcagcttctgttctacaaaaaagagtaagagcttccactgggcattgggttttgtaaggtgggaacaagaaacagaacaatggaaaaaaaaactgattggttaacatcgggtttcagattacttttttagtaagagttaaagcagaggggacttccttatcgcactgactcagatagactggartctcctgttttcaggaaaaactggtctgt

SEQ ID NO: 835050 - DNA, 605 bp, Homo sapiens
agcttaaagatcctttagaaatatttatttatttatttatttagaggcagagtcttgctctgtcacccaagctggagtgcagtggtgcaakgagctcgctgcaccctccgcctccaggttcaagcaattctgctcctcagcctcctgagtagctgggactacaggcatgtgccaccacgcctggctaatttttgtacttttagtagagacaaggtttcaccatgttggtcaggctagtctcgaacttctgacctcaggtgatccacctgcctcagcctcccaaagtgctgggattacaggtgtgagccaccacacccggcctagaaatattttaaatagagtaattacctttattttggaatttttcaaagtcttcctggagaaagtggtgtgtgaaatgagttttgaaggatgaatagaattttgcaaactattgattggtaaggaggtatgccaattggggaaaataatatgtgcaaaggtatagaagcattggcattaaagaataatgaaaagtctagtttggctggaaatagaaagtagctggaggagttccccagataaactaggaaggccatggatgtcgtattgtagaaggccttgaa

SEQ ID NO: 835051 - DNA, 605 bp, Homo sapiens
agcttaaagatcctttagaaatatttatttatttatttatttagaggcagagtcttgctctgtcacccaagctggagtgcagtggtgcaatgagctcrctgcaccctccgcctccaggttcaagcaattctgctcctcagcctcctgagtagctgggactacaggcatgtgccaccacgcctggctaatttttgtacttttagtagagacaaggtttcaccatgttggtcaggctagtctcgaacttctgacctcaggtgatccacctgcctcagcctcccaaagtgctgggattacaggtgtgagccaccacacccggcctagaaatattttaaatagagtaattacctttattttggaatttttcaaagtcttcctggagaaagtggtgtgtgaaatgagttttgaaggatgaatagaattttgcaaactattgattggtaaggaggtatgccaattggggaaaataatatgtgcaaaggtatagaagcattggcattaaagaataatgaaaagtctagtttggctggaaatagaaagtagctggaggagttccccagataaactaggaaggccatggatgtcgtattgtagaaggccttgaa

SEQ ID NO: 835052 - DNA, 564 bp, Homo sapiens
attttgcaagacactgcttaaaaaaaaaacaacacgcagctgggcacggtggctcacgcctgtaatcccatgtaatcccagcactttgggaggccgaggcaggcggatcatgaggtcaggagatcgagacaatcctggctaacatggtgaaaccctgtctctactaaaaaatacaaaaaagtagccgggcgtagtggtgggcacctgtagtcccagctactcaggaggctgaggcaggagaatggcgtgaacccgggaggcggagcttgcagtgagccgagatcacgccactgcactccagcctgggcgacagagcgagactcggtctcaaaaaaaaaaaaaaaaaaaaaaaaaaccacacacacacgcaccagaaccctgtgataaattgatagtggcttaactttcatcttaactcctttatttctgttccggcttgagtggtatttatcctttccakgtttcttatcccttgtaaaagagcaacggtgacgatttgggagggatcatgccctaagtgctccatggaaccatcagagcctgaacatgaaggcagaagagttt

SEQ ID NO: 835053 - DNA, 611 bp, Homo sapiens
aaggttttgtataatgacaactatataaagaaaatattaatgcatatgtaaatttgaagactgaatagtaatatactgaaatactaatgatgattgcattattataatttttttaaaccttcctaaatttmtgttttatttctgagggcagaagatgtttggaccagttaatataactcttggctataagtaatagtaatttgactcaagaaacctaaatgaattggagttcatttttctcatttaacagtaagtccagaaattgtaggtcatagttctgtgacttaacagtgtcaagggtgggagccctgttggcctttatttctttgttgccagataattgctgaagttcttgccatcttctctacattcaaggcagaaggaatgaaatagaaggaagagacatgccagttacatctatcttttttttttttttttaactggaaaaaaataaattttctcagaggcccccagcttaagtctctgaatgaagattgagtcaatttgggtatctctacttaaaatggaggctgagaaaacatatgagatgtggaaaaaaaaaaaagagcgttgaaagtaactttggggtggctgataaaccctctagccca

SEQ ID NO: 835054 - DNA, 410 bp, Homo sapiens
atctgcagattggtaaattgaggctcacagaattgaaacagcygacaggtttgactcacatgaagggattggagaaatcatacgggctggacgtggtggctcatgcctgtaatcccaacactttgggaagcagaggcgggaggatggactgagcccaggagttcgagatgagcctgggcaacatagggagatgctctagttcaccttggaagtaacgacaactttcagtttactatgtctctatctaaaaagaagtaacaggttactggaaagatcctggaaccgggagagagaggaaagctgggttctcttcccgtgtcttccaactactgcctatgaccagatcactttccctgtctgagcctaaatttctaatttctgaggaattcttgggatccatggtgccatca

SEQ ID NO: 835055 - DNA, 620 bp, Homo sapiens; identical to SEQ ID NO: 828725

SEQ ID NO: 835056 - DNA, 540 bp, Homo sapiens
cagtcttaactttgtcaatgttacaaagtaaaaatatgattataattgtcattatttacatttgtcatgcctaaggctatatctacccaaagccacagaaaaatgtaatcaaccagatgttcgartctttaaaaaggtcaatatatgactattaaaaagcacctggtgtttgtggaggttatttcaatctactcaaatgtttagcttcatctaaacacagtgtgtctcatctccctgggtagatgaacacagattgtctcacattctactatctctgaggtccaaaaggaccccatacctatgtaatactatatgttgttgacacctcaagatgaaaggaagttcacattaatgttaactaacagtagtatgctctgaaataatcttgattgccttgacgagtcctaggaatgatggtcaaagacatagtcttaaagagattttctctttataggaattaatcagccatggaatacagtccatcaaagtttgaagcaaccccagtatcctggagcgacagtgtattgatgtactcagaaa

SEQ ID NO: 835057 - DNA, 540 bp, Homo sapiens
cagtcttaactttgtcaatgttacaaagtaaaaatatgattataattgtcattatttacatttgtcatgcctaaggctatatctacccaaagccacagaaaaatgtaatcaaccagatgttcgagtctttaaaaaggtcaatatatgactattaaaaagcacctggtgtttgtggaggttatttcaatctactcaaatgtttagcttcatctaaacacagtgtgtctcatctccctgggtagatgaacacagattgtctcacattctactatctctgaggtccaaaaggaccccatacctatgtaatactatatgttgttgacacctcaagatgaaaggaagttcacattaatgttaactaacagtagtatgctctgaaataatcttgattgccttgacgagtcctaggaawgatggtcaaagacatagtcttaaagagattttctctttataggaattaatcagccatggaatacagtccatcaaagtttgaagcaaccccagtatcctggagcgacagtgtattgatgtactcagaaa

SEQ ID NO: 835058 - DNA, 600 bp, Homo sapiens
ttcacatctaattggtcacattattactgtgagctgaagggaatccagaaagtattcttctagtcagggcaaaaagatatttggtaggtaactagcaatatttacctcagggatataatrctgaacaatgtatagtttcagccttctaggtgcttatgttacaatgtgagagaaatgctacattgtgagtgctgtagcagagatttcaataaaatactataagatttcacaacacagagcagctcactctttctaaagaatttaaagggggcatcacagagaatataacattttagttggatattaatgaaagatttggagcgtgttaggtaagaaatgttgcaaggtgaagccaactggacttcctgggtcgagtgggggcttggagaacttttctgtctagctagaggattgtaaatgcaccaatcagtgctctgtgtctagctaaaggattgtaaatgcaacaatcagcactctgtaaaaacgcacctatcagcgctctgtgtctagctaaaggattgtaaatggaccaaacagccctctgtaaaatgggccaatcagcactctgtaaaatggaccaatcagcaggactgtggcagg

SEQ ID NO: 835059 - DNA, 700 bp, Homo sapiens
tacattttgggagaagagagagggaaataatatggttagggcatgaggagcctcctatgtgtcctttgagtgtttcttgaaccaggttgatagtttcatgggtgtgttcactctgaactaattccttgagctatacagttatgatttgcacaattcaattatattatatttcagtggaagctaatgaaagagaaacattgctgctaaaattcattaagtgaaggcttatggggaagtagaccttcatagcatcctatacttgcaaaagtggcaatctaactgaaggatgacatcagtatcagatatcagatatcacacaaaccaatgatcactcttactgtctcaactgtgggtcaacctgacattacaaattttctgatgtagtacaacatgaggtacaaaatttcacctgtgatttattctagtcaagcgtgtttaactggcagccattaaggcatcagatgtaaatttagacacagaaagcaatcaagcaaagccttaaggtatgccattttgtaggtcaattggcctctttccttcaacaagtcagtaccatttaaaaagagggggtaattctaaatgtaaaaaaaaattaaggggtggacaattagatataatgtgcaggactgcactgagactggtttaaakaaatcagccctaaagaaaaatatttaattaattaaagacatctaaatacagc

SEQ ID NO: 835060 - DNA, 290 bp, Homo sapiens
tactagcgttactggaaaaagaggtcccgatccacacttcaagagtgggttcttgggcctcacacaggaaagaattcaaggtgagtcacagagtacaatgagaagacatagtttattgaaagctactgccttttagattagggcgtcctcagaaagcaagcraaggaatgcaccctctttgtttttagtttttctgttataggagttttgtctatgtaaagactaaattgaattgtctatgtaaagactaaattggaaacagaataacaagaagaaggaatttatgcata

SEQ ID NO: 835061 - DNA, 290 bp, Homo sapiens
tactagcgttactggaaaaagaggtcccgatccacacttcaagagtgggttcttgggcctcacacaggaaagaattcaaggtgagtcacagagtacaatgagaagacatagtttattgaaagctactgccttttagattagggcgtcctcagaaagcaagcgaaggaatgcaccctctttgtttttagtttttctgttataggagttttgtctatgtaaagactaaattgaattgtctatgtaaagactaaattggaaacaraataacaagaagaaggaatttatgcata

SEQ ID NO: 835062 - DNA, 491 bp, Homo sapiens
ttagtcagtggggctttctgcaaacactctcaccttcgtcaggctcttcygctgacatgcgggaggagttaagtacatgcagctcttatggttttcctccatctgtccttgtctcctgccaggttagaagctggtggagggtggagcccaggcggtaggctcctgtgttccttccctcacccagcccatgcctcggctagaacagacacctgtgcaggcaagggcaagggtttgactttgcaaagatggctggaacgccttgccaaagggatttttctgcccactaacagccatggttagggcctgacctggtctgcccgactactttaggtggccacagtgttgttttcagcaacatgaggttaaataacggtaacctttgggtttctccttcacctcttctaaccccataacagagttctgttctgtaccagatttggaacaagtgagttgtataaatgatgagactgttcccttggccaacgagagcc

SEQ ID NO: 835063 - DNA, 543 bp, Homo sapiens
tgcaaccctgggaggaacatattgctttcccattttataaatgaagtaacagaggctctgagaggttctcagttcctcaaattaaacacctaktgagtgggggaaagttgggatttgaatccaggtgtgccttgttaaaaagtaattgtggtagggagactttgacctttttaaaggctatgtaatcagagattcttctttctgcattcagttaatgctgtcctttacagaagaattttctccttgtagattgatgatgtggaggagttatggcactagtgttactggtagtaacaacagtagcagctaatattcactgaacatttcttgtaaaccactgggaatgctttacacataataacttagttccttgtttcttaatccatgcagtgctgtgagggggaccattttacccaagttcacagatgaggacactgacacagaagttacataagttgcccagtgtgccatagtaagtggcagagccaggattcaagtccagacaggcagtttggctccagagtccaagttcctaattttatt

SEQ ID NO: 835064 - DNA, 350 bp, Homo sapiens
ggcgggaggaagggagaaaaaaggaaagaaagcaagaacgtgagaaagaaagaatatgagaaaagaaggaagaaaagggagggagaaaggaagggagggaggagggaaggaagaataagaggaaagaaagaaagaaggaaagaaggaaggaaggagaaaaaaagaaaaagaaagaaaggaaaagaaaaaagaaaagaaaaggaagaggaaaagaagaaaggaaggaagaaggcaagggaagggaagagaagacaaaggaagatggaaagaaggaaggaaaaccacaaayattagaaattctgtgtttgttagagaatatgccatactgttttttttttttttcacttgaa

SEQ ID NO: 835065 - DNA, 566 bp, Homo sapiens
gttgctggtgtttggctggaatttcacaccagtgggtctaatcctatgaggcactgtggaagtggggatccagactgtygctgaccagcccattggattcagcccccttcctgggggtatgtacaaagttccaaccttccaccttgccagagttgcagtcagttttgcctggaagccaggtgctggagtatgttaagctcctgagtctctgcgtgtgcctgagtggctactctgccaagactccaggcagctgtgtgtgtcagactgaaggccctgatggagtgggttcatgatggaatctccttaccagagggttgaaaacatctgtgggagaggcttggtttctctgagttgcacattcacttactgcttccctgggcgggggatgttcacctggctctgtgttgctcctgggtgagcttttatcctgtcttgcttttctttgttcttcatgggtcgagttgtttccttgattagtcccagtgtgactacctggatgtttcagttgaaggtgatgtatttacttgcccctttcattcctctctgtgagagccacacaccatagc

SEQ ID NO: 835066 - DNA, 566 bp, Homo sapiens
gttgctggtgtttggctggaatttcacaccagtgggtctaatcctatgaggcactgtggaagtggggatccagactgtcgctgaccagcccattggattcagcccccttcctggggrtatgtacaaagttccaaccttccaccttgccagagttgcagtcagttttgcctggaagccaggtgctggagtatgttaagctcctgagtctctgcgtgtgcctgagtggctactctgccaagactccaggcagctgtgtgtgtcagactgaaggccctgatggagtgggttcatgatggaatctccttaccagagggttgaaaacatctgtgggagaggcttggtttctctgagttgcacattcacttactgcttccctgggcgggggatgttcacctggctctgtgttgctcctgggtgagcttttatcctgtcttgcttttctttgttcttcatgggtcgagttgtttccttgattagtcccagtgtgactacctggatgtttcagttgaaggtgatgtatttacttgcccctttcattcctctctgtgagagccacacaccatagc

SEQ ID NO: 835067 - DNA, 620 bp, Homo sapiens
ctctcagggcatgccacccttccagaaccttcatgtgctcaccaacctagaaacttctatttttaaatgccctgaatatatatgccatacaaatgattgaaaacaacaacaacaaatcaactccatggcggtcaccatgttagatctgttgaaatgctacaacaggccaggcacggtggctcaggcctgtaatcccagcactttgggaggcagaggcgggcggatcacctgacatcaggtgttccagatcagtctgttaaacatcgggaatccctgtctccactaaaaatacaaaaattagccaggcatggtggcgcgctcctgtagtcccagctactcatgaggctgaggcagaagaatcatttaaactcaggtggcagaagttgcagtcagctgaaatcgtgccactgaactccagcctgggcgacagagcaagactctgtctcagtacatgcatgcatacatacatacatacatacatacatacatacatacatacatactacaactatattagttgaaatgataataagttagttacacaraataaaagaggcatcttagtgatccgcctttgggaacagaaaacccagttttctgggggaaataaagcattctgt

SEQ ID NO: 835068 - DNA, 505 bp, Homo sapiens
cacgttgagtagaggtaaagagctgtgcagtgaaggatcttcagtgacaggagtgaaggcagagcatgttcacagatgcagagcagttggaatatttcttgaagaaaggtgagttttttcttctgttactcccttttctgtaaaatagatggcagagtatcagcttgatgcaagaggcaaggagatgttagaggtttgatgagagaaaacgttcatattggaagtatttgagagttcataacctagggggaaaataggaggactgcttagtagaaattataaattgcatgagatatataagtatctccattcacataaaatgaaaacagtgagcacagctgtttcaatttttcccaattgtatacttcttgcatacagttgctgaagaggaaattaattggttttaatcattaaaattagagatgaragaatttcccagcaagtataagaaatgtagagcagggaaagaaaatgatgaagccctgtctttatgttgggtaaagaa

SEQ ID NO: 835069 - DNA, 613 bp, Homo sapiens
ttattttagagagacaatttaataactgcctaaccatcacctgatggttacctgacatttctggtggggaggctgtctcctgttttgttcatgtctgcctgaatatgtactgtaacattattactggtaagtaatatttaaaaacatatagatgcaaaaaatttcggctctagtattccattccattatatactcatgtgagagtgtaaaagtgtttacacaagaatattttgtaatactttattagtagaaattctataaataatgtgcccaagctaaatatatatattaatatagaaaacatcccctatatactcatacatatatttatgaagaaatatgagtccaaaataacgtggtatgtctgtattaacaggtaagaaaatatgttcaaatatgttcaagtgtaataagacaataaacaagttacaatgatgtaagtatagtatgtagttacttgtagtaattgatactaacattagttagttaacaatagttctactgagtaaatagaaaataccaggagtagctttcactgtttttttttttcttttrctttatcaactttattctctgacagatctggaggccaaatgtaaaatcgagttgttgg

SEQ ID NO: 835070 - DNA, 628 bp, Homo sapiens
ataaggacactatataaatgtctatagcaatgaytgctatggaagttacataaaaacagacttgatttttttaattgcatgaataaccaaaatagttatttttaattttaatatattttttaaattaggacatggttattttaattttaaatcattagtaatacgagatgtgtaattagttgatatttaacgggaagtgttaaaattcttgaagatacatttattttgaaaactggataggattttataatattcaaataacacacatgattcacctgttcaaattacaagcagaaggagggaaaatacatggattcatatatttgaggcaaatgtaaattatgagcttcatatatgcaacgtgtgtatttcttcttttccctaagaaagaagaaatgtacacattaagtatatatttatggctacatggtaaattaatagaatgagaaatgaagtcttgaggtgaataacatttacttctatgactagatcttaaacaaattgagcaaagggtgtaatatacgaaaatcaatgtgtcccatatatccccgtttgacaaaggatagtgtaaaaaaggagtgtcaggccatggacactcattcaaacagtccatttgggattccatgtg

SEQ ID NO: 835071 - DNA, 650 bp, Homo sapiens
ggtgaggagtatgaggggctgagaggagctcagtatttgactagaatactacccaaatctttcagctggataattcgatgttttaggggctgtgctgtgcattgtaggatgtttggcagcatccctaacttctactcactagataccagtagcataaccttctattggtgacaaccaaaatgtccccaggcattgtcacacatccccaggagatgtgggaggggctaaatcaccaccagttgggaagcactggacgggggtaggaatgtgacgtcagtcaggataggccagatatgccatagcaacaaccccatcatctcaatggctacaaagaagaccgtcatgaagtgacagaaggactctacttcacggatacttcacagattcacagtctacttcagagactctggctgatagagcagccaatgtatccaatatcatgaattgccatgccagagggaatagagtgctctgaaaggtctcaaaccagaaattaaatactttatgccaacagtttkgtatcacttgctctcacaacccactggccagaactagactcacgcaatacaaggagagctgagagtatagccctaccacatgcccagcagagacgagaaccagaaatacttggcaggcagcactaatggcca

SEQ ID NO: 835072 - DNA, 574 bp, Homo sapiens
gtgtctgtctgtaccagcaggaaaatgttaagctgacaccatttattcacaacactgataacccagcaactttgctcagcatctctgctgctcaggggaaagattcttttacatggaatcttgcttccatctctctctctctctgtctctttctcttcctccagcttcatcaaggaataaacaggcctcttgggacagtctatctctgttatccctcccttctcctctttacaggtttttctatctgtaggcttggctgctgctggttttatgatggtgcggccaagtttcaaaacaacacgttgattctttttttctgcaggaaaatttgcttctataattgcctcagggaggagaaaagttccaggaggaaaagaggtagcactttcattcacaataattcaactgggatgtttaaacataatttcctcactgagaatttcattagatcttacctgggtcattcccatggaaactttaatcctcagctgagatgtcatctctsctgggaagacttcctgaccccagaatttttgtaaggttattcttctccagggttctgaactctttttca

SEQ ID NO: 835073 - DNA, 519 bp, Homo sapiens
agttaaaatgacaaaagacaaactaaaagttttcatagtttgaaattatgtgacctacacaggattatgtcaatgtacagagagtgcttacaaattaataagaaaaagacagatagctcaatagataaatgggcaaatgacatagacatttataagaaaaatacatacaatgaaacatacatatgaaaggttaccagactgatacttagtgaaatataatttagaaagtaattttttttggctttgttttaatgtaacactggtaaagatttaaagagttttgtagaaaccctggggaagtgagcattttcatacagtgactttgatggaggatgttgtaataaacattctggaagacattttggcaataggtataaaaaatcttaaatatgtkttcccatgatatcataattcaaaatctaggaatttatcttcaggaagtacttgaagaaatgcacaaagctaaatgaaatgtctatggggactttggactttgcttaacacattatgatgccattt

SEQ ID NO: 835074 - DNA, 623 bp, Homo sapiens
agggatggagggagggaagaaagagaaagagattctctcaccgagaagaatgataagcagtgaggtattatttctttgatgattcctaagtagtarcatcaatgagtatttcctgtgactgcatatggagtatcagaagagaaatgtcaccatcagagttgatatttactggagcagagcaaaggagtttggggattggcctatcatcagaagccctagttactccattaagggaagtgataacctttacattgaaactggtcatttaaaagctgacatttgatatacctgtgtacccagtctccactgtaatttgctgcctccaaacaagtagggaattgtgttcaagttaagtttagggcacagaaaaaagagtctgctccattaaaagaaaaactgcatttcaaaattgacaagcaatgtagttagttgcaagtaaaattattgggaaaagattgacgttgcttttatgaatagaatgtgttgagaagaaaggcaatagcaacaaaaatatcacgtactgccatggtgataatgtttcttaattgatacattaaagcaggataagtccccgtgagactttgatccaggccagtatgttgaatagtagtgtcaagacttac

SEQ ID NO: 835075 - DNA, 656 bp, Homo sapiens
ttctcttctagtcttgtttgtacatatccagatcacgaagtagtttttttttttttttttttgagacagggtctcactcctgtcgttcaggtgggagtgcagtggcacgatgacagcttattgcagtcgtgacctcctgggctcaaacaatcctcctgcctcacttttaaatttttcttttgtagagaagaggtctcactttgttgcccaggctggcctcgaactcccgggctcaagcagtccgcctcgcctcggcctcccaaagtgctgggattacaggcatgagccaccatgtccagcctcaataagtaatttttaatctgatgattgttcaatataaaattagctttctttactttcctaagtgtcattgtatttttaaatgttctcttttcaattctgtagtatttggggaagaaagtaaaatataatatatgaattacagggaatagaataaggtatttggaagcattttagctttagaaaatgagatgagacactactttttgccatagcgatggatttaaaacccctaaggatgagcatgactgaggcccaaggaattattccttccacttyactttctgctcctgagagctgcctggtttcctgtggtagagatgcttcattagtaaatgaagggctgtcacctcctt

SEQ ID NO: 835076 - DNA, 576 bp, Homo sapiens
caacagacagcaatgtttgtcaaagaactgcatccatgacatcctcagcatggcayaggaaactggtcaaacaattcaccaaagtgattttattcccatgcagagttccttatagtgcactgtcttagtactattctacaaatggccattatataaagacttaaattaaacctccatgatatcctagtattttctaaatgttgaaaaaaaaaaaaacaagtttagtcatcaagagagatttttctgtgcaaaaaaagaaaaaacaaacaaacacacacacaaacacacacacacaccaaaaatcccccagtaccagatagccacaatactagaggagggagtaaatgcatatgaggaaaaaggattcaaaataaatttttatttgcaaaattaaataaaaaaaaaaaaacaggaacagaaaactagtccgaatcaggttccttcttctttcttctcgtcccttttggatgagtcccagactctgttttttctttgttgtgttcagtttgttgtgtcatccactctttttctagctgtttcagcatgtctggagtgaggagtccttgctgcaccaat

SEQ ID NO: 835077 - DNA, 552 bp, Homo sapiens
caataatcttcctttcatctgagattatggttaacagattatctacctgggatagaaatggatagtcctggcatgctggcatgggttactgcaggccggttctggggcagcgagtccatggggaaggggctgagtcaccacttcatgcagagggagttctgggggccctggtatgggaagcaagttagaggctgcccctattctgaggaccccagaatttaaacgagtccaggaatcacctgtaatgtgcacagagacttcagcgtctacacattggggctcacagagagatctggaatgtgaggctgtgataggccacccgaggcagagccgggcagttggtggctttgattgtgtgtgtgaaagggtgtctagaatgatgcccaggtgggcagatggtcgggactgaggggtggaggggcagggtgggagggattttggtcatggggcttgtcgtgggtcattcctgagtccattttcctgcctcggcctycccgaggagggaactggatatagaggctgtgggctcaggactgagatcagggccaaaga

SEQ ID NO: 835078 - DNA, 545 bp, Homo sapiens
catgttgatcgccatcccgatttttttttttttttgagacagggtatcactttgtcactcaggctggaatgcagtggcgtgatcacagctcattgtagcctcaacctcctgggctcaagtgatcctcccacctcagcctcctgagtagttgagacggcaggcacatgccaccacacccagctaatttttgtatttttttgtagggacagagtctcattatgttgtccaggctggtctcaaactcctggactcaaacaatcctcctgcgtccgccttccaaagttctgggattacaggcgtgagcccctgcacccagctgcactccctgtttcttgcattttcttttctcttccccagctctctcatctccctggcccttcccccaccaccactgtgtggttctgtcctcaycccttgccaaaagaaattaaaaacaaaacaaaaactacaaacaaagaagagagaaaaataatgaaataacacaaacgggctttggacatttactgtgtgccaggtgctatactagacattagaaattggcagag

SEQ ID NO: 835079 - DNA, 533 bp, Homo sapiens
agcaagaggatccagttcagaaccactcattgtacgttttttctagtctgatctgtctcctgcagtcctcagcctttctttgactttcttgtccttgatacatttgaagatgacaggcaagctatttttgtaggatgtgcctcagtttcgatttgtctgatgcttgctcatgattagattcaggccatgcatttttggcaggaatagcacagaagtgacgctgggtttttctcattgcatcctgtctggtgcctcataattttgatttgtttgttactgatgctgtttgctttcatcacttgagtaggatggttgctgccaaggttttccagtgtgaagtcaatatttacccctttgtagtaaatatcgtgtggtcaggtactttgaaactatgtgaatatcccattcctcatcaaactttcmatttatttatttatttatttatttgtatagtatggactcaaggtttgttagtttattcaatgggctataatccgtttttttcacaatttattgtgatactcaactttttc

SEQ ID NO: 835080 - DNA, 564 bp, Homo sapiens
gaccatgagggtccacacctggatggctgaagcacttctgccaggttcccagatccctcccagaggcttatccctcagccaccaccactgctgccatctccagtcactgcaccttcgaccctttccccacactcagtgcgaggtgcatgtcttgcctgtggttcactaagcgtttcggttcctttcttggcagcctttccaagtgctgaagccccacccacagcagtgttactctccccagaatgaccagagtgcaggggagggacttgaaggcccctagtgaggcacttaggccagccctgacctgcctgtgttcctccaaaagatgagggggctacaccaggagacctctaagcagcctgtgctctggccagacctgcagcaggctggaggcaggaggctgcttcattggctgcgctatgctctgggagcccaagggccaggtacccaggcagatgcrtgggcaagtaggacagtccacagccagcatggacgaaccctgagctggcctaacctaccccatccaacaccccctcgccagctcccaaggcagcctgggggcag

SEQ ID NO: 835081 - DNA, 564 bp, Homo sapiens
gaccatgagggtccacacctggatggctgaagcacttctgccaggttcccagatccctcccagaggcttatccctcagccaccaccactgctgccatctccagtcactgcaccttcgaccctttccccacactcagtgcgaggtgcatgtcttgcctgtggttcactaagcgtttcggttcctttcttggcagcctttccaagtgctgaagccccacccacagcagtgttactctccccagaatgaccagagtgcaggggagggacttgaaggcccctagtgaggcacttaggccagccctgacctgcctgtgttcctccaaaagatgagggggctacaccaggagacctctaagcagcctgtgctctggccagacctgcagcaggctggaggcaggaggctgcttcattggctgcgctatgctctgggagcccaagggccaggtacccaggcagatgcgtgggcaagtaggacagtccacagccagcatggacgaaccctgagctggcctaacctaccccatccaacaccccctcgccagctcycaaggcagcctgggggcag

SEQ ID NO: 835082 - DNA, 537 bp, Homo sapiens
aattgttacaaaatgtttacaaaaaactatattcatagaaattctgcatgtccacaaagggcatcccctgaatggcccagagaccagtgtgtgggaaccatgttgagtgggagtggggggcgtccaggcactctggtctgggtggtgggacaggtctagggtctcagaggcccatggtgctccctgggggctcagcccagagcctgggaactgaggcccctaccatgggaggcccaaccaggaagtcggcccaggcagaggtgggctgggggcttggcgcacagtggtaagaggacccatgatccctacggaaccaagacaggatgctcctcatggggctggagtcaggcgtgcttggtcagggccccagaggcagacccagagttcagtgcagaccagcctgacgcctgargctgaagctggggcaggctgctgactgcacggaagcccacctcagatatctcctcccctgcatgctccagagatgctcagacctgcgaaagaggctaaaggaatggaactgcagagaacagaccg

SEQ ID NO: 835083 - DNA, 635 bp, Homo sapiens
gaaccttctccatgcaccacagtttactcaaaaatggacytaatccagcaatcccactactgggtacctaccccaaaaaagacaagtcattatatgaaaaatacacttgcacacacatgtttatagcagcacaatttgcaattgcaaaaatatggaaccagcctaaatgttcatcagccaatgagtggataaagaaaatgtgatatatatatatatatatgcgccatggaataccactcagccatataaaagaatgaaataatggcattcacagcaacctaggtggagttagagatcattattctaagtgaagtaactcaggaatgaaaaactaagtatcatagctaagctatgagaacacaaaggcataagaatgatataatggaccttggggactcagggggtgagaaataaaagactacaaattgggtacagtgtacactgctcatgtgacggatgcaccaaaatctcagaaatcaccactaaagaacttgtctgctgcatcaccaccaccaccactctgccacaaccaccgccacctcctgccctgtagcgcctgccaccccctatgtcactgctgcctcaggaccagctgtatgattaggccataatcttcagagaataaatacattcct

SEQ ID NO: 835084 - DNA, 551 bp, Homo sapiens
agttttggctggtctcagctggggtcattcatgagctcactctaatctgatggattgcctgggatgattggtccaaaatggcctcaagtgcaggagttcaagaccagcatggaaactatagtgagacctygtctctacaaaaaaaaaaaatttttgccgggagcagtggctcacacctgtagtcccagcactttgggaggccaaggtgctcagatcacctgaggtcagagttcaagaccagactgaccaatgtggtgaaaccttgtctctactaaaaatacaaaaattagccaggtgtggtggtgcatgcctgtaatcccagctacttgggaggctgaggcaggagaatcacttgaacccaggaggcggaggttgcagtgagctgagattgtgccattgcactccagcgtgggcaacaacagcaaaactctgtctcaaaaaataaataaataaataaaaaataaaaattagccaggcattgtggtgtgtacctgtagtcccagctactcaggaggctgaggcatgagaatcacttgaacctgggaggcaga

SEQ ID NO: 835085 - DNA, 629 bp, Homo sapiens
agaaagaagtaagtctgtctttatttgcaaataacataattatctatgcagaaaatccaaaataataataacttttaaaaacctcctggctctagcaagcaactacagtaagattgcaagcttgaaggttaatatacaaaagtcaattgcttttctatatactagcaataaacaagtggaatttaaaattaaaaacacaataccatttacattagcatccaaaaaatgagatacttatgtataaatctagcaaaaacacgtacaagacctatatgaggataactacaaaactgtgattaaagatgtgagaagaactaaataaagaaagggataacccatgttcatggataggaagactcaatattttcaagatgtcatttcttcccaacttgatctatagactcaatgccatcccaatcagaacctcagcaaattatattgtggttatcgacaaactgattctaaactttatatggagaggcaaaaggccaagaatagccaatgcaatgttaaaggagaagaacaaagtatgaggactsacactacctgacttcaaggcttactgtaaagctacggcaatcaaaattgtgttatattggtgaaagaatgaacacatagatcaataagac

SEQ ID NO: 835086 - DNA, 493 bp, Homo sapiens
cctagcactctgcatggcacagattgggtcctaggaaaaaatgtttgttgaatggctaataaaaatagctgatgccttattgagcccagataccacactaagttctttatgggscttctctcattttatccctagggtgaccctatgaggtagatattaccatcatatgcactttgcagattgggacactgaggcttgaagaaaaaaaaatgactcacacctgtgcccagctggtcagtgacaaagctcggagttgtcctgatccatttgactcctgaggccacgtatacttagcccaaagctagaccgtcttcagagagggaagcgagagagagagagagggagagatggaggaagggaggagaaagatctccctataagggcatcttaccctcctctgggtttctttctgtgtgtaccgaagtgtctggcacacagtggatgctctcaacaattaagggatgttaaatagatgtcggcgaattctctccct

SEQ ID NO: 835087 - DNA, 667 bp, Homo sapiens
gaccatgggctctttgggggcacatgagcctggtccccctctgtcccataacccttctggcagattgaacaagtctccttcgtccttgtctgagaccctttgctcagagtcacctcatttccctttcaactgggggccccttccttccaatgtcctgttttcttacagtaaagcacactggttacgctgcaagtgtggatggccagattgggtatttttcctggggccccccttctctcgccctttgggggaaacccctctaatagctgccgctagcaggtcagtgtttcgccgggcttggcattcactctctgtggtgctctctgcggcttactgcatctctatttacaaacacctggttggctatctccaataactgtgacatattcatgcctacaaacccagcctgtttctgcaattttcttctaatgtcttctgtagtttgactaaagccatggtaatcatgcactgattttcagggctatcgggatcaaagggagtatacataggataggcctcacatagtctctcgtagaattgtgctgggctctcatctttcccttaaatgacctcagagactttgttaacatttgtggccttctgmgctcccttctttaacccttccagaagggcttccctgtaccggtttagcctttgcatactgtct

SEQ ID NO: 835088 - DNA, 620 bp, Homo sapiens
ccatccactgtcagggaatggtagcatatgtggagagccatctgtaaaacaggcccgggtctttttctttctcctgcaattggtcacagggaactcgccatgaattcatrggtataggtgaaggaggaggcttgtggcaggcactagggccatgggcatgctcacacaacttacttgggccttcagaagctattcaagcccgatttcacaagaccatttccatttgattatgcaattgctgctatccatgctgaactttgttttgatgggcctgttaacacccagttcatgataggcaactcaggtctcatgataacttggtaacctgaggtcaagcattcagtgtctaccaagacctgctggcaagccagatactgtttctcaaaaggagagtagtcctctgcagttgatgacatggctttgctccaaaacccttaaggtctgccctatgctttacccacagatgcccctctgagcttccatgtagcatctctatgtgcatatacacgtcaagcaccattggatctgctgggtcatacacccaagtggcagagccacttgcatggcagcctggacctttttgttctgggccccactcaaaacaagcaactattcagttc

SEQ ID NO: 835089 - DNA, 592 bp, Homo sapiens
tgagggagtatttctgtgggggcccattcattcactcatttactsaagcacatgctgagcctcaacattagaagctctggaagatacaaagaagaaaaagacaaagtctttgcatggaaaagctctcaggtaggtcggggagaaagacatattcacaaataacttcaatttaaggcaaggtgtgatcagaccatgactgaggagttcagaaaaggagagaaaattcccaactgcagtaaagttggaggaggtgaagcaggaagcagatgttaaaagctgaataaaattttaggccgggctcagtggctcatgcctgtaatcccaacacttcgggagtctgaggtgggtggatcacctgaggtcaagagttccagaccagcctggccaatatgctgaaaccccatctttaccaaaaacacacaaaaacttagccaggcatggtggcgggtgcccgtaatcccagctactcggaggctgaggtgggagaatcacttgaactcaggaggcagaggatgcagtgagctgagatcacagcactgcactccagcctgggcgacagagtcagactctgtctcaaaaaaaaaaaaaaaat

SEQ ID NO: 835090 - DNA, 597 bp, Homo sapiens
cccccctcttgggaatgcagcgattgttctgcttctcactcaggtgctcccatgatacgtggggcaggtcttcatttctgtcccttcttggacacatagaagtgattccatggtttctgtaccgccctgacatgtgggtaaagccgtctaagatgtcggttcttctccagggtcttgccacctgcaggacgttatctgtgttcttggatctcctaaacctagccagggtttctgcagactcccttgggtcgcaactcaacctgaaggatggggtgaggaagccaagatgcccttttctcaaggaccccaagcatcgaagctctccttgcatcaccttgactcttctttcacccttcaggcctgaaacctcgttcttatcctatcttttcttctttttttaaaaaaaattgccctaagtcttttcagtttccttaagggcctaggttttgaaacttaaaagctaggaagacactctttttaaatctgcattcttctgtaacaacccttccctgagrcaatcaaagaagggaagtgctaaaagatgagaaggtgtcaaagaaagataatccattaatacttcatagacattatcccacc

SEQ ID NO: 835091 - DNA, 528 bp, Homo sapiens
atatagtcctcatttccatctaagacgttatcagaatagcctttactctttatatttctgccagcattctgatcacaaccatttagataacttctgagaagactgaaatcctttctatagctctccctttcttttgtgtttatcctagtccatttcctgcttattataacaaaatgcctgaaactgggtaatttataaagaaaaaaatgtatttattacagttatagagtctgaaaagtccaagatggagaggcgccatctggtgagggtcttcttcctgctgaggattttctgcagagtcccaaggcagtgcagggcttcacatggtgggagggctaagtgtattacattaggtctcgcttcctcttcttataaagccaccagttccactcccatgataacccattaatccattagcctattaaccctttaatccattcatccattaatcatctatttatgagtgcaaagccctcatsagccaatcacctcttaaaatttcacagcactgccacattggggattaaa

SEQ ID NO: 835092 - DNA, 560 bp, Homo sapiens
ttataaggcacccagtttatggyatttttgttataacggcccaagagaactaagacaggcagcctactaaaatggcccctgcagacctgcacttcctcatattcaaaccttctttatattcccttcctagagcaggggtttgacctaatgacccatttctaatgagtaaaatctaacaaaagtagtcaatgtaatttccatgattttggctataaaagactgacttctgtcttgctagcactctctcttttgctggtactctttctctcttactttctcatgtgataattttgagctttcatgttgtgaaatgctctatgaagagggtgatgtcaataccaacagaggaaggcatctggccaagagctcatgaggaagtaaaatgctgccagcaatcatctgattgagcttggaaattcatccttctccacttgcaccttcagatgagactgtggccttggccagcacctggattatagccttgtaagagaccatgaagcagataccccagctaagtcattccttgattcctgtctcacagaagctataatataatacat

SEQ ID NO: 835093 - DNA, 382 bp, Homo sapiens
ctctctccccaccctcagtcgtcagtttcctcatttgaaaaagagagggagggtaatgctcccactctacagtttttacaaggaggctcatcacatatgtgaaagttccttggaaatcatagagaattaattactagggtaagctctctgcatagactcctctgcattcgatgtaatcactcagtcactgtatttcttcttaggatctttgctttttgctaggattcatactcccatggagtttaagggttggaaataagctctgtgacagggtgtggtttccacaacctycttgaaggaaggaagtatcactttcccactcattgatcaaatgtcaccacaattatcctgctgcttgaaatagatctggcattttttgagc

SEQ ID NO: 835094 - DNA, 606 bp, Homo sapiens
ttgtcaaatatcttctatgaaatattaaatacacacaggagctgagaatgtgagctcctgaaaaagcgatcttgaagttgaaccccaaggctaacatttcctagccttgtgatcttacataagttatttaatctctcttagtctcagccaattcatggctaatatggagttactaacatgtaggtatgcagaaattttagctgttattactgtaactaactgctactttttattactagtatgtaattataatattcaatgtataattgaatatatcatggcatatcatatattattataagcaatgcatatttttataagtataatgatacagccacatgtcacttaatgaagaggaccttccaacaaatgtcttagtgattttgtcattgtgtgaacatcatagagtgtacttacacacatctaaatggtatagcctatgtattagtcagggttctctagggggacgggactaataggatagatgtatatatgaaatggagtttattaaggagaattgatgcacatgatcacaaggtgacatcccacaacaggccttctgcaagctgaagagcawgaaaaccagtccaagtcccaaaacctcaa

SEQ ID NO: 835095 - DNA, 605 bp, Homo sapiens
attagggatatgttaagtaagtcatcaagagcccaccaaaattagattttgttagtgactgatgaacaggtatctaaagaaagtgaaatatttttaaatattattaaaagaraacacatagaacacaaaacaaatacaaagtaaagaaaaattacagaacttcagaaaactagttattacaaaaaaggaaaagcaaagctgagtaaagcatcgaataaagggtttaggagattgttgaaatttcatcgcaattttatgtgttgcacaaatttctgagaagaaaggccataatttaatagattctcaaaagagtctgtgacccaaagaggctaaggtccactccaccaagctttcctcaccattaccatagtaaccatctagtctggttcctcagttaccccgtctggattattatgataatgaccagactatttctccaagttcccaggattatctcaccttaatccacctgatcctcaaactctatggtccggctataatcaattactcagtaccccaagtattccagggaatttcaaacatttcttcaagcttttcagagacagtaaggtgaaggagttaaaagtatgaactcagaagccaga

SEQ ID NO: 835096 - DNA, 615 bp, Homo sapiens
ataactacctgttaattaaaatgaaataaaatatcctagtttatgtacttagctattatttagagttttagaacgtttttctgttctgacatattaactttatatamaatataactgtagggaaatcaagcgttatttgtaaaatatatttcagatttgtgacatgactaataagagatttaggatttttaaagacacttatgtcttaaaactatgtattaagaacatctaaaatttttgtttaaatacattaagcaaggaatatagaagatgcgaagaattttggaaatttaatgaagtaatgtttataaggtaatgcagctagaaattgtgtggttttataaggcaaacttttctcaataagaagcagtttaataacttatcaaatacatattatgaatatgtgtttcaattttctgcattttgtcaaaggaagggagaagagttgattgataatcctgactgatctttttagcaattctagtatataaacaacactcatcatttttaattgacaaaaatttaactaaatttgaaattaggattgctaatgaatcacaatttattatgaaccagcagctattttatgttttccaaacacctgtgttaattttc

SEQ ID NO: 835097 - DNA, 615 bp, Homo sapiens
ataactacctgttaattaaaatgaaataaaatatcctagtttatgtacttagctattatttagagttttagaacgtttttctgttctgacatattaactttatatacaatataactgtagggaaatcaagcgttatttgtaaaatatatttcagatttgtgacatgactaataagagatttaggatttttaaagacacttatgtcttaaaactatgtattaagaacatctaaaatttttgtttaaatacattaagcaaggaatatagaagatgcgaagaattttggaaatttaatgaagtaatgtttataaggtaatgcagctagaaattgtgtggttttataaggcaaacttttctcaataagaagcagtttaataacttatcaaatacatattatgaatatgtgtttcaattttctgcattttgtcaaaggaagggagaagagttgattgataatcctgactgatctttttagcaattctagtatataaacaacactcatcatttttaattgacaaaaatttaactaaatttgaaattaggattrctaatgaatcacaatttattatgaaccagcagctattttatgttttccaaacacctgtgttaattttc

SEQ ID NO: 835098 - DNA, 595 bp, Homo sapiens
ctttgatcattccattgctgtatcatccatctactttccttttaactaaccaggtaagactaatcttatttaacatgcaaaccacttytgttgttatatagaaaattttatgtagtatctatggcctggatgtcactaccaacaaagccaatggcagtttgagtatatctcagtaatgttatctgataaattccttttattttcatgtaaattacctattgtttcataaaaggctgctttgtgcttgtatatggccaattctcttgaaaggttagtacattttattgatgtacacatgtaagtattataatatttgaacaactacttagacatcaaagcagtttcagatgttcaagggtttttcttttattcttgggtaaagcaacaagggaaaagggtttaatataaaaattgtataagttgagaatgaggtctgattggttaaaaggttaggggactgtatgaagcacattaaaggttaatgttcagtttaagtttgtgtctgtctgaatctgtcttaaagattgtacaggtaaaaaaatagacatagcaaatgttttactgtttgtacaaagaataattagtctatatttaa

SEQ ID NO: 835099 - DNA, 645 bp, Homo sapiens
gctaacacaatatttattctgcagtccataaatcaaggagtaattttgacttccaagtttaattgtttaagaaatagatttcataaggttatagctgtcatagacagtgattcctctgatgggtctaggcaaagtaaattgaaaacctttcaggaaagattcaccattctagatcccattgagaacattcatgattcatgagagggggtcaagtatcaacataacaggagcttgaaagaagttaattcgagctctcatggatgactttgaggggtttgagactccagtggggaaagtaacagcagatgtggtagaaatagcaaaagaactagaattagaagtgaagcctgatgatgtgactgcattgctaaaatttcatgataaaacattaacagatgagaagttgcttcttagggatgagcaaaaaagtagtttcgtgagatgacatcaactcttggtgattatgtgaacattgttgaaatgacaacaaggaatttagaatattccataaacttatttgttaaagsagtgacaggatttgagaggattaactccaattttgaaaatttctactgtgagtataatgctatcaaccagtattgcatgctacagaaaaatatttcatgagaggaagagtcaatcgat

SEQ ID NO: 835100 - DNA, 520 bp, Homo sapiens
tctccctccctgcctcctacttcccttttataaggacccttgtgattacatcaggtccgcctggataaaccaaaataatctccccattgtaagatccctaagttaatgacatctgcaaagcgcttttgccatggtaacacaacatatttacaggtttcagggactaagatattagggaggtattatcctctttatcacagtgagttacttaacctctttgtccctgttgtctcatttgtaaaatgagaataatagtatagtcttcttaggattgttgtatgcatgcttatctgcctagtttttagaagctgacacacaattagcaataaatgaatattaactactaatgctagcactaggatttattgttagaatattgggcaggaaaaggtgcatagcaaaaaatagtttaataagtacatttggygtatttgtgactctttaaataataatgaattgctgaagtacataagaaacccttaattatcaatgtcattgccaggttatgcagcaaggatga

SEQ ID NO: 835101 - DNA, 561 bp, Homo sapiens
gattttaggctcctcgtgtttccaatgtcccacaagtcctgggcaaccactgaaatctttattattttctcttcacccagaagaggtcttctgtctatacccagcctgctccttagcctaaatctaccatagggcaatgcccacaaaggaaaataaataactgttgaaaataagaattcttcttaggaattttaacccacctagttcttattacttctacagattactaatatcttcaaaaacataaggttttattccatataacttgtccagccttttctagtttttgcagtgaaactactgacctcctattacctactatattctatcaaaagcagaaattagtctgctatattttaatttcagataatttttcttaagattttctggtcatgtttttagaagccaaatagttgtacatcctaaccaaccattcattcatccaacacctatttatagaatacttatcaagcagttgttttattgattatkatttctatcacaaattattttcagatctaagtacttccttggagtcttcatcaaggaacttgatgaagt

SEQ ID NO: 835102 - DNA, 589 bp, Homo sapiens
tttatatttctatttcttttcattaaattttaaaatatatatcttgaatgtctcatgataatgatgataatgaccacaaagcttactatggccaggcactgttctaagagttgagcatgcatgaattcattaagattcagaagcttctaacatccatttccaccactgttttacaaacaaacaaacacacaaacaaaacagagtccagaattttacccagcattgcactggaggcaggaatgaacccaggatttaaacccaggggtctggtccagagtctgcactcttgccagcacaccattagcccccttgtttctaccttaactcacttttcaccttctgctattaactacattttcctatcattagattgttaatactcacattgtcctgcacaacaaccaagttgttaaaagcttcgtccttagttgaaaacaaatagcatctgtattattatgactgcaaacatttttcacggctctgccaagtacagctttcatactcttttcttctcctcygggccccttgagggagatgattcctagcactataaaatctacttttccttatactgcattattgcttgaaa

SEQ ID NO: 835103 - DNA, 498 bp, Homo sapiens
gaacataagcaacttttatttgtgtggtaatttgcaatttgctctttcttcctgaaaagttatttcccaacctctttctatatatgacaggtcttactcatctttcagatctctctcaaatgctacttccaatttgttaatattttctgattttcctgtcacctttgtctcaatggtttataggccttccaagcccggctgggcgtcatagtaatccaggaagattttttagaatacagattcccgtacccagtctcagatatacagaatcaggaatgcttaggtacaaatccatgagtctggttctcatacaaggaaaactagtttggtgcactattttttggaaaaaaatgtgtctgacctttttagtgttttctgtttaccagagcatgcagggggaatgaactagttctcttctcatacccccggaatgtatayactgttaactgtaacataatcttgcaggttatccggccatattattattattattattat

SEQ ID NO: 835104 - DNA, 619 bp, Homo sapiens
gctactccagaggctgaggtgggaggatccacttaaaaccatgagtttgaggctgcagtgagccgtgattgtgccactgcactctagcccgggtgacagagcaagaccccagttcattaatttaaaaaaaaaaaaaaagaaagaaaaggaactgtactgattttgagttactggatattgtaataaagttaaatttttaaaaagtagaatataaaccacattaataaccacttctgtaaacttttataaaacatcttgaactagaattgccatgccatattttttcaaaatattatattgttcttgccattttttgacagaccccttatccctctggacagaatgcaggtccaaccacgctggtataccctcaaacccctcagacaatgaattcacaacctcaaacccgttctccggtaagtaagcagaagcttgaaccaaattacattctctacctgtgtttgtgtgtgtagtggcttgggtttctttggcaratatttttactggattttggaagtttgttccaaagatgatttattattatgactcctactattatttgttagctttgtattttcagaccttacctatagcaataattaaatttattgagaaaaag

SEQ ID NO: 835105 - DNA, 601 bp, Homo sapiens
gtggtggctcacacctgtaatcccagcacttttggaggccaaggcagccggatcacttgaggccaggagttcgagaccaacatgaggaaaccccgtctctactaaaaatacaaaaattagctaggtgggtggtggtgggcgcctgtagtcccagctactcaggaggctgaggcaggagaattgcagtgagacttcgtctcaagaaaaaaaaaaaagtgacatgctaatggtatcttaaactttatcactagatctgtgagggaaggatttttttctgttttgttcactgcagtattctgtatacctagaaaagtgcccggaagagaaggcactcaataattatttgtacaaatgaatgaatgaaattttgatttttgttcacctaaggaaggttgcagtcttggagttacaagactgcttacttggttggctttcaccttagtggttagttaagccaaaagaggactccttgagcttacttcttcctgtcctttaagtgtcttctcctctgactgtaagttgtactggtacttgggcctgatgtacagcactgctagaccaggtccctgaaactcccmttcatgggatcctctagggcctt

SEQ ID NO: 835106 - DNA, 529 bp, Homo sapiens
gtgtgccaggagtcaaccagctttctctgtagaaggcagagagtaaatattttctgctgtagtttkctctgttgcattccccccttctcttcctcctccctctcttcctaatcctttaacaacgtaaaaaccatacttagctcaagggccatccaaaagaaggctgtggctagatattgcctacagatcatgttttacaaactgccggcttagaaaaagggaatatatgatgtttctagaatgccagccatttggtggctgcaacatggaaagagaagtggctgatcaggcgagatgagaccagcctgtgaaggaatctgcaatcacacttaagtgtttccagtagggccggcgattctcaaagggtgttccccagagtcctagggttcccagagggccttgggaggccagggtcaggtcaggaccccgtgtccttgctagagcaaccctgctttgccctgtctgttgtactgggttttcacgtacaattttatttgcccaaaggggctctgataaaaaagatattttg

SEQ ID NO: 835107 - DNA, 594 bp, Homo sapiens
gtattaaatattacaatgaaatgataaaaaaagtttgaaaaaatcaaacttaattaactacattattaacttttaattattaaattattacagtaattcataattgatttcccagattttcaattgtttacataaattggtttctattggttcatttaaaatagtacattggtcattttaaagagctaagagtaaatgttaaatgttgtcacaataaaagataaaaatttgaaacaatgaatgataattatatcagttatttcttaattatcttagttatttcatattgtattaacaaatcataacattgccctttaccatgtacatataaacaaccataatttgtaaatttgcaataaaatttttattgtaattttttatatttatcccagattataatctttttcttcacttccagatctcactggattgtctcaagggccccatccacaccactgatccctgatgaaaggctctaggctgtggccgggagaggcagtctcttcttccagagcacacyctgtttgatgggagatgtcatctctgccctcgaggagccccagctgatgggggagcttttgcccttaggaagct

SEQ ID NO: 835108 - DNA, 578 bp, Homo sapiens
agttcttataaaaaagcaaatttgagatacaaatttatgttttgtaaattcacactcattacatattatttctgtgtctataattacatattatttatgtgtctaactgggatttgatttttaaaagtgactccatttgcagtttattattataattctttatccatttcagttggatagatgatatttacctgtctctattatcttgaggaaccatctcaaactcttgcctattgttaatcacaatatcctattcctccctgtgttttacacaccaagatatacctagtttatcaactataaactaaactataaacatatgacccaggactcaagtatgaccttgcctggtttttaataaatactcctgtatttgtccactcatatctgaaaaacaatgaaaagttttaacatttctgaatttttagttcccttagtacttcaattccacaggttgctaakatgatttcaaaatataatatttaatatttacccatttattgtctagctgatgcagtggaggcattaattcaccatatactactgtattctgccaagaagcagaattccatgtattt

SEQ ID NO: 835109 - DNA, 577 bp, Homo sapiens
ggaagacatcactcaattagataaacggttaagttcgtccttttagggttaggaatttggtccggccggccaagttaggaggaaacagctttctgctataggacttgggtcagccggttaagggaggcaagaccttaggggagtgaggcccattgggatcttggttaccgtgtcttttgtctgccggtacccagtgtctttcctactattccagcatgacataaaatagtggatgcatattatgctatattcaattttggagccccatgggacacctcaaagagttaagcaatcgttggctagggcagaatttctcggccattgtattcttaacattttggactggataaatctttattgtggggactgtcatgagaattgtaaagtttgtaacagcattgctaggtgccagtagtgcttttccctggtctccagaaactgtcaaatattctctttaggacaaaatttaccccagttgaaaaccactttgccagacgatctataaacatagatttgaaycaatctgcttctcatgtaagcagcttcatatatagtcataatttaaaatgaataggtt

SEQ ID NO: 835110 - DNA, 626 bp, Homo sapiens
actggcatccaatgaccctcccacccccaacatagtctggtggggtccgggtccataggagtcagaggraggaagacactcctagaaagtcaggggaagagcatcctgaccggggtgcccttttctggggggaatgtgttaagatggccaatgaaataaggcatgggccaaaagaactgcagtgatgggcagagatactggggtgcccagtgccccagtggagcatcttgttttctgggaatgctcgccgcctgggcatggcttaggtaaggggtgggaaggagggttgcatcatgtggccagggaaaagagccacagacatcctttctctataaacctggtccttgccccctccctactccatggctgggtgttctgggttgccaccttcaagcatgcttttttttttttgaaggtctcactctgtcacccagactgcagtgcagtggcacgatctcggctcactgcaacctccacctcccaggctcaagtgatctgcctatcttagcttcccgagtagctgggactacaggtgtatgccactatgtccagctaatttttttgtatttttggtagagaccgggttttgccatgctgcctaggctggtctcgaacttctgagctca

SEQ ID NO: 835111 - DNA, 626 bp, Homo sapiens
actggcatccaatgaccctcccacccccaacatagtctggtggggtccgggtccataggagtcagagggaggaagacactcctagaaagtcaggggaagagcatcctgaccggggtgcccttttctggggggaatgtgttaagatggccaatgaaataaggcatgggccaaaagaactgcagtgatgggcagagatactggggtgcccagtgccccagtggagcatcttgttttctgggaatgctcgccgcctgggcatggcttaggtaaggggtgggaaggagggttgcatcatgtggccagggaaaagagccacagacatcctttctctataaacctggtccttgccccctccctactccatggctgggtgttctgggttgccaccttcaagcatgcttttttttttttgaaggtctcactctgtcacccagactgcagtgcagtggcacgatctcggctcactgcaacctccacctcccaggctcaagtgatctgcctatcttagcytcccgagtagctgggactacaggtgtatgccactatgtccagctaatttttttgtatttttggtagagaccgggttttgccatgctgcctaggctggtctcgaacttctgagctca

SEQ ID NO: 835112 - DNA, 623 bp, Homo sapiens
gggggaataaattcccagctcatttcccttctgccttcagctcttctgccagtgcctcttgctggtcaaaccaagagaggccagaggacagatgagttcactgaggcatggcatacaagccagtctcataggagcatacatgaaagctaaggtatttttaagaaagctagaaaagccctcttcagaaaaactcaacattttctcacttatccctgcaggtaacaacaacaacaaaaacagcatcacaggaggaaccccttggctgacatttcccaaactgctttcagaaatcagggctgagctcggtagctgaggtaatgaaggcagtgagtggttatgctagagatggcaggggcagccctcaccccacagctatgggaaggagtgttaacaacagagagaggcaaccaagccagctccctaagccaggcagcaaataactccacaagctcacacctccttgagaaataactgctgtctcagccatttgtatggaacattcctaagggtggcagcggttgggggagtgacagcgtgaggacagtcgccacatgtgcaatakctgagctctagaacaaagcagagagcatggcaaagggggcctaagaacatccccctaccct

SEQ ID NO: 835113 - DNA, 556 bp, Homo sapiens
gaagaggaggggagggggcttaaaatttaatttttatttatcaatggtaattaccctgatctgatcactatacattacatatatcaaaatgtcatgatgtatcccatgaatatgtacaattactatttgtcaattaaaaataatattgaaaaaattcagtagaggtaaaataaaaaaaatgctgtcttcagaatcaaatctgaattactatggttagcaatccacatttttttgctcaggggaattataataattaatataatattttaaacaaatccttctggaggtaaataattgatttaagaggataaaaccaattaagagatattaaactagtatcagtgagaagtaaggagtacctggcataaggcaatgacagtaagaataaagaggatttttttgtatgtttttctagttttacctaaaaaaataatgcttcagaaattttctctggagataaaactgtttctatgttatttaaagagaatgtccaaatgagtctggmcttatatattacagctatttggaggaagacttatttttgtctactcaaagt

SEQ ID NO: 835114 - DNA, 563 bp, Homo sapiens
taagcttattagttgtttttaagtttttgcctacatttttagactaaccctgcttgttcctgtgaaacaatcagcaatatccagctacatctcagaaataacaaaagggatgggtgwtgtagaaacctgggataatattctagttctgagcaatttaattttgcaagacctgccaggtgataggatgccatcactctgaggttttgttttgggaaagtaagaccaagggagctaacaaaggccaggcaccatgcacccaaatcctagaaagcataactatagctaccagttatctgggtgtgtcacaagacatccttttctctttcttgctggagaagggctcagttccagagcttcaccttagcattcgacttatgataagaagcccctgcaaaccccgcccccgccagacacattttcaattccaagctttggatcaaagccctaggaaagaaactgtatctaagggatccagaggcagatgacaacataggttaaaagggcacagtacaggtaagcatggctacctcctgccgatcaagctaagctcaggcttcccatgt

SEQ ID NO: 835115 - DNA, 524 bp, Homo sapiens
gacttccaggctagctctgggcctggctgacctcttgtcctctggccagactctgcatatttgctcgcctgctgctgtgcagctccaccacccactcttccacgtgtttactctccttcttgtccaggaccaatgggctatggcttccagacttctctcctcactagtgcctgaagcaagagggcaactctccaggtggtttcctggagtttttactattagtaaccatagagaatcggggtaaaaatgaccatttggggtttacaactgtcacaagaagtcttaatgtttgatttattcaatatacatgtattgaatgtctaccatgtgctagtcactgtattagagacacggaatacagtcatgaatgcgtcactcccctcatcttaaggagtttatagaggggagattcatgtgcaaagaaatagtttcattccaataagaacatttccatttggggatatatatraggtacagataggcagtatgagtgctttcctgaaggaagggatccctgagttgag

SEQ ID NO: 835116 - DNA, 564 bp, Homo sapiens
gtctcgctctgtcatccaggctggagtgcagtggcgcgatttcggctcactgcaagctccgcctcccgggttcacgccattctcctgcctcagcctccccagtagctgggactacaggcgcccgccatcacrcctggctaatttttttttgtatttttagtagagatggggtttcaccgtgttagccaggatggtctcgatctcctgacctcgtgatccgccgcctcggcctcccaaaatgctgggattacagttatgagccatcgcgcccggcctctctagctatctttagaattttttccttcatgttgactttggacagtctgatgacaatatactttgataagatttatcttgcaaagaatcttccagatgttctttgaacctgttgtatctggatgtctaatttctatctagaccaaaaatattttcctgaatgattttatcaaatacattttccaaggtttttactttttattattatccctgagtaatggctattgctcatagatttcgttgctttatataatttcatatttcctggctgcatttttaaaaaattct

SEQ ID NO: 835117 - DNA, 512 bp, Homo sapiens
aaaaaaaaaaaaagctaataaaaatgtttctcccatgagtttgaataaatgtacatggttaacttacttscaatatatattgttttttctcttacatgtaacattaaagtggtagaagcagaccaggtgcagtggctcacacctgtaatcccagcactttgggaggctgaggcaagcagatcacctgaggtcagtcaggagttcgagaccagcctgaccaacatggcaaaaccccgtctctactaaaaatccaaaaactagccaggtgtggtgacgggtgcctgtgatcccagctacttgggagactgaggcaagagaattgcttgaacccgggaggcggaggttgcagtgagcggagatggcaccattgcactccagcctgggcaacagagccagattctgtctctaagtaaataaataaataaaaataaagtggtagaagcaaacataaaatttcttcttctaattactgaaattttatgaaatatgcacctggacctaagtgaacaaaa

SEQ ID NO: 835118 - DNA, 527 bp, Homo sapiens
tgtctgaaaagtactagtgagatcagatgtcagggcccttctattccttccacttatctgcaggtctaccctagagatagcagtggatgcaggcagacagctaatacagaatttgggtagtttcctatataggaagaagattactttcttgttctcacacctgtgaagaactagtagcaactactttcatacaggttgccagggagagagcccctctagccctagagcagttaccagactgagttcttgggttcagatactcagactttccttcattcttgctggggtcagggagcaaagataaaagctgcagggtcctggaggaagtagatattgagtcgatattgaaagagctgcccaaaggagattctgttgtcccctgcctcactctccctggagccaaaggtgagccagagccttgtcctgagagaggctgccctgtcttttgatccatgatctcttccctctattttacccctatgttccgagggactwatcctctcaactcaaatggcttccctggaaat

SEQ ID NO: 835119 - DNA, 618 bp, Homo sapiens
tctcagtaatggacagatcatccagacagaaaatcagcaaagaaaaagcagagttaacctacacattagatctaatagacctaaatgacatttacagaacatttcaccacacttccgcagaatgtatattcctctcattagcacatggaatattctctaggacagaccacaagcaatgccacaaaaccaatctcaacaaattcaaagaaatcaagatcatattaagtgtattttctgaccacaatgaataaaactggaaataaataagagaaaccttggaaactatacaaacacatggaagttatgtgttcctaactactggctaatgaagaaattaagaaggaatttaaataatttcttgaaataaaggaaagtgaaaagacaacataccaaaatcaatgggctacagcaaaagaagtactaagagggaagtttatagcagtaaatgcctacatcaaaaaaatggaaagatttcaaataaacaacctaataatgcacctcaggaaactagaaaarcaagaacaaaccaaagctaaaaatagtagaaggaaagaaatcataaagatcagagcaagaataaatgaaattgaggctaaaaacatactagtataaaaaatg

SEQ ID NO: 835120 - DNA, 509 bp, Homo sapiens
acacctttgtgacgtgtgcattcatctcacagagttgaacatttcttttgattgagcagtttggaatccgtctttttctcgaatctgcaaagggatatttyggagcccttcgagacatattttgaaaaaggaattatcttcacataaaagctagacagaaatattctgataaacttttttttgatgtgtgcattcacctcacagagctgaaactttcttttgattgagcagtttggaaacagtctttttctacaatctgcaaagtgatatttgtgggtgctgtcaggcctatgctgaaaaaggaaatatcttcacataaaaaccagacagaagttttctgaggaacttctttgtgatgtgtgctttcatctcccagagctgaaccgttcttttcattgagcagtttggaaaccgttttttgtggaatctacaaaaggatatttctgagtgatttgaggccaatggagaaaaaggaaatatcttcaaatgaaaactagacagaagctttc

SEQ ID NO: 835121 - DNA, 630 bp, Homo sapiens
gcaatgccttgccctgcttcagctcacgcatggtgcatgcacccactgacctgcacccactgtctggcactccctagtgagatgaacccggtacctcagatggaaatgcagaaatcacccgtcttctgcatcgcttatgctgggagctgtagaccagagctgttcctatttggccatcttggctcctcccccacttctgactagtttttatgtgaagacatttcctttttcaccataggcctgaaagtactcaaaaatatccctttgcagattctacaaaaagactgcttccaaactccttaatcaaaagaaattttcaactctgtgagaagaatgcacacatcacaaaacagtttttcagaaatcttctgtctaatttttatgtgaagatatgtcatttttcaccatagtcattaaactgctcacaaatatccctttgcagatactacaaaaagaccatttccaaactgctcagtcaaaagaaagtttcagttctctgagatgaatgcacacatcacaargaagtttctctgaaagcttatgcttagtatttatataaagttatttcctttttcaccataggcctcaagtggctcacaaatatcccattgtagtttccacaaaaggact

SEQ ID NO: 835122 - DNA, 630 bp, Homo sapiens
gcaatgccttgccctgcttcagctcacgcatggtgcatgcacccactgacctgcacccactgtctggcactccctagtgagatgaacccggtacctcagatggaaatgcagaaatcacccgtcttctgcatcgcttatgctgggagctgtagaccagagctgttcctatttggccatcttggctcctcccccacttctgactagtttttatgtgaagacatttcctttttcaccataggcctgaaagtactcaaaaatatccctttgcagattctacaaaaagactgcttccaaactccttaatcaaaagaaattttcaactctgtgagaagaatgcacacatcacaaaacagtttttcagaaatcttctgtctaatttttatgtgaagatatgtcatttttcaccatagtcattaaactgctcacaaatatccctttgcagatactacaaaaagaccatttccaaactgctcagtcaaaagaaagtttcagttctctgagatgaatgcacacatcacaaagaagtttctckgaaagcttatgcttagtatttatataaagttatttcctttttcaccataggcctcaagtggctcacaaatatcccattgtagtttccacaaaaggact

SEQ ID NO: 835123 - DNA, 502 bp, Homo sapiens
gggatcttaatgatgccaatggaaaaaagcaaatatcccaggaaaaaaaagtagaaactgctttgtgatgtgtgcattcacatctcagagttagaccttgcttttatttagcagtttggaaacactgttttcatagaatctgtaaagttatacctgggagcacattgaggtccatggtgaaaaatgaaatatcattagataaatcaagaaagaagctttgtgagaagctgatttgtcatatgagcattcacctcacagagttaagcttttctgtggattcagccatttgctaacactgtttttctccattctgtgaaaggacatttgggagttcatagaggccaatggtgaaaaaacaaatatcccagaataaaaactagaaggaagctacctgagaaactgctttgtgatrtgcacattcatgtcacagagttaaaactttgttttcattcaatagtttggaaaaactgtttttgtaaaatatagtaagtgatatctggga

SEQ ID NO: 835124 - DNA, 409 bp, Homo sapiens
tgaagctttctcagaaacttctttgtgatgtgtgcattcatctcacagaattgaacctttctttttaaagagcaggttgkaaacagtctttttgtagtatctgcaaagggatattttggagaccttctaagcctatggtgaaaaatgaaatatcttcacataaaaaatagaagcattgtgagggactactttgtgttgtgtgcattcctctcacagagttgaaacttcctcttcattgagcattttggaaagagtcttttgtagaatctgcaaagggatatttgggaggcctttgaggcctttggtgaaaacagaaatatcttcacctaaaaactagacagaatccttctgagaaacttctttcaggtgtgtgtattcatgtcagagagttgaacctttcgtttcattg

SEQ ID NO: 835125 - DNA, 691 bp, Homo sapiens
gaatctgcaaaggaatatttcggatccctttgaggatcatgttgaaaaagggaatatcttcacattagaactagagagaattttctcagaaacttttctgtgatgggtgmattcattttatggagttgaatctttttttgattgagcagtgtgtaaacagtctttttgtagaatctgcattgggatatttctgagtggtttgaggcatatggtgaaaaaggaaatatctttatataaaaactggacagaagatttctgagaaacttcttagtgatatgcacattcgtctcacatagttgaacctttcttttgaataagcagtttggaaacagtattttgaagaatctgcaaagggatattcgaggcctgtggtgaaaaaggaaatatcttcacataaagactggacagaagttttctgagaaacttctttgcgatttgtgcattcatctcacagagatgaacatatatttgattgagcagtttgaaaaaaacagtctttttgtagaatctgaaaagggatattccagggcgctttgaggtctatggtgataaaggaaatatcttcacataaaaactagacagaacctttctgagaaacttctttgtgatgtctacattcatctcacagagctgaactttcttttcattgagcattttggaaacattctatttgtagattctgaaaaggaat

SEQ ID NO: 835126 - DNA, 530 bp, Homo sapiens
ctgagaaacttctttgtgatgtgtgcattcatctcacagagttgaacyattcttttgattgagcagtttggaaacagtcttttcgtagaatcagcaaaaggaatttggggagaggttaaaggccagtggagaaaaagtaaatatcttcacataaaaactagaaagaagttttgtgaggaaccactttgtgatgtgtacattctcctcacagagttgaaccattcttttgattaagccgtttggaatccatctttttgtagaatctgcagagggacatttctgagtgctttgaggcctatggtcaaaaaggaaatatcttcacaaaaactaaagagaagctttctgagaaactgctttgtgatgtgtgcattcatttcacagagttgagccattcttttcattgagcagtctggaaccactcctttttagaaccggctaaagtatattacggagcattttgagacctatggtgaaaaaagaaatatgttcatacgaaaactagacagaagcttcctgagaaacttatttgt

SEQ ID NO: 835127 - DNA, 542 bp, Homo sapiens
gattgagcagtttggaaactgtcgttttgtagaatctgcaaaggcatatttgtgtgcgcttgaggcctacagtgaaaaaatgatatatcttcacataaaaactagaaagaaattgtctgtgaaactgctttgtgatgcgtgtattcatctcacagagttgaaccacgcttttgattgagcagtttggaacagtctttttgtagaatctgcaaagggatatttgggagtgctttttggcctatgatgaaaaaggaaacatcttcacataaaaactagaaagaaggtttctgagacacttctttctgatgtgtgcattcatctcacagaggtaaatgtttcttttcattaagcagtttggaaactctgttctttcagaatctacaaggggatatttgtgagtgttttgaggcctttgttgaaaaatgaaatatcttcacataaaaactaaccagtagctttctgagaaayttctttgtgatgtgtgcattcatcccacagaggtaaacgtatcttgtcattgagctgtttggaaactctaatct

SEQ ID NO: 835128 - DNA, 541 bp, Homo sapiens
tcattgttcaattcccccctatgagtgagaatatacggtgtttgctttttgtccttgcgatagtttgctgagaatgatggtttccggtttcatccatgtccctacaaaggacatgaactcttcattttttatggctgcatagtattccatggtgtatatgtgccacattttcttaatccagtctatcattgttggacatttgggttggttccaagtctttgctattgtgaatagtgccacaataagcatacatgtgcatgtgtctttatagcagcatgatttataatcctttgggtatatgcccagtaatgggatggctggatcaaatggtatttctagttccagaaccctgcagaatcgccaccttgacttccacaatggttgaactagtttagagtcctaccaaccatgtaaaagtattcctatttctccacatcstctccagcgcctgttgtttcctgactttttaatgatcaccattataactggtgtgagacagtatctcattgtggttttgatttgcatttctctgatggccagt

SEQ ID NO: 835129 - DNA, 630 bp, Homo sapiens
tctgcattcatagaacacgtgtttattgagccatgctctgtgaggggcacggtgyctggtatgggacagagctgtgaactacagactggacccggtctcgtgttactcacagtctgtgaaatgaaagcgtggctgctggtgctggggcttggctgctggggctgagtgttgagtctgtgaaatggacgggtgaagccgtacacctggtcactcggtgagatcacgttgtgtcacaggagagtgctgaggcatggccaccgtggctggacgttctcagagacactgctcagccacagcagctgggcctggctatgaccactgacctgtgactacatcaggcacagccacaaaccagagatcagtaaccagacacggcggagccatccagtgggcgcagagcagccaccgcctctgaactcagagccacgaggcggctctgggagccgcccgacacctgcctgctgtgtgatcgccagcagaccctgcccctcactgccctcagatccctcacttgtgcatctggggaggaagctaagggctctccaaggtccctatcagctctttatggtgcttcttgctagaatgtgctagaaaccatatcgatttgagagcaaagagaaattgccacca

SEQ ID NO: 835130 - DNA, 511 bp, Homo sapiens
ttaagcaaggccagaactgccgtggttttcatggtagtgttgactcaggagattggcccccccaacatggagacacatggaaggccttaataccaaacccagttttaaccacccagagagagtgagagccgctcctaaggtgaatggctgttcatcaacgagaatatctagacacactgatgtgtgatacggcaaacttgcaactatgttcaagtaaagtatcgggcagttccacacagcactccttccatttagctgagcagagggtctcagtagactcatctctgaagcttttgaaaaccccaagccaggcttctcaacccatggagactcagaagcagagtatgggtgacacctgggcatgtccctgaggcaccacaggtcgttytaaggggtgccccaagttgagcaccactgatccagagcttgctgaagtgaggccaccggtgcctagtctggcacagccctcctcaggatctctcccctccccctagttggtgaggagacggga

SEQ ID NO: 835131 - DNA, 655 bp, Homo sapiens
atttcctttaattttatcttcttctttccctacatgtatagttgtgaaagcaagattttttaaaagaggaaatcttaatttagatcggaaacagcgtcccctggaaaaggttgcttctttaagcaaggccagaactgccgtggttttcatggtagtgttgactcaggagattggcccccccaacatggagacacatggaaggccttaataccaaacccagttttaaccacccagagagagtgagagccgctcctaaggtgaatggctgttcatcaacgagaatatctagacacactgatgtgtgatacggcaaacttgcaactatgttcaagtaaagtatcgggcagttccacacagcactccttccatttagctgagcagagggtctcagtagactcatctctgaagcttttgaaaaccccaagccaggcttctcaacccatggagactcagaagcagagtatgggtgacacctgggcatgtccctgaggcaccacaggtcgttctaaggggtgccccaagttgagcaccactgatccagagcttgctgaagtgaggccaccggtgcctagtctggcacagccctcctcaggatctctcccctccccctagttggtgaggagaygggaagagaagagagtaggagggggcaagg

SEQ ID NO: 835132 - DNA, 535 bp, Homo sapiens
agttagaatagcaatcattaaaaagtcaagaaacaacagatgytggtgaggatgtggagaaataggaatgtttttacactgttggtgggaatttaaattagttcaaccattgtggaagacagtgtggcaattcctcaaagatctagaaccagaaataccatttgacccagcaatcccattactgggaatataccgaaaggattataaatcattctactataaagacacatgcacacgtaggtttattgcagcactatttacaatagcaaagccttggaaccaacccaaatgcccatcaacgatagactggataaagaaaatgtggcacatatacaccatggaatattatgcagccataaaaagaaagagttcatgtcctttgcagggacatggatgaagctagaaaccatcattctcggcaaactaacacagtaacagaaaaccaaacactgcatgttctcactcataagtgggagttgaacaatgataacacatggacacagagaggggaacaccacacactggggcctgtcag

SEQ ID NO: 835133 - DNA, 514 bp, Homo sapiens
agggcatgccctgagatgccgttcggggctctccatttgcaaagagaagaacccaggaaagtgcaaagaaagtcattgtcactgttacagtgaccaagacaacaccttggtaatgtctggatagaattctctgaaaaatggggacaatctgagttgtacaggcagcaactgagggacatttttaggaaccagaagtaagcatttgtgattgtaaattattcaggctagatatttacaatgagcaatttagcttcaggccaatattaacttccattcctattactatcagattaattgcattttgttgctttttctaaatacatgtcaaatcaggaaacctataattcagcagttagtcattaaagtagcagtggatctgcaactgtgttatctgaagcccttctaaaaaataaaataaaaatccagggcttctttttttggtctaataaacagagcattaataamaagcaactaggatattcttcctaggatgaaatatgtctaaattgaaaaa

SEQ ID NO: 835134 - DNA, 589 bp, Homo sapiens
gatcaaatggtagatctacttttagctttgagaaatctccatactcttttccatagaggttgtactaatgtgtatttccaccagcagcmtataagtgttcctctttcaccacgtccacccgagcatcttttggggatttttttttttgactttttaataatggttattctggctcgggtaaggtggtatacattgtggttttaatttgcatttccttgacaattagtgatgttgagcatttattcatatgtttttgaccatttgtatattttttgagaaatatctattcatgtcttttgtccacatttcagtttttaagttgtctgtttactgtaatgattatttattttgctgtgaagaagctttttagtttgagtcctattcattatttttgttttgttggatttgcttttaggggtcttagttataaattatttgcctatgctggtgtccagaagagtttttcctaggtactcttctagatcttttatggtttcaggtcttagcttcaggtctttaggtctttagtcaaggtaaagttaatttttgtatctagtgagagacagagatccactgtctttcttctaca

SEQ ID NO: 835135 - DNA, 599 bp, Homo sapiens
aataataatgtcttattataatttttgaataaatatgtcctgcttattaattaaaattgttctgtgcacaaarcatgttattactgttttcttccagctaatgagtcatagtactgagatgattacttttgagattaatcatttttaaatattgcaaagtatatctgttgcatattatgcttcatctacaggattctgttatatttgagtaaattttagataaagtccataaaagaatacaatactctttttacatgggccattatctcttattaaccttgataatgtttgtcccaatgaaagaaaatagaggagggtaaggaagactaaattgcaaagcaaaaggctggcgcagctaagaaatattggctgaatattttccatttgtccctccacatcccctttctctcctcctatggtcctaggagaacatcgatggggcagcctcctttgttctctggcttctggttgggcaaggctaatgagaggcactaggaggtgattagaggccaggagcaaaatgatgtctagcttttattctctagcttcttcctgacaaagccacagtttatcagagggcatgttcctttccaaggcca

SEQ ID NO: 835136 - DNA, 628 bp, Homo sapiens
aaagtatttttattactttaaactgtaatatgtgttattggtatcagatagttttaaggcaatttttctcttattttagttttatgttacaggaaaaccctaaaaaattgtgtgtagattcaatttttcttatttatatttatttaactcagacttaaaaaaattggaatattaaaatgattgttgagttcaacaaaattgtaaattctgtgtgtatatatatttgtgtatagtattcttttaaatccctaaagcattcttgtattttattttcaaattatctttatagaagcaatcatttgtaaattagttgggcatggtggcaagtgcctgtcatccaagctactcaggaggctgagccaggagcattgcttgaatttttggggctgcaccactgctctctagtctgggcaacagagcaagcctccatctcacaaaaacaaacaaacaaacgaacaaaccataatctaatttaattctaccaacaacctttgtaacaagcattttaatgatcattacagattaggaaattgaggctcagagagtaagcaatttgtctaaaaccacacaaaactaagtamtggagctggattaaaatgggagtcctcactccaaattctatttttat

SEQ ID NO: 835137 - DNA, 485 bp, Homo sapiens
tcctaatgttttctgcccatgtgggagagggagcaaacaatcaaataatgaaaatgtttattcacaaggagagatcagtgcaatgagaggaaggagctcagagctcggaaagcctatacctgagagacytgacatattcttggggctctgaaaaactttcctgagtttatgtcgctaaaacagagatctggagaatgaattgcagcaacctcaggcgcgactccatgctagctgcagcaggcaacctgccatccttcaacctgctgtgagttttcctcaccctctgcctcaggttttccctacttcatttgatgttcggtaaaagtctgtttaattatatttcccctatccttccctttatggaatattaattaagatccgtctcacgtattacttctaagtgcagcttccctgacattgctaatggcctctcttcttgagccccatggccctcatctctcagttcccacatcattttatataaa

SEQ ID NO: 835138 - DNA, 640 bp, Homo sapiens
aaaaaatagagaatgtatgttctttcagatgcttagttctgaattgagcaagtcatgaaagcaatgcttaataagcacmtagtagccacaaagatatgactatgaaaatgaaaaaaaattgcagttgtattattttaaatgctaacacttttttactttttaataaaattgtatatatttaaggtgtacagcatgatattttgatatacataatgaattgattactacagtcaagtgaattaacagatctttctcttcagatagttaccattggttttcctgctgggagcacctgaaatctattctctcagaaatttttggtataaaagagtattattaattatagtcatcatgctgaaagttagatcgctagacctattcatcttatataactgcaactttgtaccctttgaccaatgttcctctatttcccccacctttctgcccctgataaccagctttctactctttggcttctatgtatttgacatttttgtatttcacatataagtggatcatgcagtattttgctttctgtatatgtcttcattcactcagcttaatgtcctccaagttcattcatgttgttgaaaatagcagaagctcctttattaaggctaaatatttcactgtgtgtata

SEQ ID NO: 835139 - DNA, 543 bp, Homo sapiens
tgggagtgacttctctcatcaatggacacactgctttgtgctcggtttcctcccatacctctctgtcttttctaatggaattcctttgcatgcagcagcctagcacctcttactagatcatgtgtccagctgaactttacttaacagccaaacacacagttattttcacaacaatattttcaggctgtgtattaagcctatttcacagctgtgatcacaggtattaaagaacagatgtattgatttgcggggcacccatttttcattgtatttgatgtccttgtccacaaggcggaatggcaagaggcttagaaatctaaccatgtaccggttatgttgtatttgctttgagcctatatcctcattgaaaacagctgctgaactcagagttattatgaagactcctggagagaaagcagaatggaataaatgggaagagcacaggctttggagtttagagagagctggtgagaatgccatctctstctcccaccagctgtaggatatggggcaagttattttacctctctaagcttcatcttc

SEQ ID NO: 835140 - DNA, 591 bp, Homo sapiens
ttgaaaatctttccacttttcttttcatagacttgcgagcatttatgaggttttataaactaaccagtgtatcaktcacaacacttccattgcactgtccctcattccaagtcttatttacatataggatgatttttatcctttgccaaaggacctgtaaatccagctctttgatatttccaaactccagtcgaacttggtggtgtacgtgaaggaaaccacagcccacggaaaagatgagatctgctttgattatggatcttctgtgaaaactcagcaagcatttcacttataaagagtcaggcaagtcagattcaagtgttcacactggcaagtaaaaaacagcactttgggtaccattcacctgtctccaggaaaataccacctgcctggctttgaggcatgggagagggctgggaaattagagaactcggcagcttttgaaacaccagcctggacttgggagaagcagataatttcctggctgtctggaggaaacctgatccttccagaaagtccgttaatggaatgagggcagaaccagatggagtctggttatgtggctgatgcctggtgaacgctcagagcccg

SEQ ID NO: 835141 - DNA, 613 bp, Homo sapiens
gcaggattgggggctgtgtcctccctctgctgcttttctgatttcatgaacttttcgagaggagctatagtcaagcagttgaccttctctgcctgaatgcagctgaactggatgggagggtatctgtgagacgcgcttgcactgcagctgaggagcccgtgaacgtgggcaccctgcccaggccacccgcccgaggccacaacccccgcgcgctgacccgacactgcgtgcccactggcctccaacagaagcccaaagcagctcttagtgtgcaagttactatcacataaaatctctttcatttgtagaaatgggccctgttgccccagcctgtctttctggttctgtgaacgactcaggcaccccagttagcacagatgcgttttttcctcttttccctactgtgtgacctcagataacccttagggttcatagaattaccgtagcccttatcatcagtgtcacacgtgagcgtcctcctctgcacagtggragtgacatgtatttcccagaacccgtgtgggagccgacactgccatccttgtgaagtgcctgccaaacgctgcttggtgtgaggcagacacttaacccaggacaggatgctgagcagcca

SEQ ID NO: 835142 - DNA, 626 bp, Homo sapiens
tcagaaaagcacagctgccartagctgaacagtgccttcaaagaggctgcccgagccacgagcccaccgtcatccactctgctttgttcacttggggccacggcctcttctctatccctgggcctgggcctggtcactgaggcatcagctcactctgtggggagggccatgccccattgcgggggctctgagagttttgccaccaactgcacttacacactcggaggatcttgattaagtatctactggatgccagacctgagctactgccatgaggtgggccctgcatgggatattcaggatctccccctctagaggctcgaagcctcataactgctgaactgtaggggaaggatggctggaggggaaggacagaagcgtcgcattccttggcctaactctaggccacgtgtgccggggctacactggcattcatgccaggccctgctccccaggccgtgtgaactctgctggcacaagccatccctcatatgcctctgggacccctgagccctcagcgcgcgccttcattgcacctgctctgggccaacacagcaggcagcagacaactccacctgtaccaggagcgacgcaggcaacaagccgccctgagggaccctctgtag

SEQ ID NO: 835143 - DNA, 565 bp, Homo sapiens
ggaaacatcaccacattgcagttcrggagcatctctgtcaccccagtgagagcctcatgggcatttatagttcatcctgttcccatccccagccccagggaactcctaactacttctggctctgtagatctgcctgttctgaacacttcctataaatggactcatgtgatacgtggtcctgtatgtctggcttcctctgcagggcgtaatgcttccgaggttcatccacgctgcagcgtgtcggcgttctgctccttggaatgcacatcctgacttctcacctggttccctggtagatgaggacctccacccagcagacatcatgcatgaattcagattcaaaaagagtggacagccgtccttcttccttgctaagccatggctcagacagttcatttattttcaaagttttatatctgtgtctttgccatcttcagtgtaatgtgttcccatctctggctatttcagccctttgcacacacaaacttggatttttagagaacacctaattgctcctcatgcttgtttcaagttgatagtaatagctgtgcttcccgctgaggcg

SEQ ID NO: 835144 - DNA, 600 bp, Homo sapiens
ctcaaatcaattaagggtgtttagtatcctgatgacaagaaaacagccccaagatcaagaaggcattctcagaaagactcatcagctctcattccaaagaaaaaaggatgtaaagtcattattgctaaggatataaaaatcttcaaatgccattctaatatgatattttgacagatatttgttttcatgaaaagtcatgaagtccacaagagaaacagattggaaaatgattaaatggacacagtgtttcagagtgaagctcctgggaccacgttccctgaatgatgatgttgtccgttgcaatgtgtggttcaggcagaagctcccggtgctgtcttgccccatccagaaccttgaagcctatcctggcaggagacttctcccttgccagtgagccctggggcagaatgcagaggggctgctgcaacattagcaatggaaccaagaaaagagtgtaagaaaagactgtggttgagatttcccagagcagmagtttccattttttttctttattgaattgcaattaccatattgatccatgatgttatcacagtcatcagtaatccattaccctttatccagcacttttagaattttcag

SEQ ID NO: 835145 - DNA, 571 bp, Homo sapiens
atctttttggattgactaaactctacatttccttcaatctacaacttaaaactgtgttaatcatgttcaaatatagttaagtgtcccttagcctgcttcctcaatactgtgatcttatttctaccattgtgttctcacagtgtattatatttttcatatagttatttgtttccagagataccagagagcttgctttctctctctctctccagataaggacatggcaaaaaggcagctgcctattaagaccagaagagaccctgaacctgaccatgcagacaccctggtcttaaacttggattgtcagctaccagaacaataagaaaataactttctgttgtggccgggcacagtgcctcacgcctgtaatcccagcactttgggaggctgaggcaggtggatcaggaggtcagagatcgagaccatcctggctaatgcrgtgaaaccccacctctactgaaaatacaaaaaattagccaggcatggtggtgggcacctgtagtcccagctactcgggaggctgaggcaggagaatggtgcaaacccaggaggtggagcttgtagtgacccg

SEQ ID NO: 835146 - DNA, 571 bp, Homo sapiens
atctttttggattgactaaactctacatttccttcaatctacaacttaaaactgtgttaatcatgttcaaatatagttaagtgtcccttagcctgcttcctcaatactgtgatcttatttctaccattgtgttctcacagtgtattatatttttcatatagttatttgtttccagagataccagagagcttgctttctctctctctctccagataaggacatggcaaaaaggcagctgcctattaagaccagaagagaccctgaacctgaccatgcagacaccctggtcttaaacttggattgtcagctaccagaacaataagaaaataactttctgttgtggccgggcacagtgcctcacgcctgtaatcccagcactttgggaggctgaggcaggtggatcaggaggtcagagatcgagaccatcctggctaatgcagtgaaaccccacctctactgaaaatacaaaaaattagccaggcatggtggtgggcacctgtagtcccagctactygggaggctgaggcaggagaatggtgcaaacccaggaggtggagcttgtagtgacccg

SEQ ID NO: 835147 - DNA, 555 bp, Homo sapiens
ataagttgctctgaaaaaaattcagtaaattaacattgttttctgtgtataaatatatctaatcttaagtgtcattattttagtgcrctgcagagaaaatctccttttatcatgtaaaatggcaacaaaggatatttcacagtttgtatctgaaatgttctagtcagtattatgctaagtatataaaataatttacattgctataaaaacatataaagagcatttaaaaaaaatcttttacgcctgcttcacagaatgtagcttttaaagaaacttgttcttattttcaaatgttaaaattttacctcttaccattagaagttagaaaaaaattccagggtcacttcagtctccaaaaggcatgtttttgagggtgaaagactttattccagtggaacggccttcagttgatatccacacattaatattgtatgagaactctggcagtttcctctgaggtgccagtctgaaatgagagtaatggaattgagaggatggaaggctgacagtggtaaataagttgtgtgatatgaagactgggagtcaatctagtaa

SEQ ID NO: 835148 - DNA, 609 bp, Homo sapiens
attacagtatttagtactaacatgcaagtatttccagctagtggaattataagttaatacaacttttgaggaaataatcagtgagcaaactccgttgatggaaaatasgtaactttttatttattaggtttattagtttgagatctttttaatttaactggcattatatatatattcatatttaaaattaattgtgaacatgtgttaatgacatatggtcctaacaattaattaaagtgatctgttttcatttgctaatttttaagcttgaacaatgaaaagaagtctttccttaataagacataaacattctctatggcacagatccacattgaagcatattgttgccatccttctgaaccaatcaagaaaaattaaataaatatgatttacacctaactaatttataaatatttccataggttcagaacaatagtcaatagacctaatggatagccctgaaatcctcatttttacataagtatttctgaagcaagtggtattaaaaaacttcaagaaatatataaactggaaattattctatgtatagatgtgactgtacatttctgtaagacatggatttttttcatgtcatataaaattcagtaa

SEQ ID NO: 835149 - DNA, 544 bp, Homo sapiens
gctctaatacttcctgctgtgcacgttgctgccacaaatactactgcatgttcctccccctctggrgttctgattctctctaccagaccacagcccatacccgcaataggagcaaacggttatcatactaagcgttgtaatggtttatgaaattacttattcaagaagaaaatcaggaaggaagaagtcaggaagcatacatatatttatgacactaaagagatgcaaacattcaaagtctctacagcagattttcaagccatactttggatcacaaaatcaatttttggtgttaatattatctcttgttaatgaaatcaagtagtatataagagaacagaacataacaaaatagaaaattctatcaatgctattgattctattaataaaatattaatacgtgaaaattaataccatgtataaacatttggttactggttctaggagatagacagctgagatagatgagaaagaaggaagaaggaaggaagataggcaaggtatccaagttcatagagtcaaatatatcttcatatcaccagat

SEQ ID NO: 835150 - DNA, 582 bp, Homo sapiens
ctgggatccattttgagttgatttttgtgaaagtgtaaggtctgtgtttagaatmtttttattttttgcttgtgggtgttcagttgttccagcaccatttgttgaaaaaatgatttttctccattgggttgcctttgtcctttgtcaaggatcagttgactatacttgtgtaggcctgtttctgtgctccctattctgctccatttgtctgcttttctgttccttccccaataccatacactcttgactgctatagctttgtggtaagtcttgaggtccaatatgtcagtcttctgactttgtttttctcctttaacattttgttttctattctgggtcttttgacttttcatataaactgtggaatctgtttgtcaataaccaaaaaatagcttgttgagatttgaattgagatttcatcaagtctctatagatctagttaggaagaattgacatcttaacaatattgagtcttcctgtccttgtttttttcttttttttcttattgtactttaagttttagggtacatgtgcacaacgtgcaggcttgttacatatgtatacatgtgccatgttggtgtg

SEQ ID NO: 835151 - DNA, 502 bp, Homo sapiens
gaactggtttctgtaaagcatcactcgctgtttccaggggtcccagctacagagtaagtggaaagattggttgcttgttaggcagtcatacaaaacatctgcaaaacccctcatttgtgtaccgtgggaatgtgatttagacatttcggtctagaattatactctagaggtccgttgtggaatgtgcattaactaaattacagaactatgctagatccttctttaatttccttctgtgtcctatacttcttttattgacgacatcattcttcacattccctaggactttttgttcccttttacttttcctctcattctcatgtttgaatggtggcatctaaccagatgccaaggcgtgtgggtcccatcaccgtaatgtcattaatctctcttcccatcccttcattccagggctatggcctgattgagccccttgcaatcttctacataggccagstagtgtacagtcacatggggagtctgtttccttctccctgtctct

SEQ ID NO: 835152 - DNA, 615 bp, Homo sapiens
ttagggaaattaaaacagcagcctaaagccagcaggagaataactgtgacttaccaaaagaaagaatattcaaaatgaagatgatagtgataagaatggtcatagtgatggtcgataagacttatatatcaggtgcgagactaggcattttatatgcaatgctgcgtaaaagctcacaacagccccacaacgtaggtataatgtaggtttgatgatgggtcaaaatgtcagctttattactggagctgcattggagagtgcaatgaattctgtgaatcaacttgaatcctaatgacctttctaaatagttttctctcagtattaaattcatccactcagtatctactcctacccacaggagaacaggaacttggtgattttaattcatgccctttcttagtctcacaaataaatactctcttcctttgaagagtgggagtaagaagtgaaagatgttttttggtgttttatgtttgtttgttttcttttatccagttacaaatygcatttgaatgctagtaacagacattccaaacagtagattaaccaatgtaattgttttatttttgtctaatgacaagaaatttataggtgtatggttggtggcattaaaat

SEQ ID NO: 835153 - DNA, 625 bp, Homo sapiens
atttgattttacctttcaaagaatagaaactagcaaacaagagtcaagatgagttgttcatatcttgcctgcagaaaaaataacgtgcttctttttgttgtagagccgaggagtctccctatgttgcccaaggtggtcttgaactcctaggctcaagggatcctcctgccttgatctctgaaagtgctgggattataggcatgagccgctgcacctggccaacaatgagcttcttaataattgttttcaatgaagacaatgaagggttgttctgaggaagatgctcacctgttctacatctcccctgcaagcaaatctaaaggcaaagagtgcagctctaaccaagtcataaggcatgccttcttgactctgaggctgtttagccacaagaactaccaagggactctaagtggggtcctgctattagaaacattaaatctaggactgaaaattgtctgtttgaaatagttatgtgctcatattaaaaaatgagaactgattaggtaaattgggagagcaaaagggtcaagacaatgtctgttattgatgattttcagattgcgtgaattaaaatgcttatttcattcgagaagaasgatttaacagccaaaatcacacttaacca

SEQ ID NO: 835154 - DNA, 582 bp, Homo sapiens
tggtattaactattaattttatagttggtacaagcaatagagcttgaaaaggtattttcttgtgtcttaataccactaatgtatgatttataaaggcatgraaatacaatctcaggagtcttaatatttccttagaagattaaacagccatgtaaatccattatccagaaggttagacataaatgtcagttcctgagtgtcccacaaaggaaagtgtggattcttaataacagagaggacacaaggtctttccttgagagatttatgtctgatcacaatttcccacgtttaaatatccacaatcaacaataggtacaactttgtttgccaaaaaagacttttaaaatatcaaatggggagatacagaaaagaatataggacaatattttctgtgcattaaatcttcacagataaattctactacttgatataatcagtccagtccttccttccttacagatatatcttttaagagaagaattagtaattattttattctcctaaatttattcttcttttttgtttgtttattggtgaaacaaaaggattattaaaacacttaaatatattagtatgtttaaa

SEQ ID NO: 835155 - DNA, 555 bp, Homo sapiens
tgaatgaatgaattcgtttacataatgtgtactaggagccaagccctgtgtgtgtgtgtgtgtgtgtgtgtgtgtgtgtgtgtstgtgtctgtgtctgtgtctgtgtgtggtttttggtgatgtgatttttaattagatccttacaataatatggtgaagctactcatcattggtcccattaaacagaagcaaaaactagtgcttggagtatcacaataacttgtctaagattacacagccagtctgcaaaagagctggatttcaaaatcttccaagtcatcatcagttatggtatttttaagatcgatttgcagttaaccacacagctttattacaaattcatgctctcttgatgtactcacagtatttttcaaaatttacctattgctatctctctatctctttaaacttttttcatccatcctctgtatcttcccttttatccctgaatgtttgccctcccctcttaagaaaaaataagatagtagcaagctccctgctggattttataactttgcataccatatatttagtttagtaatgaaaaattccag

SEQ ID NO: 835156 - DNA, 666 bp, Homo sapiens
cctcatggtcagaggatccaaccagctcccttttaaagttgtgcaccagggaacagatgctaaatgtgtggcatccttgtggtaatggcacaaaataaatggcccagttaaaatccaattgtctgaaagtttccctcaaataggacatttttactatgatatataaaattcctcttgcaacaagtgtctttttagttaaaatcaatagatgttctttttataaaatcaaagtgattagtggtttgggtagttgtgtgtgtgagtgtgtgcacgattttatatgagttaaaagtaaatgtggagtggagggaatggaccagttactaagattagaatatagtccctttacagagatgcaggaaccctatgtcagcactgtgtgatagaactttctgagacaataaaaatattttatacctgtgccatccaacatggtagctactcacacatggagtaattggcatttggctagtgcaacagaggaactgaatttttaattttatttaatattaagtaatttaaatttagttttaaatagctgtatgtgggccggggcygtggctcatgcctataatcccagcaatttgggaggccaaggcaaaatcccttgaggccaggaattcaagaatagcctaggcaacatagcaagtccccatttctacaaaa

SEQ ID NO: 835157 - DNA, 561 bp, Homo sapiens
attgattcattgattcattcagggaagatgcactgatatttgctcaccctgaattccttttctagatgtcatccacagaaagatgaataagacatggttcatgtctctgacaccataccttccactgggggagggataaaggagagaccacgactaacatttactgagctccaactacttctgccaggcactagactagttgctttgacatcctttagttaatcctagtaatgccatctactggactgtactcatcgtattttcagatggcaaagcagagtttccgactggtatacaacttctgtgtggactcaaaatgtaagtgaactggcttgcagtccttatcagtagcatctccccaacctccaaaaaccttatatacactttatgggaaactgtaaggtagaatgccatcagcaactgattttatgggttttgatcatttgtaagctctttaataatttgagttcacagcagagtcagaaaaaagcctccycagcatcatttcttccatattcgaaccggttctctttttctctttcatgctactctttaatttga

SEQ ID NO: 835158 - DNA, 527 bp, Homo sapiens
gtgagatcttagagaaaaagaatcttctttcctcctcctttatcttcttttctcctcctctgcttccttcccctkctcctccttcttcttctctgtttttcttacaagggttaaacaagggtctattttgagcttagcacaaagtctgttcccactttctccaagtgtcccacctaagtgctgaagctcagtaaataagcccaattggaagtggatacatgattagttaattgttcagtggcaaagttcttacagttgattttctctgcaatcactctagaaaaagataagtaaaagccttggttggtgggaaagatggtctttttgaagataaaaaacatattcagaggaatgtttttgggttagttctttttttttttttttttttttgcacttagcatctgacaaagagagagtcattaatgccatagcgtgcatatgagactgtaatgagatgattctcacctgagtgatttctgaggcattcatctcattgaatctaaataccagggatccagactccacca

SEQ ID NO: 835159 - DNA, 554 bp, Homo sapiens
ccctaccacgggctttctggatgttgtccaatgagagattggcttggaactgtaaaattagccatctgcctattaaaaatgtaaccagctgcatccgatgaaacacagtgactattgaaatgaactcatccgggagagaactcgagtcccctgcttggacatttttccaatctactgctagactgagacactccacaagcaaagagcctttcgtccttgtttggaggaaaacggcatgactctcaagaacgaagaagacttgcgggtttgttttgttgctaaaattctggcatttctcaggatgagttggacttgaagtgcagatttctcagtttgtctgccatttgtttaaaacacctccctgttgcaagaaaaataaaatataaaataaataagcacacccctagtgtctccctcccttcaagattttatggtaaatcctgggcatttctaacaaaccttaatccaagcctaaaatactctaagcagcacataataacttaaaactgagagctggtgccatarttattcctgcaagtgctaccatttcgcca

SEQ ID NO: 835160 - DNA, 620 bp, Homo sapiens
ctgcatggaggaggtgatataaaagcagagagagccacgtgaaggatggctagggggcttggggtcgagcagaaagaagtttaagtataaaatccctgagaggaggagaacttgaaaggtttggcaaagaggaaggtcagtgtgtcaggagaaggccgaggggtgaagaagaggggagccaggttagaaggactggcagaggacactgacctgagagctgaccaaggcgaggactttggggggtcaggggcttggcaaatatgatcgactcagtatggccgttcatactgttgccttttccaggccacttctcctgctgggggcagtgaggagcctgccagccctgctgctttggaaagcccagaggaccaagaaactgaggctgcaggggaaaggtggggagaggagaggcaagcagcagcaaactgctggaacgcctgcaaatgggctgctccgaaggctctggggccttggttctgctctgcacagagctggctgtcctggctgacatctgttgtgacctcttccaaagtgacttcgccccatctctctcagaacgagccyggacagtgggtgtgaataagcccagtaatcctcgatgaggaagccccgtgtccacg

SEQ ID NO: 835161 - DNA, 591 bp, Homo sapiens
ttggcactaaaaggaggatgtgacactgaatagggccagatcctttccagaggttaagacagtcaaatacagagcagaaccctgaaccaccaggatgakctattggcatgcatcacagaaaacatacagggtgatgcgggagagttgaaagggtgcaggtggcaggatgcagagaggggaaatctgtgttttcaggtgctcatgggggtcctgtattagagttagagatagggttctcccagggcagacagagcccatgcatggcttcatgagcagacagagcctctggcaaagaaaaaggctctcctttccctggatgggtggagctccacgcagtgcaagggtcttggccagcagaagaaggctcagacatgcagcacctgcagcgaactgcccagacagccctgtgcagaggcctctggtgacactcccggaaaaatgccactggaggagagacttgaagggtggtggcacaggctgaattctgtccctccctcaccccatattcatatgttgaagccctaaccccagaacctcagaatgtcactgtgtttggagataggatcttcaaagaggtgattaagttaaaat

SEQ ID NO: 835162 - DNA, 628 bp, Homo sapiens
ccgctttcgagcagaatgatccaggtactagcagttgggagttgatcagggcgagaagaaaggggaaggcccacaggatatggtsagaacatcaacgcgatcacctgcagcagctaaaaagcaatcttttcaagtgactacgcattctcattggattcttgaagggcaattggaaggaagcaagggagagataattgctaacacccattagacaggtgagacaattatgggttcaagaagaacctgacttccccttgcctggagtgttttccttttttccttttggcttaggtgctacttcttaggttcacagttcacctcctctacatgaccttttcttttgtggacaggaaattcaccttagactagaatcctgcattattatcagctgctaagatttgtggggatgcttgttactgcagcataatcaggtatatcctgactgatgcagacatgaaaagtagactgatttagatataaaagcaattaagtaagcaatagcagaagacatacagaagacataaagattaggacaatggtctgcaaatcactgacatttgaggattgatagtgcctttgtgctaataggttggtacatatataaggaaggagttatttagaacatgac

SEQ ID NO: 835163 - DNA, 545 bp, Homo sapiens
actttctctctggggcccctgaagggaattgtctgggttttggttcctytgtgttgtcagtgccctccagcctcctttctgcctctggatattgccttgtgtccttgctctgtgcctgttttttcgctctgaccgtctctaccgccacattctgtgtctctcctgtgattctgcccacagtcatcccattctcttacatactctggccactcttggcctgtttctttccctgtgggatgacagtttcaaagagagtgaatgtcaaagggctcatttccttccctcttacccacagtactcattacatttgctaaattgaggtattaacagaggttaataagaggtcctgctgttgttggtttgggtctacaggagcaatggagaaggaggaagaatgaggctgaaggaggccagggtgaaaagggagaacaaggaaaaggggagaatgtcaccaggattgcccaagctatttctcactaacgtgcagttgatttgcaaattgtgattgaaacaaagaagccttacaaaaacgtttagaaagtttt

SEQ ID NO: 835164 - DNA, 503 bp, Homo sapiens
ttagaaactatatagggaaaatttgtgatgataatatctcctgtttatagagcatctatgaaccatgagaccctagggattattctattcctttttcaattaatgactccttcctttcttgttccaggtgagctttgctgttctttaagttaggcactctctgtatccaagcattgtcctattcattctctaaacaagtcctcagggtggacagggctgtgcagctggagccctgtgctctgtgtgcaggccccagcctgaggaggagctgagcaggagattccttcgtcaggctccatccagcgggaagcagcgaaatcctctgatttacatcaagaggctggtctcctggccaagccttgccacggagggctatgcctttgtgtagtctcttttctccaagagggtgccctttttctgtataaacgcagtgcccaacctgcagatagtgctgaggtagggattgcaatgwagaaacgggctctagagggcaaatgagttgc

SEQ ID NO: 835165 - DNA, 392 bp, Homo sapiens
tggctacagtagtgtagttgctgcaactctatttgttcttaatgttgcctaaggtgttatgataccctgtgtctataaatgacttttgaggggattgggtatctcactcttcatgtttttaatacttttagagtttaaatgaaaataattgagtattaaaacaatatcttttagactagagaatttctacttctgtggtagagtttggctgtaagtgcttcttgaaaaagataaacattgaatgtataagaatttttgcttcctgctatactaaagctagcccctttaagctacatttaaratatttaaaactagttctagaatatttggttgaataaaaccaatgttaataattatagtacatactatgttggtttggcatttttaggatt

SEQ ID NO: 835166 - DNA, 392 bp, Homo sapiens
tggctacagtagtgtagttgctgcaactctatttgttcttaatgttgcctaaggtgttatgataccctgtgtctataaatgacttttgaggggattgggtatctcactcttcatgtttttaatacttttagagtttaaatgaaaataattgagtattaaaacaatatcttttagactagagaatttctacttctgtggtagagtttggctgtaagtgcttcttgaaaaagataaacattgaatgtataagaatttttgcttcctgctatactaaagctagcccctttaagctacatttaagatatttaaaactagttctagaatatttggttgaataaaaccaatrttaataattatagtacatactatgttggtttggcatttttaggatt

SEQ ID NO: 835167 - DNA, 567 bp, Homo sapiens
gttaccattgtcataagtgattgaactagtccaacttgaagcactgatttgcagagtgtctttatattgttgtggtcttttcaccaaaattctatgggcttttctttgatactaccgttttcaacccgtgtgcacacatgcttcccagatagtctaccgtcctctctttctttgtgttcatgacgatgtgaacactggcatctgtttagtggcagtcctggctgtccttcaagctagcacagcactgttgaacaaaactttgccagcattacacctcctttccagaatcaccattcatccagtgatggctgccttctaacatccagttcctctgttcccccaaatcctttagtctgagtaccatgggttgatattgacaaatgccttccctcactctggtgcaagctactgccatctgttgccagccaaagctttttaagtggcytcctggccacccaccatgctaccctctcatccactgcctacattgcagccattgtgacctttctgaagtgaatatctgatgaagttgctcatttacttaaaatcctaatggcttcctattgc

SEQ ID NO: 835168 - DNA, 567 bp, Homo sapiens
gttaccattgtcataagtgattgaactagtccaacttgaagcactgatttgcagagtgtctttatattgttgtggtcttttcaccaaaattctatgggcttttctttgatactaccgttttcaacccgtgtgcacacatgcttcccagatagtctaccgtcctctctttctttgtgttcatgacgatgtgaacactggcatctgtttagtggcagtcctggctgtccttcaagctagcacagcactgttgaacaaaactttgccagcattacacctcctttccagaatcaccattcatccagtgatggctgccttctaacatccagttcctctgttcccccaaatcctttagtctgagtaccatgggttgatattgacaaatgccttccctcactctggtgcaagctactgccatctgttgccagccaaagctttttaagtggcttcctggccacccaccatgctaccctctcatccactgcctacaytgcagccattgtgacctttctgaagtgaatatctgatgaagttgctcatttacttaaaatcctaatggcttcctattgc

SEQ ID NO: 835169 - DNA, 574 bp, Homo sapiens
aaggctctaggctgggcgtggtggctcacacctgtaatcccagcacttygggaggccgaggcaggtggaacacttgaggtcaggagttcaagaccagcctggccaacatggtgaatatcctgtctctactaaaaatacaaaaattagctgggtgtggtggtgcgcacctgtaatcccagccactcaggaggctgaggcaggagaatcacttgaacccaggaagcagaggttgcagtgagccgcgattgtatcactgcactccagcctgaaccacagagcacgactctatctcaaaaataaaataagactcgctttatttctttttagcatttattattatctgatgtcacctgatattaatttgtttattacctgtttcctgcgtgtgaatataaactccaggaaggcagagaacttgtcttaattccccagttcttggactatagcctagcacatagtaggtgctaacaaacatttgtcgaggtggtggttacttattataatggagcaaaggagtaagaataaattaggggattcaaagagaaaatcatatttgatcaatgaccaaaacttc

SEQ ID NO: 835170 - DNA, 574 bp, Homo sapiens
aaggctctaggctgggcgtggtggctcacacctgtaatcccagcacttcgggaggccgaggcaggtggawcacttgaggtcaggagttcaagaccagcctggccaacatggtgaatatcctgtctctactaaaaatacaaaaattagctgggtgtggtggtgcgcacctgtaatcccagccactcaggaggctgaggcaggagaatcacttgaacccaggaagcagaggttgcagtgagccgcgattgtatcactgcactccagcctgaaccacagagcacgactctatctcaaaaataaaataagactcgctttatttctttttagcatttattattatctgatgtcacctgatattaatttgtttattacctgtttcctgcgtgtgaatataaactccaggaaggcagagaacttgtcttaattccccagttcttggactatagcctagcacatagtaggtgctaacaaacatttgtcgaggtggtggttacttattataatggagcaaaggagtaagaataaattaggggattcaaagagaaaatcatatttgatcaatgaccaaaacttc

SEQ ID NO: 835171 - DNA, 626 bp, Homo sapiens
cagaagtaaaatatattgtgagcatatatcatcagcatctttctgctcttaaatagtaagtgatatttctgacttgaattcaataaccttcaaggtatccatgagaattaagacagaaagaggttgaggcaatggatataagccatacagcaaactcctcatgggagcacgaactcagctcagtttttctgacacccagccgcctcctctcatggctatgtagtgagtgacattgtatgcaagagtgaggcattggcttcaaggaggaccatgtgcattaaatattagctgtgtggcctttgccacagtctccctgggcttcagtctcaccatctgcaaatgataacagtacctatcttggagggttattatgagaatttagatgaggtaacacgtgtaatgttcttaccctagtgcctggcaggtaattaaggatgccacttaacaaatgacagtgattatcagatgagacatccatctgcttagctgacatctccacttgaacctcaatcttagcctgtccaaaagtgarctcttcattttctccatcaaatgtgttcccccagtcttccttctttcaataagcagcaactccattctttcttttgttcaggtcagaaattgtg

SEQ ID NO: 835172 - DNA, 607 bp, Homo sapiens
aaattatcttcagtaagattttgctgtttctgtaagacttcactgcctcccaggcctaatgtataagccagaaggaactcagttttccagaaattaaggagcccattttaacctaaaatattggctttactcccaggttctcttaacttagccaatgatttttcctacctaagcacacaagaaaaatgaaaaaaggggtagaacacagaaatccctgtgaattttcaaaagccaaattttataacccctgcaatattactgcttactaccagttcctttctgacccagtcagatatacgaggcctctgactgggtccaagccagttaattcctggatcaaatctgttcctggacccagtccagtttctgtcatgactacaaacccagtttggatcagaaacttgctcgaagaaactcagagagctcaaaacacaaatctatggagcttcaaattccgagagggagcttaccgcgatccccagccrctctgagagatcaatggacacaggtgggacctgcaggtaccttgtgtgttcactcagcgctcctgggagtcactagaagctccacttcggatcctgcttctgacaccatctgataaaagaaa

SEQ ID NO: 835173 - DNA, 555 bp, Homo sapiens
gcttttaacttcaagttcctcacagtttagtggatgacagaaccaggatccaaaatggggtacaatacggataaatgaatcttgcacttaagtccaaaaacacatccatataagtaaacaatatgtgcctgatacatagtaggcatgaataaaaaattggtgaataaattgaatgaataaaggtaccaagtttgaagaaaaaaaaccccaaaccctggggtttcatttagttgcaagctcagtgcaggtcagtcaggggtgtgatacaattgtccacaaagcatgtaaggttgggcctcataaatgcgaaatataacaggaacaagaatggtcacagatgtattctgaggtatgctcctctgagctcatcattccatggctctagctcatgctggataccagaatattttacaaacattttttaaaataaagaaaaaagtggagtacttctgaagaagaccaagtgaatgaggaatctcacagccttggaaaggwaaaacctagaagaaagagatctttatctatatgaagatcttcaatggaacagagtgctgg

SEQ ID NO: 835174 - DNA, 555 bp, Homo sapiens
gcttttaacttcaagttcctcacagtttagtggatgacagaaccaggatccaaaatggggtacaatacggataaatgaatcttgcacttaagtccaaaaacacatccatataagtaaacaatatgtgcctgatacatagtaggcatgaataaaaaattggtgaataaattgaatgaataaaggtaccaagtttgaagaaaaaaaaccccaaaccctggggtttcatttagttgcaagctcagtgcaggtcagtcaggggtgtgatacaattgtccacaaagcatgtaaggttgggcctcataaatgcgaaatataacaggaacaagaatggtcacagatgtattctgaggtatgctcctctgagctcatcattccatggctctagctcatgctggataccagaatattttacaaacattttttaaaataaagaaaaaagtggagtacttctgaagaagaccaagtgaatgaggaatctcacagccttggaaaggtaaaacctagaagaaagagatctttatctataygaagatcttcaatggaacagagtgctgg

SEQ ID NO: 835175 - DNA, 655 bp, Homo sapiens
tcacccacttctcaatttaaatataagtattaaatatcaaatctattttaggctcctgattgacatcattayttgttttataagtcagattttgtgggcttagatttttaaaatattgtgcctacatgccttctggagaaaaatgacccagttttcattttgtaaaatggcaatcttattcatatgggtctatttttgatcggtattttctccctaatgcttattgtagtacctaacatacagtaagggttctaaaaaatctttatttatttaatgaaaaattcattctggcaaactttgaaaatttgaccatggacatttaggaagaaagcaacaaaggtgacacattcaaaacatggggaaaaattttaagctggaaaaaaggtgataactaattgatgcagaaatgagaaaatcataattcaaccaaattattcctcctatcacctaatcattattatatattcactcactcccctaacactggttgaacatattctatgtatgagtcactgtgagggattctctgaatataagggaacaagatttggttcatgggcataaagtttgagtgggaaagaataataaatccaccacctgttccccattggatccccggcactctgaacaatcacaaggcaggtgcctggtaagt

SEQ ID NO: 835176 - DNA, 614 bp, Homo sapiens
acaaaccttgagctagatacagagtgctgattggtgtgtttacaatccattagctagacataaagattctccaagtccccaccagactcaggagcccagctggcttcacccagtggatcccacactgggccgcaagtggagctgcctgccagtcccgcgccatgcgcctgcactcctcagcccttgggtggtcgatgggactgggtgccctggagcaggtggcggcgctcattggggaggctcgggcagggcaggagcccacggcgggggcggggaggctcagacatagcaggctgcaggtccggagccctgccccgcagggaggcagctaaggccgggcgagaaattgagcacagcagctgctggcccaggtgctaagcctctcactgcccgtgccggcggggcggcggggccggggggctggcgggcagctccgagtgcggggccgcccgtgcccacacccacccggaacttgccctggcccgcaagcrccacgcgcagccccggttccgcctgcgcatccccctccatacctcccccgccacacctcccgcaagctgagggagctggcttcagccttggccagcccagaaaggggctcccacagtgcagcg

SEQ ID NO: 835177 - DNA, 629 bp, Homo sapiens
ctgtctcctgtccatttttaatttatcacaatgtaccttcaaatcatattatccattttgaaaataatataagaaacttaaaacagtatgtgtccatttttctcttttttggagaattaccatgcattttatttctgcatatgttataaatttcacattacattttcttcttgttttaaactgttaattttattctaaataatttttttaaatgagaaaaaaaattgaatttacccccaaggtagcattcttgtgttctatcttttttgcatattttaaatccaagtatctatttgatattattttcttttattataaataacttatttctgcatttattgtagtgtaagtctgctgttgacaaattaccccagctttttttttctaaaaagtttatccttatttttgaatgatggttttgctgtttgctgaatttacagttctaggttgacagtttttaaatttttaaagtaaaattctaacaccttgtttttgcttcatttctgataagcttcagtcattctcatttttgttcccctgtgtgtagtatgtattttttctccagttgttttaaagttttttcttcatcactagtttacagtagwttcatttttatatagcttgtggtg

SEQ ID NO: 835178 - DNA, 653 bp, Homo sapiens
tagatagcctcatctagtttcagatgagagagagcaatgaaagtttctgcttttttaaaaaacaaacaaacaaaaaaaacctggcttgtcttgaaactaggagaatcaggtattctacccctttttggcatgacttaaacttactaccagtgtaaagccttaactcgttctcagatacaaacaagctcttaagagcaaaggctgcctgagcagcttattgcacggaggaagcaggagaagagaaaagattatgtgaatatcatgcaagtagtaacgaagaataaaaacaggaaagtattaatcgaagatgtgattttccctatgtaatcaagaattttgtcatgcttactccatgaggcaggtaagtacggaggaaggtaacagtgaccagaagattccctttagtaaacatctcctcagggatctgtgaagtcaggaatctcagctcctgttacaaatcgaaggccattaattaccatggtgtctgaagttgtcaatagcccacccctttaattcccacataatcacttcaattattgtgctcattktatgtagttattgcttgtctcctcccacagaatgtaagacccatgacagaagagaccatatccatctttttagaaaagtccttgacctataatactcattcaaaa

SEQ ID NO: 835179 - DNA, 536 bp, Homo sapiens
tgtagtgattacacaaaagaatgtatgtaattcacctagcatagggctgtgtatgtaatatctgttcaataaatattagttttctttcttcgcccttaccttctctagaagtttctctgattatattagtccagaatgttgatattgttcatctggcaataaattacagattatcttgaagtatttcatagaagcatttttttttttttttttttgagatggagtcttgctctgtggccgaggctggagtgcagtggcatgatctcggctcactgcaagctccgcctcccaggttcatgccattctcctgcctcagcctccagagtagctgggactaccggtgtgtgccgtcatgtctggctaattttttgtatttttagtagagacggggtttcaccatgttagccaggatggtctcratctcctgaccttgtgatctgcccacctctgcctcccaaactgctgggattacaggtgtgagccaccacacctggcccagaagcatttttattattacttagcttgcagtgttacta

SEQ ID NO: 835180 - DNA, 625 bp, Homo sapiens
gggggttaggtttcaacatgggaattttgtgggggacacattcagaccatactagggagaaatagtggtgcgtaaatttatccttgtgactgaagatctaatattccaaataacttggttctaactggcaagggtacttatagtcttgttgcaatcactgtaggatatatccagacccctctgatagctttagttcttcccactgacctgtctgcagagattcttcagggttgtactgcttcccaggctggcctgtggaaagagagtatatgaccactctgcttgtggcagttctttggtactgactgcactcggcatgccgctaagcgctctcttcagattatctcattctacatcctcaacaatctggtaaggttggttattatcattgctcttttactattgagaaaaccaagactcaggtttgagtaaataacctgcttctgggaaatgtagccagtaagccacagagcccagggccaagccaaggtcggtccgacttccaaattcatacyttcagtcaacatttgtacatcccagaatcgtgtcctggacttagtgactctgaggacaccttcctcaagggcacatggtttctacctagagtgaggaaatatgaaccaca

SEQ ID NO: 835181 - DNA, 639 bp, Homo sapiens
gcctggccgacagagcgagactccgtcttaaaataaaaaataaaaaaataagaaatacaggcagggcgcgtgggctcatgcttgtaatcccagcactttgggaggctgaggcggacaggctgcttgagctcaagagttccagactagcatcggcaaagcagggagaccccatctttacaaaaaaagtagcctggcatggtgttgtgagcccatagtcccagctaagtagggcagaggtaggagaatcacttgagcccaggagttccaggctgcagtgagccgtggtcgtgccactggactccagcctgggtgaaagagcaagaccctgtctcaaaaagagaaaggaaaaaatttaacatcaagaacttcctttcatcaagacaccactgagagaatacgacaacccacagagtaggaaaagagatttgtaatacacatctgtaacaatggacttcctcctagaatagagaggataaaaagtagcaacacttccgcttgcacccggacggaacttcctgtcacggaaaagaacatcctgtcacggagaagaacatcctgcagaatttcctgtcaygaggaacattccgcaggaggaaatggaggctgaaaggctgcgactcctcgaggaagaggccaagc

SEQ ID NO: 835182 - DNA, 522 bp, Homo sapiens
gccattcctgattggtctctttccctctcctcagacctacctattctttgagacacaataytgaaattaggccaattaataaccctgtaatggcctctaagtgctcaggtgaaaggaggcctcccatgtctgttactttagatgaaaactagaaatgattaagcttagtgaaaaaagcatggctaaagctaagacaggccaaaagctagacctcttgtgccaaatagccaagctgtgaatgcaaaggaaaagttcctgaagaaaattaaaagcccatttctgtgaacggatgaatgataagaaagcagaacagccttactgctgatggtaatgctattgcgcacttagcagactacagtagagtgtaaacataacttctgtatgcactggaaaaccaaaaaattcatctgacagctttgtgatattcactttattgtggtagtctggaaccactcccacaacatttctgaagtatgcctctaatgctaaacaaatactcatgaaggaatctaccatagccat

SEQ ID NO: 835183 - DNA, 483 bp, Homo sapiens
tatgaaagcttgttatgcagcgaatgaattgtagagtcagsagtcaaggcaaggagactaaaaagactgtaatccatgacacaaaaggatttccaacctgcccctgtccccctagtctgcactgtagtgagtgtctccttgtgaaagacaaaatgcaagattattgtctttagaaaacgacagaggggctgcatatatttgtattatcttttatcaagaatgcaaattgcaaaatatgaactcctcacatgactggacataaacaacaaagatttttgcagcctggtcctactgaaatttatcatctctacatagatctctgtgcgtttttaccccaaatttggtagtatgattttggggcaaatatcaattaagtatgtgagatggaaagtgaagatacaaaggaataacttcttcagcatcacaatttatatgtgaaccattttaaacatcttctgactcacagtataatttataaaattc

SEQ ID NO: 835184 - DNA, 646 bp, Homo sapiens
acaaaatgttacctgtggccagtgttttctcaggggtcccaggatcctgtagctgcagsggtcccagagcaagctagtcccagccagtgatgacccacactgggtaccaactgtagggaagcaaaacagggctttccccaccttctaggtcctttggctgggataggaattaaattgacataaaccagattaacaggagaaaaaccatgtttaattgcatatgtacacacgagagtcccacaaaatatgagacttgatgaagggtcacattattaaagctgatacggcatcctgagctacacaaaggaagaggggccggggctgcagagaggtggtgaccaccagtgggagggcgaggggaggaaatgtatgatgaacaaaagctatcttgctgggcagacaaaaagtcccttgggcaataaaagttgtctggagcaactctctccctgatatagacaattttactaacgtagatttcctttacagatgcaaatttctttaacaaagcaacagcttttcagtgctactcctgtgtctgcagtttctcagaataaccaactcgaaatatgctacagaagtatatttgggggtggcatattctggtctcctaaggtcatattttagggtgctatgtcctgagccccat

SEQ ID NO: 835185 - DNA, 543 bp, Homo sapiens
atcaaaatgattgaatttgatcatagttttccaaagaaaatgaaaacattgacaaagagacagtgattaaggctttactaataaaggcaaggacttcttgcaaatgggataattacatgatttcaaagaagtttgtcttacctcctgtttagagaaaacagctaaaattaactagaactaacctgacattctcaaaggatgattgaaagctgtaaatctgaaagctgaataatatgtattattgcaagaacaactttaaaaggtcagggaagtagttcaattaaaagaacagaggaatacaaagcaaagcagactcaagccagctactgccactcacctttgctgagtctcagcacagggatctcaggttgcagtgctgctgctatcaggcaactccccgctccgtggggtctgccttgctgccagcggactgccatytaaactgctttcctctgcagcctcaggtgtcacacgaagacatgaaaatgcccatgcaataagatggacttggttcccttacatcttttttaaaccccttgttat

SEQ ID NO: 835186 - DNA, 536 bp, Homo sapiens
aacctaggccatctgatgccagagccccagcctttagccactgtgccaacctgtccctggcaaacgtaactaataaggatttggactcaargctataaagggcatgccccttctgttcagaggctttgcacatgctcttcccctgcctgaagcactgacccttccccaattgcctgactatatcctccccaaggctcagagatgggctggaaggtcacttcctccaggaactttccaggattgtctctgtcaggtaccctggtgacgcacagcgagtctctgtgtactcactaccacggcagctaaatcactgtttccgcctgtgtcctcacccagactgtgagtgtccccagggtagagatgggtctggcctcccattgccccatccccacggcaagcacagtctctggcacacagtaggtccccaaggtttgtggactgaataagtaccaccaaggtggccagaggctgggagaagcctggagcaccaatggccatgaaaattttccagaagcttctctgtcattatacagaaa

SEQ ID NO: 835187 - DNA, 536 bp, Homo sapiens
aacctaggccatctgatgccagagccccagcctttagccactgtgccaacctgtccctggcaaacgtaactaataaggatttggactcaaggctataaarggcatgccccttctgttcagaggctttgcacatgctcttcccctgcctgaagcactgacccttccccaattgcctgactatatcctccccaaggctcagagatgggctggaaggtcacttcctccaggaactttccaggattgtctctgtcaggtaccctggtgacgcacagcgagtctctgtgtactcactaccacggcagctaaatcactgtttccgcctgtgtcctcacccagactgtgagtgtccccagggtagagatgggtctggcctcccattgccccatccccacggcaagcacagtctctggcacacagtaggtccccaaggtttgtggactgaataagtaccaccaaggtggccagaggctgggagaagcctggagcaccaatggccatgaaaattttccagaagcttctctgtcattatacagaaa

SEQ ID NO: 835188 - DNA, 588 bp, Homo sapiens
ctcacttaaaccgatgattagatataggatccagtgctgattggccaggcctgggtcatgtgctcatctcttgagctgcggagtgagctcaagagatggtggagctcaagcttgggtggagyatcattctacccgaatcacatgcattgaaagtatgtgtgtgtttgctgggggagttccccaaaggagaataaaggtgctgttcacagaagaagtgaaaatggacggcagacacacacacagaagtctactcctgagccaaaatttctctatttccctattgctgggcactgggtgcaggtgtgtgagctaaagggaatgcttacctcctttttctgggtgcccttcttttagtaatgcagtcgagaatcccaaagtcaattttcgcagccgtgtcacccagtcgatgcccctctaagtgctgactcctgccccacacaccacagctcagcccagcctcttcctgctgtgctttggacgcaagtccagcacttgtcctggtgtccctctgacatcctatcttgttacactcaaatgaaagcctcctggcggccagggtctttgtctgccttgttcactgttgtgtcc

SEQ ID NO: 835189 - DNA, 551 bp, Homo sapiens
gggcctctgggtaatggagaatatcagaaacacaagagaaaggagccttatgggagaagaagatgatgaattcagcagtgactgactatgtgggcattwctgtgtctgtgggatctcagctggagacgttctagagaaatccactaaaggggcctgaggctcaggaaggtgatctgggctggagctatatttggctgttgaagtggtaggaaacaagtgtatataaaaaagtgaggaaaaaagattattgaggaaggaaacctggatattttaatataagaacagaggacagatgaaaaagggcctaaggaggaagttaagaaactgcctgagaggaaggaaagaaagagtggtatatgctatggaaggcctcagggaagttaaataaagtagaaacttgtatagttaaaagtgtcactactaaaaaatgattgacttagagctacataaatagaacatcactggaagaacatcattctagttgagaacttcgctgtcatagccatcacttttggtcatgatgacaagaagtggaaactcctgtggagtgc

SEQ ID NO: 835190 - DNA, 646 bp, Homo sapiens
aaattaccacaactcacccaaaatgaaatagacttttaaataataattttaactattaaggaaattaaatttatagtttttaaattaaaaaaaatcttattctgttgcctaattgctctgactgggacttcgagtattatgttgaataaaaatggtgaaagtgggcatccttgtcttgctataggtttcagaaggaaaaatgtcaatatttcccccatttagtatgatgttagctgggggtttgtcgtatgcagcctttgtggcattgaggtatgttttttctatacctaatttgttgagtgtttttattataaagggatattgaattttatcaaatactttatctgtgtctattgagatgatcatgtggtttttgtccttggttctgtgaatgtgatgcatcacatttattaatttgcatatgttaaaccttcctagtatctttggaatgaatctcgcttgatcatggtgaatgacctttttaatgtgctgttgaattttgtttgctactattttattgaggayttttgcatcaattttcaccagggatattggcctgtagtttttttatgttgtgtccttgtctggcttgggtataagggtgataatggcttcataggatgagtctggaagaattttattctct

SEQ ID NO: 835191 - DNA, 590 bp, Homo sapiens
taaataaaggaatattggttatatgtgacccacacagatactcaggccaaactgggttggggtgagaacacccacaaaagaaactcaaagatagaagtgtccttggaatcaagtttgaggagacatgacaagaatggatatttcccagtggattccatgaacactctagccctgaaacagtgagaaaaccagaaaagacctaagggatatgagagtataatttcaatgagagaggacaagctgtggaatgaattagaaaaagaaactgaagtaggatagttcaggaaattaaatcctagggcacagagaaattctcagagcaattctagaatgtacactgtaaagaatactactcttttttgtaaagaatactactttttttcctccctaataatgaaaaaaatgagatatagaaaaagtaagaaatttgcctgtgtttcaatctcaggtcttggtatttctaaaggttaagcttctaaacactactctatttccttgtgtccctttttttggcaagtaaatgagtaaagattatactrtttgttcaatcaagttattgtccaagaaattaactggaattcagctattta

SEQ ID NO: 835192 - DNA, 604 bp, Homo sapiens
ctaaatctaaaaccaatttctttttttctatgatagggtttctagataatgcaatatatccttctaagtacagaaccatgtgcaaattgttaatataatatttgtttgcttcactggaagwgttactacaatacagctatgtttgctagttgacattcggtaggcaggacaatgagtgaagtgggcctcagtgcagattatagggagtggtgcagatggttgagagctggaaagcacttgcctgcctagtcctaaggcagaatccttcatacagtctcagcctatgtcggcacctggaattatgggctcaatattgctgcccttctgatttttcaagggaagcaagaaattaagatcttaatagtaaaagtattatttctccatttttgaaaaccaattcaaattattttaaaatgctatgtaagcgaaagaaatcatgttggttggtcacatatgattggctcttttctgtcctttgtgaataatatgaaaaaaaatgccttactctaaatcactataaaatctaattcattataagaaagattattaagatcagcagtcaagcctatattaatttagcacagcatattttctggtgaaaata

SEQ ID NO: 835193 - DNA, 626 bp, Homo sapiens
gctctcctctgtccttctgctttttctcctccttctccctcaccttcttctgttactcatatctcctaaaagtcatctgaagacaaattagacttagaacattcaccataatgcttygggaaggttgtcacagatatcccctcaccagacatttcaacaagttgattgtatcacataccatttagccacagtttttaaaatttattcacttatttttggatgcataataaatgtacatagttttggggtagacatattgagttttaagtgtctgtaaaatattgatgggaatatctgacagagagtggtagaaatttctgaggcttaagagaaacaaatactaagaagaacatagggtaagaatgttgctgttcaaatcaagggagaaatgcatcttaaggataattgagtactcaacagcttgaacaccaaaatgaggtccttatctcaacaccagcccattggctggtgggcttttccaccactacccaactcaggtcttctctgctcattttatttttaagagctgactcttatatctgtattttcagacacttattaatgcatggcactataagtatatatccaaagataataactatttacatcattcccaaatattgcct

SEQ ID NO: 835194 - DNA, 599 bp, Homo sapiens
tttgccaaaaaaagttacactctaaaaaatatttttgcaggtaataatgacaaatttttgaattaaggactaatagrataatactgttttgataacaattacttggcagagtgagcaataggtattggaaaatggcaaataattgatctagtgagaaatatagattaacacaattcgtttctaagtccaataaaatgtacatttattttttaaacatttcttttgtttctaacagggggctttggattttaaaacatttcttttctaagaaatgttaaaactagtgccatgatgcttatgcagtttgcagaaacatgagccaattaaacctcattggctgttgaggtttagcaggaggctttgcattttaatagcaagcacttttgttcagctccctatcttggtcatatatggtaaagttcaacattctagaagtcgacaatgccacacattcagtattttcaaatcctagcaaaaacagaaaacatccactatgtatgctctaaaaatatgatttctacttttaaaaaaactgaatactcacctgtggtttattgtccaaaagtttttaaaaagtagaaaagactttgcatcctgaa

SEQ ID NO: 835195 - DNA, 599 bp, Homo sapiens
tttgccaaaaaaagttacactctaaaaaatatttttgcaggtaataatgacaaatttttgaattaaggactaataggataatactgttttgataacaattacttggcagagtgagcaataggtattggaaaatggcaaataattgatctagtgagaaatatagattaacacaattcgtttctaagtccaataaaatgtacatttattttttaaacatttcttttgtttctaacagggggctttggattttaaaacatttcttttctaagaaatgttaaaactagtgccatgatgcttatgcagtttgcagaaacatgagccaattaaacctcattggctgttgaggtttagcaggaggctttgcattttaatagcaagcacttttgttcagctccctatcttggtcatatatggtaaagttcaacattctagaagtcgacaatgccacacattcagtattttcaaatcctagcaaaaacagaaaacatccactatgtatgctctaaaaatatgatttctacttttaaaaaaactgaatactcacctgtggtttattgtccaaaagttttwaaaaagtagaaaagactttgcatcctgaa

SEQ ID NO: 835196 - DNA, 628 bp, Homo sapiens
tatttattaaatgcagattctagcagtccaggaatctttttttttttttttttttaacaggatcttgctctgtcacktaggctggagtgctggagtgcagtggcatgatcttgactcactgcaatctctgcctcctgtgttcaagcaattctcctgcctcagtctcccaaatagctgggattataggcatgcaccaccacagcctgagtaatttttgtatttttagtagagatggggtttcaccatattggccaggctggtcttgaactcctgacctcaggtgatccacctgccttggcctcccaaagtgctgggattacagggatgaggcactgtgcctggcctgcttttttttcttatgtgaaaggaaaataaatcttgggtctgtccccaaaatcgctaagccaagggaaaagttaagctgggaactatgtcagacaaatctgcctcccattttatccctaaataagatagctacaaagattaaaaaaaaaaaaaagctacatatctccctcacaatttgcccacaaggaaattccttgtgagcctcaagatttttaccctaaaacagttctgttgaatttcaccctggtcacataaactgatagctcgtcttcacaggtagaaa

SEQ ID NO: 835197 - DNA, 383 bp, Homo sapiens
catggataattctaccatccagataactactgctcgtattttctcccagtcccttggttatgcatatawtttgaaatttcttttaaagattttcactgtcctgttttaaagcaatcaataatgtttcatgctgaggcatggctcaattttcataataaaggaggagatagagagagagagatcaagaaccagaaagattcaaatgtcttgaaggattggtaaaagaaagaaagaagaggcaggcagccagatcctctcgcctcctttccccttgactgctgatactgcccccctacaccttcttcccctggaggcattccccaaaccttcaaatagaacaaaaaagctgttccagacccaaaaagcatcacgagccagtctac

SEQ ID NO: 835198 - DNA, 235 bp, Homo sapiens
ctcaggctggtcttgaactcctgggctcaagggatccttccacctcagcctcccaaagtgctggaatatgaggtgtgagccactgcgtacggccagtcaggactctttttcgttttgtttgtttttgagacagagtttcgctcttgtcgcccatgctagggtaaaatggcgcgagtgcaatggcctcagccaggactcttttaacacagarctagccatactataagacagctga

SEQ ID NO: 835199 - DNA, 616 bp, Homo sapiens
gacaagcaaaagtaaagtacagcatagggcaagaaccaaaaagtaagccacagccttcatctatttgtataggtatatactagtaaatgctgaagattctgagtttgagtaaccctggactactttagacttcaattttgttcatggagttcaaaagttctgcaaatcacgtttcatcataaatctgaagcaaagacagaggctcaaataatctggatagctctcaagggttctatattagaaacccaatattaacagtcacttaaagcttatgtcagggcccaaactaacattaaaagagcagagaactgtaattacctgcatctcaaaaaagttaagttggtttcctggaatccactgagtccataaaactatgttattccacactcaaaacatgcctttgttaattgttatttgccaaatgctagttaatttgttaccactacttagtaacatttctttggaaaactataaaatagatcaccaacattatcaaagaagacaggsaaaaaaagagggtctccctgtgttgccaagggtggagtacagaggcaacatcctagcgcgctacaggcacttgggctggagggatcctcccacctctggtggtgttttt

SEQ ID NO: 835200 - DNA, 616 bp, Homo sapiens
gacaagcaaaagtaaagtacagcatagggcaagaaccaaaaagtaagccacagccttcatctatttgtataggtatatactagtaaatgctgaagattctgagtttgagtaaccctggactactttagacttcaattttgttcatggagttcaaaagttctgcaaatcacgtttcatcataaatctgaagcaaagacagaggctcaaataatctggatagctctcaagggttctatattagaaacccaatattaacagtcacttaaagcttatgtcagggcccaaactaacattaaaagagcagagaactgtaattacctgcatctcaaaaaagttaagttggtttcctggaatccactgagtccataaaactatgttattccacactcaaaacatgcctttgttaattgttatttgccaaatgctagttaatttgttaccactacttagtaacatttctttggaaaactataaaatagatcaccaacattatcaaagaagacagggaaaaaaagagggtctccctgtgttgccaagggtggagyacagaggcaacatcctagcgcgctacaggcacttgggctggagggatcctcccacctctggtggtgttttt

SEQ ID NO: 835201 - DNA, 504 bp, Homo sapiens
acactggctgggactcctagcataatgctgagtatgggtgatgacagtggacatctttgctttattcccaatcttagaggaaaaactttcagtctttcaccattaagtatggtgctagatggtagggttttgttgttgttgatgttagatgtcctttatcaagttaagaaagtttccttctatttctagtttgttgcgagtgtttaccactaatggagattatcacaaatgttttaactacatctattgagataattgtgtggtttttcttttgtattctgttaatataataaattgcatttttgactgtggaggcagtcttgcattcccaggataaaccccatttggttgtgatgtattatctttttaacatattgctggattcgatttgctaatattttgttgaggacttttgtgtytatttggttgaggatttttttcatgggagatatttggtctgtagttttttctttcattcatttattctttctcttttttcttgta

SEQ ID NO: 835202 - DNA, 583 bp, Homo sapiens
ttgggccatacctgatgcagaaagtcttttttttcttttctttctttctttttttttttggagatggagtttcactctgttgcccaggctggagtgcagtagtgcgatcttggctcactgcaacctctgcttcctgggttcaagcgattctcctgttctcctgcctcagcctcctgagtagctaggactacaggtgcatgccaccacactcggctaattttttatttttagtagagatggggtttaaccatgttggccaggctggtctcgaactcctgaccttgggtgatccacccacctcggcctcccaaagtgctgggattacaggcatgagccactgcacccggctgaaaatctcttatctaatccccacatgatggcctttccactttggcttccattggcctagagaagctggttctggggaccctggtagcttctgggccttcttggtgggcaggaagggagggggaggatgactctggcttcctgttccatctggtggaatcagctaaactmccccaactacatcccttttcaggattgcgccaatcagaaagagaagcctatgagttcatagtgg

SEQ ID NO: 835203 - DNA, 593 bp, Homo sapiens
gtgtcctataaggtaggattactgcctttacaaatttttatttcttcctttccaatagttatgccttttatttccttttcttgccttattgcattggctagaatttccagtactacattgaatagcagtggtgagagtgaacatttttcagtcattcctaattcttagggggaaagcactcagtctgtcaccagtaaacatgatattagctgtagatgtactttttatagatgtactttatcaagttgtggaagttttcctttgttcccggttttcttaggggttttataatgaattaatgtctcacttcttcagattctgcatttgtctatttgccatctattcacaggccaatgatgatctggtacctggggggccttacagacctgggaaaagattgccccttcctgggcagtcttagtgaggggttccactgagaacatgtctttcatatacataccaatgaatcccaagtataaagccacaatcagctccttttctcactctcacacactaagccagtatttccctgttttaaatcatctcagrgctgggaccagacaactagatacctgtgccccagggcccactgg

SEQ ID NO: 835204 - DNA, 491 bp, Homo sapiens
tcagccaaaaggtgtaaattaaggattgaacataaccacgaarcaattggctgacaacaaaaaaggggggaaaaagacttttaacagaaagagctactgcaacttaaattgttctcacattttaaatgtgttaacaatatctatttttatttgtaagccaactttgtgttgcaactctgctgagtttcatcttttaagcctcttttgcctctctgagccagttttatcttcgtatttgaggctttacattcaggtgacttctttcattgcatttcaagggttctctaacccaaaaaaaagatggaagcagcacacgacaatcctttggggtgagtaaagaaaaatattagaatttctatttccattttctctaaatataatatgagtctacatttgatatatggattttcacaggcattcttgttcagtaactatatcagaggatccatatctcatacagtgagcaaaatatcctgaaagaagcatgcatg

SEQ ID NO: 835205 - DNA, 623 bp, Homo sapiens
acatcgaaataataactaatgtagttctcttaactgttgaatttcttgatggtaatttaacttctttagcaataattatggatgctagagaaagggtgatagtagtattttccccccttcaaaataaaaatatacaaaaaaaaacctaattaataagctacatcatactgatcatttaagaaaaaaagatgaaacggaaaataataattgtccaacctattcaccacccagttctttaaataattttctttatataaagtatgtaagtatcataatgaacaataaccatgttctacttcattgtatagtagaactacaaaactgatcaacaaagttacaaaagaacataataaaataattcttccactaaaagcaataaggccacataaaaacaactaaatccaatcatagcaatatagaatacttcttactaagacaatgacacaaacaggaacacatatatgtaacagaccaattatcagcctggtttcctaaaagtacctatacaaatcgctgttaaatgaatgtattaacaagtcaatttaaaccaagttaggcctaaagccacacaaggatccmctaatttcctagcactaacataaagaacctgagacattcctgta

SEQ ID NO: 835206 - DNA, 633 bp, Homo sapiens
aagaattacattttatctacaggcaatcataagccatgtctgttatgcagcataggctttccattctctatacatctaggtcatagagtttttccattgataaatctggatgtttatataccaacaktactttcttacaacatattccagtatatagtgtccagcttcacccactttttaaagtggccctgaaacaattttattcatcttattggagtgttgctgtaggggaagagtagaagctaagaagagtttgagttcaacaccattatatccaaatcctgaccttactactggaatgtaagctccttgaaagtggagatcttgtctgtcttgttcacagttgtgttcccagccccagaggtagtctcagggccaatatcaagtatgctctcaaatatttgctgggaaaatttactagctggataaaaggcaagttactttaatctctttaatcttcctttgtccttacaaatgaaagagactaatagtacttaaccttgcagtgttattataaggattaaagttgataaatatatgatcatgagaacaattgctagcacataacggtcactctgaaaatagtagctgatatatcagctgcattgtttgattattgttggctcaattaaa

SEQ ID NO: 835207 - DNA, 586 bp, Homo sapiens
atgtccctcattttgacattgatgttttctcatgattagactagagttataaattttaggaaagaataccatagaggtgaaatgcctttttaatcacaacacatcaggcagtacatggtatccacatgacactactccaaatactaatactggtcacttgggtaaagtagtgtttgccagtttcctccactgtaaagttactattttcccctttccatactttattaattggaagcatgtcactaagtgcagcccacactcactcaataaatactactttatttcttttgttgctcaattgttctagctttggccattgggacttctttcaggttggctcctttatctgtttgacatacccctttcctttactttttgagcactttcttactttctgttgcaagatattataggcttatgcagtttccttgccccagtcctagaataagccctttctccaagaagcatagtaccttttctttgagatttatgtagaaccaagatctgaatgctgagactgctcactgytattggggtgtcattccttctaggctctctcagtggacagagctaggttacatatata

SEQ ID NO: 835208 - DNA, 530 bp, Homo sapiens
agaagtaagattttatatatgctggaataaattatcctcaggtatataggagattgaatactcttttttttttctgagtaacctagtttattttgcacatttattgggaaatggcagatgaaacaaagtggacaaagaacagattgaggtcactttttcattgtcctcatcttcttgcttcacttttcatgagataaagctgaaaagtacatatttttccgaaattacacgttgtcacctaaggttactaagtgacctcatttttctacaaaattgtttgcccccatttgcccatcagtgatcagagctagtttttgaaaatattttaataagagttcgtgtttatcttaaagctaagtataatgtgtaagtattcaaatcaccaaaatatttttgaaaagtactgtwctaatctcaataagtacatggagtgttacaatttattgactcacattcctctactccccaccccaagaaaatgattagggaggatgattcagttacaaacttacactgcaaaaggaaaatgc

SEQ ID NO: 835209 - DNA, 600 bp, Homo sapiens
ttgttgttaccccaagttgtaatccctttataatcacaatttcaacattttattctcayagcaccaccttctaactttgataattcagttttaaaaaccctccaaatctatccatttttcattctctctggaaaaatccttttatcctaccatcttttaatggaaactgatatcatcaggttctcacttccctctttactgggaacttaaattccacggacagccttgataatcattgccatatttatatcttcaactttctttcctgtctactgctttgctggttaaatctatctgcctactcagtgcccttacttgtatggctgaatgtgtctgtggagaaaaacactcaatctctttgaatagtctcactttataatcatgatcaccaacctccagtgggttcctaatgctgccaagtgatcttactatattgctctagtccattcattctctcactcttccagatgaatattgcttgctttctcttttcttctcaagcctccaatacctaatctcttattttcacttttaaatgatcaccttactttcttttcactgagacaatagaagcaatctgaagatatttttcaaaattcc

SEQ ID NO: 835210 - DNA, 559 bp, Homo sapiens
agtagcactgactttggagttagactccctgggcttaaatttcagtagtagcactttctacacaatttatttgccatttctgtctcttacatgcctcctttgtagaataaggaaaataatacttacccagttgatgactgctctactaaaggtagtcatgacaagctacgcatttgcaaaatacaaggttactgactcaactggagttaaagaagctctaaagaaaaaagaccgatgctcaaattattattattagtattgattattgagttaatattaactttaaagtacttagcacattatgaatgcagtgttaaatattatttttattactattaatattgctgtttccccagtgctaggaagtactagagatggggagagatattaatggctgatttgtgcaggacctgcaccaccttattgccaagtctggattccagagccccacaggaccctttgtgtccacagtgctgacacartattatgcagaaagtaggaataaaatgcacttattgcttaaatttattatggcccaaagcaataaataccaagtata

SEQ ID NO: 835211 - DNA, 574 bp, Homo sapiens
aataacctcaaaagggcaaatctaagggccgggtgtggcggctcacacctgtaatcccagcactttgggaggccgagacgggcggatcatgggttcaggagattgagaccatcctggctaacatggtgaaaccccgtctctactaaaaatacaaaaaattagccaggcatggtggtgggcacctgtagtcccagctacctgggaggctgaggcaggagaatggcgtgaaaccgggaggtggagcttgcagtgagccaagatcatgccactgcactccagcctgggtgacagagtgagattctgtctcaaaaaaaaaaaaaaaaaggcaaatctaaaagctattggccttaaagagaagtcagagagaaatataggggtagagaatttattgaaagagataataacaagatcttctcaaatctaaagaaaagtatcaatattcaagyacaagaaggtaatagaacatgaatcagatttaacctaaagaaaaccacctcaaggcatttaataatcaaaactcccaaaggtcaaggataataaaaggatcctaaaagcagcaagagaaaataaagaa

SEQ ID NO: 835212 - DNA, 451 bp, Homo sapiens
tttctaagcttttgtatatacatctacaaattgyccttcatggaagttagtaacaatttatcctctcaacagtagtgtataaaggtcctattttcatacttgacatacttctgtgacataaattaatgtgtaaatacatgattatccattatttttatctaaaatgagactgaagcatcgccattcttctaacctcctattcaagctgacatccaggaaatataaattgcttgggtttgctcaaatatggatggattgtcttaaatatatgccactcaaattacttctcaagatgtacacaattcacaacgctccattgtttgcagcgtctatttgaatcttcttgtcaatactcagacagtattcaaagaatatgccgttctgaacttaccttcccaagatgccttagaagcgtctgctctcagctgcagcataccttcctcctttaaac

SEQ ID NO: 835213 - DNA, 500 bp, Homo sapiens
gagaaccaggactttgattaaatttattcctgtctgtatccccagcagstagaacactgcctagtacatagtaggttctcaataagaatttgttaacaaataaatcagtgaatggttatacttgatgtatgttgatgttactgagcacacctcatgttgaaaaatattgcaaataggagaatgactgttattcattcagatgtttaaattgaaacagttttaatagatgagtaaattaaagtgtcatatatgcttatttggcaattcactttgtattgttttatgaagataaatgtggaatgatttaaaaaataatcttgccgcaagcttttttttttttaaacccaagagatgagcagtatgattccaaaccatagcagcatctctgtttttagctcccagaaatgaatacaaatcctttataactgacagcattggtgtacttcagtgttcatacttttaaagctacccagaacaccagaaaatgagagcatggaaag

SEQ ID NO: 835214 - DNA, 547 bp, Homo sapiens
ctgacccagggaaaataaatgcccaactccaacccactctagccattcagtccacctgtgcagggtgggaactgagacacatctgtgaarttcacagtccagaggcacaggctgcctaaagaacagatacctaattgtgaaattatagaacacttccccaccccaacaccataccaccacattactaaaggctaatcgacagcagttccttttaaccagtgcctcatgtccagctatcaagaaaaaattacaagacatattgaaaggcaaaaatgtagtttgaagagacagagaaagcctgagaaccagcctaaaatatgtcagggatggtggaattattaggctggaaatttaaaacaactattattaacatgcttagggctgtaatggataaagtagacagcatgcaagaacagatgggcaatgtaagcagagggatggaaatcccaagaaagaaccaaaaataaatgctagagctcaaaagcagtgtaatcagaatgaagaatgtgtctgatggcttattagcagactgcacacagccgaaaaa

SEQ ID NO: 835215 - DNA, 547 bp, Homo sapiens
ctgacccagggaaaataaatgcccaactccaacccactctagccattcagtccacctgtgcagggtgggaactgagacacatctgtgaagttcacagtccagaggcacaggctgcctaaagaacagatacctaattgtgaaattatagaacacttccccaccccaacaccataccaccacattactaaaggctaatcgacagcagttccttttaaccagtgcctcatgtccagctatcaagaaaaaattacaagacatattgaaaggcaaaaatgtagtttgaagagacagagaaagcctgagaaccagcctaaaatatgtcagggatggtggaattattaggctggaaatttaaaacaactattattaacatgcttagggctgtaatggataaagtagacagcatgcaagaacagatgggcaatgtaagcagagggatggaaatcccaagaaagaaccaaaaataaatgctagagctcaaaagcagtgtaatcagaatgaagaatgygtctgatggcttattagcagactgcacacagccgaaaaa

SEQ ID NO: 835216 - DNA, 670 bp, Homo sapiens
aaccccatctctactaaaaatacaaaattagccaggcgtagtagcacatgcctgtgatcccagctacttgggaggctgaggcaggagaatcgcttgaacctaggaggcagaggttgcagtgagcrgagatcgtgccattgcactccagcctgggtaacaagagtgaaactccgtctcaaaaacaaacaaacaaacaaaaattgtcaggctgttcagtgtgtagcttataaagctacatcgtagtgtcaaaccctctgccttgcctttaattcaacaaatagcgcttgaaggggtactacctctcccttcagtgatacctactcccctcccttttctgcccatcaccaagttaccattttgtttttgtcttttattttgctgtggtttttaatatgagtacagtgtaaacataattatctttatattttttaattttttgttgttgttgttagagatggtgctgtgctgtccaggctggagtgcagtggctgtttacaggtgtgatcatagagcattacaacctcaaacttctaagctcaagtgatcctcctgcctcagcttcccaagtagctggaactacaggaatgcacaactatgcctggtgattagctttattgtaatggagaaaagccaagcggtgttcaaggcattctagacaaaaccattgacc

SEQ ID NO: 835217 - DNA, 543 bp, Homo sapiens
agcaatatcacattagacaattattatactgtcctacccctcgaattcctcatttcaaaataggggaacaccaataactacttcaaaggattgttatgagtattaagtgtgatgttatagataaaatatttakcatggggcttgctgtacaatcatttacttaataaatgttaaccattaggttttcccatttgccatagttgcccccaccactcccgactagataaagtgtctggaaggcaccaattgtgtccttacataaggtcccagtgcaacagagttgacacatgataaactgtgttgaatgaatcaacaaatgaataagtggttggctggatgactgtgttaactggcccttaccagttaagtggtcagttttagacaacagaggaagatcattaaacatttggagaggactgtcatgtcagcttaggtttcttcacaaaactgagagcaacaggagacaatattttgcccctatcctgtatcctgtggtttgttcttctgctctctctactttacatccatgatctttctccaaag

SEQ ID NO: 835218 - DNA, 615 bp, Homo sapiens
ttctgtttcaacaaggtatcaaagagaaggtaatctccaaatagggatattgtctcttattcatcgaatctaatagtgctggtccataagcaagcacycaataaatacatgttaaatgaatgaactattataatttgaatcaattatgtatattatgtatcttttggctaaaacaaaatgctctatttttaaaggtcaacttttagtgattctccccagagtatggttttctttgtctcttattcaacatgaaacttgaaggttataagaggcagtataatatgtaggtccaaacattgacattatatcataagagacagatgatgggcattccgaactcataaatttttctattatttgaaagtatgaaagcctttttctcatttatatttctgatgctgtatctgaaataaatttttttcctagttcaggtaatagtagataacagggaccaatctcagggatataattaagactgctttggttttaccctgattccaactgttcagaacaaaatataatttacttctctgaaaaactaatgaaatttaggtgagttttccttctaaaatatgtaggatattatcttctgttcataagcccatccacttagcc

SEQ ID NO: 835219 - DNA, 598 bp, Homo sapiens
tctcaaaatggcatcagttttttcttttctgtagcaagaagagggaaagtttgtatttgtccacctgccaggtacttttcttgtgtgtttttacacgtgtgtatactatgtgtgactttctgacatgggcatactttataagtgactgattagccattgtttttttcaaactgaaatataatccccatatattataatctaggtccaaattcagtgcagtgttagtatatggaaatgttatttcaaaatttaatgtataaaataacgtaatctgtatttggattttggtgaaagtcaataaaagatgcccaagataattatcaacataaagctactttgttagatttttcaaactataaatgaaccatatcttattgtgaatcctcttaatgtctggctgaaaaagatacagtctatttctattctgacttcaataaccatatttcagggaaagttatttagaaaggttagtatttatttacacagtaaaaaatttttgagtttatgtattctgttgtttgaagaactaaagcttcgattgtcttagatttttaagatkatcatagctatattatttagtgcttattaaatttcagga

SEQ ID NO: 835220 - DNA, 534 bp, Homo sapiens
ttgagatttaaatatgtaactaaaatcctgtgttaatatatattttctgagagtacwttgagatgctagagttttgtgagaaattagcaaataacaaatggtatataggttactttccataaatagaatttgttttaaagtgtgatgtgtccctttggcatatctgatttctttaacatttctgtgtcccagaaaagtctagtaagtcttctgaacttctatttgatttttttactatattcctctgacaactttgcgtgatagagatatgtaatgttattttaaaagttaatacaggccttataaatcaaagttaaagaattgagattgttaccttaacatttattttgtaaaaagagttatttaaaaatgaattcttagcatcataggatttctacattattttaagccattagtaagagtcatgctaatattaattaactggttttgcaagaaaattgggatgtcaaaattgactttttattttttattggtaaacatatgtatatttcaaaacaaagttctgaaagttcc

SEQ ID NO: 835221 - DNA, 645 bp, Homo sapiens
  misc_feature 1, 2, 3, 4, 5, 6, 7, 8, 9, 10, 11, 12, 13, 14, 15, 16, 17,18, 19, 20, 21, 22, 23, 24, 25, 26, 27: n = A,T,C or G
nnnnnnnnnnnnnnnnnnnnnnnnnnntgtcattttggactttagggaacctaatatcctgctaaatcttaaacactgacagcaattaaggtctcgtcctcaggcacagtagaagatgccaatcaaaagaaactgcattcctgagacagggggccagcaatgaaagctattcaactcaaggctcaggcactatggcagaagaggtgggcatgtgagattgtaagagccgatattgagagataaaataagttcagtttctctataaattaatcattaatgtcaaaggcatgcttatatcagaccagcgtatgggcccctttgtcagattaacaagactttcttgaagaattagctaaatccttaatagaggttataaaggttataaaaggcttatggaagttttatcttatggtagaaattaaaatttatagattctttacaatttcattggcttcaggctgtttttgttaaggcttattgtttggaaaattaagtctcctctcaaagaataaaggtttttgccttttttwaaaaaaaaatccttgagttatcactttggttaaatgaatgacttattttacaatgacctgggatcctattttgtgatatcaagtgttttaaacctttgatatttgataaactttc

SEQ ID NO: 835222 - DNA, 593 bp, Homo sapiens
tattctctgacacccctcctgccatgctccccactcccgtagatctagttagtctcgcagcagttttatagacgatgttgctctctagtggcttaaaaatttcaagttggcaagttgtctatgtaagatatgtatctccaagtatatttaaaaactgctagtaaatctttcagtgtttaaccaaatttagatatttaaaacattgttttaactcattagtgagtaaaaatttaaattatggtcattatttgagacagatgcaagtaagttaatggtatatcacagatcgattgaattataaaactggaaaaagtactgaacattttttattctataagaagaaaacctgaggcacagaatcttaaataatttgctcacagatacaaaatgaaataagttctacatcatcaactgaacagaagatagacaaaatgtgatgattagaaaatatctctcagattttctttttcatgcttttcaccattaatcctcyctttaatgtttctaatctgtatatctgttgtgaatgaaaaatagaatgaaaaaagtgagaagagtataaaacttatcactaaattttacatttcagcgtt

SEQ ID NO: 835223 - DNA, 362 bp, Homo sapiens
ttgtccttctctgtaattatcgttggkatttgaagggctctgtttttctgttagccactggggaaatgagataaaaatgacctttaaataaataattataaactaggtttcattgcaatcttcaattgcttctctctttttgaatatatttttaatgtttttgtgaatattctgaaaagtggattttgaataaatttgggctttgaagtactttagaaagatttctatctagattccacaaatctgtaaataagagaagaatataaaccaatgcagcagcttaagtacatctggaataaccaagaaagaaacacattaaagttaattaggacaaaaaaatacagcttttatctcatacttac

SEQ ID NO: 835224 - DNA, 618 bp, Homo sapiens
aggctgctctcgtacataccagctgaatattagccctctaaacaacctttaacaaaatcawcaaaatattatgtgaacacagaataatgtaaaccccctctcagcacaaaagaaaaaaagtcagatttgaaatgattgttttccttcaagcaaggaattagcattagttaatagaaaactgatgctaacttctttaataataacattttaggttggacaatgtgaaatggccatttttaaagcaaaagatggttaaaaactggcaatttcaaatgattcaacctctatattcttaagtatggtactgtaaattgccagtatatatacaatattccaacctgtagagctaaacacagaacctgtatattaactaatatacagctaaacacagaacctgtattttaactaatgggcttgaaactagtcaataagacaaaaacttgattttactgaattatataagtcagttgatggtgctatgttttcctggaatttgatataaaaattgatttagagcccactaaaaatgtaattatttatgtttgtcaaaatttgtgaaatatgcttagatgattatttaaagcccaaacctgaatgagagaaaatctaactaaactt

SEQ ID NO: 835225 - DNA, 618 bp, Homo sapiens
aggctgctctcgtacataccagctgaatattagccctctaaacaacctttaacaaaatcaacaaaatattatgtgaacacagaataatgtaaaccccctctcagcamaaaagaaaaaaagtcagatttgaaatgattgttttccttcaagcaaggaattagcattagttaatagaaaactgatgctaacttctttaataataacattttaggttggacaatgtgaaatggccatttttaaagcaaaagatggttaaaaactggcaatttcaaatgattcaacctctatattcttaagtatggtactgtaaattgccagtatatatacaatattccaacctgtagagctaaacacagaacctgtatattaactaatatacagctaaacacagaacctgtattttaactaatgggcttgaaactagtcaataagacaaaaacttgattttactgaattatataagtcagttgatggtgctatgttttcctggaatttgatataaaaattgatttagagcccactaaaaatgtaattatttatgtttgtcaaaatttgtgaaatatgcttagatgattatttaaagcccaaacctgaatgagagaaaatctaactaaactt

SEQ ID NO: 835226 - DNA, 535 bp, Homo sapiens
cctttatgggaaacagtatggagatttcttaaagacctaaaaatagaattaacctttgatctagcaatcccattactatgtatacatccaaarggaaagaaatcattatatcaaaaacaaaaacaaaaaaaaccactcgtatgtttactgcagcactagtcacaatagcaatgatatggaattaaccaaagtgtccatcaatggaggactggataacaaaaatgtgtatatatctacatctatatctcaccttgaatactacttagccataacaaagaatgaaataatgtcttttgcagcaagatggatagaactggaggccacgtgtataagtgaaataactcagaaacagaaattcaagtatcacatgttctcactttaagtgggagctaaacaatgtgtatgcatgagcatacagaatagaatgacactggtgactataaaaagtgtgagggtgggaggagatgagggttggaaaattacctattgggtacaatattcactatttgggtgatgatgggtacactaaaagccc

SEQ ID NO: 835227 - DNA, 503 bp, Homo sapiens
tcagaaattaggcaaacaagaagaaagtggagtgagggatttaaagtgttaaaagaaagcaacttcaaaagaaatctaaatagatggagagactgatataccatctttatggattagaaggcccaacatagtaaagaagtcaattctcttcatatttatgtatagatttaacattattccagtaaaaatctcagagggattattgataatatatacaagctgattccttaaaaaaaaaaaaaaaaggcgggggcgaagggaggctgaagcaagaggatcacttgagccctggagttcgagattgctgtgagctacgatcacacctctgcattccagcctaagcaacagagcaagacctcatctctaaaaaaataaaatgcataaaaaaattataacatcrttaaaataaaatgaaatatgggaaaggcaaaggaacatgaatacaaaataattttgaaaaagaataaaatagaaggaacaccaattttaagactactcaattt

SEQ ID NO: 835228 - DNA, 474 bp, Homo sapiens
aaattcctaatcctctctccagaaaccctgagtttcctcacctggaacgtggggattatgagagtttcttgaccattgcaggtcaagcacttggtttaatacatggtacatagcaagcagtcacatatgcttgctcatagaatatattaaactatgagttgctcttacaacaggaaaatttatttaaaataactatttttgttaccctttgcatttttttctttggtggtggttttttttttttttttttttttgagacaggatctcaccctgtcacccaggctggagtgcagtggcgtgatctcagcttactacagcctcaacctcccaggttcaagtgatcctcccacctcarcctcctgagtagctgggactacagatgcacactgccatgcctggctaattttttatttttatttttcattgagacagagtctcggtctgtcgcccagctggagtgcagtgatgtgatct

SEQ ID NO: 835229 - DNA, 564 bp, Homo sapiens
gatgaagaggagggcgcccttcagcctgaaggagcaggggagggcgtgatgatgaggtggggggccaaccctcccctgcctgcctccccccagctgcccagcagagtgggggacactcacaggtgtgcgatgtagtacatgacggcaaggccttcgatggggtggccctggctgttgatgaagtagtagttgatctgggggtggatggacagacggacagtgaggcgcacagaggggtgggaggctgatggtggtggtgggggattaggaacacggaccgtcaccatcagatgggtggtcagaaagttgaataatgaggacggtgggtgggactcaaaactggtaatcggggctgaaaaaatggagggaacagtcacagctgaaggggtgaatggttggacaatcagagacggacagtcacagctgaaccaagggacagtggtggacagagctgccccgcaggactggtggacagaggggatgggygactggccacactggtaaaatgggtggacacgtggatagctggcggatggccctcccacaggcccagggtctgcagag

SEQ ID NO: 835230 - DNA, 502 bp, Homo sapiens
accctgtcctccaggtctgcccaagatggaggtgtttcaggaatactacgggcttcctccaccccctggagccattggaccctttctacggctcaaccctggagacattgtggagctcacgaaggctgaggctgaacagaactggtgggaggtacaggctggggccacaagagtgatggggtgggacccaagtgtagggttatggattcatgtggtctcagggagttgggtcatagttccaccatgctctggaggtgatgcctggggagtggggtaggtagactgagacttctgggcatggcttttctgagcgggccatcttcccaggaagttaatactcattatcacctctctgggctctccaggccatcctgagatagatggacaagcagagtgaccattgagcaragagatggacacacacacacacacacacacacacacacacacacatgcacacgagtgatggggcaggatccatgtgtagggttatgggtttaga

SEQ ID NO: 835231 - DNA, 502 bp, Homo sapiens
accctgtcctccaggtctgcccaagatggaggtgtttcaggaatactacgggcttcctccaccccctggagccattggaccctttctacggctcaaccctggagacattgtggagctcacgaaggctgaggctgaacagaactggtgggaggtacaggctggggccacaagagtgatggggtgggacccaagtgtagggttatggattcatgtggtctcagggagttgggtcatagttccaccatgctctggaggtgatgcctggggagtggggtaggtagactgagacttctgggcatggcttttctgagcgggccatcttcccaggaagttaatactcattatcacctctctgggctctccaggccatcctgagatagatggacaagcagagtgaccattgagcagagagatggacacacacacacacacacacacacacacacacacacaygcacacgagtgatggggcaggatccatgtgtagggttatgggtttaga

SEQ ID NO: 835232 - DNA, 502 bp, Homo sapiens
accctgtcctccaggtctgcccaagatggaggtgtttcaggaatactacgggcttcctccaccccctggagccattggaccctttctacggctcaaccctggagacattgtggagctcacgaaggctgaggctgaacagaactggtgggaggtacaggctggggccacaagagtgatggggtgggacccaagtgtagggttatggattcatgtggtctcagggagttgggtcatagttccaccatgctctggaggtgatgcctggggagtggggtaggtagactgagacttctgggcatggcttttctgagcgggccatcttcccaggaagttaatactcattatcacctctctgggctctccaggccatcctgagatagatggacaagcagagtgaccattgagcagagagatggacacacacacacacacacacacacacacacacacacatrcacacgagtgatggggcaggatccatgtgtagggttatgggtttaga

SEQ ID NO: 835233 - DNA, 600 bp, Homo sapiens
tttcaagttctggaaattatcattatcattatgatagtaatatcatcatcaccaccrtcaccattctcctcatcaccattcttatcatcatcatcatcatcatcattatcaccaccatcaccatcatcgttaccattataaccatcaccaccatcattaccacaatagtattcatgaccatgagcatcaccaccatcatcatcttagctccagctgggaaaccaagagcattcaccaacccatcaatttttgtattttgggttgtctttgtttctgtttttgttttgagatagagtctccctctgtcatccaggctggagtgcagtggcgtgatcttggctcactgcaacctccacctcccaggttcaagtgcctcagcctcccgaacagctgggattacaggcgcccaccaccatgccctgctaatttttgtattttctttttagtagagacagggtttcaccatgttggccaggctggtcttgaactccttacctcaagtaatctgcctgccttggcctcccaaagtgctaggatcacaggtgtgaaccactgcacccggtcaatttttgaaactggaaaatacctcagatattaatc

SEQ ID NO: 835234 - DNA, 539 bp, Homo sapiens
atctgcctgccttggcctcccaaagtgctrggatcacaggtgtgaaccactgcacccggtcaatttttgaaactggaaaatacctcagatattaatcagcttccaatcttcactcatcactcagagagagaaacccaaagagtgagaagaagggtttactcaagagcacaaatcaaactgagtgttactgcctccaagcccttagttctattcctgctgtctacctcgggcagaggccactaaagatccaccaatattcgtgttttctcttccataatatggaattgctgctggaaaatggctgcccagctaaggactgcatttcccatctctccttgcatgtggatgcagtcatgtgactgcttctggccaatagaataggagcatttgtcataagcatcactttcagggcactgtatttaaggagaaattacttctccatacctcctctctccctattttctgcaggctgagactctaagggatggcaaaactgcaaatgaaagtagcctgggtccctgaattatctgcggggaaaa

SEQ ID NO: 835235 - DNA, 339 bp, Homo sapiens
gggaagtcattaggggttagattttgtaagcttcttggccagaattgttgatttcctcttccacatctttccccttcctgttcttacacccccacccgcaactctgcagggccgctgcaggacagtctttatatagcttcggtcacctctgtgggtttgaagggtgtctggagtcttgggttttcagtgtctcactaggacccgataccctgcctgtggtaggtgggataaagggcctcctctccctccacgaggcacctayagcctaatccctaaagcccaaggatgtgttcccttctatgacaaaagggacttttgcagatgggattcagttaaggg

SEQ ID NO: 835236 - DNA, 610 bp, Homo sapiens
aatagaaaatccaaaaatttgtacatgaattaaattaataaacaaattcaatgagtttactagatacaaaattcattgtccaaaggaattgtatttctttacaccagcaataatgttaaaaataataatttataagattaagttcatatttcatgaaaagtgtaaaatttaagaataaatttaaaaatagtgtacgaagtctttatatacaataatataaaacttttgtacaataataacatcaaaatgaggggtgatatgtactacattcataggctaaatgtctcacttttataataatgttaattctcaaacatatttatattatgcttgagtttgacaaaattatatacgtttgacaaaattccaataaattcccaatatattttgtggaacttataaactacacaataaaggccaaaacagtccttaagaaaaacaagttgagaagacttgacatatcatgaatgatttgaaatttacaaatttcagaayttttcccattgtaatataagcatgtaatactatcacatttccccaaatggctactttaagtgcatcctacaaattgtgatatattctgtttttgttttcatcttcgtcctctttg

SEQ ID NO: 835237 - DNA, 527 bp, Homo sapiens
ccttcactccatcaactcaaccaggaatcttgtggagaaaccccctaagaagaaaaaaaaagcaaaggaacatgtctctcagtgggtgtattacccacgaggaacgaaaatgaatgtacgggagtctggttggaacagacagaaggggagatcctgagaagattcttccagcaaaagatattaacaggaaatgggcttcagagaacccagtaaatgaagatgtgcaaaatgccttgtatagccttttttagtttgcctttattgctgtattgtaatagatattaaaatagatatttacgaatgtcttcagggtgagtcacagctcttgtttcccagccctccctttctcaagtcttccattcctccattgcaagttttccagcacagatattttcagaagctggattcctgtattggggaagttgttctgcactttaatcaccgacttgtacctacacaagggkagaggttgtaactcggggagctaatgtaaagagaagctgtaccattcaacatatgtatatgaa

SEQ ID NO: 835238 - DNA, 297 bp, Homo sapiens
ggccaagacagcccagaaaccacaaggtgaataacagcacccagaacagaaggtccaccatgaagataaggacttaatctatcaggaaggattaaatgtaaccgtcaagagtaggcttgatggaggagggtgaatctgaatggagccttgagctacagtggggtttacagcacaggcaaatcctggtgactgcatgctagatgaaaggaattggacaaatgarataactgaggcaagagaggttgggcatgttcaaattcgtatctgtattgcatagatagcttaagaatgaagtag

SEQ ID NO: 835239 - DNA, 634 bp, Homo sapiens
cacaaaccacttttgaccataatgacccattggtacatcctgtgctaaatttcacctgtattcctcctgattgcactcacgatgcaactcagggtcatatcaagcaaaacctgtttatctaatctgtctgactcaccctaaccttcctgccgcacgtctcagtttaacccatcataatcgtattgtcaaaataactgcctgtaatcccagcactttgggaggccaaggcagaaggatcacttgagcacaggggtttgagactagcctgggcaaaatggtgaaacactgactctataaaatatatacaaattagctgggtgtggtggtgcccacctgtagtcccagctactcaggagcatgaggtgagaggatgacttgagctaaggagttcaagcctgcagcgaaccctgatgacgccactgcactccagcctgggcaacagagtgagaccctgtctcaaaaaataaataaataagctgcgtgtggtggtgtgtgcctgtagkcccagctgcttgggaggatgagccattgagccttggaggtcaagaggtcaaggctgtactgagctgtgatcttgtcactgaattccagcctgggagacagagtccttgtcttaaaaagtaattataataaa

SEQ ID NO: 835240 - DNA, 634 bp, Homo sapiens
cacaaaccacttttgaccataatgacccattggtacatcctgtgctaaatttcacctgtattcctcctgattgcactcacgatgcaactcagggtcatatcaagcaaaacctgtttatctaatctgtctgactcaccctaaccttcctgccgcacgtctcagtttaacccatcataatcgtattgtcaaaataactgcctgtaatcccagcactttgggaggccaaggcagaaggatcacttgagcacaggggtttgagactagcctgggcaaaatggtgaaacactgactctataaaatatatacaaattagctgggtgtggtggtgcccacctgtagtcccagctactcaggagcatgaggtgagaggatgacttgagctaaggagttcaagcctgcagcgaaccctgatgacgccactgcactccagcctgggcaacagagtgagaccctgtctcaaaaaataaataaataagctgcgtgtggtggtgtgtgcctgtaggcccagctgcttgggaggatgagccrttgagccttggaggtcaagaggtcaaggctgtactgagctgtgatcttgtcactgaattccagcctgggagacagagtccttgtcttaaaaagtaattataataaa

SEQ ID NO: 835241 - DNA, 679 bp, Homo sapiens
acttggagcaggaatatgatctttatatgggagactcagtggatccttatcaccttcatagaaaggtactcacctcccacgtcaagagaaaagccaacatgtttttcctccaatgcataaaaggaacttccatagggctggcaggagtcaggctgttcaagacaactggaaggagttgaataacatctatccagtgagtcctgcaagacttcaggctctactacctccagcagctccctgctgagcctggaaaaggaggaaaaagtaaagaataagccaggggaaatcagacacaacagagccccaactaggtttcatgggtagcatagggaagtggttaaaaaactaaaaggatagatccattaatgaggtaacaaattattgccttcatgttgggacagaacagggccaaatggaaaagaatgaaagagaaagacagatagacacacacacacacacacagagagagagagagagagagaacgagctcagtgaattgtccaggtgacrcactgatgagggagtaacaggacactctgagttagtgccctcaggacacacagcatacagggatcatgaaaagactgtgctcaataattttccataaaatgtgctcaagtttccatgcagtcgccatgagaatacagtttttgaagtctggtccacctacagtaggtta

SEQ ID NO: 835242 - DNA, 592 bp, Homo sapiens
agagccacaggctggatgacatctggtttatagtgaggggcagcagcaactccaagagggggaagatgtgaccatgagccccgccccagacccaggaggcttgaccttggggctgccgtagcagtggatgctcttcaggtcagtgtgggttagagggaataaccatgctgggagaagggttggagacatccattcttatgttaaaaagctctgccctaggtcaggtgctagagtaagtgtcccttgctagtatacaaagcagtgatacttataatattcttctgtacttacagttgaaggaggtttccaaatgatatctcataaatatttattggtgtttaattttctttacgctgtgttaaacacttgggattcagatattaatgtctccccaaaggaactcaagcccatgagagaaagaacagaaatatagctttttaagaaaatatgaaagttcccccacattggggtgctgtggcaacccatagagtgggagtttaggtgaagacattgctcctaatgacagggggaaycataagaggacttcttcagaacagactcattttcctccaatgtcccacagagagggatc

SEQ ID NO: 835243 - DNA, 606 bp, Homo sapiens
aataaacattacacctcaagaaaccaggaaaaaaacaacaaaataaatccaaagttcactgaaaaaaggaaacaaaaatcaatgcagaagtaaatcaactgaagaacagaaatactacagaaaaataataaaagtgagttgttggttttttgttttgttttgttttgttttttttccttttcctttctctttctttttctctttttaggagagacaacgtcttactattctttccaggctgattgggaactactggcctccagtggtgatgcaacgtaggcctctcgcacccgagttgtttttctggaaaaagtaaaattaacaaacacttggctaaactaactaagaaaaaaatagagaagactcaaataaataacatgcgaaatgaaagtggaggcattacaacagaagcctcacaagtaaaaaggatcataagaaactattattaggccgggcgcggtggctcctacgcctgcaatcccagcactttgggaggccraggcgggcggatcacgaggtcacgagatcgagaccatcctggctaacacggtgaaaccccgtctctactaaaaatacaaaaaaattagccgggcgtggtggcgggtg

SEQ ID NO: 835244 - DNA, 495 bp, Homo sapiens
tcatgaataagcaccattaaaagagcgaaaaggcaagctacagattgaaaaaagggaaatgcaatacatatatatygtagaaaggacacatatccggaaaaaagtattacaaatcaacagaaaaacaagcatatcaatgaaaactggataaaaagatttaacaggcacttcacaaaagaggacacacaaatgacaataaaagatactcaatctcaataccaggaaaatgcaaaatgaaatcacactgatacattactgcacccctactagaatggcaaaataatttttaactgacaggcatcagcaaggatgtggggtaaccagaatatccctgctaaatggtacaaccactttgggaaaacgttcaacagtatgtaatactaagttttatcattcatatacctctaaaaccaacaatgccactcctacaaatataccccagtctagtaatgctctatttcttgatctgtggtggttcacttggtaaaaattcat

SEQ ID NO: 835245 - DNA, 495 bp, Homo sapiens
tcatgaataagcaccattaaaagagcgaaaaggcaagctacagattgaaaaaagggaaatgcaatacatatatatcgtagaaaggacacatatccggaaaaaagtattacaaatcaacagaaaaacaagcatatcaatgaaaactggataaaaagatttaacaggcacttcacaaaagaggacacacaaatgacaataaaagatactcaatctcaataccaggaaaatgcaaaatgaaatcacactgatacattactgcacccctactagaatggcaaaataatttttaactgacaggcatcagcaaggatgtggggtaaccagaatatccctgctaaatggtacaaccactttgggaaaacgttcaacartatgtaatactaagttttatcattcatatacctctaaaaccaacaatgccactcctacaaatataccccagtctagtaatgctctatttcttgatctgtggtggttcacttggtaaaaattcat

SEQ ID NO: 835246 - DNA, 495 bp, Homo sapiens
tcatgaataagcaccattaaaagagcgaaaaggcaagctacagattgaaaaaagggaaatgcaatacatatatatcgtagaaaggacacatatccggaaaaaagtattacaaatcaacagaaaaacaagcatatcaatgaaaactggataaaaagatttaacaggcacttcacaaaagaggacacacaaatgacaataaaagatactcaatctcaataccaggaaaatgcaaaatgaaatcacactgatacattactgcacccctactagaatggcaaaataatttttaactgacaggcatcagcaaggatgtggggtaaccagaatatccctgctaaatggtacaaccactttgggaaaacgttcaacagtatgtaatactaagttttatcattcatatacctctaaaaccaacaatgycactcctacaaatataccccagtctagtaatgctctatttcttgatctgtggtggttcacttggtaaaaattcat

SEQ ID NO: 835247 - DNA, 619 bp, Homo sapiens
tatttcttcagcaatattttctaggcactaacctctgttttggttaataggggttaatcagtgaataaacataccaaaagggaaaaaaacaagmaaacatacaaattaaaaagaaacaaacaacaactcctgccttgctagaatttactatataatgaatactcatttcagactcaagtaaagttacatgtaaatactagaaggctagcactaacagagcattgcagaaaaatacctttctgaaatgctctgttagttcagagcattgaagtaatctttgaaaccacattttcaaagactttacttagaaagccattgttcaaattgttcaatgcctatctttaggatggaaaaaaataaagggttttagcatggttgagagaaatgagaaggaagaaagagttgcagggtaaattcaggatgtatcccaggacagaacagggaaagctagctcacgataaatttaacttctcagagtttcttcttaaatgagctagctgcatactcttagaggatcctgagttccacaatggtcttttacttttcaaaagcattcaggacatgaaccagaaaagaaagaattaaaactagtgaaaggagccccatatacatttctgaa

SEQ ID NO: 835248 - DNA, 641 bp, Homo sapiens
ctcattatctgcagtttttgtatttgtgaattcacctacttggtaaaattcatttttaactttcaaatcaatactcatggtgcttttgagacaatttgaggacatgtgcaaagtggcaaaaaactttyagtcagccgacatgtatacatccagctgaagttgaacagagttatgctctctcttcttgtttcagctttcatacagagatggccagagcatagatagggtggggacaatgcaatgcaatgtaagaagcctcagctctggtgacaggtgtataaggcttgaattccagcattggcatcggtaagtggggtggtttcaggcaaatcacttaataatcatgaatcttcttttctcatttgtaaaataaagcaaataaaatctactaggataagatgtttttaaaatttaaaattatagcatattacgtatctgatgtatataggtagatatagattagatatagatctatctgttttcctcctaggaggaacaatagtaaatgttcactaattcagtgttcaagaggattgtatagaaatagtgagaattgactatatatttttcctaaagctgttacgaatagaaatgttacaaaagttttatttttttaatttagagagatatacttatttatg

SEQ ID NO: 835249 - DNA, 655 bp, Homo sapiens
atttcaaagcgttattcgaatccagataccatatgaccgcacacctcagagagtctaccttgatgcctctaatctccttgaagtattctatccataaatattttagaartttagttattgaaatttagttattaaaatttatcctatactaggcactgacatccttaatctcaatgacccattgtaattatcttttagctctgaagctccaacataacaaaacatatatttataaattagaattaagaacagaaactaagaatcaatctaaaatcacttcagtgataatttttctgacaattgcatcacaattctttactattgtggtttttaggcttactacatctttccataatgctgagttttattttctgaattaagctcaaatatctgagatgatatttatatattttttatctttcatggtagctagcgtagtgctgggctctgaatttaaatgctggttgtctgattcttccattcttcagctagttggatcatactatttgtaatgggtgaaattaaatacacttgatggagtctttcactctttatatagattgaaaaattactcaatattatggtaatagaagaggagcaaattattacatgacttaactaggaaatagcacataggagcgcatagtattgaaaa

SEQ ID NO: 835250 - DNA, 575 bp, Homo sapiens
tgaggaagatactcagacaaatttcagcctgtcagtgaccactcatcgcatcagtgaggcaaaaatgaataccaaagagaaatttagytctctcctaaacatgtctgacaatatcacacaacatgatgatagagtaactggtctgtcactgtttaagaagatgccatctattcttccacaaattaaacaagatacaattactaatctcaagaaggctatcacagcaaatctacacactaacgaactcatggaaatgcaaccaattttaaacacaagcttgcatagagtgacaaatgagccatctgtggataatcaccttgatctaaggaaagaaggtgaattttatcctgatgctacttatcccatcgaaaatagctatgaaactgagctttatgattattattattatgaggatctaaatacaatgcttgaaatggagtatctgagagggccaaaaggagacactggacctcccgtaagtttttttttttttaatatctcctaatatgctaacttacattttaaactctctttaaaatacattttaaagagagttctctggaccaaacaataca

SEQ ID NO: 835251 - DNA, 628 bp, Homo sapiens
gcagtaactgtagacaaatcttcccttgaccagagatctagcagtcttgtttcaggagattaaaaccacaccatgatttaaacagaggaagtttaacagaaagaattaaaatgattaagatatgatagtaaagtgaccatagactataagaatactctatatatggcagctcagagcagaaggagagagaggcacaaacttggaaggtggcacccttcccaagactgtggttcaaatctcattatagaatgtgtagttgaactcagcagatggtagggaagtttgctggtttgctggtcagaactgcagtcacaggacgagcagggaagaatatgctagagggcaggcaaggctgggagccatagctggtggccagtgcctggcaatgcagcaggagtggggccttagtgctgcaagaggcctggagttcacttgggaaggaaaatgagattgagaggggcacagcatcaagaggattgtgggagatggacctgaggactsgggtgagtgcaagcaaccaggcagccaatgccagcaggaggctggagcacagggtgtctgtatggagaaggcagcagtaagatgatcactaggccatactggggctgcaaagccgccaaagtacaat

SEQ ID NO: 835252 - DNA, 651 bp, Homo sapiens
tcaattggaatgtctgcaatgcggcggtgtcgacccagtaggtacgcactctgtcgatgtatgtacatgactggaagcacctcatcatttttaaatgggtagagacgccaccgttttttggggatacgtgcttctgggggctcactatatttaatgactacaccccggaaagtgttggtgtcctcaagaagtgccccagaaagttcaaagcttggtttttctttagcgggcacctctttttctttgttgttgccaccaggccgaggaaccaactcctgagactcactgccgccaccaccaacgtcattcctctggcgatgctcccgtcgcctggcattataaaactcccgctcttcttcctgagcctgcaggttctgagtgtctcgatcccgtccctgaccctgcccactcccaggcctctcgttagacgttctcctttggtgggaatggccccggtgtctgtcccggtcactgttcctagctctcctgtgttcctgttctgatggttccctgtgctgccgatcctcccgtcctctccggggatgatcctcacgctcctraaattcaaacagattctgtaatttaaacgcagtgcacaatctaaaggcagcccaaatcttgttctttttgaacgaagtgcatgcaaaaagt

SEQ ID NO: 835253 - DNA, 608 bp, Homo sapiens
ctgtagtttaaggagacgctgccggtaacggcgtcggtccgtggctgaggcccaaaccgtyttttctctcagagggtggggagggaggtgggggcagcagaggcctgggctgggtgccctgtgcacgccaccccacttccgccctacccctgggacgttggccttggctggctagttgggcaccgtgtgcctgccctccaagggcctcctctacgccaatgaggcctcatctgtgctctcgctgggcacgtggcttcatgtcagtaagcaagatgcttcttaataacccaccttctgccccactctattccttatcctgctgcccctgtaggggtcaagggccctccgtctacaccctcttcttctcctccatcctttattcagagtcatctcgcccttccccatgggtgggggaacctgtgtttgtttgtgtgcacatgtaaattttaaatattttaagcagaaagtccttacctcctgtaacacatcaataaagtacaatcattgtgagccctttcaagaggtgattgtctttgttatgctcagggctttgggctggcctctgggtgaggaaaggccagcaggtatgcaccccgacctccttcacc

SEQ ID NO: 835254 - DNA, 544 bp, Homo sapiens
gaaagaaactaaagaagtcctaaatacatgaaataatatattgcattcatgaataaagttgttaaatattacaatatataatttgttgctatatttatctatagatayaatgcaatcccagtgaaaattacagtcgttgttttagaggaaatataaagctgattaaaatttatatcaaaaggcaaataattgagaataggcaaagtaactttgaagaacaaagttagaagacttaaattactagatttctggtctcatttaaatatataattatcaagtgtatagtactggcataaggatagacaaataagtcaatggaacagaatgtgtaattcagcaacagatccacacatatttggtcacctaattataatccaaatattaccacaacagatggccttgtctataatagtgctagaacaacaggctattcctattgtgaaatgaagaacattgatctttacttcatatcagccataaaaatgaaattcagggaagatggccgaataggaacagctctggtctgcagctcccactaagattg

SEQ ID NO: 835255 - DNA, 602 bp, Homo sapiens
ttagttcaaaccctaattgcctccctgtatcaggattcaatcagaaaagagatccactataagtgatatagaataaagtttatcataagrgtttgatattgagcccctagcaattgtgagagctagtaacgattctatataaggatgttgcttctatatctgatgctggactggaaagaaggatgaatgggaaatgtgaagtggggagagcaagaatgaactgaaacctgaaaggatgagctgaagctcatgaatatgaactaaaacttggatctatcttttgctacattcaggcctcaatttcaacattgtgggtgacttgcagaggaagctaacactctttgtcatagatttaggccacatacctggcataggattaggaggagctaaataaggtgtttcatcagcagttgaagtagctgtaggcttggctgccgtcccatgccactaatgtgagccaacagagcagagacaatgtgtgtgaactggagcagagacaatgtgtgtgaactgcagcagaacctgactgaacacaaaacatctgaacacaaatgcaactgatgctttacttatgcctcccaaatctcatgcaaatttttctt

SEQ ID NO: 835256 - DNA, 521 bp, Homo sapiens
ctttcaattattgctacctttttaaatacaatattggtaaatttagactctagtcattttggctatttattttctttttatctttttcttattaagttttttttttcctttagtttgagggtattgactggtatgacagcagggatccttgaacactatatattcaggactaattgttctcatttctctcataaaattatttttctctgagctatgagggacatgcaatcttacaacttggtttgtctctactgaattgttttagttgttgttaaattgttgagccacttttgtgtgcctgcacaatgggatctctattttttccaaaaattaagttgagctttcccaggctggcaggtctgtgatgacaatgtcaccctttatctttaggaagaaccaaccctgaattatttattcaacagtgttgtttccaaatcatsaatagatgaagttggctttagaattagagtaaacaatcaggtggctaacttggagtgttaaggctgttttgcgaaaacaaa

SEQ ID NO: 835257 - DNA, 622 bp, Homo sapiens
tggtctttgagagtcattatcatgtaggagagcattgaaaccttgaagaatgaagaagtggctcagaaagagtttgtagagtaatatatagaagttggcctaagacaaaattgcaaattatttgtaaaataggagaggaactaggagacagtaattggagaaagcagaggaggagagtttcagtaatacagagctgtcaatagcaggctatttatatattaaaaagatgtataaagagtcctttgctctcttctgcaagagccattttaatataattgttggcctgagaatcagatttaagaggcacccaaacattttggctgtcaatttttgttataatgcttcaatttttattcatatgtcttaggtgatcataaatcttatcaatgttttcatggtagatgtattcaactcaacagttacttattaagaacttactatctgactactttgtgtatttttaccttgaagtagttactttacttcttaaaagatcatatcaagtccttatgcacatatatttcaacaataaggagtttatttttataccataattaayttgataagcaaagatgaacgtttagatcttagttaaaagatgatctgtgcagtacagtgatac

SEQ ID NO: 835258 - DNA, 282 bp, Homo sapiens
tggcttgtgcctgtaatcccagcactttgggaggcsaaggtgggtggatcgcttgagcccaggaattagagaccagcctgggcaacatggtgaaactccacttctactaaaaatacaaaaaaaatagccagtcgtagtggcactcacatgtgggcccagctgctcggaaggctgaggtgggaggatcacctgaccccagaagtcaaggctactgtgatctgtcgtcatgctactgttctccagcttaggtgacagagtgagacactgtcttggaaatctata

SEQ ID NO: 835259 - DNA, 580 bp, Homo sapiens
ttttttctgatattttataactgcttttctgctgtttagtattcacatatataattattcttcagcttcgctcttccacactttatgatgatttgtcacgactgcctcattttaaagagcatcagctcttcttcagcccctttctggctcctaaggagctaaatattaattctgatacttaatttcattcagaccaaatgataacaccaccaataagtgtcaaaggaacttaacacttgaggagataaaaaggaataaaataaaataaagggcagaaattaaatctgaatgatttcttcaattcaacgggcacacagaaaacaaaaatcactagaattagaatcggaacagcaagaaatgtttcagtattttttttcctaccaaaatattcagttaccaagaggaaaataaagggcttatctgttaactattttttggtgtattagtcgcagtgaaaatgggcagatagtagaaatcattattacattctgctactatttaaggtttgaaagccattgtgatctttggcagagaaatctgatctatttctcacasctggaaaataagcaagcagtgtgtt

SEQ ID NO: 835260 - DNA, 657 bp, Homo sapiens
tatgtgttctctttctttttatggctgcrtagcatttcatggtgtacatgtaccagattttctttatccagtctatcgtcgataggcatttatattgattcaatgtctttgctattgtgaatagtgctgcaatgaacatacctgtgcatgtgtctttcatttacactaattagaattttgttggtacttacattttgaatctaatgtctacgttcaattctgggaaattgtctcctgttatttttttgatagtcccctcttctctgtttctctgctccaactttctggaactgctcttagtcaatgctggatctcctggattgaatggctatgtctcttattttttccagctctttttaattttttatttatacattttttgagactgtccaaccccttaatttctaatttcttaatcctttttttatagcatcttgttcttgttttgtagatgcaatattttcctgaatctctctagagacttctgggcaggccagagaaagccaaaatgtgaagcaaaatgggtttggtgctggtatggtggacaacaaattctgttgaagtggtcttgaatgcttcccctagtgatgtgatagtttctagtatcattgcctgctggggcaacacatcttgtgatggcaacttaaaaagtttact

SEQ ID NO: 835261 - DNA, 582 bp, Homo sapiens
cagtgagacatcttcttctttttttaaaatactttatggtctagggtacattggcagaatgtgcaggtttgttacayaggtataaaaatgccatggtggtttcctgcacccatcaacccgtcatctacattaggtatttctcctaatgctatccctcccctagccccccacacctggacaggcgtgggtgtgtgatgttgccctccctgtgtctgtgtgttcttattgttcaacaaccacttatgagtgagaacatgcggggtttggttttctgttcttgtgttagtttgctgagaatgatggtttccagcttcatccacgtgcctgcaaaggacatgaactcatcctttttttatgactgtattgtattccatggtaaaaaaagggaatcctccctaactcattttatgaggccagcatcatcctcataccaaaacctggcaaagacacaacaaaaaaagaaaattttaggccaatatccctgaggaacattgatgcgaaaatcctcaataaaatactggcaaaccaaatccagcagcacatcaaaaaggttatccaccacgatcaagttggcttcatccc

SEQ ID NO: 835262 - DNA, 584 bp, Homo sapiens
gcgtgctcacacgtgtgtgaataggtccttggtgagatatgaggctcttgtggaccacacagaagttgtttcagaggatgaatttccarattcatccccaactccaagactcttgccttctcacttgttcattccttcagattcagtggtgcagcgccagcttcatagccatacaatctgtgcagttgtacgttgcctggtgttcagcaggtccctatctttgatttcatattctgctgtcactgtcttgaaattcttaatacttcttgaacaaggagtccttcatatttactttgtactgggctccatatatgttatatagctggtcctactgtggaaaattatggccagaggtaaatttctctctaagatgtgactctgttctttctcagcatcatctcaatgactggcttgtcttagacttgagaatgggaaaaacgtgggcttttggtcagatgtacttggatgcaggttgggagcctgctacttactgcctatgtgacctagagcacatttgttaacctctgcaagaccacctcatcctttagaagaatacaatcgtcctttcctcataagatgtggtg

SEQ ID NO: 835263 - DNA, 606 bp, Homo sapiens
gtgagatggagtttgagtctggaaatgctgggggctctcttgccactacaagcaaaagtgtgtctgaaactgaagctartacagagaagagcaaagatgtgtcattccaggtggcattggaacaccaggtggcattggagcctccagtgtgcctgcagtcagtgtaatcctgggctttttaatgagatcaaccaataaacttccttttcacttaagcttggtcaagataggtttctaccccttgtaatcaggaaaatcctgactaattcagattttccttcattctcagttctccggttcttccttcttgcatttatggccagtttgtctgcgaatgtctgtctctattattactcatataatggcttccattttgttttattgttgtagcttcattttggttggatagattgtccaaactctctccccacctccatctattgacctaatggtggtggagggttctggatggggaattaccagcctgctagctttttgaaatcgtatcctggcgtttagaagctttttgcactggctggctggattgaaaccaactctttgaatttaacactgaatgtggctaagacacatgtaaatattactcaa

SEQ ID NO: 835264 - DNA, 642 bp, Homo sapiens
agcagacccccgacaatctggatcctgctattccaccctcacagtctgtcatcctccttcatccttccctctggtcacactgattttcccaccactctctggactcwccttggccttctgtgtctttattcccgcatcagctgtgtcccctggaagagactttctcctctgtgtggtttggtaaattacattttcccacatggtcccagttcatatgcactaagaccaagattgacatttgttatgttcttttggttgcaagggatagaaattccttcaaaccacttaagtaatggagtttgttattaacataactatgggggtaagagacaggtgaagaatctcatagaaaccaagggcagcctgccccctccccttcaagatccaagacaggtctcagatctgagtagttttgtcaccctcctcagttacaagatgtcaagatctccattctcgtgctctcttgctagggtgcctcctactctggccctgtgtatctttgtgtgcgacatcactttcttctccctactgacagctggctcttcctctggctcctcattcaaacttgcttgaagtagtctcccgggcagagctcctcagataggaccatctcatacatgtgtccaatcccaggattagctg

SEQ ID NO: 835265 - DNA, 613 bp, Homo sapiens
tcatttaacttctttgcacctcaagtctgtgatctctgaaatgaagtaatcaagacagattaatttatttctwcattcaaaacatttttattttcctactaaatggtctgtagttcccttcagagagacaaaaatacagtaaaaaaaaatctatactagaagtgttacatatgtttatgtctatgtctatttgtctatttataactatctatccatctatcttctatctagaaaatttattttctacctataattagtagttataatagggctattaataaagccttttaatgttttaatgttggacaggttattaaatatgtgggaatatttgaattctaatatgttctattattggtggcattatcattgttgatgtttttgaaaggtatccttttatagttgaggaaattttatagattcataaatacaattgtgttagctttatattttttcttttttactacaaactatgttctttttttgtaatagaagctgataacatgaagcattgaatataagagctataaagtatttatatttgttgtgtctaatttatttatttcttttttttttattttttgaagagttttgctcttgtcgcccaggctgg

SEQ ID NO: 835266 - DNA, 411 bp, Homo sapiens
gcctctgcattgctcttcctcagcctggaacattctatccccagccaagctgattcacactttattgaggtctttgctcaaacatcacatccagagaggtctctccgacatgcattagaaaggcactccccsgtttatctttcctcagagtatgtgccactccctacctctctgttatatatttgtctgcctagtatctgctcccccactagcctgaacgctccaaacagcagggacttgggctgtgttcttccacgctatccccagtgcctagggtggcatgtgcctttcagtagtggctctgaaaatgtatgttgaaagtgtaaaccaaaaataaaattctaagccccaccaactcactgaatgaaacttctcagccaaggggatccaactaaacctgaaaaactagtt

SEQ ID NO: 835267 - DNA, 594 bp, Homo sapiens
agataattgtagattcacatgaagctttacgaaataatacagagacattccgtgccccctctacctaatgtccccaatggtaatatttaatattttgcaaaactatagtacaatattacaattaagactttcttaaaagactcacatgaggacctttgagacttccctgaccccagaaggaaaaaattccagggaatgatgagctgcctgcctttggaaggaaggtccaccaggtaagaaactggaggccacagggatacctctgggctccctggctggaattggcagatgctggtgcagatgccagggcctcccctcagaactccaacctgcatgagggcacctgggttccagggatgcaacgcagctccctgcctggcccctgtggctttgagtggctgtgtccctcagcccttcacagctggctctgcccctcagcccttcacagctggctctgcccctcagcccttcacagctggctctgyccctcagcccttcacagctggctctgctgagttctgtggttgagatgccaggtactggaacacacagctccaggcttgagtcctagcccctcactttacagatggcctt

SEQ ID NO: 835268 - DNA, 559 bp, Homo sapiens
aaaaaaaggagacgtcacaaactaacttttatatttacctatgtagttacctttattggtattctttatttgttcgtgtggcttcaaggtgctgtctagcatcctttyatttcagcctgaaacactgttagcagtttcgtagtccaggtttactaattattaactccttcaagttgttttgttttgtttgtttgtttgtttgtttttgagatggggtcttactctgtcattcaggctagagtgtggtggtgccatcatagctcactgcagcctcagcctccctgggctcaggtgatccatccacctcagtctcctgagtagctgggactacaggcatgtgccaccaagcccagctgatttttttgtatttttggtaggcatggggtttcgccatgttgtccaggttggtctcaaactcctgggctcaagtgatctgcccacttcagcctcccaaagtgctgggattataggcatgagccactgtgtccagacaattccctcagtttttatctggaaatgtcttaatttcaccttcatttttgaaggatatttttggcag

SEQ ID NO: 835269 - DNA, 559 bp, Homo sapiens
aaaaaaaggagacgtcacaaactaacttttatatttacctatgtagttacctttattggtattctttatttgttcgtgtggcttcaaggtgctgtctagcatcctttcatttcagcctgaaacactgttagcagtttcgtagtccaggtttactaattattaactccttcaagttgttttgttttgtttgtttgtttgtttgtttttgagatggggtcttactctgtcattcaggctagagtgtggtggtgccatcatagctcactgcagcctcagcctccctgggctcaggtgatccatccacctcagtctcctgagtagctgggactacaggcatgtgccaccaagcccagctgatttttttgtatttttggtaggcatggggtttcgccatgttgtccaggttggtctcaaactcctgggctcaagtgatctgcccacytcagcctcccaaagtgctgggattataggcatgagccactgtgtccagacaattccctcagtttttatctggaaatgtcttaatttcaccttcatttttgaaggatatttttggcag

SEQ ID NO: 835270 - DNA, 638 bp, Homo sapiens
tccttgtactttctcattccatcctggtgtgcaatcaatgatgagttttctgtcactataagttatatcttgttttctgtctctatgaattagaatcatatactatgtaccctttttgtgtcctggctccttttcctcagcataataccacatccatcctctccttcttccttagtaactgcatcctgggcaatatccccagctgaaagattacgcttcccagccttccttgcagctagacgtagccatatgacaaaatgacgcccaatgaagcatacatagaaaagtcatgtgagacttctggaaaagcttctgtaaaagtgaggagcagacacccttttctttttcttctcctttctcttgctgttggcctggaatgtggacctgatggatggagctctggcaatcatcttggagtatgaagtgaccttaaggatgaacagaaaagaaaatgagcctgggcctttaatgacacagtggagctgctcccagcttggctaccttcctcttagtctgcttttatamgaaaatatatatatatcttgtttaagcacaaatattttgagtttttctgctgtttgttgctaaaagtaattctaattgttccataagccttctagcactattgcatttttaaa

SEQ ID NO: 835271 - DNA, 601 bp, Homo sapiens
aattttaaatgacatcatgttttaaatttatttttgcttaatgctagtatgtatgtatttacatatatacatgtaaacatacacaaatacatacaaaatgtatataacgtattttgtattttgatctcgtgagcagtaacaatgcttaaactatttgtagtctaatactttgtagattcttttaattttctaagtatataatcctataatttccaagtaatgaaagctttatttttttcctagtatttaatctcctttctttgttgcttcccttcctttcctctctcattccccttcctcttctgtctcctttttcttctcctctctcctctccttccaacatttcttcctctggcttgaacgtcgagtacattagtgatagaggcattcccagtatcatgagaaaagtatagtggtttctgtaaaatttttttgcatatagtctttgtttatttttgtagtttaccgagaatttttttatccaaatgmatcttgaatgttgtctttttctgcatttacagagatgatcatattatttattttctgctaatcttgtgatgaaatttattgagttttgaattatacatttttgctataatcc

SEQ ID NO: 835272 - DNA, 627 bp, Homo sapiens
gaatataggtccacagtcttttctggcttgcagggtttcagttgaaaggtccactgttagcatgatggggtttgctttgtaggtaacctgccccttctttctagctgccttttatattttttctttcatgttgaccttgaagaacctgatgaatatgtgtcttgggtatggttgtcttgtagggtatttcacaaggcttctctaaatttcctgaatttgaatgttgatctctctagtgagcttgcgtaaacttttatggacactgtcttcaaatatatttccaagttgcttgctctttctttctccctttcatggatgccaaggagtcataggtttggtttttttacataatctcatatttctcagaggctttgttcattatttattcttcattttttgtttgattgagttgattctaaaagccagtctttgagcgctgacattcttccctcagcttggtctagtccgctgttaatatttctgagtgtattatgaaattcttgcagtgagkttttcaggtctattagataaggctggtactttctttttttactttgtttgtttgtttttaattttcatttttatttcttctaaaaaaaatgcaatatgtgtgcagaatgtgcaggt

SEQ ID NO: 835273 - DNA, 594 bp, Homo sapiens
ctggaagcaactttctctgattacctctgggttcctaaagtgcatggcaccattaaggaactggarctagggaaatgcctgcaatgctactggctcctgctaggcaattggaatcaaagcatatttctttctttctttctttctttttttttttttttttttttttgagacagagttttgctcttattgcccaggctggaatgcaatggtgcgatctcagctcactgcaacctctgcttcccaggttcaaacaattctcctgcctcagcctcccaagtagctggaattacaggcgcctgccaccatgcccggctaactttttgtattttttgtggagatggggttttgccatgttggccaggctggtctcgaactcctgatctcaggtgatgcaccagcctcagcctcccaaagtgctgggattacaggcatgagccaccacatgtggccggaaccaaagcatatttcaaacccctcacctgacctggttttcatcatcacatgaatttccctgtctcatccttcttaacctttcctttgatgggaagggagacagctcatctgtctggagcggagaatagggcctgtgtggtg

SEQ ID NO: 835274 - DNA, 652 bp, Homo sapiens
aaattatcttccaatgtggctatgccatttgcatttcaccagcaatgaggaacagttttgttgcttctaattctcaccagcaattggtatcatcacttttgaaattttagctattcaaataggtttgtagtggtatgctgttgttttaatttaaatttccctaatgacaaatgatattcagcacctttttatgttgcttatttggcacttgtatagcttcttaaattacatatttattctgatcttttgcccaatttttaattgggttgttttcttattgttgatttttaaaagttatttgtttattttgaatacagttttttattttcaggtatgcagtttgcaaatattttctagaagtctgtgtcttgttgttttattctcttaatgatgccttttccagagtaaatatttttaattttaataaagtctaatttaccaattttcaatttcatagattattgctttctgtgttgtgtctatatagtcatcactaaacacaaggccacacagattttctcctatatattctccttgatgttttgtagtttacatttaacatttaggtaaatgatacayattaatttaacttttgtgttagatatgaggttcatttttttccatatcgacttccattcttcccagcatcatt

SEQ ID NO: 835275 - DNA, 558 bp, Homo sapiens
actaggcatctgttggagggggaagagcgagactggggcttatttggagtgaggatttctaggagggggaagtaagaggctgaagctggacagggaggtcagggttgacccagaggatcagggctggagggagctatcttctctgctgagggtgtctctgggactcatatctttaattccttggactttccccttgtagccttccctgagatggcaaacagaagggctggatcaattctacattgtcggcaaaggtctggattgccttgcaaggtatagaaagactgcacatatggggcctcagaccatctgtcctctcatctacagaaaagttccaacagccggatggtatcaaaatgaatggttccttcctggggccaactcagtccctcatgcaaatcataatttggccaaacctttgtgcagagggctatgaggcatttttcctccagattctgagggtcaaagtagtcccagtgattcaggatatgctccaaaagagtatacgctggktggggaggggggcgggtaaagataactggttgcctattctgaaag

SEQ ID NO: 835276 - DNA, 599 bp, Homo sapiens
cccagctctcctctgagtgccctggccaaattctgcctcatcctgcgggttgatgaactgctggtgtgccaacgtctgttggtgtgcttttctaccagtgtgctcccttgatgtcctctcgctgttcagccgcttgtgtcttcttccgctgatgtggtcctctcaacatctggccaactgtgtgtctgcccactagggtcttgggtttttgtaggcccaagacgatgttctggtgggccagggtggtcttggaaaatgcaacatttgggtgcaaaggcaggagtacctgtcctcatctagatctataggagtggagccctagcaagagaccacacctttctctacccagtacttccctgccctactcctgtatcagtttgacagaataccccatggaccattggtggtagtggctacagggaaaatgcttctctgcctatggaaagaggagggaagattggtagggactttgtattgtggcwcaagtgccatcttagttagcctcagtagaatagaacatcaggttaaattgctatttatttatttattttatttttttatttcaagccgtggatcccagatagcatctctggatatgt

SEQ ID NO: 835277 - DNA, 599 bp, Homo sapiens
cccagctctcctctgagtgccctggccaaattctgcctcatcctgcgggttgatgaactgctggtgtgccaacgtctgttggtgtgcttttctaccagtgtgctcccttgatgtcctctcgctgttcagccgcttgtgtcttcttccgctgatgtggtcctctcaacatctggccaactgtgtgtctgcccactagggtcttgggtttttgtaggcccaagacgatgttctggtgggccagggtggtcttggaaaatgcaacatttgggtgcaaaggcaggagtacctgtcctcatctagatctataggagtggagccctagcaagagaccacacctttctctacccagtacttccctgccctactcctgtatcagtttgacagaataccccatggaccattggtggtagtggctacagggaaaatgcttctctgcctatggaaagaggagggaagattggtagggactttgtattgtggcacaagtgccatcttagttagcctcagtagaatagaacatcaggttaaattgctatttatttatttattttatttttttayttcaagccgtggatcccagatagcatctctggatatgt

SEQ ID NO: 835278 - DNA, 610 bp, Homo sapiens
tagctgagagtttaacagccaagaaagaaggaaaaagacaaaaggaagaagctcccggtacagacacagagrgagggggctccaaagaggaaagaggagactctgcatttggaggataccagccagttttacgtgatggctggaagaggcggtgtctgatttcaagttccatggttcaggggattggtttgacctggcatgtcattcacgttggctgtgaaaaaactggccctcccacagtcctttaatatgcaaatgcagggcgccataatgttctacacacacttggggatatgtgggcgtggccatgttgtcaggcacatgctggggcaagggcaagaggacaagggtgggaatcgccatgttgggtggacccagtttctaatggtcagcttttgcgtatcacaggttgccagtctgggtctaagagccagggctttcatgctagacaagaaatatttttggagctgcaaaaaaaacctttcaaggacctcttttcctctctatctaaaataattttttttttcttttttttgagaaggggtctggctctgtcgcccaggctggagtgcagtggcgcaatcttagctcactgcaagctccgcctcct

SEQ ID NO: 835279 - DNA, 628 bp, Homo sapiens
aaggaaaactaggaagaagcctatgaattattcagtgatgtccagtataacacagggaaaggaagaaaatcttactgcctttctggagagactaagggaggcattgaggaaacatacctccctgtcacctgaytctactgaaggccaactaatcttaaaggataagtttatcactcagtcagctgcagacattagaaaaaaacttcaaaagtccaccttagtcctggagcaaaacttagaaaccctattgaatttggcaaccttggttttttataatagagatcaagaggagcaggtggaatgagacaaacaggataaaaaaaaaagccactgctttaatcatggccctcagggaagcggactttggaggctctggaaaagggaaaagctgggcaagttgaatgcctaatagggcttgcttccagtgtggtctacaaggacactttaaaaaagattgtccaagtggaaataagttgccccctcatccatgccccttatgtcaagggaatcactggaagacccatttacctaggggatgaaggtcccctgagtcagaagccactaatcagatgatccagcagcaggactgagggtgcctggggcaagcaccagcccatgccaacaccct

SEQ ID NO: 835280 - DNA, 619 bp, Homo sapiens
gtgattgttttctggccatcttagccttaataaagtttagagataagtaagaagagttggaattatcttattaagtaatgaatttcaggatgtagtttcaaggtcagcttcagcaattatctctctctctgtattttaacatgtgtttctgttcagtagcctatctctatctggacagcttatataattacaaaacttctctttttgcatttgtacaaagtgccctcttcttagagattgatctatcaatttgaagacaagcttcagctactagtatacactttttaaaaaaaataaattttattgtgtatatttgaagtttacaacacaatgttatagaatatatagggatagtaaaatagttactatagtgaagcaaattaaaataatttatcatctcatatagctactattttgtgtgtatgacaagaatagctaaaatctacatatttaacaagaaaaaaattccctaataaaataaaatcgtrtcacctatagtcttcatgtggtatattggatttctagacttgttcattctttatgacggccactttgtatcttttgacattcctctccctccccatttcctcaccacccctgatgactaactaatgtttta

SEQ ID NO: 835281 - DNA, 619 bp, Homo sapiens
gtgattgttttctggccatcttagccttaataaagtttagagataagtaagaagagttggaattatcttattaagtaatgaatttcaggatgtagtttcaaggtcagcttcagcaattatctctctctctgtattttaacatgtgtttctgttcagtagcctatctctatctggacagcttatataattacaaaacttctctttttgcatttgtacaaagtgccctcttcttagagattgatctatcaatttgaagacaagcttcagctactagtatacactttttaaaaaaaataaattttattgtgtatatttgaagtttacaacacaatgttatagaatatatagggatagtaaaatagttactatagtgaagcaaattaaaataatttatcatctcatatagctactattttgtgtgtatgacaagaatagctaaaatctacatatttaacaagaaaaaaattccctaataaaataaaatcgtgtcacctatagtcttcatgtggtatattggatttctagacttgttcattctttatgacggccactttgtatcttttgacattcctctccctccccatttcctcaccayccctgatgactaactaatgtttta

SEQ ID NO: 835282 - DNA, 621 bp, Homo sapiens
aatgaagagatatatttagcttcacacaaaaagcagtattttgtaacatcactaagagagtattctctgaggactgcaatcaccagtggttgcaagcctggaactccagagttgagtatagagttggaccagcttaagtctctgccccacacagataaattgaagtgaaagcatggaggcatagaagtggccaaagttataacttggattagggtacaatcttctacacctatccaaatgattgtactttccttaaaattttcaacacaggttaaaatgagtgtaagagagattgtcaaaatgtggaaatttgctactaggatatttagaaactatatatcatatgagctttgaatttggttagggcataatgagacagaattgatacctaatgctaccaaattttgaagtaaatatatcaatcagctttatctaaaataatatggtgtcacagactgccccaaatttatgtggcacacaaaaatccacccaatttcttgcctgaagaagacaaactttgaaatgctgatttatacacaaaaagttccccatggcttcaggctgattctcaggyttaaaattgcactgtgctcagttttgtctattttcttatcctacttc

SEQ ID NO: 835283 - DNA, 489 bp, Homo sapiens
gataccctaaatcatctctctcaagttaaaagttctgcaagtctagggcaggggcaaaatgctgccagcctctttgctaaaacatagcaagagtcgcttttgctccatttcccaacaagttcctcatctccatctgagacctcctcaacctggatttcattgtccatatcattatcaacattttggtcaaagccattcaacaggtctctagggagttccaacgttcccacattttcctatcttcttctgagccctccaaactgttccaaccctgcctgttacccagttccaaagtcacttccacgttttcaggtatcttttctgcaggtccccactctactggttccaatttactctattagttcattttcacactkcccataaagacatacctgagactgggtaatttatacaggaaaggggtttaatggacttaccattccacgtggctggggaggcctcacaatcatggcggaaggtgaaatgcat

SEQ ID NO: 835284 - DNA, 489 bp, Homo sapiens
gataccctaaatcatctctctcaagttaaaagttctgcaagtctagggcaggggcaaaatgctgccagcctctttgctaaaacatagcaagagtcgcttttgctccatttcccaacaagttcctcatctccatctgagacctcctcaacctggatttcattgtccatatcattatcaacattttggtcaaagccattcaacaggtctctagggagttccaacgttcccacattttcctatcttcttctgagccctccaaactgttccaaccctgcctgttacccagttccaaagtcacttccacgttttcaggtatcttttctgcaggtccccactctactggttccaatttactctattagttcattttcacactgcccawaaagacatacctgagactgggtaatttatacaggaaaggggtttaatggacttaccattccacgtggctggggaggcctcacaatcatggcggaaggtgaaatgcat

SEQ ID NO: 835285 - DNA, 594 bp, Homo sapiens
aatgtgggtgctaaataggtcattgctttctcaaatcaaagaatagaggtagagagagattctaacaagatggatgctgcaatcttttgtggcaataacatmcaatcatatatatatacatgtatctgcatattcagtcacctttactatatgctatttggttgaaccaagtcacaggccttgctcacactcaaggacaggagatcacatgagggcattgaacatcaatgaatagaaaccatggagccaccttagtagtctgcccaccactgaaataaatgttgtacatccttcatcatagaaattatgatggtagactttcctgataaatatgaatctggggcatttttacaagacatttctttaatgattttctgtattttttctaaggaaattagtccctttgtcaatttctaaatccagagttatcagttttggtaatatgcatccccctagatttttttttacaactaggttttcaaatttatgttcatgaagatctgtgaagtattctcgtataatttttaaagtttcttctgtttcagtatttgtttcttgcttttgtatgtgctttttctcttttttcttaagaac

SEQ ID NO: 835286 - DNA, 516 bp, Homo sapiens
atttgactcactgaataacayaaaagcttcagaactttgtgacattgcctaaggcatcattactttattgctccgaatgtaatatttatctaattagtattagctctagccaataatacatttttcacccatttgtactgtggtcaccaaatatcaattgtggtcatctgctttaaacacacaaaaatagttaaaacaagaaaaaaaattggcgaaagatataaaaagcaatgcaggctgaaaacaagtgcaacaaaagtcttatgaaataaagtataaattaaaagtattacattgtacaaattttaattatacattgagaagactgctacaagtaataaggttacaacagctattattaactgtgagtcaaaaaatagattgacataatcgaaaagcaaatattagaaataagcaaatttaagaggaatacagtagatattaaataatttatcacacttctatcaatttaagaaaacactatataaaaataataaacataggtcaaataaaaat

SEQ ID NO: 835287 - DNA, 606 bp, Homo sapiens
atctattgctctatttgacattattgaaattggaataagctattattcaattatattttaygaagggctttttttagtagtgcatgaaagtctttaacttataatgtttatcttataactatctatctaattgcactcttttgttaccctaatgcataattaatttatttccttatgttctgcaagtatgtgacaataccatcagttttataatgatatttactatccattgtttcatctctagatctagtttcccttccagacgtatcgacatactctacagataaatgatcaataacagtgtcaattgtggaaatttttgcccttatttcagtattcattagcaaattatatgcatgattttcacagtgatggtaagacctgtgagagtaagaatataaacatttaacaggactcttaaactgaagcgatcagcttacacaatataagaataaaaatatgatttaattttcctatagcaaaatgtttacagagctatttagtaataaaaagacatgtctttatccttttcaattattatcaaaattggaattgtgtcaagaaaattatctgcagattagatattagatatttacaaaatcttta

SEQ ID NO: 835288 - DNA, 322 bp, Homo sapiens
tgataaattcctccactggtttgcatatgatccaaaaggatcccagagtacatgaatttatccccagttaccccaagcatagaacaaagattgtgattattctacacagaatttgagtatagaaagttgcatcatgtcattcatttggttattttttcactaattcatcaaatctttattaagaatctgctgtatcaggcaccgttwtaagaaatgcagattgagcagatgaacaaaatagacaaagtctctactttctgcaggttacaatgagacagaagggatagagagactgattttaaaaatgaatgaaatagattct

SEQ ID NO: 835289 - DNA, 681 bp, Homo sapiens
ccctgtagcattcagcatttcatggawtgccaagagtctaccgaagcctctacggccctaacatcttcccctttctgctgattcagatgcacccagatggcactgccaaaagtgatctgcaatgcatcgcttgtgactgagtttctgccaagaaaactaaagggcttgaagccagacttctctgttttccacttggatattgtggtggtagaagaaaatggaaattagttgggcagaatcctgaggcggtcccagagagtcccattccctggtatatacgccctatataatctccaacccttatgcatgggcagagccttcggatatgatgggatatcactcctgtgattaggtcacttgtcaatcaactttgatttaatcaaaagggagtgtcttggtcttttttctgtcgcttatagcagaatacatgaaactgggtaatttacaaagaaaatgaatttgttttttacagttatagaggctgagaagctcaagttgaggagtcacatctggtgcgggccttcttgctggtgaggactctgcagagtcctgaattggcacagggcatcacatggtgagggggttgagtgtgctagctcaggtgtctttttctcttcctataaagctaccagtctcactcccatgataactcattaatccattaacccattgatttataaa

SEQ ID NO: 835290 - DNA, 478 bp, Homo sapiens
ggtgacatggggatataaataaagggtcaaggacacttttccatcccctaaaacatgtaacatagtggcatacaaatagcaagtattcaatacgagagtatcagagtaaaacatattatctctattccttttgcttgtttattgtaatgatttttattggttaataggtctgagatcaccatttaaatatattctcatgtcaatagttcataaattagagttgtgaacttatataatctaaattcatacacttataaacctctggctggctttttcaagaaatattatttagtgcttacatgtaaatattttgtggggcatccatatttcattacataaagaagcacatttcatagtgactgttaacattataactgaggaatgatttgaattgaggaagattttgaaaaggcaaatgtagagaaaggaacattgatttaaaattttcactagarccgtttcaacattttagaggagg

SEQ ID NO: 835291 - DNA, 461 bp, Homo sapiens
acttactttgcatctttaagagatccctgtcctctgctgcaattgaaacaatcaacaaagtgaaaagacaaccaagagaatgggagaaaatacttgtaaactacccatctgacaagagattaataactggaatatacaaggagctcaaaccactctatgggaaaaaaatctaataatccaattaaaaatgtgcaaaagatttaaatagacatttctcaaaagaacacatacaaatggcaaacaggtatatgaaaaggtgctaaacatcattaatcagcagagaaatgcaaatcaaaattccaatgagttattaccttaccccagttaaagtggcttttgtcttaaaaaaaaaaagcagtaattttatctttaaaaaaaaaaaaaaaaaaaagcawtaacaaatgccagcaaggaattggaaaaaaaaactggagcccttttacctgttggtgggaatgtaa

SEQ ID NO: 835292 - DNA, 652 bp, Homo sapiens
cggtgaaaaactaataatatttgatgaattttacactttaaaaatggctgcaaaaatcactaaacggatatttgaactgagtaaactagttgaggcaacagtagcaaaaattgtggtacccagaatggaaaactaaaccatttattactcgactgaatattgccgtagcaaaagttaatctttcctatgttttatatattatagcagtgcttctctaattgtatcacttagcatcagcatcacctgggaaattgtaacacatgcacattctcagaacacccaccagtcttactgaatcaaaaactctgtagccaggacccagtaatctggggttttatatgttctctaggtgattctggtacaccctgaagttgagactcatggtgttgtgtaatatttgggacacattagtccccaaaatattgtaacaaagctttatgcaaaacatgcaacatcacattgactagcttgcaacctctcattttcaaaggcaactgtagtgtccttctataatatcctagcttatggcactttgtgatatttaaatcaaggggctccttcccagtacccaggcgttcctaagaatttccctgcaaagacgagctgacagaggattcttcmtgaggtacctcaaaggtaacgttgtaaagat

SEQ ID NO: 835293 - DNA, 616 bp, Homo sapiens
aataaattttctaaagtaacccttgtcttccactagctttataccccaatatatctactagtgactcgtctgcaatgcactgccccagtcagacttcccagtctagttatttcttctcaaatttattgttatttgtctaaaaagtattaaagcgtcttgctttggccattttttcagacttcactctcttgtgagggcttccatgtacatgttaaattaataaaacttctatgctttcctcatgttaacttgtttttgtcaatttcattcccagatccagtcgaagagcccattgaagatctaagaggcatagaagctatggttagtgcctcccttacaagcttaccattaatgcgttacaggtttatcaatagtgttattacttttagaaagacatagttgtaaaagaggtggatctgagcagaaattaatacaggaaatacccattttacttttaatattcaatactaaataacattactacttacaattgtgtttgttttgtaagttttcaaaaactaatattttmagattatggccagaattatcatacagcatttattatatttttcaggaatcatctttatcatattttttgactaaaataatacttttc

SEQ ID NO: 835294 - DNA, 605 bp, Homo sapiens
gccctggggtcctatataaatttgaaaggcagtctaggcaggttctggtgycatgctgagctcagagccagtggacatggcttacatatgacctactgaaacaccagctgaggtggccaagggcgtgcaacctcccacaacactaggcaccaggagagactccttccctctgcttgaggataggggagggaagagtaaagaagactttgccttgcaacatggataccagctcaactacagtagaataggacactggggagagtcctgatgccccccttccaggccctagatcccaaatgacatttctatacacaccttaagcataaaggaattcatcaccttgaagagaaggactcagttctggcaggattcatcacctgctgactaaagagccattgggtcctgaatgatcagcaccaatacccaggcagtactcaccatggaccttggcgaggctctgagatatgctcgcttcaggtgtaacccagcacattaccagctgtagttgctatggggaaagcctccttctgcttgagaacagaagaggaaagatgaatttgtcctgcagcttagatgccagctcagccacagttgggaagagcaca

SEQ ID NO: 835295 - DNA, 506 bp, Homo sapiens
aatggaaagaactcgagtggaatggcatggaatggaaaggactggaatataatggaatggawtgaaatcaacccaattaaaaactaatggaatggaatggaatggaatggaatggaatctaaccgagtggaatagaatggaatggaatttaatgaaatggaatggaatagaatggtatggaatcaacccgagtggaatggtatgtaatggaatggaatggaatggaatggaatggaataaaatggaatggaatggaatggaaacaaaccgaatggaatggaatggaatggaatggaatggaatggaatggaatggaataaccggagaggaatggaatggaaaggagtggaatggaatggaatagaatggaatggaatggaatggaatagaatgaaatggaaaggaatgaaatggaaacaacccgagtggaatggaatggaacgcaatggaatggaatggaatcaaccagagtggaattgaatggaatggaatggaatggaatggaa

SEQ ID NO: 835296 - DNA, 587 bp, Homo sapiens
aaacaaacaaacaaacaaacaaaattatgctaaataaaggaagccagacaccgaagaccacatattgaatgattccatttatawgaaatgtccagaataggcaaatccatagagacagaaagcagattagtggttgccaagtgctgagaagagagagaaatggagagtgactgcttagttagcatttctgtttagggtgattttttaaagttctggaccgagatagaggtgatggctgcataacatgggtgaacaggcttaatgccactgaattgtacactttaaaattgttaaaacttcaccgtgattttaaaaatgttaaggtccctgactaatttaagcccactctgcaccgtgtagtcaggaactaggacttagagctggcatagagtgggaatttgtcaaataatcaccatcattttggattcttaatgagttgccaactgtcctaagtattactattttacatattgtaatgaatgctttgtgaaacaaaagcttttgtggttgttgctgttgattacaaattttatctctttttttaacttttattttaggttcagggtacacatgcaggtttgttgtac

SEQ ID NO: 835297 - DNA, 503 bp, Homo sapiens
aaagcactaatatccagaatctacaacaaactcaaacgaattagcaagaaaacaacaatcccatcaaaaagtgggctaaggacatgaatagacaacaattctcaagatatacaaaatgaccaacatatgaaaaatgctcaacatcactaatcaggaaaacacaaatcaaaaccacaatgtgataccaccttactcctgcaagaatggccatcatcaaaaaaatcaaaacataatagacgttggcacggatgtagtgaacagggaacacttctacactgctggtgggaatgtaaactagtacaaccactatggaaaacagtgtggagattcacagagaactaaaagtagaactaccattcgatccagcaatcccactactgggcatctacccagaggaaaagaagtcattatacaaaaaaggtacttgcacacrcatgtttatagcagcacaattcgcaattgcgaaactgtggaaccaaccaaaatgcccatcaatcaacaag

SEQ ID NO: 835298 - DNA, 561 bp, Homo sapiens
tcgccctcgctccatctacctgcccccgctgcctctttcaggaaggagccccttaggaggacaggcctgcagcatcctggtctcgggaggcttctgtcattgctcacacacagwtcagatttccacctctttatagacaagaagtgaatttgcctggggcagaacacccacccaaagagtccccacttaacaatacccccccccacggcaagaatgcccaaatccgaatgaccccagttttcctaatgagtaaaatgatcccagcatgtgccccagagcatgacgcctgcagctccggtttcatgcaggaaattggttttggagagttttggcaagttggaaagccacttactggcttttgacatgacttctcttggagaataagtggactccaagctaactctttgcaaatgtaaacacatgtccatcttgtaataaatgcaaaatgcccgtgcagcagaagcatgcgactttcatatccttgcctagaataggctgcatggtgtatgtcagtgagggccacgaggcgtcggctttagacacagatcatagctctacagg

SEQ ID NO: 835299 - DNA, 374 bp, Homo sapiens
atgttactgaaaagtaatcattgtaataatgaagaccacatgtgtcctgggtctaattattaaatcattatattgttatatcattcctattagttgctttggcgaaagggtcaaatgaaaaaagtcagggcattcttttttatgtcgacattttattttctatcaatacaattcgctccagcccgagacatggcagaatgggacgtgagctggcctgcatgggggctcggctttggccttcatggyggttgggtccggagggaggtgagcagtgcccttgactgatgcactgtccgtcgctgctggactagggctgggactgggccccagagccagggtctccagcgctggcaagggggagctgctgggtcctt

SEQ ID NO: 835300 - DNA, 610 bp, Homo sapiens
aaggtttgttgagtgagggaaattcaggaaacttctgtcagtcactttagccaatttgaagctctcccttttttgtgcaaagacaaactacagcttactcaactggtactaatttatctaggttcagcatttgattttattgggccttggattttcatctattttgtgtctatctcattgctccaaactagtacaagctcctgaattgccagggccacttcttattcctcctgggatgatcaggttgggcgggccagggtgctgctttaaaagtcagattttgcttctttagtcttccctattgttaatgaacagtttttggatgtcactttgtgcctagcttgttctaagtgtttatgttagttaagggttttctgtgtctatagaaggaaaaattcaaactgagttaagcccaaactagactttgttggctcacatagctgaaaggccccggggtagctgccttcaggcctggctggacctagtagttccagtgtcatcacaggactctaagaactgtcatggctctgcttttttatgtgctggtgccaagactatctgttcctggkggatcccagcagccccagactcatgggaaaaaatgaccatg

SEQ ID NO: 835301 - DNA, 622 bp, Homo sapiens
ttctgtgggtcctctttcagtcttcattcatgtgggacattttgactggggaatggttttatgccttgggcctcaaaaacgttccaggcgttttggtcacaggaaagtgaccgccagaaaagaggtggggacaactgagactcatgtgagtctgatggaaacttggggggaacaacgtgttagtacttggacctatttctgagcaatggagaggaagcacgcaaacacacttgtaaggcacctacaccatgccgggtctgtgcaaggcagggagctgagcagtggccactcacctgcttgggcctcccttctaaagctgcagcctgtccacttctctctgttggcggaaggcagaaaaacctctctctctccatttctttctgtctctccatctctgtctttcagtctctgccttgctgtttctgcctttctctgtctctgttctctgtgtctctttgtctctgtctctgtctttctgtttttctctgtgtctctgtctctgtgtctatttcggtctttgtgtctgtctcttttttccatctctctttgtcatctgtccttctctctgtstctgtttctgtctttgtctctgtttctctgtctgtgtccatctctgcctctc

SEQ ID NO: 835302 - DNA, 584 bp, Homo sapiens
cgctgctttgctctcttcccagcaaagtctggaaaagttctctctcctcttcagtctgtgagttgcacayggccagagacaatctctcttgttgacagctctgtgcccagtgacagcatggtgtctggtatatgaccgggagtccatgatggatggatggatgagtgaacaaataagaaagggaggtctggagagagacaggaaggctggacaccatgctggaaacttgcatgttcatgctttcgtgtgatcttgacaccacatgtaaaccgtgttaattccttctgtaaatgaggaaagtgaggcctcaagatggcttagcttgccctctgaataatagagccaataaatagtggaggctttttccaactggggcattccagcttcacatccagctgtcttttggaagttttttgaggacccaagggtgaatctggacatccgcttgagaagcccaatgctaattggctatgtgcaaatgtatcacatcttgtatgagctaaagtcataaatttatccctggctgaatgtttgctccagctcagtctgaggataactatatcctcgggagagaaaggagatcc

SEQ ID NO: 835303 - DNA, 503 bp, Homo sapiens
tcttgatttctaacttcagatcataaatgttctaatttcacattattatgttaaaattaagactataaacattgttaattatgacttcatgtcaagcccacacacattaattcagtggtatcatttctggtatatggcgtacattcgtatctagaagaagctacatatttatctctatttcagaatgtgagattagacactcgagtacactgataaataagacagacatctcagtcaatactgggctatctgtgtatctaatagttcttattagggccctgtttaaccttattttatggtactgctgagggaatgtcacacaaagctcactgctgtggggcaagaagagaaaccaataggtgggtaagttcctgtgggcccctgagscgttgctaacaaataactatgctgatgatgctagtaacaataattatagccactgctatttcttagaaatggcaggcattatgtgacatgtgttatatgcattaccttgtttaaat

SEQ ID NO: 835304 - DNA, 634 bp, Homo sapiens
atgcattaccttgtttaaatattatgacgaccagatgaggtaggacatattattgttccstctttatagaggttaactaatcggaatgtaggttggatgaaagcagggatttctgtctgtgtatggaccactgatctttggggtgggcattccataatcaagtcgttattcagttttgaagagtatgtactccaagccacacccccataaggatttccatctcaggtggtctgaccagaaaccctggagctgaggtgctcctcctctcatcctataggtcccctttccatccagagccaggagagtctctgctgtctttctctaatgatggtagttgcctcttgtcaaccttgaccccagagcattaatgactggattgtaattttcttccctggggattaggaacctacagtccttctcacttccatttctactaagtaaaaaaaaaaagcaagccaaatataataactacagctaatatttattaaatatctattacaaatcagataccacactgtgactctattatgtatgtaaggaaatttaatttcttcaacaactcatttgccctcttactccttctttgaagtcatcattattctccatacagaagttagtaaattgtgggtgggag

SEQ ID NO: 835305 - DNA, 634 bp, Homo sapiens
atgcattaccttgtttaaatattatgacgaccagatgaggtaggacatattattgttccgtctttatagaggttaactaatcggaatgtaggttggatgaaagcagggatttctgtctgtgtatkgaccactgatctttggggtgggcattccataatcaagtcgttattcagttttgaagagtatgtactccaagccacacccccataaggatttccatctcaggtggtctgaccagaaaccctggagctgaggtgctcctcctctcatcctataggtcccctttccatccagagccaggagagtctctgctgtctttctctaatgatggtagttgcctcttgtcaaccttgaccccagagcattaatgactggattgtaattttcttccctggggattaggaacctacagtccttctcacttccatttctactaagtaaaaaaaaaaagcaagccaaatataataactacagctaatatttattaaatatctattacaaatcagataccacactgtgactctattatgtatgtaaggaaatttaatttcttcaacaactcatttgccctcttactccttctttgaagtcatcattattctccatacagaagttagtaaattgtgggtgggag

SEQ ID NO: 835306 - DNA, 570 bp, Homo sapiens
ctcttatctgcaagtgacagaaactgaaattgaattgaaacaaacatacagaaggaacttagtggcttctgtcacagaaaatgtcaggaggcgcattaagaactcaacaatgagaacacatggacacagggaggggaatatcacacactggggcctgtcaacgggtcgggggctagaggagggatagcattaggagaaatacctaatgtagatgacgggttgatgggtgcagcaaaccaccgtaacacatgtatacctatgtaacaaacctgcacgttctgcacatgtatcccagaacataaagtataatttgaaaaaaaaaaaaaaaactttaggtccagatacacagcctggggaggacctgatttctttcttgactcttccttctcaggcaggtcctccctcccgacatgaagtttgttgtctgccattcttagcaaactcagcagaaagtactcttcatccagtagcaccgamcagcatcctagcattgattctgattggtccaccgtggggtctatgactataggagtgccatgttttattatcaagcataggaaatgtgcccac

SEQ ID NO: 835307 - DNA, 570 bp, Homo sapiens
ctcttatctgcaagtgacagaaactgaaattgaattgaaacaaacatacagaaggaacttagtggcttctgtcacagaaaatgtcaggaggcgcattaagaactcaacaatgagaacacatggacacagggaggggaatatcacacactggggcctgtcaacgggtcgggggctagaggagggatagcattaggagaaatacctaatgtagatgacgggttgatgggtgcagcaaaccaccgtaacacatgtatacctatgtaacaaacctgcacgttctgcacatgtatcccagaacataaagtataatttgaaaaaaaaaaaaaaaactttaggtccagatacacagcctggggaggacctgatttctttcttgactcttccttctcaggcaggtcctccctcccgacatgaagtttgttgtctgccattcttagcaaactcagcagaaagtactcttcatccagtagcaccgaccagcatcctagcattgattctgattggtccaccgtggggyctatgactataggagtgccatgttttattatcaagcataggaaatgtgcccac

SEQ ID NO: 835308 - DNA, 478 bp, Homo sapiens
ccaacccactgcataggcaggaacaagtccagcctgggtcatctgagaacagcccagagcagaaggccatcatatttgttkgcaaatattgttgttgttgatagccactaggttgtgggtggtttattacgcagcagtagatagctgaaataccattggtgtgtccctgtttattgcagccctgtgagagctgagcctctccaattcccatgtcttccatcagcaaagaaaaatgagacttcaaatgagatattttctctgtcggttttacagcctaaactgttccatcccttttccttcctgggtggattatggagttcctgacttccattaactccccttgaggctatttctttccttggggcactgatttgcaaggctgccttgggtaccctgcattatctgttcccatagtcatttatctagcggaaatgtccagacttccatatttgcccaacttttcttacagctcccaggg

SEQ ID NO: 835309 - DNA, 583 bp, Homo sapiens
cccacgagaacatcaccctcaatcccacacaygtgcactcgtgtgtatgcgtgtgcatgtggacaaggcaattcatatgatagagaaggcgtgagttagttctctctcatcccacattcaagaatatcattctattatcttcatcacgtttactttctagcatcttccagagcccccctgctcggtgatgggcctcaagtgtcaccctcagctgggaaggcttcccttttcccttgttgaaatatctctccttaaatctctgctcttgggggtgcctttgctcttatattaagaggggacataggaggctgatcagacaaaacgtcccttgattttatgtcaggatcacgtgtgcacctgtcggagctataagatgccgttcagtgaactagagacagagctggggtgcaggaggaaatgggttaggttgtgagtacatgtcagtagcttttaagtatctgtataccccctcctctatgcacgcacccggctggctccaaatgcctcttaccaaggccggcatcacacgtttagtttattaactacctaccatccttgcagctgctctgggcgctgctgtgca

SEQ ID NO: 835310 - DNA, 583 bp, Homo sapiens
cccacgagaacatcaccctcaatcccacacatgtgcactcgtgtgtatgcrtgtgcatgtggacaaggcaattcatatgatagagaaggcgtgagttagttctctctcatcccacattcaagaatatcattctattatcttcatcacgtttactttctagcatcttccagagcccccctgctcggtgatgggcctcaagtgtcaccctcagctgggaaggcttcccttttcccttgttgaaatatctctccttaaatctctgctcttgggggtgcctttgctcttatattaagaggggacataggaggctgatcagacaaaacgtcccttgattttatgtcaggatcacgtgtgcacctgtcggagctataagatgccgttcagtgaactagagacagagctggggtgcaggaggaaatgggttaggttgtgagtacatgtcagtagcttttaagtatctgtataccccctcctctatgcacgcacccggctggctccaaatgcctcttaccaaggccggcatcacacgtttagtttattaactacctaccatccttgcagctgctctgggcgctgctgtgca

SEQ ID NO: 835311 - DNA, 627 bp, Homo sapiens
aaaatgctcctggggaaactggatgagttctgggccaagtaaaaaacagacagctgtgggtatggggtcttccagggaccataagacaggcaaaataatgacagtgctttgaaaatgagyctttaaagaagcttcaacactatttttccctctctggcagctgtcagcctactggttttcactgtgattgcaggctgttggctttcaaagctacttcagagctgtggaggagaggattggataagacaagttaaaatgctacaaagcttgctctttaccaagattcaaattttttcattttttttttccaaataaatgctccccaggtttctgcaaacctttagctaatttctagagttctgagcaagttgattctgatcatttttgccagttttctcattgcttttatggaagagagaatttttttaagtccttactctgccatttttgctgatatcatctctccaagattttatcatgtaggttatataacaagctccaatagatattcacttgaacacatattcatatgttatagtccctaagattagtttttttttccccagctgattctttaaatagtgagagaaatttagttcctaggaagtatgtgctctggccataatg

SEQ ID NO: 835312 - DNA, 448 bp, Homo sapiens
acaaattagctgggtgtggtggtggtttcctgtaatcccaactactctggaggctgaggcaggagaattgcttgaacccgggaggcggaggttgcaatgagttgaggtcgtgccactgcactgcagcctgggtgacaaagtgagactccatctcaaaaactaataaataaataaaaataattgagacagatttctcacttttggagaagggagttaaaaatacagaaagggagaaaactagaataaacccagttgttggattggatatgtaatgtccatgtgaactcatggtctctgatagataatagatatgacgatggataaataggtagatacacagraagaaagatagataattaaagatataaatgtatggatatggaagttatctgtatgtgtattacatacatatatttcctagctttctccactgagagaggtgggagca

SEQ ID NO: 835313 - DNA, 631 bp, Homo sapiens
taatagttttcaggagcctggaaaatgtttctatcttttgcgactataatctcacatttgagtgtttggccaaagataaaaactcaaattgttggrggaggtgttggcatgaagatatcatattaatcctaggtttattcatcacagaaaaatttggaaacaacctatctaataattgtacaataatcaaataaaaataccaaataatatgtagttattacgattaaaattgtgaagattagaaaaaacaagaaaaatgtttggttaaaaaaattgagaaaattgtatccataacataaataaaactgtataaaatatgtgcatatatgtataagaataaagaaagaaatctgctagaaaaacaacatatttgttagggtgtaggatcacaggcaaaaatttttaaagtaataatcctggaacacacatttttaaactgccaaaggatacaatgtgaaaagtgtatcctcctggggctagagagcataagccaactcaattgatttcacagagcgctcaccagaggtgagtccaccaaccacacctgggccttcctacttaccatgtccagcttggcttactgcatgcctcaaagcacccacaagattcagcaataatactgtttttctta

SEQ ID NO: 835314 - DNA, 334 bp, Homo sapiens
tcttaccaactctgtaagaagtgaatagtaaatatagtaaactttatttacttcccctgtttaatttaactaaggtggcttaaaggagggaagtcagttgttcaagggtacagaagaatttttttaaaattcactaactatcatacaggaacaatgttatgtaaaagagcaggtttccaaagctgatgagactggcttgttgtataacttacattatgcaartggtgctctggttgaggaaaatactgtgattggaggctcataggaaactaacactctatttcctctaggagtgatcgtttgacatttactaattcagtgattatgatgactt

SEQ ID NO: 835315 - DNA, 334 bp, Homo sapiens
tcttaccaactctgtaagaagtgaatagtaaatatagtaaactttatttacttcccctgtttaatttaactaaggtggcttaaaggagggaagtcagttgttcaagggtacagaagaatttttttaaaattcactaactatcatacaggaacaatgttatgtaaaagagcaggtttccaaagctgatgagactggcttgttgtataacttacattatgcaagtrgtgctctggttgaggaaaatactgtgattggaggctcataggaaactaacactctatttcctctaggagtgatcgtttgacatttactaattcagtgattatgatgactt

SEQ ID NO: 835316 - DNA, 488 bp, Homo sapiens
gagcaaggtgaaacctgaaatacctcctatgtcccagccccagagttcacacattgtcacttctgccacatactatgaggcgcaaaaaaccagcaccaattcagtgtgggtggggatacaaaatggcataagaaatgagaatcattaagggccatcttgtagctagttattacagaacactatggactaagatatcatgggtgggatcatcattatctaagcatataagataacacacaataatatatcttttagtgcaatgaattaacagcagccaatctagtactttatattttctatggctgttttactaaaatcagtgttgctattttttcattaataaataggtaaacaaaakaatgataaaagtatttttgccaatcataaaagtatttctacaaaaaatcaaaattcattttaataaaatgtggcatggcctgtgatagaacgggcaaaagaccaggctatgcaaatacaaaggagtctta

SEQ ID NO: 835317 - DNA, 577 bp, Homo sapiens
gcaacttggaagtcacaatgyatttttcacaaaacagtgcagctagatgtagtaaaaatagtatgattagagctgtaatttgggagtttgtgggttaaataagcttttgctcactgtctggaaatcataccaccaggaatgaagttgtcactgaggaagaatctactcaaggttgcaaccagcttatatgcagaattcaacctgggcttaaatggggcagtggactttgctggatttctcacagcaaagctttttctcaagcttaaaatatgcacccctttttgaatgactgaatctaacatgaatgatttttacttgttgccaacttacgtgccttgaaatcctgagacatgtcctttcatgttgaattttccttaggaattaaagaaatccttaataaatgtcttgcaattataatcaactttaattacttgttgctatggagttttgcttggttacaaattcttcatctgctgtttctaattcagctcaagtttctgtggctaaagggatattttgactctaatgagagaaaatacataaattttttaatagttttagtctttcttctagcaat

SEQ ID NO: 835318 - DNA, 543 bp, Homo sapiens
taaattttaaaaatgcattaaatacacctaacctactgaacattgtagcttagccaagcctacattaagtatactcagaacacttacattagcctatggttgggcaaaagcacctaacacaaagccttttttataataaagtattgaatatctcatgtaatttattgaatactgcacactatagagtacagtatctactgtttaccctcatggttgcatggctgcctgggctggcactgtccagcattgcaagagatgattataacatgtacagttaacccaggaaaatatcaaaattgaaaattcaaagtacagtttctactgaatgcatatcacttttgcaccattgtaatgttgaaaaatcttaagttgaatcaccagaagttggggactgtgtgtgtattctttaatgaagaaagaggcccacgaagggraaaattgcctagggcccatgatagtcataatgtgaccctgaggcttctggttttaaataccttctagatacatttacaatgctactcacaaatttctttctccagtttg

SEQ ID NO: 835319 - DNA, 543 bp, Homo sapiens
taaattttaaaaatgcattaaatacacctaacctactgaacattgtagcttagccaagcctacattaagtatactcagaacacttacattagcctatggttgggcaaaagcacctaacacaaagccttttttataataaagtattgaatatctcatgtaatttattgaatactgcacactatagagtacagtatctactgtttaccctcatggttgcatggctgcctgggctggcactgtccagcattgcaagagatgattataacatgtacagttaacccaggaaaatatcaaaattgaaaattcaaagtacagtttctactgaatgcatatcacttttgcaccattgtaatgttgaaaaatcttaagttgaatcaccagaagttggggactgtgtgtgtattctttaatgaagaaagaggcccacgaagggaaaawttgcctagggcccatgatagtcataatgtgaccctgaggcttctggttttaaataccttctagatacatttacaatgctactcacaaatttctttctccagtttg

SEQ ID NO: 835320 - DNA, 476 bp, Homo sapiens; identical to SEQ ID NO: 834131

SEQ ID NO: 835321 - DNA, 471 bp, Homo sapiens
gaaggacaagaggacacgcattaattgggggatcttggtgctgtttggcttgcatgaagactatggacaggtagagaatctaggwcaggggtgcaatgctcacctttagatcaaggctgctaagacttgccccgaggcctcagaggtgagagaaaaggcagaggcttgaggtgagcatggaaagctggcctgggagggaataaatttgccaagcaggcctgagcaaggcccagccttcttacctgtaagctctgcttctaaatctctaggacgataaaaggaagcaatcacctttcatcttcagaagtacatttcattaattgataatggctaccaggatttattatattacaaaatgttctgacactgggttcaagctcagtgggaaagattggtacaattgattagtaatatctgtcctaggtctggttgtgaagggttgggactatcagaacgtacgcccctctctgc

SEQ ID NO: 835322 - DNA, 615 bp, Homo sapiens
gttttttaaaatgtgcatttgttatattttctatcttcatagaattgtattgagaggtttgaggaggttgtgttaggggttactagccagccaccttttaaaccagaacacttgtatctaattttaaaaataacctgcttcaatgtggtccaagttaggtagagattgatgttataattcaattgctatgtagaaataactattaatgcactttttagtcctggctgggcactttcttaatggcctcaaaagacgtgggtgaaatatttcagagaacctttttgtacatagcaggagtacactggagaattttggtccctttttttcacatgtagtgaatttcaacactatctttctgaatcatatctgatttattccctaaaactaatcacagaatcatctctaaaatagcatttctgctccaatcagagcttccttttaaaaataataagtcaacaggcatcacacattttaaattgaatacagactgcaaagcagccctcatccattagttcaactgacytttgaataacccagaccagaaaagaatagggccataaatcgaagaagactctaagcctagctggggcttggtggtgctatcagcccaggagt

SEQ ID NO: 835323 - DNA, 583 bp, Homo sapiens
aagatttgaatattgatgagatataaacattcagtctatagcattaatttcacctcgggcccagggacttatttataaaatgaaaagataagcagatacttcacaaggatacttttaatattacatgyttacaaatttagtttatacttccatcagggatgacatgaatatctaacaacaacaaaaaaaaaaaacacctctttcaaatcccagcaagaaaacagatattgtcaactgacactgaaaatgaatcctataattttcaacgttatgtgattttggtattgtgcagcctcacactgagcatagctggtacacacaaaaagaatgatggtgtgtgagagacatgagcaggacaaccttcacttccttagccaaccatctgtgcttaaaattggctgaagctttgtcacacttaaagaaaaataattgccaaaaaatcaatctatattcttgaatcagcttttaattttccacagccaggtaaaggaatcagatgaacctcatctcttgtatttgacaaagacactatccaaaagtcaaatttcaaaagtcaaaaatatgtttatggatatcagctaaa

SEQ ID NO: 835324 - DNA, 425 bp, Homo sapiens
ttaattatgcaaagggggttttattgcatatacttacatatttaggaggagatggagaaaggcacaaataaaccttcactacatttgaattcatgtgatggtgaactatgcccctcccctgcattmcatttatacagtctgactaataatatgcctctatttagtttccggcttctggtgggaattatatattaaacatggcctaacttcttgtttctacattaagatcatcttgggggaaaaatagctatttctgcttttttctaatatatgccccatagtaagaaggcataaactcattctataggaagggtaatcaattccttaatcatctcataaaggcataaaagcagaagttcctggtcgaattcatttcattgcccttgatcaacagcaatatcacagaactggaccaaaatgtgtgc

SEQ ID NO: 835325 - DNA, 649 bp, Homo sapiens
aaaacctagatgacaggttgataggtgcagcaaactaccatgacacatatatacctaggtaacagaccttcatgttctgctcatgtatcgcagaacttaaagtaaaataaaaaaaaaaaagaataaaaagagctacaaaaatgtagcaacaacaaatctcaaacatggacactcattattaatatatctgaataacctaacaacttctgtataattaccatataatttttgagcacagaattcccctaagtataataattcagatactgtgcatgttcctaaagaccaaaacacctggaactacgaacataaagcagttgcttgaacagtggtgccatgtacttctgtaggacaatccaaaaaatttggttcctagccatctgtcagaacactgacagaaagaccaaaataaaattcctcaaactgattttcttctcaacaatgtatttaattactttaacacataaacatcctcaaccagttaaaaatagcagccaaaaaaaagactggttccagaaccttgaaacctaagtgcgaaattgtcactgtttgccatttaggtgctacatccgcacgttsatatccttattgaataggcctaaccatttagtacagaatcaagcaccaaatttatccatatatttaaatg

SEQ ID NO: 835326 - DNA, 530 bp, Homo sapiens
ttcttaatatggatttctatttatgttgtgctgtggtctgagagcatagttggtaagatttggggtttttaaaatttcctgaagattgttttatgtctgatagtgtggtttcttttagagtatgtgccatgtgcmaatgagaagaatgtatattttgttgttctggggtgaagtgttctgtagatttattaggtccattttgtcaagtgttaaattcaggtcttaaatatctttgttagttttatgcctcgatgacctgtctaatattgtcagtggagtgttgaagtctcccactgttattgtatgggagtctaaggctcttaactttctttataaatctgggtgctcctgtgtgggtgcatatatatttaggagttcaatattcttgttgaattgagctctttactattatctaatgcccttctttgtctttttaaatcattgttgttttaatgtctattttatctgaaattagaatagcaaccctgatttttctctgttttccatttgcttggtagatttttctttat

SEQ ID NO: 835327 - DNA, 631 bp, Homo sapiens
aaaccctctcagcaccttaattcttgagtctcatgtgaatccaggagatggcttacaaattggtacctattagcccatyctagtgaacatgttaaaggtaagaggaaaagaaaaggggagcaattttgaggggtatcttgtctggacaacacacagggtctggctgagtttgcagaaagataaaggactacattctagatgctaccaactcatgcagttgggacacaagtaaagagaggcaggaaagaactggcttaagtcaatgccatcttttacttagacaacaatcaaagaagaatagatattgatacatttcctattcagtttagacaagaaagccattgtctagcatttaactcagttgtataaatggaaagtcctcaatggagtattagcactgtggaatgttctatagtaacagctgttaatcaattaaggaaaccatatttattatgtatttgttcattcagctaacaagtatagagtcctattttgtgccaagtacctttgcaggtactggagatccagcagtaaaaaacaaaagtccctcattggagtctgttgaaaataacaaaagaaaaacccacatataatatttcagatgatgacaaatgttacaggaaagaagcag

SEQ ID NO: 835328 - DNA, 405 bp, Homo sapiens
tttagccaggagttgcagtttatttttaagtgagtctagcattatgtgaaatttggttatttactttagggttcctatgtagtgaaaaaactacttgaaataaccatgtatagtgtttagaagcatgacataaaatatgagggcatggttcatgtactctggttgttttttctcttactaattgggcatgggacaaataagtcttttttttttttttggaatccccctactctcccaatatggttggaatctccctgctctcccaatcatatgctgtagttttaacccccastactacacaatgtgactttagaaacagggttagtaaagatgtcaaaagttaagattaagtgattaggttgggccctaatatgaattctgcccttataaaaatgggaaatttga

SEQ ID NO: 835329 - DNA, 470 bp, Homo sapiens
gcaaagcagaagccagcacatcacatggcaaaagaaaaagagagaggaggtcccagacttttaaacaaccagatctcacgtggactgagggagaactcacttatcagcaaggggatggggctaagtcattcatgagggatctgccccattattaccaaaacaccagtggtttgatgtaggtcttgatgcttgcttcacagaaagccaatcactgaaacaacagttattgccaaggaaggctttaatcagttgctgcagccaaggagatgggcgctcagtctcaaatccatctgcctgactaaaactaagagtttgtatagcaggggagaaacgtaacagtgtgtaagaaaacaaaaattagggaagggkcaaggacgcaatcatggtgaatgagggattcatgatgtggtgccatcatctggtgagtttcagttctttgatactttctttgagaggcctgaaggttcttt

SEQ ID NO: 835330 - DNA, 570 bp, Homo sapiens
gtttgtttcacatactcagacttcttccctatctgcttcatctgccttaaccaagatgttagaccagtgattcttaatcctgtwtacatgccagaatcactggggagcttaaaaccaaggaaccaaacacactggagcctggatttcattcccagaagtgtgaatttaattgatacggggtatagtgtgtatgagcttgcttctgggattttttttgaagttccatagaactttgggatgagaatctctaccttagatgctattcttatcttcctcctgggtttattgagcaacatgccttgtttttgtttgttttgttagtaatagctcccctgcctcccttggctgccacctccacttgcagtggtttacctatctgccctgctatcattctgcctgttctgttttgttctgttcctctgtgtcctctcttagcaaaaggacattgctgatcttaccttcaaatctttgtccttgctattgtggctgcttgtaatcactcctcttttctctattggaatcttgttgaaccaaagtttcgccttctccatgcaactgtctctcatcact

SEQ ID NO: 835331 - DNA, 691 bp, Homo sapiens
cctcttattgtgaaaagagtactgggtagaaaagagtagatctatgctttatttcaattctaccataagctcaagatatggcctcagtttcttaccagtataatgttgggttggggtggtgattataaggtcatggaatagtagagctgtatggggcctttgagatttttttttggattgagtctcactctgttgcctaccttagggtgcactggcatgatctgggctcactgcaacctctgcctcctgggctcaagtgaccctcccacctcagccttatgagtacctgggaccataggcatgtgcgaccacacctggctaatttttgcagtttttgtagagacagggttttgccatgttgcccaggctggtctcaaacccctgagcttaagattagcctcccaaagtgttaggattacaggcgtgggccaccgcacggctgacctttgagattattgatctcatccaatcagtgagggaagaataggtagcccaggaaggtaaaaccgtagcgttgaactttgtggcattatgaggctctgagaaactttggttattctcagtattccatgacgttactgaacattcttttttaagggctcttttagacctckgtcataccttctcctcatacttaagttatcatattcctttttctgatctttcctgagttcacagatttctcaggagc

SEQ ID NO: 835332 - DNA, 606 bp, Homo sapiens
ctctcactcacaattttgcaagagctttctatatttggtattcttttcttaccatccttcaactcattttcattccactctcacagaaagtttcctgaaaaagaaatgtgatcctaaaactgtgccgctcagaatttctccagtgtacccccttggccttcagcagagaggaagaagggaggtgaggtctcagagacattaattttcactttcagtcatcctcttccttcctccaatcacaccaatactcatagcattctagaccaaccttggcagaaggaggaagaggttaaattggacaacttcctctactcaaaactgctacctttcatttcagtttaatagcatttataggtacctgctatttgcaatgctttgtgctttttcaccaatcctcacaaaaatcaggtggtgttacagggggaaggaatgagacgcagcatgaaggagctacctaaggttataccaagctagttagataaatgtgcctgtacaggttkcttgccattgaacatcacaacagttggtttgtttttcaaatatatgatttaggcagtagaggttaagaacagaagccctaacttcaggcactcttgactggaaaac

SEQ ID NO: 835333 - DNA, 587 bp, Homo sapiens
tatttttatggagtttcgcctttgtcacccaggctgaaatgtaatggcttcttcttgkctcactgcaacctccgcctcccgggttcaagcagttctcctgcctcagcctaccgagtagctgggattacagtcacccaccaccacgcccagctaatttttacatttttagtagagacacggtttcaccatgttggccaggctggtctcgaactcctgacctcaggtgatccacctgccttggcctcccaaaagtgctgggattatagacgtgagccaccgtgcccagctgtcttgctcttgatattagtataaaaacattccatctttaccataaactatgatgctataagtattttatagatgtcccttgtcagattgaggaagaacctttctcttcttagtttgctgagagagtttgttatgaacagtgttaaattttgtaaaatactttttctatttctgtcatatgattgttctttttcagtctgttttatgaataatttcattgattgatttttctaatgttgaacaaactatgattcctggagcaaaccccattggttgttacttttaaaatatgttattag

SEQ ID NO: 835334 - DNA, 565 bp, Homo sapiens
caataaactaggtattgatggaacgtatctgaaaataataaaagctttttatgacaaacccacagccagtgtcgtactgaatgggcaaaagctggaagcattccctttgaaaattggcacatgacagggatgccctctctcaccactcctattcaacatagtattggaagttctagccagagtaatcaggcaagagaaagaaataaagggtattcaaatagaaagagcagaagtcaaattgtctctgtttgcagatgacatgcttgtatatttagaaaaccccatcatctcagcctagaatctccttaagctgataagcaacttcagcaaagtctcaggatacaaaatcagtgtgcaaaaatcacaagcattcctatacaccaataacagacaaacagccaaatcatgagtgaactcccattcacaactgctacaaagagaataaaataccaagggatacaacttacaagggatgtgaaggccctcttmaagtagaactacaaaccactgctcaaggaaataagagaggacaaaacaaatgggaaaattattccatgctcatggg

SEQ ID NO: 835335 - DNA, 672 bp, Homo sapiens
ctcagaaaaggctttgctttaaagaaagtagtatattagttaagatgtagaagctaaatcataaatgcagtaaatgtagacatgtaatctgtagttgacggcactrctttttaaatacaatcagccaaaaaattggcattttctattttccagagttagaatttcttaataaaattagaaggttttgaactgattagaatttggtcattttgtacatgtatcagtaaaattgtaccatgtactgttgtatttcacggcagataaacaaatcaggtaaatattgctttccaaaatgagtacctatttaaaaaatgtattgggccatttaaatgccctgttgtcaactgtgggatatctataaagtcatcaaaagcatatttattacatagattctgtggcatatttttagtgtgctttagaacaaatataagacaatgcaacagagtttgcccattcctctttagtaaaaaaagctaagactgcagtctcctcttttccctaaatgtcatctacaaaattaacaattgccaaatacaacaaatcaacaattgacaacctgatgatagtgccgcaaatccatttaaagtttaaactgtctctaataactattttcattcaggagtgtggtaggagaagatgaggttagggaggagctcattcttctcccagtac

SEQ ID NO: 835336 - DNA, 545 bp, Homo sapiens
gaaggggcaaggcttcagaaatgtgggggacattttctttcctcayagaggaatgtaattctattctagatgtgattatagctactctatttttttttttctttagaaagacaataggaaataaggtaatgaagacagtaggaaataaggtaatgagcccagactttaggtttgaatagccctgccttcatctctatttctcttgtattcatcattaaacacatagtaacagataactaattttaataaatctgtatactatgtgtcatttaacccataataatccagggtggtgatacagccatgggttcttgagccagtttatctgtgtttgaatttcagctctgttacttatgcaagttacttaatgcttatgtgcttcagttttctcatctgaataataggatagagacaatacttacaggattcttgtaaggattaagtgaattagtatatgtaaaacactcaggaatgcacatcgaaggtgcttggtatatgttagctgtcattatccactaaatgtaagttggatgaggcaaaaccct

SEQ ID NO: 835337 - DNA, 626 bp, Homo sapiens
cttctttaaaaagcaaattccggccgggcactatggttcacacctgtcatcccaacgatttaggagaccgcggtgggaggatcgcttgagccccgaaatttgaaaccagcttgggcaacatagcaagacctccatatctacaaaaaaataaaatattagccaggcgtggtggtgcgcgcccgtagccccagctactcgggaggctgaggcgggaggattgcttgagcctaggaggtggaggctgcagcgagcctgatgttgtcactgccctccagcctggtgagagtgagaccttgtctcaaaagaaaaaaaaaaaaaagcaacccagagttgtgggaaagaactgagtgtcattctcaatgtttttaacctacgtgctaaccgcgcaccttctacctaggctgcgcgacctccgcgcccggatccatggcgccccctcttctcgactcccgatgcagagctccgatgcagagctcagcgccagccactcacaaggagcctggcaagttttatcgaattggtgaacgaagttcgaaagctctaccctyggagatccttattcagtaggtctgaggtagacctaggaaacgcgcattttatataaatcctacctctgacggcaaacg

SEQ ID NO: 835338 - DNA, 547 bp, Homo sapiens
ctcagaataatttaaggttctaatagctttaagttagcatgatttaatttcacacaatttaaaaatgacatcagccctttttccaagagaattacactttgtgaaatcccctctgtgctaactttaraaagattcaaatcttgactcagtctctggctcacagggtctcccatccatgaggcaagccaaggcacttgtatggccgggaaaacagagccgggaccacgaaacacacatctgctggacttcctgcctttgaccctgctccaacattcatggcgttgtcacactttattaacttataaaagctaactaactactaaggaaattcaatgccaccctaagaaaagcaaattgccagttattttgacatcagaagttgtttgaaagttctgtgaaaggaaagcccaactgtgatcttagggaaattaattttaagaaacataattttcaaaggtgataattatttttcaagaatattgctgaccattgacatctgaaataggcttttgggtttttttttttcgtgttttgtctttcacaaaga

SEQ ID NO: 835339 - DNA, 580 bp, Homo sapiens
gaaaataaaagagccaggagtggcacatgttatgaagatgtaccttgtgagacgtggacgtaagttggactccaggctttgctgcagccgctataccatttcagttgtcctgccaaagcccctgatttctgatgctaagaacaagaaggcagtgcttcaagggtcctcattaagaagccactgaaggatgtggtagagcgcctgtagtcccagctactcaggaggctgaggcgggaggatcgcttgagcccaggagttggagtgatcagtgagctatagttgcaccactgcactacagcctgagctacagagcaagacctgcctctcggaaggccgggcatggtggctcacgcctgtaatcccaccactttgggaggccgaagcgggtggatcacctgaggtcagaagatcgagaccagcctggccaacatggcgaaaccccatctctacgaaaaatacaaaaaattagcygggtatggttgtgggcacctgtaatcccaactactcaggaggctgaggcaggagaatcacttgaaccctgggggcggagattgcagtgagccaagatcatgccactgca

SEQ ID NO: 835340 - DNA, 574 bp, Homo sapiens
cacacaagagatcagttcctccaaggtcaggggacagagagcacagggatccagcgccaagcgcaaggcccccagaagaagccagagagtcggggagggggcgggggggaatcggtccsagcaggtgggaaggattctgggaccagacctaagggatcatgagcacagctgctgcaggcagacgggcccctggagaagctggggacaagctggaatagagacttcattgcgggaagggctgtcagggaggcctcctggggtggaaaagggtggtcaggaggctcctggaggcggcgcggccccgggggtccaactcacctggggcccggccaccgcgctctcgaccgccgcctctgcccgcgcagcacgggcacagctcgccagcactgcgaacccggatgggtccgtcgggcgcggccctcagcagagctgccttcacagatgtggtgcccaggtcaatgccgagggtgatcggccgcgcagccattatctccctgacccgcgcagctccagtctgcagcccagcggccccacaagtccgcgctcttcgcccaggggggcggggcaggggcgg

SEQ ID NO: 835341 - DNA, 628 bp, Homo sapiens
aaaactgttgggagaacactgtattagttcaatttcatactgctatgaagaaaataccccagactgggtaatttatmaagaaaaaagaggtttaatggactcacagtttcacacggctggggaggccgcacaatcatggcagaaggcaaaggaggagcaaaactaggtcttacctggcagcaggcaagaatgatcacgttcaggggaacagccctttataaaaccttcagatctcaggagacttattcactatcatgagaacagcatggaaaaaaaaacactcccatgattcaattattttccactgggtccctcccataacacatggggattatgtgctacaattcaagatgagatttgggtgggggacacagccaaaccatatcattccatgcctggcccctcccaaaactcatgtcctgacatttcaaaatacaatcatgcccttgcaacagtcccccaaagtctcaactcattccaccattaactcaaaagtctacagtccaaaatctcatctgagacaaagcaagtctcttctgactatgagcttgtaatatcaaaagcaacttaattacttcctagataaaatgcgggtacaggcatttggtaaatacacctgttccaaatg

SEQ ID NO: 835342 - DNA, 544 bp, Homo sapiens
ctcatccacaaatcaatggggttcaatgtaggtttctaaggatccctcccacagcaaaaatcttaatatccttcatagaaactggtggcctcactagaacatcagtctgtttgcttcttaactaatagtcttccattcattccacaaactattactatatgccctcctctgtacaaggtgctggggcatatagtaaggaaggatggttcccacccacgtgagactcaaatgtggggaatgtggggatttgtactgtgttcagaagtctttctttttcttctttcttttatctctctctctctctctctgtctttcccctttctttttcctctttctctttctttcctctttctctttctttcctctttctctttcagacagggtctcactctgttgcttgggctggagtgcagtggtgcagtcatggctccctgcagcctcaacctcccaggctcaagcaattctcccacctcaccctcccaagyagctgggactacaggcacacaccacaatgccgcactaatatttgtaattttttgtagag

SEQ ID NO: 835343 - DNA, 596 bp, Homo sapiens
aaatacaggctgccagttcaatttgaatttcagataaacgacagggaatattgcatggcacataattatacaaaacaatcatctgttgtttatctgaaattgaagtagaactggrcatcctatatttttatttgtgatgctgacaaccctatactagtacctatctcgcaatgcatgcgaaataccatagtacctggtatatgctcatagtaattacacgtagtaaatgctcaataaatactagccattatttctattattataattttcccattgttaacacttattagtacgtaattattattgttgtgatgactatgtatattccaagaatgggtataccttttttatttaaccattcttttgaggctattctagcttgtaatttttttttagtgtgaataatgtcttgtatttatagtcccctgtttccttttgggaaaattttttcatgataaattataaacagtgagccctaattgctttctggtagatctatgttagttagtcctgctacatgtcaacagtaaatccgctagcattaggtgtataatgtgaacaaaaggttgctaatttaacatggtttaaacagctgc

SEQ ID NO: 835344 - DNA, 599 bp, Homo sapiens
tggttatttagtaatgaaaaagcagtgtgttcagctgcattgtaactatccagtctgtggatgtgcacagtctgttttctctgaagttatagggcccaagagggaatacgcatggcaggcctgcctagtgcccaccaagccacgctgtagagatagttctttattgtgtgtacagggtctgccaattaacaggcataattttaaaaaataattgaattgaatgcccttaagtgggtcacaggctgtccatttctaatatctgcctcctcgtccccaccacatacatgtacactttgcttatcacatttttgggacatgcctgcctattgaagacatcttagtttgtatcagctgtagcactgcagaaccattaaaagagtttacgctgaaaattcaggtgagttttatcccttaattaggtattctggagacaggataaacattgattggagaggttatagtaggggatgccagttatttgctcrccatatatttattgagcatctactaagtaccaggctctatcctaggtatgtacaaatgtagatacctagacacagtattgtacatacagtagggaatgaaacagaaaattaaaa

SEQ ID NO: 835345 - DNA, 623 bp, Homo sapiens
ggatctgctcttctaccttgcttctactccttaccacctgagtacttgagaaattcgtgtaaattctctgagacacrgttataattcatatttcttggggttgtaagtgctagttaagtatgtatttgaatgttcctagcatattacatggcacatagaaagtgataatacaagattcacttggcattatgcatatatgttcaatgaatcttaattctcattttgattgtgcagacttcaaacatcccatatttctttttttttttttttttttgagatggagtctcactctgtcacccaggctggagtgcagtggtgcgatctcagctcgctgcaacctctgcctccccgattcaagcgattctcctgcctcagcctcccgagtagctgggactacgggcacgtgccatcacgcctggctaattttttttgtattgttagtagagacagggtttcactgtgttagccaggatggtcttgatcacctgacctcgcaatctgcctgcctcggcctcccaaagtgctgggattacaggcctgacccaccgcgcctggcctcatatttctttttagtctcagttttgatgattttattgcacttttagatgcttcagagaatagat

SEQ ID NO: 835346 - DNA, 623 bp, Homo sapiens
ggatctgctcttctaccttgcttctactccttaccacctgagtacttgagaaattcgtgtaaattctctgagacacggttataattcatatttcttggggttgtaagtgctagttaagtatgtatttgaatgttcctagcatattacatggcacatagaaagtgataatacaagattcacttggcattatgcatatatgttcaatgaatcttaattctcattttgattgtgcagacttcaaacatcccatatttctttttttttttttttttttgagatggagtctcactctgtcacccaggctggagtgcagtggtgcgatctcagctcgctgcaacctctgcctccccgattcaagcgattctcctgcctcagcctcccgagtagctgggactacgggcacgtgccatcacgcctggctaattttttttgtattgttagtagagacagggtttcactgtgttagccaggatggtcttgatcacctgacctcgcaatctgcctgcctcggcctcccaaagtgctgggattacagkcctgacccaccgcgcctggcctcatatttctttttagtctcagttttgatgattttattgcacttttagatgcttcagagaatagat

SEQ ID NO: 835347 - DNA, 614 bp, Homo sapiens
acagttgtttacccatgtatgtaggtgtatcagtccattttcatatggctataaagaactggctgagattgggtaatttataaaggaaaarggtttaattgactcacagttctgcatggctgggtaggcctctggaaacttacaatcatggtagaaggcaaagggaaagcaaagcaccttcttcgcaaggtggcaggaaggagaagtgccgagcaaagggtgaagagtcaccttataaaaccaccagatctcatgaaaattgactcaatgtcatgagaacagcatggcggaaactgcccccccacttgattcaattacttcccatcagatttctttccataaaacatgtggggattatggggattacagttcaacatgagttttgggtggggacacagccaaaccatatcagtgggtgttagctgtaacattcttttcactactctataggttcaaatttttttaaaataaaaaattggtgtaaaataaataaactaagctgagattaggaccatcctcaactacttggtaggagcaaataaactatgcctgaatgaagagataaatatatgaagtacgaaattacttcatctgtatctcagctgtcactcaca

SEQ ID NO: 835348 - DNA, 614 bp, Homo sapiens
acagttgtttacccatgtatgtaggtgtatcagtccattttcatatggctataaagaactggctgagattgggtaatttataaaggaaaagggtttaattsactcacagttctgcatggctgggtaggcctctggaaacttacaatcatggtagaaggcaaagggaaagcaaagcaccttcttcgcaaggtggcaggaaggagaagtgccgagcaaagggtgaagagtcaccttataaaaccaccagatctcatgaaaattgactcaatgtcatgagaacagcatggcggaaactgcccccccacttgattcaattacttcccatcagatttctttccataaaacatgtggggattatggggattacagttcaacatgagttttgggtggggacacagccaaaccatatcagtgggtgttagctgtaacattcttttcactactctataggttcaaatttttttaaaataaaaaattggtgtaaaataaataaactaagctgagattaggaccatcctcaactacttggtaggagcaaataaactatgcctgaatgaagagataaatatatgaagtacgaaattacttcatctgtatctcagctgtcactcaca

SEQ ID NO: 835349 - DNA, 642 bp, Homo sapiens
tgccaatcacagtcctggctccagacccaaaaatggccctgttcccctgtgtatttggctatagtcacatttggcattggccctactaaaagaactatctactaagagacccaaaataagtcaggcccacttgtgcctcaaatgtcacacctgcctatctcagtcctgactgtggagaaccccgaaatggttcagtaacttggctccagccctacttagtagttctgtacacacagggactttctgagagatacacttgtctgtgctgctgaaacatatttgctgaccttgatgccagcagatggcaaaacatttctgttattcaactatggcctttctcagctgccctctgagagtagttctgcacaccagggacctgaagggagatatgccaatctgtatccctgtgcacactcccaacaaccttagtcccacagtaggtcatgaaacagttggataacttagctccagcccctctcatctatggactgagacatgttttcctggcccagatgcccagagagaaatamactagtccatgcccccagaggaagcctgcagatccaaatataagctgtagctgaagccggcttttgactcagttctagtccctctcatttgcagtctggggctagtaatacc

SEQ ID NO: 835350 - DNA, 594 bp, Homo sapiens
ctgtgtgcaggccagtgggaggatttgcgaagaagctgtttttatttggctgtctcagctgtttgagcagaagtatgttttttaaacaggttgytggaaggttcacaaagtaattggaaggcctagcatcttcctactgcaccaagtctgggcttccaagaacagtgacccaaactgcactgcagaactggccttacaatgaacccacaacccgttgtgcttccccaatgagtgttacagggaatcctactgttaactgcctcttctcacgaaacttgagcttgcatcccttgcatccactgtgtatcttccaggctaccacaatttccactgaaagaaagaggcctctgctgtcacctgagcctagcgagggaaggaggagacagagaaagagaaaggcagagagacagaaagattacaagagagagacatggaatctatagccttttattttatgtttcagtagagtgtgttttacataaacatgtgttttttacaaatatagacttagttgtctgactatactatattttacacattttcatatccatagccatttatgtagttttaatatatatctccttaatttgacat

SEQ ID NO: 835351 - DNA, 624 bp, Homo sapiens
ggggcggaaaaatactctgtatttgcaattatttatggatgcataggaaattatctagaatgacacacaagaaacaaataatatggtttcctgtttggcaattgatagttctggtgagggctgggaagatggaagaggggtgggatgtcaacttttccttatgtgcttttttgtaatttttttctctttgaactaagtgaattattacctagtcaaaaatttaaaaccgggtgtggtggccagagcctgtagccccagctactcaggaagctgtggcagaaaaatcattcaaggttgtggtgtactgtgatcagggctgtaaatagccactgcactccagcctgagcaacacagaccctgtctgtctctaaaaaaaaaaggaaaacataaataatttttaaatgacaaaattatatataataataagcctgttttttcaactaataatatatcaaacacatttccctgcattttaaatctctttctaaaaatttyttaaaacttttattcattttttagcatttttaataaatttgtttatttctttgtttttaaattttaatctatttatttatttatatattttgaaaccaggctatgagactggctaatttttgtattttt

SEQ ID NO: 835352 - DNA, 581 bp, Homo sapiens
acagagcccagcataaagaaactaaagaataaaaaaactgaagagagatttcagctgttggttattgcaggtaagacagagtttggaacttaaatcaagttaaattaattaccctgtagaacattaacaactagagaattctttatcagagaaacacaccagaacctatagtatctaaaacatatctaatatgacatcaaaaagtataaagcacgcaaagagatgggaaatatgacaaaagagtaatttttataaagacaataggcatcagtctcatgaagatccaaattagtagttagcagatcacaactagaaagcagctactagaaacatattctagaacttaagaaagatatatgtttaattagccaacgtgtagtgactcacacctataatcttagcactttggaaaactgaggcaggaggattgcttgagcccagtaactcaaaatcagtctgagcaacataatgagaccccayctctacaccccaccgccaaaaaaaatcataaaaattagccaggcacagtgacacacacttctagtcctagttactcaggaagttggagcaatgaggctcat

SEQ ID NO: 835353 - DNA, 600 bp, Homo sapiens
tgagttttgttctgtggcttaacatgtggcttattctagagaatgtttcatgtactgatgaracaaatgtgtatgttgtaactattggaagaaatagtctgtaaatgcctattaggtcaacttggtctgtaatgcagattaaacccaatgtttctttgttgatttcgtctacatgatctgtccaatgctgaattggggtgttgatgttttcagctattattgtattgggttctatctttctctttagctacagtaatatttagtttatacatctggtgctcttattttggttgcatatatatttacaattgttatatctttttgctgaaatggcccctttgtagttgtaatataacctttgtcattttattattaatactattttatttaaattacattctatccaagtatagctatgcctgcatacttctggtttccacttgcatggatttttttttttcttcacttctttcagtctatctgtgtctttactggtaaagtgagttttcggttggcagcatatagttggatcttatatttttaattcattcatccagtctatattgtttagttggggaattaaaaatatttataattaat

SEQ ID NO: 835354 - DNA, 500 bp, Homo sapiens
gtgcttggtgtgtaccttcttgttcctttgactgcccaccttgctttcatctcaggtacagctctttcaggtgagagtaacagaaagcccagctcaactggcttaaaaagaagrtatgtgttgtcaccagtatctgaaaagtccagcagtagaaccggctacaggctcagccttatctggaaacattaacagtgtgaccaagacctgaccttttctgtctctcaccccatcttctaggcagccttggtcctcagacaagtaatggcaaaatgtcacagccccaggttctagttgtgtggatagagatgtgtgactctttgaataatccccaagtttcattatgtatccttgaaactgattgggtcacatgccctccatgaacctatagcctgaggatattcttattggccaggatattcttattggccagggcgaagtcatgtgctggggtgggtccccagaggggaaaatggagtgctataatcagaggatggaggaat

SEQ ID NO: 835355 - DNA, 472 bp, Homo sapiens
tcaagagtgctgctctacttggcaatatttgggggatggaagaggtgaaacccttcactgcggtactctacaatatatccaaattcagaacactctagcacaggccaacataggctccgatgtctcacttagcctcacagaaatatctcccagacctgcagacacagacaaatcctagacaagcctatgatgctttgattaatcactaatggagttgtccttgaagacagtattttaaattgtccctttgacatcctgcagtttttttacagctcagggcaatgcacaatagtaagattcaggatggataaggatgtgtctttcttttttgtccaaaaatgccattttaaagagaagatgggcaaggagactgtatctgatcattccaatctgttttcaggcagattttaagaatgacagtcgaggcacctggaaaytgattcccttccaagtctctgtgcaaggggtattc

SEQ ID NO: 835356 - DNA, 606 bp, Homo sapiens
cggggggaaagagtaggaggggggtgaggggtaaaaacctacctattggggacrgtgtacactgcacgggtgatgggtgcaccaaaatatcagaaatcaccactaaagaacttattcatgtaaccaaacaccacctgttccccaaaaagctattgaaaagaaacacccacctctttgccacacaattatttggcatagaccattgtttctgaacttcccttgacctggcttcatccccagaaggcacccatgaaaggtcagcatttgaatcatgctctggtccctggtgaacattcaagcctctgagctcatgtcatgagtccatggccatttttcagaagacaaactgcccagcaccagaatgtcaggcgtcatgtgctcaatcccaaacaaggatgtcaacaggatttcagatgcatcaaagctggggagagctaagaggatttactaatgtgacacatgcctcttagaaactgtgttttcttcctgcacttaagcccctaaaataaaataaaatagaagtcttaattttgaaagacacaaaattatctttctttgtgactaagatttctcaaagcggaaaacacaaggtcattaactaagaaa

SEQ ID NO: 835357 - DNA, 606 bp, Homo sapiens
cggggggaaagagtaggaggggggtgaggggtaaaaacctacctattggggacggtgtacactgcacgggtgatgggtgcaccaaaatatcagaaatcaccactaaagaacttattcatgtaaccaaacaccacctgttccccaaaaagctattgaaaagaaacacccacctctttgccacacaattatttggcatagaccattgtttctgaacttcccttgacctggcttcatccccagaaggcacccatgaaaggtcagcatttgaatcatgctctggtccctggtgaacattcaagcctctgagctcatgtcatgagtccatggccatttttcagaagacaaactgcccagcaccagaatgtcaggcgtcatgtgctcaatcccaaacaaggatgtcaacaggatttcagatgcatcaaagctggggagagctaagaggatttactaatgtgacacatgcctcttagaaactgtgttttcttcctgcacttaagcccctaaaakaaaataaaatagaagtcttaattttgaaagacacaaaattatctttctttgtgactaagatttctcaaagcggaaaacacaaggtcattaactaagaaa

SEQ ID NO: 835358 - DNA, 635 bp, Homo sapiens
gtggaaatgtaagaaggactcactgagaccagagagcccaccaygtgtgtgacagcatccctggaaacacgtgaaagaggcttctttactaaggcaataaaaatccactgatgacagaggcattagcacttttaagaagctcagtggccactgtcttccattggcctggactgacactagaaaatgctgcatagaactaggctctctagtaaattgatgtgacaggattcccacaaagcaagaatccctttggtcagagacgagaaagatgtgttaacataacaggcacacatggcttcagagattgacggtaatgcccattaggccatagtattcctgcggggggtaagataaatgggtagctggctagggtgtaatctgacttcaaaacagaaaaagtggagttctgatgagcaaaggtcaatgttaactgctgcaacagaaaatcactgttcctcctacagtttccagagttaagtcagttcacagacccaggacctattgcttccttgagagaaatcaatattcttccagtcctttcccaaagggatctgtggctacttcccagaataattgtatgtgtgcactcttagatatgagttctaggctaaaactgatgataagggacccagcat

SEQ ID NO: 835359 - DNA, 635 bp, Homo sapiens
gtggaaatgtaagaaggactcactgagaccagagagcccaccacgtgtgtgacagcatccctggaaacrcgtgaaagaggcttctttactaaggcaataaaaatccactgatgacagaggcattagcacttttaagaagctcagtggccactgtcttccattggcctggactgacactagaaaatgctgcatagaactaggctctctagtaaattgatgtgacaggattcccacaaagcaagaatccctttggtcagagacgagaaagatgtgttaacataacaggcacacatggcttcagagattgacggtaatgcccattaggccatagtattcctgcggggggtaagataaatgggtagctggctagggtgtaatctgacttcaaaacagaaaaagtggagttctgatgagcaaaggtcaatgttaactgctgcaacagaaaatcactgttcctcctacagtttccagagttaagtcagttcacagacccaggacctattgcttccttgagagaaatcaatattcttccagtcctttcccaaagggatctgtggctacttcccagaataattgtatgtgtgcactcttagatatgagttctaggctaaaactgatgataagggacccagcat

SEQ ID NO: 835360 - DNA, 471 bp, Homo sapiens
ttcatctggcagactgggccttttctgacaacttcagggcccagcttagacactggaatatgctttaaagtatacgacgatttgcctaagtcaaaaaaaggccaagtgtggtggctcatgcctataattccagcactttgagaggctgaggtgggaggatcgcttgaccccaggagctcgagatcacctgggaacatggtgaaaccctgtgtctaccaaaaaaaaaaaaagcacaaaaacaagaaattagccaggagtggtgatgcaggcctacagtcccagctactcaggagtctgaggtgggaaaatctcctgagcatgggacgttgaggctacagtgaactgtgatcgcaccactgaactccagtctaggtgacagagcaagaccctgtttcaaaacaaataacaaaaacacagaataaatcttctttttcmtcaggccccacatctccagtgtagacttgaatctcc

SEQ ID NO: 835361 - DNA, 474 bp, Homo sapiens
agataacaccaatagcaggaaaaaaacagtttggggagaaaagatgacttgtttaattcttggccttaagtctgatgtattgacaatgtagtttattcattcaagtggagatccatttatataataagaggttggaaaagcagatagaggacatacaaaatagacagtggttagaaagctagattttggaatgatccaaatggactcaaaaacatcttcagagcaggtaatatcagcaaaactttttttggtgtaaaaaaattaaagagagaggacagctgaagacaaagtgtttgggatttttttattttctgaaaaaaactctttttataataaggagaagagcattcagaaaaagacaaaaacaccgtgcttgaaaaaatkgagaaagagaatctcagaaatctgggaggtgtttggaggagtgaatggtggaaattgcctgtttccccctcctttcctcttcccagacat

SEQ ID NO: 835362 - DNA, 626 bp, Homo sapiens
agaaaatgaagggaagtgacgctgaagttctcctttcttcagaccttttattctcttaagatcctcaaccgattggatgatgccaaccacattggaatgggcaatttgcttcacttagtccattgattcaattgccaatcttattccaaaacaccctcacagacacacccagaagcaacacttaatctgggcacctatggcccactcaagttgacacacaaaattaatcatcagttgaagaaattttaatatttaataaactatgtgattcaagcaacgttatatataaacttgttttgtgatctcacaggctatatatgttatatatgaacttcctgttttgcgttctcactggtagcttgcctgttgatgtactttgaggctaccattttataaaggaagcttcctacatgatccaagtttgccttaataaagttataaatggcttattgtagatcaataaaaagtcaccatctgagaacacaaaattcrtaggctaacagtcaaagtgtttgaatggcattgagctattattacaaattgaagaaagaagataatattaataccataaactatcccacttgtataagttttagtgtaaaaaagaaaatgagagaggacactaa

SEQ ID NO: 835363 - DNA, 644 bp, Homo sapiens
taataattgctttaggccttaatgaaaagtgacatttgaacatcagcttgaaggaggtgatggagtkacccttttgggtatctggaggaagagcattccttgccaaaggaacaggctgggcaaaggccctgcagccaaagcatacctagcatgtttaaggaacatcaaaaagctggtagagggggagttaaattagcaagagggaaatgaaatcaaagatattatgagggctagatggtagagggtcttatatgccattgtaaggactaagtgacaagaggatgtgtttggattgctttgactgatctgacttccattttaaaaggatgttctttctggccgctgtagagaatagactaaagcagagtcaggatggaaggaaggagtcagcttttgaaaaaggtgagaggaagacttgggtggacgaggtggataacagtagaggtaataagaggtgataagatacatgaacattggatgtacttagggcaacagtatttgccgacaaatactggagagtgagaaggagaggtcagtttggcctgcacagctggaaggatggcgatgaggattactataggtagaacaagcttgggtagggtaagagctccattttggatgtgttgagtcctttttgacatcca

SEQ ID NO: 835364 - DNA, 597 bp, Homo sapiens
aattgtaaagttaaggcaatttctaaaatttctaaacacatgagacttttttgtattctttgatgctttgtgttaattattgaattttggtgagagatgatattctgtatgataatgattctttggtagagttgagatttcttctatggcctaacatctaaacaatttctcctaaaaatttgtgcttaaaaaattcctcaacttgctgggtgcaggtttccccatattctcattttatcacgcttattatgtgtgcataaaacattaaacttaatttttaacaattcttattgatacataatatttgtacatttttatggaatacatgtgatattttgctaagtgcatagaatgtgcggtgatcaagtcagggtatttcctcatgttctcacttataactgggagctgaatgctgagaacacatggacacatagagggaaacaacacacaccagtgtctgttggagagtggakggtgggaggaaggagaggatcaggaaaaataactaatggataccaagcttaatacctgggtgatgaaatcatctgtacaacaaacccccatgaaacatgtttacctgtatgacaaacccacaca

SEQ ID NO: 835365 - DNA, 530 bp, Homo sapiens
cagtacaactaaatatttactatttggccactctgtgtcatgcaattcakttttgtcccccaatcacaattccaactgtgactacattgaacttgatgcatttatagcttatatttgtaggataagtcattatcctattttctgaccttataggtaaacactttagagtttatatctgttttctaaaataaccacatattagggaccctgtcattgaccaagaacacacaaaaagtgctttcatgagccccgaagacagaaggcaaggcaagagcattgttccgaaacagatttctagtgttcatgtctagcagcttctttattttgcacttgaccctgatttaacttgttactcctggcttatttcttaaacttggctttataaactcgtgttgaccccttgtcagactccaaagggccagtttcttgctgtggttctctttggactcccgtccttgcgctttggccctcggtcgttttgtagacttacatactaccttcaaactcagacccagtggaggagcagctga

SEQ ID NO: 835366 - DNA, 610 bp, Homo sapiens
aattgtaggattctggctggatgctaaacgtgcagaattgtgtgtagggttaagaatgaggagttatagagacacagccctgctttcgtgtttgtattcggggtgggaaatgtgtggagaatgcatcctagtgagtggacctgtgtcaacacccacatgcccacacgcatgcgtgctcagccccttggtctgaaagggcaggctgagtgattgctcagtctatggaagtttaggaaattaggaaaaggtgtggagcagtttagtcattgaattctgggaaatttggaccttaccccaagatgaaagggtgtccgtagtgggtacgttgggaatgacctctgttttggggctagtcctcctaatgacagttcccctcacagctccctggcaggagtttgataagctcaccccaggccttcctgctcactcttgaggtgtggatatttcccacccagtgtcttttcttttctttttttttttgagatggactcctgctctgtcgyccaggctggagtgcagtggcatggtctcagctcactgcaacctctgcctcccaggttcaagcaattctctgcctcagcctcctgagtagctgggattacaggcgcct

SEQ ID NO: 835367 - DNA, 589 bp, Homo sapiens
agtggcgcgatctcggctcaccgcaacctccaccttccaggttcaagcgatttccctgcctcagcctcccgagtagmtgggattacagtcgcgcgccaccacgcccggctaattttttttgtatttttgtagagatggggtttcaccatgttggccaggatggtcttgaactcctgacctcaggtgttccgcccgccttggcctcccaaagtgctgagattacaggcatgagccaccgcaccctgcctaggaatcagtaacgtgtgtgtgtgtgtacgcgcgccaaagatttatttcttcatttcttgcatttcaagtactcttcgatgtcatccttggcctgagactccttgccatagtccttaactactacacaactgcaaccaaccactttacggggtttcccctctctgtcgatttttacagagccctacccattctcctagtttcttgttgtcatcaaccttaattaggttgatttggtgttcagcacaaaggcctccaccaacttgacatacatagtaggctcatcatagttggatgcaagcacacaaagatgggcttggcgtttgtctaaggctttggcagc

SEQ ID NO: 835368 - DNA, 589 bp, Homo sapiens
agtggcgcgatctcggctcaccgcaacctccaccttccaggttcaagcgatttccctgcctcagcctcccgagtagatgggattacagtcgcgcgccaccacgcccggctaattttttttgtatttttgtagagatggggtttcaccatgttggccaggatggtcttgaactcctgacctcaggtgttccgcccgccttggcctcccaaagtgctgagattacaggcatgagccaccgcaccctgcctaggaatcagtaacgtgtgtgtgtgtgtacgcgcgccaaagatttatttcttcatttcttgcatttcaagtactcttcgatgtcatccttggcctgagactccttgccatagtccttaactactacacaactgcaaccaaccactttacggggtttcccctctctgtcgatttttacagagccctacccattctcctagtttcttgttgtcatcarccttaattaggttgatttggtgttcagcacaaaggcctccaccaacttgacatacatagtaggctcatcatagttggatgcaagcacacaaagatgggcttggcgtttgtctaaggctttggcagc

SEQ ID NO: 835369 - DNA, 575 bp, Homo sapiens
tttcttcatcagcagcgagactggcatccctgtagctttgagaaaccatgctagtgtagatgccagctcmctccagcgggcctgactgggagaacttgggctggggttctggtctggggctcctaggcctgatgggaagagagttcagcccagctttcctgtacttcagctcgtatgcagacgatggccattgttgaaatgagagactcaaaggaagctggaacctgaacttttttgttgtctcgtggacacctgtgttcagtttcgggttctacctcttgctgtctgtgtgttcttaggtgactcacttaaacctttctgagtctcattgtcttcatttataaaataaaagacgtaacattgatgtcagatattgtcctgagcattaaatgggagaataagcaagcctcttctgcattcccctggcttccagtgggtggaggccagagaagctgctaaacatcctgccaggtgcaggacagaccccatcgcaaagaattgtctggcccctgatgtcagtaatgcagtattgaggatccttggtgtgggggaaacagaataaactcagaagcttg

SEQ ID NO: 835370 - DNA, 514 bp, Homo sapiens
cacacagtaatgctgtgacggggcggagctcacactaatgctgtgacggggcggggcttacacactaatgctctgacggggcggagctcacactaatgctctgacggggcagggctcacagtaatgctctgacagggcggagctcacactaatgctctgacggggcggagctcacactaatgctctgacggggcggggctcacactaatgctgtgacggggcggagctcacacagtaatgctgtgacggggcggagctcacactaatgctctgacggggcggggctcacagtactcctctgacggggcggagctcacactaatgctctgacggggcggagctcacactaatgctctgacggggcggggctcactaatgctctgacggggcggggctcacactaacgctctgacggggcggggctcacactaatcctctgacggggcggagctcacactaatgctctgacggggcggggctcacastaatgctctgacggggcggagctcacact

SEQ ID NO: 835371 - DNA, 591 bp, Homo sapiens
tgttattcctttttttggctgagtattccattgtgtgcatataccacattttgtctattcctttatctgttgatggacaacttggattgtttccaactcttggcgattgtgaataatgctccaatgaacatggtgtccagtatctgttcaagtccctagattcagttcctttggatatatacctaggagtggaattgctgggtaatataacattcttcacttagtatttttgacaagcaaaaaagcaacatagcatctgcaacattttacattcccaccagcaatgtacagggttccaacttcacatccttgcaaacatttattattctgttttctcaattatagccatcctagtgtcaagtggtatctcttttattatctgatgcctgggctattataatctcctaactacttatttctgctttaatatttctttcttaatgtatctagcacaataatgctatattttcttaccttgaaaaacttactcaccagtaactttcaatggctctttattgttccttgaaaaaaagtctraagtctactagcttgcaaaactttctattttcttggcctcaatctaccttagta

SEQ ID NO: 835372 - DNA, 539 bp, Homo sapiens
catatctccatttatagttaactatttactttctaattytcaaattgaagctgcggtgctattcctttccgttggaaatccttccactatgaaattggtagtggaagagcttggtcatggagtcatctagtcttgcatgtggactctggagccactacttgttgctttctcttcgattggctccttggtctctttgagccttcgtttgtccacctgggatagaaatagagattaaacatgattatttaataatagacacaaaacatagtgattcttccttccctatcttccatggccttctctcaaatgtctcttgatttttttggataaatgtcttctctctctccatcagcttcttcattgcttcattggtaaataaacatatttatatttcctatttctgaaaaacaattaaaaatttaaagtggggtcttcttgtttatgtttctctttaagccattcctccattgcccccttcccactggctgccatatttcttgaaatcatattttcacggtgccactctccacatttgctta

SEQ ID NO: 835373 - DNA, 539 bp, Homo sapiens
catatctccatttatagttaactatttactttctaattttcaaattgaagctgcgrtgctattcctttccgttggaaatccttccactatgaaattggtagtggaagagcttggtcatggagtcatctagtcttgcatgtggactctggagccactacttgttgctttctcttcgattggctccttggtctctttgagccttcgtttgtccacctgggatagaaatagagattaaacatgattatttaataatagacacaaaacatagtgattcttccttccctatcttccatggccttctctcaaatgtctcttgatttttttggataaatgtcttctctctctccatcagcttcttcattgcttcattggtaaataaacatatttatatttcctatttctgaaaaacaattaaaaatttaaagtggggtcttcttgtttatgtttctctttaagccattcctccattgcccccttcccactggctgccatatttcttgaaatcatattttcacggtgccactctccacatttgctta

SEQ ID NO: 835374 - DNA, 326 bp, Homo sapiens
tcagcacttttagttcttgacaattatcatgcagaaatatctactcatgtgtataatgatacrtacacaagggtgtccaatcaatactattcatgaggtcaaatggagacaatctaaaaatacttaatagaggaagttacaaattaatgtggtaaatctatacagtgtagttctatgcagcattaaaaagaaccatggatcaaggcaaaattttcaagacatatttttaagttcaaaaagcaagttacatggcaatatgataacatgtttataaaataaattgtgagtgcatgcaaatgtgcatacaaaatagacaaagtcagaaa

SEQ ID NO: 835375 - DNA, 627 bp, Homo sapiens
gacatattgcatattaatatattagtattaccatattaatatataaatatgtgctaatttttttctatttttggtctattagatctctcatttttaaataaaaataagttaaaaatcaacttatgctcattttttcttcttgtagctctacatgatgttgttaggttcatataaggtcatgatcatgaatttttttggtggattgttctttataatattgagttatccctttttatttaactggttttgtctttgattctgaattgtctgatcttaatattgctaccatcacttttgtttttattgcatgttttcgttgctcatctgttatcctttaatccagtggatgtgtatatgtctagtatatgtgacttggggaatatctttcttaaggagtatataatctctttacttatctttcattcttctggcttttctcatttgtgccctcaatagcacttatcatacttttggtcataaccattctctcttgtgcattttctgacgtaatctttatttctaaggtaatgtcctctttttctttagtttccttcmtgaattttgtcagttcctgctctttttccttctcttctctgagcttttgcatttctgttccttgtgttattt

SEQ ID NO: 835376 - DNA, 608 bp, Homo sapiens
taatcttagtgtcatatccttcttctaacaaacccctttcctcaaaccccattcttttgttagtattccagttttgtacttataacaggaggttgttttgcagatttaattttgtaatttaatttacatttaattttatggccaagatcaagtgctatgagatcatcatcaagatttactgtctcaattgtacaatctctgtaaaatgatttgtgaagcattctatctttttatatgctttgaaagaatttaaacgctatggaaactagaaacttcttcaaaatttgaaagaacgtatctgtaagtcatttggcccgtaagcatattttagaaaaaagtgttggacacatggagaggttttaagtttctttgtccattattattaagctattcaggttttctactccccgttgaatcaatcacagaaacatccattgggaatttttaagttctttagtatagcattataaacaatattttattctaattaaaaatwtgaaatctgttaaactcttctcatttgtaattttgcccattaaatgtttctgttttatttattagacctatacttattttttatttttcctcaaagaactagctcctgtata

SEQ ID NO: 835377 - DNA, 526 bp, Homo sapiens
taaaattaggtttttataaacagtgcatttaatgaagcatattagtccttttccatattaaattggattatcacattttttcttgtttgttttaatgcctcaggattcaagactgaaatcaatcatttactgatccagattaaagtctgtatatatagatatatacatgtatgggtttaccaataatattgataaaatattctcatgaatcttttgtgaagcaatggaaaaacactgaaaaggcttatattcactgtctggagaaatgagatccaaccacaagcgtataagcaaagtagacacaaaagtagggcaataatagcattttgattgcttttgctaataaacttttccatttccttaaaacaaaaagattgttagttcattttaatgtggcatttctgatgcttacaaagtattatgtgctttttagaagaaaaawttccttaaaatatagatatgtgcaatgtaccactttctttcatgcttgctatttctaaaacccaaagagagagtagactgactg

SEQ ID NO: 835378 - DNA, 659 bp, Homo sapiens
acatatacatatatacatatatagttttataattttagtcttatagttttagtttacaattaaaaactatatctatatataataggctatatctatatctatatagactaaaatatctatatattatatatagatataatttttaaattataaactaaattggttaaaatggacgttttaaccatgacacagagagaaataagttttatatttttcttttagcacttatgctaactctcgtgtcactaagttaagacaaatagtgctggaaatatagtaggaaatattagaagagagagaaaatacacctgattttatccagttacaggttatcaaatggttttaaagtaattcttctggccaagtttctagaaaaaattggtttttttttccttgttttccttttcccttcttttcacaagtgttgaaaattgtttattatacctaccattgctcctagatatatttttattgttaatcaattaaaaatgtatttagggtaagtacaggaagaagggatcaaattacaaagtgtctttcttggatcctgaaattgatggtgaccctaayacaagttaacgatcatcctagccattctttttctttaaaattgggtatagtttcagggtactgtgaagggtatgagaagagtaaaaata

SEQ ID NO: 835379 - DNA, 616 bp, Homo sapiens
tctgttttatgtttctttacacaatattatatacacacatgygcacacatacacacacacatatgtatgtatatttcctatttgattaactacacattcacttaactaaattgttggctttttccatatttttccacctggtatccaatggtattttaaaatatatattaaaaattctgctggaatctaaatatattgttttgacattctctgatatgccagtaaatcttctcaaaaaagaataatgaggcccatttgcaattacttgtttcctatgaatcaatgcttttttccagtaataactacttctttcactacaatgtcttatcaagccatctgcatctgcataatcaacttcttaaaattttttaggagttgtattgagcagattagtctctagtacagataaaaactcttttttcttcattagatcctttaagaatattccacttgagtaccattttcattccatcaaattttccaaaattattgactatggttctggtgtttttagtactctgaaacagaattcccttgaacatgaagacttgaactcatttggaagcataaaattcatgcaacagaagcatagaataagaagaatcacagaggcaga

SEQ ID NO: 835380 - DNA, 656 bp, Homo sapiens
taaaatatatattaaaaattctgctggaatctaaatatattgttttgacattctctgatatgccagtaaatcttctcaaaaaagaataatgaggcccatttgcaattacttgtttcctatgaatcaatgcttttttccagtaataactacttctttcactacaatgtcttatcaagccatctgcatctgcataatcaacttcttaaaattttttaggagttgtattgagcagattagtctctagtacagataaaaactcttttttcttcattagatcctttaagaatattccacttgagtaccattttcattccatcaaattttccaaaattattgactatggttctggtgtttttagtactctgaaacagaattcccttgaacatgaagacttgaactcatttggaagcataaaattcatgcaacagaagcatagaataagaagaatcacagaggcagatgtaagcagcaccctaatcaatggccaagtgagaagagctctgtcatgtcagtgtctatttgtatgtatcagagacaaaatccaataaacccttgaaaatataaataacsttttcatgttttgattccatgcttactatgaaatctgattatcacacagctttaaaaactatccctagagctggaactagagcatt

SEQ ID NO: 835381 - DNA, 487 bp, Homo sapiens
aactgtctgagccaagaatagcctaagaatgcatgatgactaaatacaatgtggtaacctggatgagatcctggaacaaaaaagaaaattaagtaaaaactaagaaaatttgaattaagtataaacttttgttgttaaaaactgtgtcaccattgatttgttaattgcaacaaatgtaacttatataatatattcataatagggtaaactgtctgaagggagtgatggtatatctgtaccatctgtaccatgtataactctgtactagtagcttaatatttttaatatgtttggtaaatctaaataactctaaaaatacagtttattaaacataattttttaaaataaagtgtrttaatttaaaaaatctcaaaactcaggctgtaccctagacaaataaaatctgaatttctggtgttgagatccaggcaccagtattttttaagctctgcaggtgattcccgtgtgcagccatggttgagaacaa

SEQ ID NO: 835382 - DNA, 492 bp, Homo sapiens
tgtagtttgtgtttaatgtttcttatgatgtgtccattgttgaacatgagattttgaagttctctattattattgtattatcgtctacttctccgctcatagctatttatatttgctttatatatttattgctgatgtttgtgtgtatgtatatatagatagatagattagatagatataattgttatatcctcttaatgaattgacttctttattactacataattatcttctttgcctcatttgacagtttttgacctaaagtctattttatctaatataagtatggctaccctgctcttttctggtctccatttgaatggactatcattttccatctcttcacttttagtctatgtgtgtccttaaaggagaaattarcctcttacaggcagcatacagttaggtctttcgttttgtaaatgtattcagccactctaggtcttttgattggaaaagttaattcatttacattcaaggtaattattgtta

SEQ ID NO: 835383 - DNA, 489 bp, Homo sapiens
ttacctccatctagaatcagattttgttctccactgcagaaaacctgctgaggccttcccgtcacattagaataaaacccataccccttattctccagtctgaggccttctgcctctccctgaaattctctgtaccccactcactctctctgccccagccacactggccttctctttattctttgagcacaattgcactaggtattctctcttttgaaatgctcttcctacaaattattctttgcctgtctccttgacattcaaggctcagccctctgttgtgcttctctgactcttgtctgaagtatccatattccagggtactctccaatacaaaactgtgttctattttctacagaccacctatcaccatctaaaaccttcttscttatttatgtacctgttgtgttgtttgttccctcactggaatacaagttccatgagtgcaagaccttaatctgccttatttcctgatttgagttcctatca

SEQ ID NO: 835384 - DNA, 591 bp, Homo sapiens
ttaatgtataagtagctgctaacacmgtctagcacaggtgatatcctgctctctgtggtctctgtaaacatgttttgaagttatccactatttccccaagtcatcttctgagccatcacatttcaaataaatgcctttgaaaatagggacctactgtaaattattcattccttctcttttggtttggtttatgttgctgctgaaatataaatctgaatttgaattccacaattacaagaaatggcaatatttgacaaaaattatactatcaaattaggtattttcttaataaagaacaatattgacaaattttaagcagattaaagagctgacaaaactgttaaattagtataaaatgggattctgtttattgattgattgattgataaatagccttggaggaaggagatcttaacgatagttacaaagggcaatggctgctgaaaacagttaagcctttgtaacaatttagacagacatatatgtatggacatggaaggatatcgtatacatgtcgctaagtagaggaagtaaggcatagaatatgtattagttgtacacacacacataatataggtgtatatatgtatc

SEQ ID NO: 835385 - DNA, 454 bp, Homo sapiens
agtagcaaaaatgatataggagctgaaataatgtgagatctatacatttcctgggagatttttgttttgggacatgttatgagaattagagtattagattctgttctattgattctgccaatagttatggttgcacagttttaccatgtctttcttttgctacctttttcttcatcaataacttaaatctactttgttactgattctattttgtggtttacgattatgggaataatgacagcggtgagtatatgagccaccatcttaattttgggtataccacagtttagtggagagagtaagggataggtgtcagatctgaattcacattctgtctctactgcttactagtgtgagaccttggaccacttgtacaactcctctgaaactctagcctttcttctgtaaagttggcataagactacagactaggasgtccagagaatgtaaataa

SEQ ID NO: 835386 - DNA, 591 bp, Homo sapiens
catcaccatctatctagcttaagtcaaacacctagatgttgtccttgacccttctctttaacctgcctcatccaatccatcagcaagtttgccctactctgtttctaaacatcttatcccaaatatgtccatttgttttctactccatagttaccacctcaatccaagccaccagatatatttttaaaaatctggactagtgcaataacttcctagctgtttctcttacgtctatattcatatcctttgattatatagcagccagattgattttttaaaagcataaattaaatcatgttatcccaccccctgcttaaaactctctaatggcctctcatttcactttgaaaaattctaagcacctcacatttttatacatatacataaaatattttattcacaagtaaaatatatcactactagacctttggatatacattaaggaatccatttcactacaaattccttgggtttatatttttaatgtttattttttctgtrcaaaattggcaataaagctcaggaaagttactatgattgctattatattatcagctgaatcctatcacatctgatgtctttatatcagat

SEQ ID NO: 835387 - DNA, 586 bp, Homo sapiens
attcaaaaagcctctcttctagctgttttgcaatatgcaatgttttcctgttaaccacagtcaccctagtgtgcaacagaacacmagaattcattggttcaatctaattgagactttgaacccgttgaccaactgctccccaccttcctaaccccttcttctccccaatctctgataaccactgttctactctctgcttctattatatcaactttttttttttaaagattccacatatgaatgagatcacatggtatttgtccttctgtgtctggcttatttcatttaacatgacgtcctccaggtttatccatgtagtcacaaatagcaggattccatttgttatggctgaataatattccattatgtatatataccacattttctttctccatttgttgttagacacttacgttgattccatatcttgacttgtgatagctatacaataaaacatgggagtgcagatatctctttgaaatacttatttcatttcctttggatacatactcagtagttgaattactggatcctatggtagtgttttttttaaatgttttgagtaacctccatacgtttttctata

SEQ ID NO: 835388 - DNA, 584 bp, Homo sapiens
cttacaggaaaagatttcaggttttccccattcagtatgatattagctatgtatctgccatgtatggcttttatcatgttgatgtatgctctatacccagcgttttgaggatttttatcttgaagggatgttgaattttatcaaatgctttttcagcatcaattgaaatgatcatatggtttttgtccttcattctgttgatatgatgtattacattgattgatttttatatgttgaaccatccttgcattcttaggataaatcccacttggtcatgatgaatgatctttttaacgtgttgttgaatttggtttgctagtactttgttgaggatttttgcatcaatgttcaccagtgatattggcctatagttttcttttttgatgtgtttttgtctggttttggtatcagggtaatactggccttgtagaatgagtttggaagtattccctcctcttctattttttggaatagtttgagtaggattggtccatgtaatttataygacagaactcgaaacttgatattatcacttccatttaacagacgaatatattaagccattatgtaattaaactagccta

SEQ ID NO: 835389 - DNA, 584 bp, Homo sapiens
cttacaggaaaagatttcaggttttccccattcagtatgatattagctatgtatctgccatgtatggcttttatcatgttgatgtatgctctatacccagcgttttgaggatttttatcttgaagggatgttgaattttatcaaatgctttttcagcatcaattgaaatgatcatatggtttttgtccttcattctgttgatatgatgtattacattgattgatttttatatgttgaaccatccttgcattcttaggataaatcccacttggtcatgatgaatgatctttttaacgtgttgttgaatttggtttgctagtactttgttgaggatttttgcatcaatgttcaccagtgatattggcctatagttttcttttttgatgtgtttttgtctggttttggtatcagggtaatactggccttgtagaatgagtttggaagtattccctcctcttctattttttggaatagtttgagtaggattggtccatgtaatttatatgayagaactcgaaacttgatattatcacttccatttaacagacgaatatattaagccattatgtaattaaactagccta

SEQ ID NO: 835390 - DNA, 513 bp, Homo sapiens
acatttttctcacataatataggattttgaaattgctaacaattattactgatcagaaatgagaagcttgtcataatatgaartgaagcctattgatatgatttgcaactttaatataaagcaaaagcgaatctcaatgctttgagatgacactgactgtaaagcccctcatcatctcatcattcagtaaaggcattctatggggataattgtggagactgagaatgaatgagagaaataaactcggaacaggttattgttgttttctgaaggcaggtataatttcaatttataagaaaatcaatgttaactgaatgatgagtttatcttcttttcaaaagggataatatttagtattaaaccttcattgttttaattcaaataatgctggtcccctgatcttttatgcagaaaggactgaatccctaaaccttaattcaagtgttgctatgtattcccagtagtcttaggcaaagatattcaacctccatgcctcattttctccatctgtag

SEQ ID NO: 835391 - DNA, 651 bp, Homo sapiens
ttttacctactttacctctcataatgttcaaaatgaccctttgaatgagaaagtaaaattttaaaaattcgaggaaaatgttattcagatgacattacacatattaataaatgtcagaagtagaatttaataccagggatgttgggctaacagtcctttccattttcaggatgtcattataattccataaaagaagatcctagctattttgatttggtctggaaagtgaactagaatcagtgattgtacactatgaagacaaattttgattccatatgcaaaactatgcaataaagaggtgtggtgacaataaaataagagataaggtcaagaatcttgatttaaaaaaaaaaaagaaaacaactctaaggtactaagtcagctgacatatatacttcccaaagaaattcctgaagcactttcccagaatacattaatggataggtaaggtgtacttacaaatggaacaaagcaacacacacattcgatcaggtagaattatcataagaatttaaattcattatgtgtcgtgaaaattgattataggaattggagttattcttrtctaatgcaattagatttgagttgagggaccagggaaaaaatcactcaggtacaaagcacctgctccaggaactgtttcataaaccc

SEQ ID NO: 835392 - DNA, 608 bp, Homo sapiens
ttcaaaaaatatcaaattacatctatcgtgaatattaaatgactgttatgaacctacattggaacttatagatmtgcatgtgcaagcaaacagttactttttagttgcgtacaatgtggatacataatgatgcatgctgagaatatgggctttcttcactgaacacaattaaaatttcacatgtatgcaaaagaaaggaatgaaaaataagcagataattggggtgaattaatgagcaccttattaatttcaatgtactcttttaaccttaaaatcattgggtacttcagattttttttatattatactaaaatgtcacttaaaatcaagtgctattttttaaatataatgatctgcgttcttcttaggcatataacggttttcacctcaactgaatagcttctcttaatctataagaatttactcaccaattaagttaagaagtttaatagcttctaacttttactcatgatagaaaagtcaaggtcctgattaagcaaatatggagctgtaatttgattcttcaattttcaaaagagaaaatagattcagaaagttatgtagcatgccccacatgtaaccacccaacaggttcacgttgcctgctg

SEQ ID NO: 835393 - DNA, 530 bp, Homo sapiens
atggaggccctctgctcctacagactgctcacaattacctgccctgcagaccagttcatagttcatagttcatatagcagtttacaacatggctgctcatctcttcaaagtgaaggagagagagagaaatagagaatggggaggagaaggagaaagagactagcaagacagagtcttatataaagtaactgtattagtccgttcttgcattactataaagaatacctgaaactgggtaatttatatagaaaagaggtttaattggctcacggttccataggctcaacaggaagcatggcttggaggcctcaggaaacttacaatcatggtggaaggcaaaggggaaacaggtacatcttcacatggccagagcaggaaggagagagagtggggaatggcgctacacacttttaagcaaccagatctcatgataastcactcactattgtgagatcagcaccaaaggggaaatctgcccccatcatccaatcacttcctaccacagcccacctctaacattggggatgaaa

SEQ ID NO: 835394 - DNA, 520 bp, Homo sapiens
gggttatggttgttgttgtttttttttttttttwaatggtggtgtcctaactcaatttgtagtcattcctgctaagtaagaaaagagggatggagtcaccttaaagctaatacccagacacctccttctacataaaggagagcaaaagaaaggcaaggctatgaaattgaacctatgctcttcctcagctctcattttaaaccttattggccagaccttattaattaaaactaatttatttatctatagaaagatcagctactggcatgtaatagttcctcaaaccgactagaagatacgtgagtcaaccaaaatacacaaatcaatcattagtggggatgttagggcttcaaccaagctcagtcagttgaaagtgtggttaattcaaccattcctggatgcctcacaacatctaccttggtaaaaccttaaaaacatttcaacaaatttctctgctatttcttttttaatcctgagtgcctcttgttcaatgattatctctgcatatcattgaaaacat

SEQ ID NO: 835395 - DNA, 520 bp, Homo sapiens
gggttatggttgttgttgttttttttttttttttaatggtggtgtcctaactcaatttgtagtcattcctgctaartaagaaaagagggatggagtcaccttaaagctaatacccagacacctccttctacataaaggagagcaaaagaaaggcaaggctatgaaattgaacctatgctcttcctcagctctcattttaaaccttattggccagaccttattaattaaaactaatttatttatctatagaaagatcagctactggcatgtaatagttcctcaaaccgactagaagatacgtgagtcaaccaaaatacacaaatcaatcattagtggggatgttagggcttcaaccaagctcagtcagttgaaagtgtggttaattcaaccattcctggatgcctcacaacatctaccttggtaaaaccttaaaaacatttcaacaaatttctctgctatttcttttttaatcctgagtgcctcttgttcaatgattatctctgcatatcattgaaaacat

SEQ ID NO: 835396 - DNA, 595 bp, Homo sapiens
acagaattctggagctctttctctgcatagctctttcccgtctattactctgctagcaaattctacatytgcggcctctccaaacttcagtctgtctcttcaactcaatgatattactggactctggattctcactccttgtcccacaattctgaaactacgttgggaagaaatataggaagaacatggggctcactgcttattttccttctctctggaattataatcttatactagctattgcacaatttctgaaaacagttgattaatattttccatcttttttgcttgtagtggctgaacaagtcccatagtagaggactttataggcagaagtggaagtcaataatttatcctgcttgggattcactatgcttataaatattcatgctttttattatgaaaaattattggcttgttgaatattgcctttttcccattctctccttatgcaatatctcgtaattgttgggctttgatttaactaataatattcaggaacaactgtgctagatcttgttctaggcccttgggatgcctcagtgaccaaaaccaatattctgccctgatggaattcacattgtgtataacctgt

SEQ ID NO: 835397 - DNA, 488 bp, Homo sapiens
gttcttttatgtttttgatagtatattactaaagcttatcatgtatgctgattctcaattgtggcatgttgttttcttctgtattttgcaattttgtattatgaaatcttcagcagcaggattctattggcagtaattctatcgggattgaagatgttccttcaaagaggttttacatttacttcgccaatgctcagggttttacaggctttaaagaaagatattggtggctgcgcacagtggctcacatctgtaatcccagcactctaggatgccaaggtggttggatcacataaggccaagagttcaagaccagctggccaacgtagcgaaaccttgtctctactaaaaataccaaaaaaaaaaaaaagttatccgggcatggtggtgcacatctgtastcccagctagtcagtaggccgaggcaggagaactgaggccgaggttgcagtgagccgagattgtgcctaggtgacccagaaagactc

SEQ ID NO: 835398 - DNA, 488 bp, Homo sapiens
gttcttttatgtttttgatagtatattactaaagcttatcatgtatgctgattctcaattgtggcatgttgttttcttctgtattttgcaattttgtattatgaaatcttcagcagcaggattctattggcagtaattctatcgggattgaagatgttccttcaaagaggttttacatttacttcgccaatgctcagggttttacaggctttaaagaaagatattggtggctgcgcacagtggctcacatctgtaatcccagcactctaggatgccaaggtggttggatcacataaggccaagagttcaagaccagctggccaacgtagcgaaaccttgtctctactaaaaataccaaaaaaaaaaaaaagttatccgggcatggtggtgcacatctgtagtcccagctagtcaktaggccgaggcaggagaactgaggccgaggttgcagtgagccgagattgtgcctaggtgacccagaaagactc

SEQ ID NO: 835399 - DNA, 553 bp, Homo sapiens
cccaacactttggaaggcccaggtgggtggmtcacttgagttcaggagtttgagaccagcctggccaacatagtgaaaccccatctctactaaaaatacaaaaattagctgggcgtggtggcaggtgcctgtaatcccaatactcaagaggctgaggcaggagaatcacttgaacctgggaggcagaggttgcagcaagccaacatctgaccattgcactccagcctgtgtgacaagagctagacttagcctcaaaaaaaaaaaaaaaaaaagaataaaagaataaaaacccttcaaaatgaaaacagacctgttaataattccttttttttttttgccctgtaagaaagtatgttaagtttatttgtcttctggtaaattattatattaaaaaatatgacttcagggtcatccctaaatagttaaatatataatttgaaccctatatatttacctaaatatattccatttttggagtgtcaccttcatttattctagtcagggtcatcaatctccatcagggtttactttctactctctcattgggtatgcc

SEQ ID NO: 835400 - DNA, 572 bp, Homo sapiens
atgaagacccttaagactagctagtaaaagagtacctggtggctaagaacctataagccatgctgggggttgcaaaccaaacttattacagggacctgcacaaagcaaagactggggcctycaagtacagattgtagaaagttgtaaaattctgtttagtccaaaggggccagtcgcagttcatttagctagttctgcagccaataaacgcctagtgggaattcagtaccaggacactctcagatttttttttttttttttttttacttttcaagaaaaatcagaaattctcattttattttaattttggaagcaaatgtttatttttcccttaggcatataattctttcagaggctttaaagtttactactgtttttcccacaaagtctattcgttcagtctcctattagagttatatctgggcattttaaggttgtttttataatgttacatcttgtctaacttttttttcttccacttttcctttttcttcccctctttttggtattattatttctgctcttttcgctaagatgaaatataaagacatcagccttagaagaccagtaga

SEQ ID NO: 835401 - DNA, 598 bp, Homo sapiens; identical to SEQ ID NO: 826755

SEQ ID NO: 835402 - DNA, 586 bp, Homo sapiens; identical to SEQ ID NO: 826756

SEQ ID NO: 835403 - DNA, 613 bp, Homo sapiens
aagcaaaagtaaagtacagcatagggcaagaaccaaaaagtaagccacagccttcatctatttgtataggtatatactagtaaatgctgaagattctgagtttgagtaaccctggactactttagacttcaattttgttcatggagttcaaaagttctgcaaatcacgtttcatcataaatctgaagcaaagacagaggctcaaataatctggatagctctcaagggttctatattagaaacccaatattaacagtcacttaaagcttatgtcagggcccaaactaacattaaaagagcagagaactgtaattacctgcatctcaaaaaagttaagttggtttcctggaatccactgagtccataaaactatgttattccacactcaaaacatgcctttgttaattgttatttgccaaatgctagttaatttgttaccactacttagtaacatttctttggaaaactataaaatagatcaccaacattatcaaagaagacaggsaaaaaaagagggtctccctgtgttgccaagggtggagtacagaggcaacatcctagcgcgctacaggcacttgggctggagggatcctcccacctctggtggtgttttt

SEQ ID NO: 835404 - DNA, 613 bp, Homo sapiens
aagcaaaagtaaagtacagcatagggcaagaaccaaaaagtaagccacagccttcatctatttgtataggtatatactagtaaatgctgaagattctgagtttgagtaaccctggactactttagacttcaattttgttcatggagttcaaaagttctgcaaatcacgtttcatcataaatctgaagcaaagacagaggctcaaataatctggatagctctcaagggttctatattagaaacccaatattaacagtcacttaaagcttatgtcagggcccaaactaacattaaaagagcagagaactgtaattacctgcatctcaaaaaagttaagttggtttcctggaatccactgagtccataaaactatgttattccacactcaaaacatgcctttgttaattgttatttgccaaatgctagttaatttgttaccactacttagtaacatttctttggaaaactataaaatagatcaccaacattatcaaagaagacagggaaaaaaagagggtctccctgtgttgccaagggtggagyacagaggcaacatcctagcgcgctacaggcacttgggctggagggatcctcccacctctggtggtgttttt

SEQ ID NO: 835405 - DNA, 491 bp, Homo sapiens
tttgttttattatgcagataataaaatcttgaggttacatttacttaaaaaagttggagaaaataaaagtaattacgactatacacaaagcctgaggaaactcattttttccctggggaaagtaaaactaaataggagtaatttttaccataacaaggaagttttaataggttattcagatgtaggacacaagatattgattaaatcttttagaaagtgggctgtggagtatagtaggatcttcctgaaacttagtttaggagaatatagtgaaataaggtacaaaattgaagtattcgaaagaatagcgcagactttttgggttcctaaaatctttcatttatgtttgtaaattagtgtgtggaacttccgaatggcattttcccactgtccatttggagtacaataagacaaattaatasaaatcaaaataatatggcagcagcatcacataatttgtgtacactgatgtagtaacagatttaatttaa

SEQ ID NO: 835406 - DNA, 432 bp, Homo sapiens
gggtgtcattcagatcagctgacatcagtagtttcattggtatgcaggagctgaaagaatatctcaaagggaaaacttaagattttacaatgtttaagttgttatctttaaagcagttaaggggaacgatagtcttgtgataaggtctctgtgagtctgaggcaataggcagtggaccgctctgaggaagcaggttggagagcaagctgcctaatgattaatgctgaacatgctgcaagcatgatttctttttgtttctcctcttccttcttccctgattagttttataaaatttataggaatagtttcatcacctgtagaaaatattacaaatttgtataccttgttacagaagttgtttagagtggctgkcaaaggctgcatttctctctttcctagttagtagaggtgtttctgtgactgaggcctagc

SEQ ID NO: 835407 - DNA, 467 bp, Homo sapiens
actaaaattatagctgtacatgcaaaacaacatattcatgagtggttggttaaaacctgaaattatggagaaggctgaattgacatatacagcattatcggcaaaaaccttcacacrctgtgccctctaaaatgaggctttattttctgtctgaaacattgacaagggatattcaatatgggatatgccaatgcatactcgtttatctgtcatgcatttttcttattctaatttctccatagagtttagcagtcatgacttttgtaattattattgcattattccctccattcatataaaattataatttctctttagtaaaataaagcatgcaatttgactaatttgtatttaatgcttatataccaacagtagaatatttagcagattgatataacaccataattcatgatacagtattccatatataatactcatgatcagaagtgagaacttgcaatttttac

SEQ ID NO: 835408 - DNA, 632 bp, Homo sapiens
agaagtatttttcttataataataaggcattatttgcttttaacactcttctwctcacacaagaatgcaggggaagtttctaaaggctacatgacatacgacatgacaacagaccgatgcagaaggagatatacaaatccatgaatctcctattgaggcagatattaaagagatttgcaaagatgtaaaacaatgccacttttctcatttttgtttcaaaactgacattattttccataatatttatgttaatatgcaataaaaatgttttggaaatgtttgtttcaatttctaatacagtaaacactgttagatagaagccagaaaaacaaactttaaaaaagtgtttggggttggtctcaacaacttctaataatgtaatgtcagaccaaaaagtgtgaggacccatactgaaacttaagaactaagtacagaggcttcatatttcttaatgctaaaattaactagtatgataaaagggaaaacataaatagtcatcctggttattatacttgactattgagttggtatgggtaaagggtgccaatacattgacagttaagacagctacgaaagtagatgataaagatgtaaaatggagctgaaaagtagtataaataatattcttttaa

SEQ ID NO: 835409 - DNA, 476 bp, Homo sapiens
ccatcagttaacactgaagagtcaaagacttatctttaggatccagctaagaaaaggtcccagggaatattccagacttttgttgcaatttgttgcaattcctaactagctatccccaaggaaaatggctaaagggagagaagggaacccttaaaaaacataaccttacctcaatccagttcgaccctgattaatttaaggtaacatttcttaaaacgtcatctgcatatgtgaaaaatattttcatcataatactaagatgctatttatcttttccattttgttgacatctgcactgatggtccaaaagcaatggtggttaaaagtgttggtgccataacacaaactaaagcgctggcaccaagctgcactagcactcatattgcactctgcttcacagcttggacccacaattaaaatccccacmcagttttttaaaatgccaatttcacatatgacaaagaagtaaaaagtat

SEQ ID NO: 835410 - DNA, 644 bp, Homo sapiens
tttttttttttttttctgtttgtggattcctaggaagtctctgtttttgtatctttttatagttatcccccttaccttgacttagcctgagtgactctgtktttttttccaaaaacctaattcagaccaagtgaaaattcctgctctagacctcagtcattttctcccaaatagaagatctctttagctagggaggctaggttggcattattcttaatggctatgtcatgaatcttaagtttcatgttaatagggaatttataaaactccaaagaatgtttcaagatctacaagtaaaaaagtgcaaatgatatgcagagactgaatataaaagagagaggaatgtgtatgtgagagggaggggtagctgagtagaggagaagagaaaaattgtgaaatagatttcctctgttcatttctcttcctaccctctccaggcacacatcttgcacccatttctttctttctttcttttttttattatacttgaagttctagggtacatgtgcacaacgtgcaggtttgttacatatgtatacttgtgccatgtttgtgtgctgcacccattaactcgtcatttacattaggtatatctcctaatgctatccctcgcccatccccccaccccacaacagtccccggag

SEQ ID NO: 835411 - DNA, 565 bp, Homo sapiens
tctctggcctcagcactgctgaaggtactgggatacagtgccacatgagtcagaggaggttcctgcttccaaggaggctgagcctcagcttttggggtacatggtgtaacagacctgggatgaagggattggatatggcaaagaggaatgttccaggaaacaaacatcaaaattgttttaaggggaatgttggctgtagaacctatacctcttaaaatgtcagagatgccatagaacaaatattagtttttctatcatgcttctacctatagtttttcactacagcattgaaatatgcagagctcctatttaagtcaaaagctattgtataatcttttctgaatgaaggcagtaattactccttataatatggtttattataagaaactgataaaatgttagatctcaaaacaatatgcacaataaaatcctgatacaacatagttmatctatactttgggggtttctttcaattatcattataaaaaggtttcactctaacaagaagagcagattaatttgtaaaagaattagatatgctggtttagttcaataaagaaaaaca

SEQ ID NO: 835412 - DNA, 575 bp, Homo sapiens
aagtaatgcagatctcccttctgaaggaaggagcaaagggagaaaagtggtaaatattcaaaacatgctcttctgttgtcatttctttttcctggttaataaggggtcatacaaggctgaaaactttttggagaaatactgtgggtaggagccactcattaaagtcaactggagtagctgtgctaactttttccctccagggacaaaagaaggttttgaatgttccaggaggttggagcgtctgtccgtagccacatcaaagtaggtcacgtatctgctctaacagatttcactgtcaaataggaagctggcaccagggccagccaatgatggaaagttaatagaatatttctcatgcaggagctgctggattgcatgaagatgttgcagacatggagtcagaccacacaatgttaagtggaggaaaaaaatactatgttttgacaatgaattaactttcagacaacctcctgtgccctttcatgaatatgtaaatgtttaaagagagattcactgagaagtgattacctyctccacgttgctaattttttttttcttttagatggagttttgct

SEQ ID NO: 835413 - DNA, 487 bp, Homo sapiens
gacttcaaagtgatggatggagaccattttgcccaagcccagggtcattctgattgtctgatagtcaacacttaggatgctgcgtgatgaagagctttgccactgaggtcaattccattttaggcctggcgcagtaactcacacctgtaatcccagaactttgggaagctgagacgggcagatcactggaggtcaggagtttgagaccagcctggccaacatggcaaaaccctgtctactaaaaatgcaaaaattagctgggcatggtggtgggcgcctgtaattccagctacttgggaggctgaggcaggagaaccgcttgaacccaggagatggaagttgcagtgagcagagatcgtgccactgcactccagcctgggtgacagagcgagactctgtctcaaaagaaagagaaataaaaaacmcatttcaggctgagtcttttccctatcatttataggaatggatccagttcacagaatcccta

SEQ ID NO: 835414 - DNA, 588 bp, Homo sapiens
tgtttaatgagactggcctattcccagaaatgggagaatggtcaaatcggatccttttccacttagcaattaactcagtttttccctccacatctaccaactcagtttttagtgggtaaaacttttctgaagattcctttgtctgcctaaattccagacccaccaaagagaacatttttttcctcccctccatgtaatagcagaaaagaggacccaagaatgtaaccacatctaaacagaacctttgcaaaataatggctatctctaagaatcatttaactccaaataaaactattaagaatttgtttcctgatccaatcattcccccaagtaatcatttattgcccctcaatagtattcctcttctccctcgtcccataacctgttttaccagaatctaagcccaccttttttctataatctcaagatggtatataagcttaggtaccttattgtggggaggtcttcattctgaaggttckcatgtataaatgttaaataaattcatatgcccttttccccattaattaatgtgcctcatgtcagtgatttttcagtgagtctttaagggaacaaagaacttggccc

SEQ ID NO: 835415 - DNA, 335 bp, Homo sapiens
ataataatatatcaatattgattcacaacaccatgatcgagtgagttttattcctgggttgcaaggatggttcaacatatgcacattcaataggtgtgatttaccacataaacaaaattaaaaactgaaatcatatgatcatctcaacagatgtggaaaaagcaattgataaaattcagcatccctttgtaataaaaactctcaacaaastaggctttgaaggaacatacctgaaaataataaatccatgcatgacaaactcacagtcaacatcatactgaatggggaaaagctgaaagcattacacttaagaactggaataagacaaggatgcc

SEQ ID NO: 835416 - DNA, 602 bp, Homo sapiens
aaatacacatcacaaaatccaagaccccagaagggactaaatgctaaagattttttattggcacagacatttgtgccaagtcccttcaagttttccccacctctggggtctggattttccaggggcatctgsggttgatgaaatactcagagcaagaaggaatgtggtcctgtggctggaatgggcaaaagaaaaaacattctggatcacatataacttggcaagatcattctgactgccaggagagaaagtgcttcattctacacaaacttttaaccctctgtaggaagaagcatttaagtttccccagtgattttgtttgttttattcagaagtatatccccaggcgcagaacaacactaatatgtactagaacctcaataactatccactgacttaaatgactgatcgacacaggaaaacatttctcaagggatagcttcacaatgctttgtccatccttgggagtcactgcattgagtatgtgcagtgactgagcattatcagtaacagctcatgagcagcaagaggtttatggcaactaacatgtgcccagaataatggccctcataatcagataagaaaactcagatattatgttg

SEQ ID NO: 835417 - DNA, 606 bp, Homo sapiens
ggaatgcatttcccaggttcgtttgccctctggcttctgattggatttgacaaatggagttaccagcaagcaactgaagggcagagggaagaaattatgtgtttattccctggctccatccccactggacaatagttagacatggtctctgtttttctacccaaggtcacattgccttttgggaaggtcctctccagcagctatagctcttgccaacttcacatcaccactaaccctttgcctgtcaggaaaggcaatgtcttcccactgattttgatcctatagtgccttgctactctttgttagtgcccttcaccctatctacatctttgcaaacacctcttcgttaaattctcctaaattataattgcttgcaccatctgttccctgcaggactctgaccaatccaccactgttaagataaactgagcacaaagccacttcaacaaagtatttgagtagcaaacaacaacttttttcatatgttcatggagcaagctccaagttagaatgaatatctgtctccacattgcatactaggcttcctaattaatctatcgcatcatttccaatttgtrttatgaaagcttgtgctaaacagaaact

SEQ ID NO: 835418 - DNA, 561 bp, Homo sapiens
aacctgtgaatcattttaaatttattaagaccttagcactttgacaagtacgctattttaccagccttcatgttggcaaaggagaaacatgaaaccaacgagcttattttactggctcaaaaacacacaactgcatactaactttgtatcaaaaactatggaggctaaagacagtggaataccatctttaaactgcttaaagggaaaaaacaactatcaattcaggattctgatttgtcttttggtctatgaactcaatttgtgaatttatatgaggcttccctgatatatttgcatttatatatacgtgtatttgtctctgtgtgtgtatatctatatgcacacacgtgtgtatgactatatgcacacacgtgtgtgtatgactatatgcacacacgtgtgtatatgcacacacgtgtgtatatgyacacacatatgtacacaatgcatatatatatacatatatgtacacacatatacatacttacatgaataattctgtatcagaccactaggtgatttatgaaaaacaattcatgtcctcaaaaaccttatggttta

SEQ ID NO: 835419 - DNA, 618 bp, Homo sapiens
ttttggtttttattgagaaacaaaaataaaattctaagcccrcccagctgactgagcagacagtccattggccaagggaatcccacagaaaccttggaagctgagctgctggacttgacaggatgggaggtcaaacacacctgcttatactctctcaatagtcaccattaggtcttcttccctaagggctaaacagaaaccaccctttcaaaagactccaccactgatttcaaccaacctcctgactgcctcttccttttgtggtttcagtacaacaaccatctggcattccttcctgataaagagactacctgccacagagtggttctggccagtctatagaggatacacagtgaggattttcacgtcctctgtttcaccttttgacatcagagaaccaaacactccaccctgggatcatcctaatgacatcattttatgcacatgcaacacacaaagaaacacaaagctcacctgtgcatgtgcgatttctcctttcataaatattcatgactcctcttgtatagaggaaaccagcccccaatatttcaacgtaggttctattttccgtaagtgttggctggtctgagaaataaagagaaagagtacaaagagaga

SEQ ID NO: 835420 - DNA, 598 bp, Homo sapiens
agtttccaggcttgtatcagggatggttaacagaagcaggtggtttcagcataatgttaagtaagtgctatgatagcataatctctcagagaaaacaccaagcctgtcctagaatttgaagaaattttgaaagagaggatacctgggctgatctgaaaggatgaagaggagttaggttaaacaaagaaatgcagtaaaaaggatggagagaggaaaagaagcatgaatcaatatgttgtttctacagcagaaattgtgtggcaaggaacagtaaagggtgaacctggcaaggcagacaggatccatggcacctggtgtctcatgcatgtgcaaaggagctgacctttattttatagcagtaaggaaccacttctatttgtttttgagattttttttccccaggactttgtgaaaaatatcttggcctggaaaattatagaagagatataaaggataaaagacagtcrttacttcaaaatgcaacctttatatcatagaaatatagttcataaaactagagcagatatttgagatcacttaattctactgcttcaatttacaactaagaaaattggtccaaaggcaatcagtgccttat

SEQ ID NO: 835421 - DNA, 598 bp, Homo sapiens
agtttccaggcttgtatcagggatggttaacagaagcaggtggtttcagcataatgttaagtaagtgctatgatagcataatctctcagagaaaacaccaagcctgtcctagaatttgaagaaattttgaaagagaggatacctgggctgatctgaaaggatgaagaggagttaggttaaacaaagaaatgcagtaaaaaggatggagagaggaaaagaagcatgaatcaatatgttgtttctacagcagaaattgtgtggcaaggaacagtaaagggtgaacctggcaaggcagacaggatccatggcacctggtgtctcatgcatgtgcaaaggagctgacctttattttatagcagtaaggaaccacttctatttgtttttgagattttttttccccaggactttgtgaaaaatatcttggcctggaaaattatagaagagatataaaggataaaagacagtcattacttcaaaatgcaacctttatatcatagaaatatagttcataaaactagagcagatatttgagatcacttaattctactgcttcaatttacaactragaaaattggtccaaaggcaatcagtgccttat

SEQ ID NO: 835422 - DNA, 512 bp, Homo sapiens
aaccaggaacaaagaccccaaaactaagatagaaaaatctagaagtcaaaacaactattataatgttgtaggagactctttcatgacctcacctgagggctattaactattattaagataaagctcaagagagcatgcctttctcattaccaagcccattatataattcagagacctttttttttttttaacgacagttataagtgacagaaggcagtgtggtagcaaaggaagagacagaaaggtcatcaaaagcagacacaggagaactcgaacttgctctggagatgatttaaacattttgagatggacattttgatcaaaaggaaagacagtaagaaaaacaagaaaaggtctgcctattgccctaatcctcctgagtaaaccaggagcattgcagagctcactcaacctctcaggctgacctggtatagaaaaaagagcatggygatcttgaataggttactaaacatctctgagcttccacttcctcagctttcaaatggaaggtc

SEQ ID NO: 835423 - DNA, 538 bp, Homo sapiens
ggcaagacagcaaatggcttggatcgagctgtaaaattgactcctgtggcggggaaaagaagaygtttcaatgatatgttaataagatgctaatataattaaaatatggtaaaaataaatacattcataatagtatctgggatatagtaggtgttcaatatatattcattaaatttaataaatacataaattataaatccaagatttatatttctagagaatcacaagattccaacaataacacataatagttatttccaattctgtcaattattgattgagaattcttccaattctctcttttaattttcagaccaaccttccataccaatgcaaaatttcagcttctttcactcatgtttcactaatgagaataaaaatattctcagctccagaatgtgtgaaattacttgctctgatgtatgtatctactcaatacgtgccatataacacatcaaaacaggggcacagggactcctgctgcagcaccatattgtcttagagagttatgttatctggaaaactaggactagaacaa

SEQ ID NO: 835424 - DNA, 630 bp, Homo sapiens
ctttaatacctatgactctttgtccttggcatagccaggcatgaacccaaccttgaataaactcagccattctgtttgtccattccatcttactgggtatagccaaagcatgtactcatacattctccacaacaygggcagactaaattttctgtgaagatgataaagattaggtttcaggctcttcacttacatgcgccccttgcaaggctccaaaacaaatctcagctatgtgtttgcatagatctgtgcttttgtaaaattttcaaaattaagatattttaaccagaattaggataattctctctttccactctaaatattccttcatcataagtggtgtggggttgagtgacagtggactagctacagcatttttgaaatctagctaaggggaaactgagttggacatgcatttgatttgggcttagtagggtgtgatttgtatggttcctaatcacttctatataaaattattactagacatctatgttgacttacccggtgttgcaacacacagaagccagaccctaggtcacactgtgttatgaacataatctaaaacatgaggagaaagtgaaaggtataagagatgtaggattggggtaacagtccaataaaagctactct

SEQ ID NO: 835425 - DNA, 647 bp, Homo sapiens
aatccccacctggatcctagcctcctagctggcctctttgtgctcatccttgtacctgaagtctgttttccacacagcagccagaacaatgctttgacaacataagtcatgtcataacactcgcttgccacaaaccctccagtggtacccagttttgccaaattcagaagacctttctgcagttcacaacgtcctgtagatctgtgtgaccccactcctgcaccacagtgcatgtgcacacacgcgcacacacacacacacgtgcatacacactctcatacacatgccaacacacactgactcatgatattctctgacctcctatggcactgctctgacctcactcactgcaccccatgcacactggcttcagtgctgttccatgggcgtgccaggcatgttcccacagcagggccttcacagtgactctccctctgcatggtcagtttctcacttcctccaaggctttgctgaaatgccaccacttctgtgaagctccaccttgaccacctgtttaaaattgcagctctcttcccacccattactccccatcctccctgtcttgccctatgtggtwttccatggacttatcaccctctggcatgctatgttatttacccatttattaattttgtttgacacttgtc

SEQ ID NO: 835426 - DNA, 596 bp, Homo sapiens
ctcgcggtgagtgttacagctcttaaggtggcgcgtctggagttcgttccttctgatgttcagatgtgttcggagtttcttccttctggtgggtttgtagtctcgctggctcaggagtgaagctgcagaccttcgcagtgttacagctcttaaggcggtgcatctggagttgttcattcctcctggtgggctcgtgggcttgctcacttcaggagtgaagctgcagaccttcgtggtgagtgttacagctcataaaagcagtgtggacccaaagagtgagcagtagcaagatttattgcaaagagcaaaagaacaaagcttccacagtgtggaaggggacctgagtgggttgccactgctgcctctggcagcctgcttttgttctcttatctggccccacccacatcctgctgattggtagagccaagtggtctgttttgacagggtgctaattggtgcatttacaatccctgagcyagtcacaaaagttcttcatgtccccactagattaactagatacagagtgtagacataaaggttctccaaggccccaccagagtagctagatacagagtgtcgattggtgcattcacaaa

SEQ ID NO: 835427 - DNA, 639 bp, Homo sapiens
caattagttaggggcatgaaagtcaggatttatcatgggaaaggaatwtgcagtttatattctaaaactgcacttttcagacaactgatttgctgagctgaggggagtgtcatgctattatctaaataaacttcatattttacaacagccataacagaatatacaaagataatgtcaaaacaaagaatgcattctccctattatacatgccatttggtttctcatgtaccagtattatgaaaaaggaaattctggctggatttcctggcgccatggctcacacttgtaatctgagaactttgcgagacccaggtgggaggatcgcctgagtccagaatttagagaccagcctggggaaaaaaaaaaaaaatgcctgtagtcctagctactcagggaggctgaagcaggaggatcacttgaatctaggagttcaaggctgcagtaagccatgcttatgccactgcacttcagcctgggtgaagctaaacatattaaaaatattagaaatgttactcttacatagatgtttctaccattgacaataactgtttgactaatatcaagtcaacaaaaatagtgtaagaaataaaagttattggctgggcaccgtggcactcacctgtaatcccaacacttttt

SEQ ID NO: 835428 - DNA, 630 bp, Homo sapiens
tttgacatataattttcacactataaagtgtacagctccatgaatctttacatatgtgtacacacgtgtatcactacccagatcaagttgtggaacatttccaccaccctagagctttctctcctgctcatcgcagacaatacccacagagataaccgcttttctggtttctattagctcagatttggtttgcttcttctctaagaactcactttgttttgaaaagaaaataaggaatagcatgttatacttttaaatcaccttcagaccatcaccaagaatgatttcattttagcctaaggtgcttctgagattagagaaagaagtgggaaggaaaaaaatccgacgggtgaggaaggtgagggtagagaggggtgggagagctgagaaagagtcctgtcaccagagagataacgattcacataacagaggagggttcacagactggaggcttatacaggccttcaagaatgcttaggcgctctgttcattaactgtatagagatgctcaaagactgtcycaacctacctagaagacagggagatgagttaaagaaagtcctctgggtagaaagtcagtttcaccaactgccttcagagatgaaccttttctgtcatcagacccacaca

SEQ ID NO: 835429 - DNA, 616 bp, Homo sapiens
ttaaaaatatgtttatatatatttgtatgtgtgcaaatgaatascaaaaggtttatgtagaatgatacagtccaacagtggttatctgggagcaaggagttgattggaggaagactcagatgaaggggactttcaagtttccctgtgtattcttctgcattgtttacctcttttaaaatgaaattgtattcacataatttaaattgcttttacatttgtaaaaagtaagtaaacacatctggaaacctatctcctctagcagctctttaataggctttgagatttttttttccaaaaatgcaaatatataaattttagcaaaatagttgcctgtattttgttgtcatagccagaggcacttagtcacagaaaggacttagaatatatcattatcttcagtctataccctggaaacagaatctgactctgaattgttggcacatgtctgctgggcagttaggagcaatacccatgagtggtgacagaagccagcctggacaccgagagagactgaaccgtcacatagtcacaatggaggcctcggtggatcggattgaccactctgaccttcagaattgctctgccttgaggcaactgccccatccccatccagcag

SEQ ID NO: 835430 - DNA, 545 bp, Homo sapiens
acatgagtatatgtaaaactgcaactgggaaagtgtttgatggaaaggcccattgggtgttacaagagcagataaaagggtgtttgacctatcgcgggaggccagggacatccctgatgagaaaacctcaactgagctgagatccgcaggctgggttggggtacagaaaggtgttccaggcaaaaaggacagactacgcaggcttctatggtaggaagaaagctcttagataacagggagttgattctcaatgatgtttaagacctctttctttttacaaatttttatctatttattgaataggtaatacataaatttaacacatttcaaaggtatgaaagggtacagagtgaacagtaagcctcccttattgctctgacccagaaacaatcactcttgccggtttttctgatcctcctaaaggtattagatgcatcaactaatattcmtttttctatcctccacaaaattgtagtaccctctacaccatgttatatcttgctttattctcctcacaatatatctgaggctctctcagcacattc

SEQ ID NO: 835431 - DNA, 515 bp, Homo sapiens
gttcaagatccccactgcactgagctgtcatgtctttctgagtctcctttctcctggaagacttgcttgacctttttccttcaggacattgacatttttgaagagtacaggcagacattttgtagactgttattcaattcgaatttggttgtttcttcatggttagattcagattagggcatattggcaggaatgctacagaagtgatacagctcctcggcatattcaattctggcaggagaagctttgaagaaatcagtttaaattcttctctctggagttctccttcctttctgccatttgagcagataggagatcctggcctccttacctcaggggagatttgaggcagggcaggaagtggtagtcccttcaaggccccttcctggcttttatttccaaaagcataggcttattgagacaagatagasggactttgaaggaagcagaggtggggaaagaattgtctcagacccaaaggaaattcctccagggtagagacaggagagagaagt

SEQ ID NO: 835432 - DNA, 647 bp, Homo sapiens
tggttacttctaattcctcccttagtccctgcagagccagtggtcctctccctctctggggactatttgctccattgggcaattctctaaaggatcaaagatggcctagactagctccctcttggggaaacaatccattctctgtactaaacttcatcctctgatatagaatgcttcttctggacactcctctagaggcaaatttttggtacctgtacctcaaaaactcaaaggaacatagatcaattattctgagtgtttctcttgaagttccctaaatgctctcccttcctgtatgggcaaggaagagggtgtcaatcacatgcagcatattaacaaatctctccccaaaagcctttaaactgaaacaagtctccttgctcaacctctgcagccttaacaggtagattttaatatctgaatctatctttagttaggtattaagatctcaaaattgaggtctcaaattagaggacttccttggccagctgagttatcacctttgctttgtataactgtctgtstttgggaccttcagcctaaaatgaaatagaaagagtctcattttgccatcctatttcacattgatgtagcacctaattatccttcatgcagcaagtcagcaaacacaacatactcctccctgc

SEQ ID NO: 835433 - DNA, 657 bp, Homo sapiens
tgaatagatgctattggtacccctgtaacataatgaaaaatgggcagccaccatctgaccgcaacagagaatctgactcttccccttccattagcctctgggaaaaatggtatgatcgcctccaacagatcagagagggttggttatggtcgtatctttaagagtgaaattttcaactcctaagacaatgagaggtctgaccatgagtccttctccaccctccagacgtgggaccacacaaggacttccctgctactgagggacaagttcccagtggccggccgcttattgcacctatctccagcattccttatgaaaaaattacttgtaccagtctatgaaaatgaatcataaagctagtgtgactgcaactattagatacattccattccatgaataacactattttatatgaaggtttgaggttaaaagggaaaaaataggcaaggattatgaaaatacaactttctgtcatagatttcagcaggtgtcttcttacaatacaggacatgtttttattacgaaaacaaagaaagggtgctgccatagtagaattccactgcagaggatgaatatactgctgggtccayttggttgtatcgtagttcaataacgctatgtgtatgtgtgtgtgtatgtgtctgttaggaattagga

SEQ ID NO: 835434 - DNA, 586 bp, Homo sapiens
gtaaaggaataatataacaagaatacwtagcaatcataataaatatgtacttgtctcactcaatcccagctactataacaaaataaaatagactgggtggcttataaacaacataaacttatttctcacatttctggaggatgagaagttcaaaatcaagctgatggcagattcagtgtctggtgagagcccacttcctggttcatacatggcagtctttttgttaagtccacacaaggtgcgaagggcaagggacctctctcaggcctctttgataaggtcattaatcccatttgtgagggctttaccctgatgacctcatcacttcccaaaggccccaccttctaatatcatcaccttggaggttaggatttcaacatatgaatttttgcagggatgaggagggacaaaaatattcagtctatagcagggctcaataatatagcctccactagataaagcaactgataaaattacagggagaaatctataaatagcccctgtcaggaactgatagatcaaagattaagtttgatctaaatatatgaactttatagccataagcataaaaataaacttccattaa

SEQ ID NO: 835435 - DNA, 495 bp, Homo sapiens
cacgtgtgtgacttcagaggccccaggcctcaggaacactgcttgctcatcttgcccaagccttcaaaggccatgttgttaagagtgtcactcctctgcccatgcastgccaggtctgcaagaacaggagcattattgggagcactatgagggcactgactgaggtttgtgggcagcctgctgatgtcctaaagtattcggttacaactgcaggagagaggactcaggacagatgtacttcctttaggggacaacttttcatggaatcggagagtctttggacacaggtgtctgctagtggcagtccatgcaaccagggcctggtggagcaggagtcaggaggaggaggcaggcccagctccctggcaatggggatgctcactttggggctgacaggcccactccacacacaggctgagggggacagggccctattatatgggtgagcggggccggctctggcatcttgtcattctagcttgtgtaagtcagcaa

SEQ ID NO: 835436 - DNA, 495 bp, Homo sapiens
cacgtgtgtgacttcagaggccccaggcctcaggaacactgcttgctcatcttgcccaagccttcaaaggccatgttgttaagagtgtcactcctctgcccatgcactgccaggtctgcaagaacaggagcattattgggagcactatgagggcactgactgaggtttgtgggcagcctgctgatgtcctaaagtattcggttacaactgcaggagagaggactcaggacagatgtacttcctttaggggacaacttttcatggaatcggagagtctttggacacaggtgtctgctagtggcagtccatgcaaccagggcctggtggagcaggagtcaggaggaggaggcaggcccagctccctggcaatggggatgctcactttggggctgacaggcccactccacacacaggctgagggggacagggccctattayatgggtgagcggggccggctctggcatcttgtcattctagcttgtgtaagtcagcaa

SEQ ID NO: 835437 - DNA, 560 bp, Homo sapiens
ttagtcctttgcatccctagataaactttaggaccagtttgtcatttctgcaaaaattgcagcaggggagggagggatattgccatgttaacaattttgagtttttcaatccatgagtrtgggatgtcattccatttatttagattttctttcatttctttcactaatgttttgtagcttttttgtacaagtcttgcatttattttgttaaatttattcctggtattttattttttaatgttattataaatgtaattgttttcttcttttcagattgtttttacaaacacagttgatttttgtatattaatctatcttatcatccttgctaaataatttattagcaataaaaaagttctgtgaactcctgaggattttttacatgtcagatcatgtcatctgtaaaacaaaataattttacttctttccaatccaaatgtctcttattattttttcttgcctcattgccccactaggacatacagtagtaaaatattggccagaaattctaagagtgaacatctttgtctcatttcttatattaagagtaaataattcag

SEQ ID NO: 835438 - DNA, 571 bp, Homo sapiens
aatttcaaagcagggaatacattattcttacaatagcagtcaccgatagtttggccagtcaaactgatctcaataattgctccagaatttattcatcttatagacaataataattccctggcattatgcaakatgtcctgttacagagctcccactggactctggttttgaagaagtgatgctttctatgttaacactggtacatattacgggggactccctgcctttgagctacttcttgtactaaacaatgtgaacttcctcaagttcctgaagggaaaactccaatcaagtggtttagggacttcgctaggatcaaagaaagagtatgaatctggtataacatgggacagagtaacctcttagttttatattccagtaaccaaatggcaatttctccttttttaaaaaagtttttaagaacacaggttggttggtcagtacctcatgtttctccattattttcaatggttagaaacacattctggtcagcgttactaaaattcacacacaaaacagaaacagaaaggttacttgaaatacaagattaagaattatttttagcctttga

SEQ ID NO: 835439 - DNA, 594 bp, Homo sapiens
ctgtgagtgattcctaaataaaaagaacagagacatatgtttttaacaagtacttatgtgggattcataaaattaatttttatattatcctctccccatcaacaaattgttagggacaccatgtccrtgttttaaatgttcattaaaattgcattgtattttaatctcaacaatatcaatatagatttaatcctcagtcatgtatatcaacttttgtgaaaattaattttattttctttcactggcataagtttattttaatagttatttgaaaaaaaaaaaactcctggattttttattcccctgactttttaaatgtttaaaagatggctgtttcttaccttcatgtgattaggggaccttatgttaaattcttgagttatgctttctgcagactttaggtagacagagtttcactggtgaggtaaatttttttaaactgtgaaatgcacagatctaaagtttacaattcaataactttggacaaatacaaagacccatataatcaataccgattcaagctacaggcattttcctcacctcaaaaattccttcatgcctttccacttaaatctcattcacacatcaaatctt

SEQ ID NO: 835440 - DNA, 505 bp, Homo sapiens
ttctaatacacaaagactattacaagagggaggaaggaaggaaggtcagttatctgaataactgaggctagctagaagcccaaatttgstatgatgggggccatcaaatctcaacagaaacagctttctctctctgttaacctggacagggcttgtgattttttttttttttcctccactcagccatagactctcagctacatatactctagcctggagtggtcaaatcggctcatctctttctctctcataccaaactttcaaaaacaaaacaaaacaaaccaaaaaacacttttgttattggaataaatgagaaagatgtatttgtgtttatctgtgatacatggaccatcaaaagcctcgctgctaatgaaggcaattatttaggtttacttaatctattaacttatcagttaataactgctatttattctgctagaaattcccaatggtacaattgtttctggctgtagctccttccatgctttgtacatcctacttgtgg

SEQ ID NO: 835441 - DNA, 532 bp, Homo sapiens
tctttatccattcattcatccactgagagacacaggttgacaccatatcttggctattgtgaaaaatgctgcaatgaaaatgaacataggtgtgccgttatctcttcaacgtgctgctttcatttcctttggatatatacctgtcaaataaaattctaagaggatttggactgggctcctgcacaagactcaacagaccaaaccaatatagagttttatcatgatagctgagcttcagttaatcacagaaggttctgtaaccaattaaccaactaagttataactaattaagttgtctctatacctcacttctgtttaaatgctgccagatcacttttttggccagagtcctctgaacctgttttggttttgggggctgtccaatttgagaattgttttttgtattgttttattttgttttactcaaataaactccggtaaatttaagtctaagggtyttttttcttttaacagattggcgtggtcagcgggatctgaagcagaactccagtgattgccaggggcactgggt

SEQ ID NO: 835442 - DNA, 589 bp, Homo sapiens
acatgatccatcatgtattaatcctaaacaagttacttggcttgagcttcattttcctcaactttgaataacacagcacttcctacctaaggttgctatgaagataaccaaaaatgaatgtaaattcattttcttttttaaatttttattatttttgagatggagtttcactcttgtcgtccaggctggagtgcaatggcacaatcttagctcactgcaacctccgcctcctgggttcaagcaattctcctgccttagcctcccaaggagctgggattataggcgcctgccaccacacctggctaattcttgtatttttagtagagacagggttttaccatgtgtaaattcattttctaagttgtaaagttggagataaaaaggttttaatattaaaagcttcttaaaaacactagctgaagtatccaaaattttgtttaggagctcagtttgaaaaaatgtagaatataaatgtggaatccagacctgggctccatttccagctctccaccggactcaggatagttataaccaatgtccaggcttccactgggaaaatggaacttyccatttaattaggaaatgaggt

SEQ ID NO: 835443 - DNA, 614 bp, Homo sapiens
  misc_feature 597, 598, 599, 600, 601, 602, 603, 604, 605, 606, 607, 608,609, 610, 611, 612, 613, 614: n = A,T,C or G
tgaccttaccttaacttgattacaggtgcaatgactctcttcctacataatgtcagacttataggtaccagaggttagstcttcaatgtatctttctgggcggacacaattcaacttattaatatagtgaatgtactcagagataccagaactgtttgagggtagggagaaatcttcaccacactatactctcaggttttagcccagggccaaggacacagaaggagcaatacatgtgtgctcaaacagaccaacaaatcagtaaaccagttaataaatggcatatacagctacttttttaaaaggagaaagatttatagttttattatagtaaacagagactaaaagaacagaagttgcctaaccacttctctgttatagaattataagaagggatgctgaacttacagcttgcctatacatccaatttcaggcatatctaattccaatatctccatgaagatctgtctggagaagtaaacctctttaatctaacatgatcagagaatatctactgaacgactcactactttgggctggattctaacataaattctgagaatacacagtaagaatggcatacagtcgctgcctttnnnnnnnnnnnnnnnnnn

SEQ ID NO: 835444 - DNA, 577 bp, Homo sapiens
cctgggcgcactgaggcaggtggatcatgaggtcaggagatcaagaccatcctagctaacacggtaaaaccccgtctctatcaaaaatacaaaaaattagccaggtgggtggctggcacctgtagtyccagttactcgagaggctgaggcaggagaatcacttgaacctggcagacagcggttgctgtgagccgagatcacgtcactgcactccagcctggtgacagagtgagactgcatttaaaaaaaacacaaaaactaagttttagaaagaaacacagaaacttttcatgagctttgattagccagccaaagagtttttagaaacatcaaaatcatgagctttgaaagaaaaaacgaataaactgaattttgttacaattaaaaacttctgagcaccaaacaacaccgttaagaaaataagtttatacatacacacagtttcccatattgatgcaatttatcaatgattaaaatttacagtatttcattgttggggggaaagacaccattaaacaagccagagactagaagaaaatatgtgcaaatcatatatccaataaagagcttatatcag

SEQ ID NO: 835445 - DNA, 593 bp, Homo sapiens
ttctagaatcagttgggtcttagattgtcagtggttgaaagaacttaattctggagattttagataaggtggtgattgtgaccagagcagtgtttatctggcattgtagatctgcgatagatccgggacartgtatggggaggaattagactggctgtcaggggaggagttatgggactgtgcaggactgttttaaaaatgggttggacaaagagctaggcacattgagaaggaggaattggtcagacttgtttggcagtatttggggaacataggtaaaatgtaattgtttgtctgatttttatttaaatctttcattcctctttagaattatttaaagggacatagcatcttttactgaatcaaatgacaagagggcattttatttatttatctatttatttatttatttatttatctgtttgcttaatggagcttttgtgatttggggttgcaagctctctctgtggtcctgttggatatttattgatccctagtagcattatcataaggcatatcagcattaagaattttcattaacgggacatgtggaaacactgctagaaggaaactattgttgctagactgtttca

SEQ ID NO: 835446 - DNA, 599 bp, Homo sapiens
taaaaatctcaacataatacatattgctatwacacagatttagacacaaaacaagacaaattgtgtcacctagaatgtaagaactcaatatagccatcatgtcctagcaagtgtttctcaaactttttgagaattaaaataagttttacatttagatatagcaaacaaaggcttcactaaacagtacttaccctgatatatgacatattcttgtatatttttatacccttcaaactgatttgatggttccattaatgagtcactgttgagagacaaatctctgtgatttcttgtgtttctcaatgtctttcctgcagagggactgactcccttttcaacaatgttatcttttcaaggatgtttatacagccttggaagacacagatggtgtttccctctagagcaaaggacaagttggttttatttacattataatgtaaatgatggctcgctctggggcaaacgtagggcaggtttattgctagttataaaagatttaggattcctcaactcagagttcctttcctggaatgcatccaattgtgtgtgcacaagttgagaccctcttagtgtcaccctgtggaagctggggcttgagg

SEQ ID NO: 835447 - DNA, 627 bp, Homo sapiens
tacataaaataaagttataaaatagataaaactatgcctgcataattttgctattaaatatatgtttaaatacattaaggatttaaaacaaaaatttatatattactgattggggataagtttgaagaatttatcttgtttcgtgattgcttgagtttctattgatgcttttgtattttgcttttgtagattttattaacatcatttgaaaaatctttggatcatttatttagatttttaagatagggtttaggagacatttattctggccaagattgaataacagggactaattcacactcctgcctaaacaacaaaaaacctggacaaaatatataaaaacaatacttctcagacattcaacaacaggaagctcatgatcctgactcccaaaagaagggaagtaagcaaggtgaggcttgcggtcatctctgttttctgctgcaggcatttagtgaattttggcacaggaaggagtgaagcaggaacagggccatatgagggaaagtccagtgagatccagaagatgcaaaatttagagagatgtttgctgccagggccgtgcaggcacagaattagcccagaggaagaagaawgtggagtcctccttgagctggggaaggttag

SEQ ID NO: 835448 - DNA, 598 bp, Homo sapiens
tctattgttccataccatatttctttcakcatgatacaacccaactgagtgatacagaatagattttataaaatgaagagtaaagaaaaacaacttccttaatttcccctagcatttggaatctttccaaaatagtatatacaaacctattttccacagtgaattatatatatatagtttaatttggaaattaaggcaaagtttatgaaacacatgatttcacaaagtctttttgaaaatgaaaaaccatccaattttacatattaaagaacattagagaaaaaaaactgaagagtcactagggcttaggtagattttcttttatgcaattggaaaagatgggaagaaactgtttaggtggtggagaataggttcatttttttgttggggaaccgggtgggagaagaagatacttgttatctcagaggccaggaagtgcatctgggaggagaccaggggtaggcagcagatgccagggtgcccctcgcacatctgacatggcaaagaaaagtaaggggcagggaccactttagagagccacaagcagtgtgaaagcaaatgaacaatgaggaattgccataatccagtttttaaaaca

SEQ ID NO: 835449 - DNA, 609 bp, Homo sapiens
gttctagtaacagagccacttactgatgtgctgcatgatcctaggcaaatcacttgcagtttctgggcctgaatgtggctcccagggaaaccttctcactccrgcccatctcactgcctcactcttgtccaataggacaagacaaaagctaaattccacacctttcttgcctccctagaaagaataagctctccacagcccctggttcactggcagtgctggtgacttacccctcccagccgacaagcacccagggctttttctctagcccagttcagcctgggcctggctctgcgggaccaagagtccaagagtcagcagaatcagccaccttccctgcctgacaaggctccagctaccctggagttcaactcctcaccttcccctcctgcacttgcccttctctgctctcctgagttgtccatacattacaaggaatgcaataccctttttttaaaaaaaaagccattttgctctgaactaacagagtcaggcctcattgttcccaatatcgccaagcaatttctgagctaggggagtgttgaattggagcaggaagatgggcaattgggcagggtcagctgacacaagtgggtctggagagcttca

SEQ ID NO: 835450 - DNA, 602 bp, Homo sapiens
tccagctcttcaagttagggatgcaggtgcctggcagagcaggtggggcaatggaccctatgcaaaggggctttggctgggctttgatctggccagtatttattacaaccagccaaggcaggcctgggagaactctgtttatgtggcagggttgattgccacctagaagaacgtgtacaggagggccctgggccaatcagagcctagggacgttgtcttcaatgctttgagctgagaggaggtggaaaggatctcctgcttgctacggtggcatgcttgatgttggcagagagagaaagcccaggaaagtgcccctgcgtaggaccagacacaagggctataaggtggttgggaacaagttggcaaatacagaacctccccatgcaccaaccagcctttgcaaagaaaggggagaaggaattcctgtgaaggggatccaggaccaggctgtctccctggcccagcacatgctgtagtacatgctttatgccctgaagggcttgagagagctgggggactggagtggtaagccctgagaagctgccycaacagtgaacctgacttaaaggccctcaaaatgcccaatagaaggctgagaactg

SEQ ID NO: 835451 - DNA, 592 bp, Homo sapiens
tgctttgtatcaagggtattcattgcttttctaggcatcttgcctccttcctcccccactagggattggcagcgttgagaattctgttctcatttarctacaagaaacggtgtctagaactgtgtcttgcatggaattgggactccttacatgtctgttgatttgacatctagagctcctgtaactgtaggttgtcttgcaacagcaacccccttagatatactgctcttattccaatgaccccaccactgttcaaaatatctctggaatttcttttctggaattattttcagagaaggcttatgaggcaaagaataaaactagtctcttttctttagaatcaaacaacgtgtatttcattttcattttttgtcattatgagtcaacaatttatttatttatttatttatttatttatttatatttatttattgagatggagtcttactctgtcgcccaggctggagttcagtggtacaatctctgctcactgcaaccaccgctccgattctcatgcctcagcctcctgagtagctgggattacaggtgcacaccaccacgccctgctaatttttgtctttttaatagagat

SEQ ID NO: 835452 - DNA, 526 bp, Homo sapiens
cctgttacaggggtgagactgttatacctgggaacttcacagctcactcattattcacttattcaraaatactcattgcaaacctattacgtgctgcactcttccaggcacctgggatgtggcagtgaaggagacagaccagctgtctttgggcttcctcctgatgctcacgttccagtgcagtcaagatctttaccaccatcgacattctaataataaacacaactcctacgttcacagagcttcagagtttacagagtgtgttgatgctcattagcctacttgatcctctccaaaaccgtgggcagtaagaattattattatcatctttcataaatgctcacaatgacattttttttctcattttaacatctctgtcatcaggtgggtcttgcaggggatggcatgctgtaatgaaattggtggcccttattttctttcttagtgttaaataaaagaatggtaggtcttacaatccatgccttagatttaataaaatacaaaactatccctgttttgcagatga

SEQ ID NO: 835453 - DNA, 632 bp, Homo sapiens
gtcatgcactcttgttgggaaggggaagggggccataccacmgagccacccaccgggacctggcccgtttccatccctggggtttgctaggaagtcgcttccagccaaatcgctctgaggactcagattgtctcgtttgcctggttgttatggagagattcgacacacaggcaatcaaaccccttagctcacctgcgagaggaagagagtgagcgacaagtgtaatagtggggagagaacagatattccctgtcactccgcttgcattatcccccataatgagctctgcccgacagctgctctcagggctcagactgttgcagggagcccagaggaggctgcttggggtttcagtcctctacccactgcaagtctgaggctgcaccggtgtctcctcccccaatcaccagcttgatgaacaggcaggaaacaaaaccacccacaaggtaggaggccaacctcgctgtggaaatggacagagccacagagccttgtgtctcacacctgctggtctcacacatgtagaaactggggcaccctggtccgtcagccaggagctgtaaaggattggctcctgcatgtgagacacgtgtgtgtgtgcacgtatacatgtgcacatgagagagagagtc

SEQ ID NO: 835454 - DNA, 582 bp, Homo sapiens
aagaggttaccttatccatatccgttccttcacctccattttatctctagcccatcattggctctagagttcctccagaagaattcacaaattccatagtctggtattcaactccccttaaaatctagccctgatccatatccccaaatgtaataagtggtattctttaatctgaatatcatactccagcagaatatattttctgaccagaccagagacatgccatagaacattctgcctctgtatcttttctcatttcatgcccctgccaacaatgctcccctcccactgcagcctttagagttcaactcaagttccacctgctccctgatgccccttcctgggctcagcctcccactggccctgctcatggccactgcttgccccttgtgggatggggagccacatcctgcatgcagagccagagcgaatcaatgagtgaggtgtgctccttcaagggaccccgaggagagccactgcgtcctctttgctgattcccccttgatggcatgtgcctgtgctgatgacttyggttatgtgcttcaattcctgttctggaagggggcttagagccttggccct

SEQ ID NO: 835455 - DNA, 626 bp, Homo sapiens
atatgactatggaaagacattgaaaattgatgtctattttatttcaggggaagatgaacaaaccaaggaaataattttccaaacttttaggtacatttaaaagaaatgtcttgaatcctaaatatccccaacagatttaagtaagatccacaggggcaccgacatacctggaacataaagagggaaagaggggagataatagaggggaagggtgaccagccatccaggtttgcctgagactaaaggttttcccaggaagtgggacttttagaacaaaaaactcagggaaagtcctatgcaaaccagaatggttggtcaccctataaagggatccgagaagaaaagaatgtggtggatgttattagcgtgccactcacaagcaattctattacttcatcactcattgtgtcagtgttttccaagcatttactatgggccaagaactgtgctaggcacggggactacaatgaggactaagcctcatggtgcacacagtccacaaagtccgctggstaatagaatctgagagactagaagtgtgaaggaacctaaatagcttgtagtaaaaactaatttcctctgatttacaggtaagaactctaagactgagaggttgtgaatgactg

SEQ ID NO: 835456 - DNA, 473 bp, Homo sapiens
gacttcatctggtgtcatgactccaacactagctgagtcatctgaasacaatgaccatcttttctacacttcaatttctcatctggaaaaaaaaaattaagagctgggcttgatcatttctaagttcttttttgctctaaaattctatgaatctacaaatatataaatcactttcattttatatcagtttttccttctgaagagaaaaacagaaggaaccaagccttcctaacttcaggggattgagctgttattagtttagaatgtagctgttctttgctaggacaattgcagtctaaacagtggtttcttcatcaaagagaacagagcttacgcacaggaggactaataaatgaaggaggttagctctccatgaagaatgggaaagtttgcttctgaaggttacccactttctagtgaacctgtgagttaaaatgcaattttttgctgcttcatgtagaatgtcagggtga

SEQ ID NO: 835457 - DNA, 473 bp, Homo sapiens
gacttcatctggtgtcatgactccaacactagctgagtcatctgaagacaatgaccaycttttctacacttcaatttctcatctggaaaaaaaaaattaagagctgggcttgatcatttctaagttcttttttgctctaaaattctatgaatctacaaatatataaatcactttcattttatatcagtttttccttctgaagagaaaaacagaaggaaccaagccttcctaacttcaggggattgagctgttattagtttagaatgtagctgttctttgctaggacaattgcagtctaaacagtggtttcttcatcaaagagaacagagcttacgcacaggaggactaataaatgaaggaggttagctctccatgaagaatgggaaagtttgcttctgaaggttacccactttctagtgaacctgtgagttaaaatgcaattttttgctgcttcatgtagaatgtcagggtga

SEQ ID NO: 835458 - DNA, 473 bp, Homo sapiens
gacttcatctggtgtcatgactccaacactagctgagtcatctgaagacaatgaccatcttttctacacttcaatttctcatctggaaaaaaaaaattaagagctgggcttgatcatttctaagttcttttttgctctaaaattctatgaatctacaaatatataaatcactttcattttatatcagtttttccttctgaagagaaaaacagaaggaaccaagccttcctaacttcaggggattgagctgttattagtttagaatgtagctgttctttgctaggacaattgcagtctaaacagtggtttcttcatcaaagagaacagagcttacgcacaggaggactaataaatgaaggaggttagctctccatgaagaatgggaaagtttgcttctgaaggttacccactttctagtgaacctgtgagttaaaaygcaattttttgctgcttcatgtagaatgtcagggtga

SEQ ID NO: 835459 - DNA, 601 bp, Homo sapiens
catctagtccaaagtgccagtagtgycatggttgagaatttctgatctaggacaatgtctcttcattctgtgtcaaataagttaggcaaccaagatacattaaataacttaagttactaaaaagtcctaaatgtttttctttgattttggaataaaataagataccattgacacgagtatatgagttttagtatgttctttagggaggaaaatgtagagcaatgaataaaaaaaggaaaaaaattacaataatgttttgttttcattaggagatccaacttgttttcaaatataaattctcctaagggttgcttttttttttggtcagcttgagtagattcttctaaggaaaagaatatgtcatgtaattatacgtgacaaaattttcaaggttctgttaaagagatacaactaagagaaatgtgttggaacaccctttcttggaataggaagagttgtcaagattgaaaatattatttcattaaatcttacttatccccagaaaatttcaaaagacatcccctccctccccaaataaaattaatggttatcattttgttccagagctcttaaagagcaaagtatttttaaaattttcttg

SEQ ID NO: 835460 - DNA, 635 bp, Homo sapiens
tctcatacacactgcaactcggatgagccttcgagacattatgctccacgaaagaagccagatacagccaggtgcggtggctcactcctgtaatcccagcactttgggaggccgaggcgggcagatcacaaggtcaggagttcaagaccagcctggccaacatggtgaaaccctgtctctactaaaaatacaaaattagctgggcatggtggcgcatgcctgtaatcccagctactggggaggccgagacaggagaatcgtttgaagccaggaggcagaggttttggtgagtcaatatcgtgccactgcactccagcctgggcaacagagcgagactccatctcaaaaaataaaagtaaaaaaagccagacacaaacgatgtatacttttgatccacatactgtatgatcccattgaaattaaatagccagaaaaaggctaggtgtggtggttcacacctgttatcccagtactttgggaggctgaggtgggagggtcgcttgagctcaggagtttgaggccagcctgggtaacatagcaagacccccatctctacaaataayttaaaaattaggcaggcatggtggtgtgcacctgtagtcctggctacttgggaggctgaggcaggaggatcc

SEQ ID NO: 835461 - DNA, 592 bp, Homo sapiens
acctttgccctctgaaggtttgctgaaacaataactcccaaaggcgagattaattggagaaaaggcatacaaaatatattaacatgtacactgggagaactacagagagattaccaccccccmgccccaaagtggttcagaagcttatagacaatcctgacaaaacaggtaatgggagatgggagagaagaggaattctgttgagggaattactagggaaaataaatgaatcagggaacagagattaacttgtacagtatcttgtgaaagaacctgttcaggtgtggttatatttttggtcttacagggagaggaaaaataaaacaactgttttccttggtgggtccagacattaggtggataaaggaatttaacaactttatcctgtgctttaagagacaaggtgagggggttaaagaggtcattgagaccttgaggctccatcagttcagcatgtcaaagcaccatattttggggtatggattactgagtaccaacaactttgaggttactatgtctatgatgtcactagttgtcagctccactatcttatggggccatagatatcatatggccactatcatatgtggtc

SEQ ID NO: 835462 - DNA, 559 bp, Homo sapiens
ccatcatcctgataccaaaacccggcagagacacaacaaaaaaagaaaatttcaggccaatatccctgatgaacttcagtgcaaaaatcctcaataaaatactgccaaagcgaatccagcgccccatcaaaaagcttacccacaatgatcaagttggcttcatccctaggatgcaaggctggttcagggtgttttttttaacatgaagggatgttgagttatatcaaaagccctttctgtctctattgaggtaaccatgtggtttttgcttttatttctatttatgtgatgagtgatatttattgatttgcctatgttgaaccaactttaagtcccaggaataaagcctacttgatcatggtagattggcgtttttatttgctgcagaattcagtatgctattattttgttgataatttttgtatctatgttcatcagggrcattaacctgaaggtttctttcttcattgtatctctgccaggtttcggtattagaataattctgaactcacacaatcagttaggaaggagtcccttcttctcaattttctgtaatagt

SEQ ID NO: 835463 - DNA, 513 bp, Homo sapiens
gacatatctcaaaagaagacatacaaatggccaataagtatatgaaaaaaatgctcaatgttattaatcatcagagagatgcaaattaaaaccacaatgagatttcatctcatatcattagaacgaatattatcaaaaaggtgaaatataacaagtgttcaataggatatgaagaaaacagaacctttactcaatgttggtggaaatgtaacttatagtagccattgagtaaacaatgtggagtttccttaaaaaattaaaaatagaactacaatataatcccgtattctcaccactgggtatataagtttaaaggaaataaaatcaggatattgaatatatctgcactcctaagtttattgcagcactattcacagtagtcaatatatagattccacctaagtattcattaaaggatgaaaggataaakaaagtgttgtatatgtatccagaggaatattattcatcctttaaaaagaacgtaatcctgtttaggacaacatggatgtatgt

SEQ ID NO: 835464 - DNA, 622 bp, Homo sapiens
agcattttacttcaagcccgttaagatgactattataaaaaaaagaaaataacaaatattggtgtgtatgtagagaaattgcaaactcttgtatactgttgttggaatgcaaaatgttatagccactgtgaaaaacagtatagtggttcctcaaaaaattaaaaatggaattaccatatgttccattaatcccacttctgggtgtataaccaaaataattgaaagcagatttgcaaagaggtatttgtatacccatattcataggagcattatttacaataattgaaacatgggagcaacctgtgtccacagacaaataatggctaagtaaaatgtcacacacacacacacacacacacacttacaatggcctatattattcagccttaaggaaaaagggaattctgacatatgctacaacatggatgaattgtgaggaaattctgctaagtaaaataagccagtaacaaaaagataaatatggtatcattttacctatatgaggtacttagagcrgtcaaactcataagagaccaagagtagaatattgtttgccaaggtctaggggtaggaggatatgtggtttatctatggaatggaattttttttggccatacaaatc

SEQ ID NO: 835465 - DNA, 669 bp, Homo sapiens
atatgagtttcttatttctcagtggatccttcagaaaaatgcattgagtaccaagttgtaatgtagaggttatgcataaagctactgaaaatgattcattatactctcaagcattagccttggggagcctggcatatgataaataataagagcattctatggaaaaaaacctagagcactttttgtagtcagaatctcctctggtgatttgatttttatttttggatgttcttttggtaccattaaggccaggatctctgtacccttatgcaagttagaaaaaggtccctcttggggagaccaactccaaaacacaactcttcctctgactatcttcccctttccccttccgatggtcatgacttggcaaacagagtctgaagtaggtccttaagcctcagccaggcacccttatgagggtatgatctaaataagtatttgtggaagcctaggttcttagtctatttgtgctgccataacaaaataccacagaatgggtaatttataaataatagaaatttatttctcatagttctgaaggctgggaagtctgagagcaaggtatcagatggtgagagccttgtgtctctgcttctaagacgktgtcttgttgctacaacctctgcagggaaggagcactatgtcctaacataggagaagggtaaaatg

SEQ ID NO: 835466 - DNA, 605 bp, Homo sapiens
gcaattaagtcccatcttcaggctccacttctaattctacttctcttactagttccatcacatctgcagttaattcctccaatgaagttttgaacccctcyaagtcatccctgagagttgtaatcaacttcttccagattcctattcatgttgatattttgacctcttcccataaatcacaaatgttgttaatggtatgtagaatgatgaattttttccagaagatttgtcgcttactgtgcccagatccatcatggaaatcactatctagggcagctatagccttatgagatatatttcttaaacaatatttgaaatatgtatgtcctaaaatatgtatttcttaaataatattttaaaaaatacttgatgtattatttaacacttgaatgtcaaaattactctttgatccatgggctgcagaataaatgctgtgttggcaggcataaaaagaacattactatcatgtacatctccattacagctcttaggtaagcagatgcattgtcaataagcagtaatactttgaataaaatcttttattttgagcagtagttctcaaaaataggcttaaaatattcagtaaaccattctgtaaacagatg

SEQ ID NO: 835467 - DNA, 619 bp, Homo sapiens
gtcatcacaaacatcaagatgtgaagtagatgctattagaattgttaaagaacaagcatcaagcatacgctactcaccccctactcccctgaaaggcaccaccttacttcacagaggtcttttgagtggctgagagtaagtgtaccgatctaaaggtcagcagacactaagttctggctttaccatttaataactgattagccacatgatcataaaaaaatctctctctcaaactcactttcttgaaccagaaaatgggagtaacgctctacctgcttcaatcttgttacataaattaaaaacttttgtcaacgtgggctgtgaactgaggtactgcataatgtcatatacacatatgtaaagtttaggccagaagcagtgactcacacctgtaatcccagcactttgggaggccaaggtgggagtccaggaattcaagaccagcctgggcaacatagagacctcaaatccacaaaaaaaaaaaaaaaaaaaaaaaaactcaaaawttaggccggtgcaacagtcccagctactagggaagctgaggcaggagggtcactggaactcaggaggtcgagcctgcagtaagctataatggcgacactgcacttcagcatgg

SEQ ID NO: 835468 - DNA, 619 bp, Homo sapiens
gtcatcacaaacatcaagatgtgaagtagatgctattagaattgttaaagaacaagcatcaagcatacgctactcaccccctactcccctgaaaggcaccaccttacttcacagaggtcttttgagtggctgagagtaagtgtaccgatctaaaggtcagcagacactaagttctggctttaccatttaataactgattagccacatgatcataaaaaaatctctctctcaaactcactttcttgaaccagaaaatgggagtaacgctctacctgcttcaatcttgttacataaattaaaaacttttgtcaacgtgggctgtgaactgaggtactgcataatgtcatatacacatatgtaaagtttaggccagaagcagtgactcacacctgtaatcccagcactttgggaggccaaggtgggagtccaggaattcaagaccagcctgggcaacatagagacctcaaatccacaaaaaaaaaaaaaaaaaaaaaaaaactcaaaatttaggccggtgcaacagtcccagctactagggaagctgaggcaggagggtcactkgaactcaggaggtcgagcctgcagtaagctataatggcgacactgcacttcagcatgg

SEQ ID NO: 835469 - DNA, 572 bp, Homo sapiens
tttcctttcatttttcacattataaaacctgttcaataattctgttttttattctcttgtattttaaactacttttcaatgaaagttatgttatacctctcattcttcaatatttataatagcacttaattttcttgtcatattgcatatgctaaaacattcaagagagaaaaggtaataatggtgatgacaaatatcgccgtgaagttcatgatttgattttgaagttgtctgaatatttttctctttgggatgtatttgctaccatttttagtaaacattatttatcacatatagctgatttatttttcttattccactgaatttagaaaatatattttcaaaatgtggggatatgatataatagatcttgctaaacttactaatatatttgattatgacaacagactattaatgatatatctaatatatttctatctttttaattatttgaactatccttgttagttttaaagttaaaaagttatgcttgctccataaagcaaactgacatactttccatcttctttcgtagcctgagtttatttaaatmacataaaaattttctgttc

SEQ ID NO: 835470 - DNA, 508 bp, Homo sapiens
cactttcggaggccaagatgggtggatcccttgagttcaggtgtttgaggccagcctgggcaacatggggaaaccctgtctcttcaaaaaatataaaaattagccaggcatggtggcacccacctrtagtctcagctacttggggggctgagacaggaggatcacttgagtccaggaggttgaaggtgcagtagccaagatcacaccactgcacttcaacctgggtgacagagcaagaccttgtctcaaaaaataaataaataaaataaaataaattaaaaaaagagtacacacagtcatgtgtgagagagacagagagaaaaagagagaaaaaggaggactgaattcatcctcacataaggaactcgtttccatgctaacagctttaatccattcatgacagtggagtcctcatgacctaattacctttcgttaggccccacctcccaacactgttgcattggggattaagtttctaacacatgcttcttgagggacacattcaaac

SEQ ID NO: 835471 - DNA, 589 bp, Homo sapiens
cattgtaatgaaaagaccatgtctgagaatggctttaccctctggtgaaatgcaccctgatctttgtgggtgagcaccttcttgttcttcagtctttggtgactaaagattctacaaggcttataaggtctacaggggctggtgagtgaataacaggcatctacagaccaacttagtgtgttagtatcatctttttttaccctgggaaaaggaaaaggaaaaacttattttttccacttagactcatcacaagtcttagcacatttgaaaacattccaacgacaaaaatggtcgtttcagagcatgaagccattgggtcccaagtttgtcagcttctctgcttcctcattattccaatgatcaaacagcaaccgctctgcaagcttctctgtgcccctccccaccgccgttgtcctgcagattcccttctccaaaatcaccagtgtgtgatttccttggaataaaaagcagatatataaggttactcactttttcctgatgttgaaacttgcctctcagtcacgtcagcctggcttcatccacygtcagtactgtctctcccgttttactattttatgtgtatatttta

SEQ ID NO: 835472 - DNA, 602 bp, Homo sapiens
gttgaggcctttgtaaatggtwttgttttaaatttaattttcagatcgcctattgcttatatatagaaatacaatgattttgtacattgatcttatatcccacaacattgcttaatttgtttattagttctaattgtgtttccatggtctgccaaacttttaagaaatagttgtcttctcctgtagaatttttattagaatatataaacaataaaaaattgcctagctattttatatgaagctagtgtcatcttgatttcaaaataagataaaggcaatgtaaaaacagaaagtacagtttcaaaaatcctacatatagagtaatattaatcaagagattacaatattatattttaaaaagaataaatcattaccaagaagggctattccaggagtgcaaagatggatgaatatcagaaaagtaatcaatgcctttctccaattaactgattgtaacaaaaaaattagatgatcttctcaaaaagtcaacaatgcaagaaaagttatttaagaaggccaatgctcatttatgacttaaaaatgaaagacatctcagcaacctagatcatagaagaaatttacttagcaaagtttcagataaa

SEQ ID NO: 835473 - DNA, 502 bp, Homo sapiens
tcattcttcgttattttccactcctgagttttggactcttctctcggtcaataagtatatccgaattcttccagctgtaaaaccaacaaatgaaaggcctcgtgtaccaaggctgcccccgcgtgcggccccccgggctgtgtggccttggcctggagcacagccccgctgccaccttcctgcactccgtgggggagatgggcggtgcacactacccagaagtggaatgtgcatttcacagaaaatgaccaatttaagcagaaaattaaagcagaaaacggggtgagaacggcagacgcgtgtgtgggcaccgcagcgtacacgcttaggatcccgagtttatttttctagggcccgtgtgttggtgcgcatgcgcgtgcgcccccaccacctgaaatcttggtrgtgcctgttaacccggcagtagacccatgggtgaatttactctcttctctgtgtctttctgtattttccacgctttctgtgacgaacaacatcatac

SEQ ID NO: 835474 - DNA, 502 bp, Homo sapiens
tcattcttcgttattttccactcctgagttttggactcttctctcggtcaataagtatatccgaattcttccagctgtaaaaccaacaaatgaaaggcctcgtgtaccaaggctgcccccgcgtgcggccccccgggctgtgtggccttggcctggagcacagccccgctgccaccttcctgcactccgtgggggagatgggcggtgcacactacccagaagtggaatgtgcatttcacagaaaatgaccaatttaagcagaaaattaaagcagaaaacggggtgagaacggcagacgcgtgtgtgggcaccgcagcgtacacgcttaggatcccgagtttatttttctagggcccgtgtgttggtgcgcatgcgcgtgcgcccccaccacctgaaatcttggtagtgcctgttaacccggcagtagacccatgggtgaatttactctcttctctgtgtctttctgtattttccaygctttctgtgacgaacaacatcatac

SEQ ID NO: 835475 - DNA, 193 bp, Homo sapiens
atacaattatttcatttttacgtaaaggacagtgacatatttacagctaattttttcactcaacatcgcttttaatacatacaactcatactagattgttttttacttgagttaaaaacaccatatcatagaatcacaacttaaagcaagtttctctacatacayttagaagtaaagttaagatagtatacat

SEQ ID NO: 835476 - DNA, 594 bp, Homo sapiens
tactctaaatctacacttggataaataaatttgtttggaaaaaccctatatgagattggtcattattataatcatctcgatgtttcaatgagtttttggtctatatgaaagttgattttargatatggtcatttcttgggagttgcacacaatttcatggaagcagagcagaggcatgtgggcatgtatttcattatgggcacaagggtgctggaggaaggaggttaaacagatgatattgtgatttttggctggtttcctgaaatttcaagaatgcccagcacatctgaggatgaaatgaaattttttgtatacctatgaaacacacagtgtttgtatacctatgaaacacacagtgtgtggcatggaagagacacttggtaacttcattcatgaatgggggctccacagcgactaaagaagggaaggcatgggaaggggaggggaaccgccctgggacagaaatgaaagagaagaaactgagacacccacctgccggggcttttctcgggctcttcctggcagaaccccattatcagttgcatctccactcagccctcacctcctcttcccgccgccgagcaaccagccaag

SEQ ID NO: 835477 - DNA, 557 bp, Homo sapiens
gtgagcaggttccagaggtgttcggccarcatgagcaggtgctccaggcctgatccaccggctccgcctgctccgccctaggccaccacgcaccactgtcttctatgatgtttgacttctgggagcaggtcttaccttcccagctggattggaagtctttgaaaacaggccgtctgccctatatcccctccctgccccaccttgcctggaacagaggcctcggacgtggcagagcaatagaaatctgctgcacgaagagcgatgcgcgaaggagggagaggaagggaactgtggaggcggcggcctgccctgccctgtcagagaggcagctatgctaggagtcttgcgtgctctctggttattctccgggcgctgcacagggagcctggtgaggagggagggcttggcaggctcctgggctcgccctcgcctggcaccaaggagcccgctgttatttctgtgtgttccaggcacacgctccagcaccactaggggacattttaggacattctgggggcagttagcaccgggggcagtggtcacctggtagaaaaata

SEQ ID NO: 835478 - DNA, 298 bp, Homo sapiens
ttttacatagaaaggcagagggaaaggcagagtaatacttttaggttttatagctggctttgaggaaaagggtttctaatttctaagactagccttggggaggagggattctagtttctgcggctagccttgagggagagcgggactgagagacaggagagaaggacaaagtcaraaaaacttttgctcctgaggctgcttctcaggccttcattttgggatattgtttgctgagccgaacagcactactggaatccatcgtactgtcagaggcatttgaaccagagcaactccatct

SEQ ID NO: 835479 - DNA, 603 bp, Homo sapiens
ccctgtctcaaaaaaaaaggggggtgaggtgagagtgggcaaatgacatgaacaggcatttmtcaaaagaagatgtacaaatggacaaaaaacgtttttaaaatgttcaacatcacgaatcactagggaaatgctagttagaaccacagtgagatactaccttgccccagccagaatggacactattgaaaagtcaaaaaacaatagatggcatggatgtggtgaaaatggaacacttatacactgctggtgggaatgtaaattagtacaacctctatggaaaacagtatggaggtttctcaaagaaccattcaatccagaaatcccactacagggtaagtactcaaagggaaaaaaaaatcattatatcaaaaagacactagcatctttatgtttattgcagcacaattcacaattgcaaaaatatggaatcagcctaagtgcccatcaacctgtaagtaaataaaatgtggtataaattccatagaatactactcagctataaaaaaaaggcaaaataatgtcttctgcagtaacttggacggaactagagactattattctgagtgaaataactcaggaatgaaaaaccaaatactgtat

SEQ ID NO: 835480 - DNA, 621 bp, Homo sapiens
gagaattgttcgagtgaatggatgtgtctaacactgaaggaaagcagggaaaggagaccagatctgtgctctttggagtttcagattgtagctctaaggatctaaatttccagagggagagaaagtagggaaatggtccataactcatttgtcttccattttctgtcccgtgggctaggtaggtctgttcttgatatggttgggagagtggttgcctgtctcagtgttcaatgtcagatgacaatattagctcacattgtaaatattctgagagtgccataccctcaaggtttcttgttaggttatttcattagggagtgttttctaagattggcttaaagtaaaggattttaaactttttctaagagagacattttaaatttattttaattttcatgggttctccaaatgcagtagactttttggcaaaatctcaggtaaacctcatacatataaatcacagaaatggaagaattaggtaggtgcaaaagtaattgcgstttttgccattacttttaatggcaaatacttcagttaatgcaggggtgatctaggacctcacctgcttatcatttctttgtcctttgtcaaagccctgaagcatctgggggactttagggc

SEQ ID NO: 835481 - DNA, 620 bp, Homo sapiens
gtcctttcatctaaactgttgatttattggaactgcagtgatatttcttcgtgtatatctgatattggcaatttgtgttttctcttttttcttgcttgatctttccaggtatttatgaattttattaatttttttcagggaaccaacttttgggtttttttaatttttaaaatttttgcttactatttctttggtttctgcttttgtattatttcctttttttctacctatctttcttttgttttccttgtttcttaaggtggaatcttagatctatgatttaaagattttcttcaaatataagcatttcaagctacatttttttttttttaaggcagagtcctattgtcgcccaggcccgagtgcagtggtgcaatcttggctcagtgcaacctctgcctcccaggtttgagtgattttcctgcctcagctcccggagtagctgggattacaggcactcaccaccatgcctggctaatttttttgtatttttagtagagacagggtttcaccatgttggccaggctgttctcaaactcccgacctcaagcgatccgcctgcctcagcctcccaaagtgstgagattaaaagcctatgagccatcatgcccggctcaagt

SEQ ID NO: 835482 - DNA, 773 bp, Homo sapiens
ttgttttaatttgcaaatactttttaaagcattaacgtatttatctgtttcaatgagttgacttgaggtaaaagccaggtgggacatgctaggtaaactaatgaaataatacattattttttgagaataatgaaaatatcaaaaaaggaattgcttttaaccatacacttgcattcacgtttttcttcccttgggagaacatcagtttattgatttttataattaatctggactaacagatgtctgactgattagttctggtaacaatatttgtcatttttgatatcttctcagctgttccatatgggatttttttttaatttctatagtttcttaaatcagagccaatgtgtagtcatttcttgacatttatgactcaaattttggtactgctaaacttttaagaatttctcacacttagttctcatatttctgcattcttcacagaaacaactgcaatctcctctttcttcaactttaaggatgaggctgacactgtcaacactgtgagaaaagtaatgctagatgggggcatgaatatcctagaagtgttctaaaaaggagctttgttagaggacaggtaggtagaagatgctgaaaagcatggctttcccagatgccctttctagtatcatcacagtaagaaacagcggtatgaccaataaaactaaataaaacaaaaaccaagctttgttcgggtagtacagtttgtggtcaagaacataagttctggaattgtacaatttggatccsagttctgactctagctcatg

SEQ ID NO: 835483 - DNA, 628 bp, Homo sapiens
cacattgaaggctattgcagattttcacagtcctgtcttctgatagaagaactgtagcaatgtagcaagcagaaagctttaggtttttcacagcattaaaaaagcatatgatcaaaattcaaacrgataatacatttttgcaactgttctcactatgagactgaaaattgacaatgtcttctgcctttatcaatgatttatttcaattcataaaatgtcattctttataaagcatctgtttaatgattagagaaatatataataacacactcaatatgatagcatttggcttctaggaaaagacaatacgttccataataatcaatcaattggttaggttcgggtagcttttccttttgtgccatttaaacctgaaattttattttgacagcaggtactaattacaaacttcacaataatttaattttaaccatgcttaggtatctcaaatatctttgtactgattactaaaaagcttaaataacataattttaatatgatataaaatattcatttttgctttttttaagtggtttttgaattatgagggcatagtgatgtttctcttaaatatagctctactaaagtaaaatgcaaataacagtcagcttttcaggacatttggaag

SEQ ID NO: 835484 - DNA, 578 bp, Homo sapiens
taaagaagacaatgtagtgttgacatcaagatasacaaatggattgatggaacaaaatagagagtcaagaaatagacccacacatatatggccaattttcttttttggcaaaggtgcatagacaattcaaaggagaaaggatcatttttttcaataattgatgctgaaataatgggatatccaaatgcaacaaacaaaccgaaactttaatctattccttgtagcacatgcacaaatgtactcacagtagattacagacctaatgctaaatctgattagaataaaacttctggaagaaaatataggagaaaatctgtgtgacattctgttatggcttaaatgtgtcacccagagttcatatgctggaaattgaatccccattgcaacagtgttgagaggaaagacttttattagggctctgccctagtgaatggattaatagcattatggtttgaatgagttagtttttgcaggagagggttcctgtaaaagaatgcattcagccctctttcttttgctcttgttctccctgcctttctgtcttccaccatgaaggtgccccccacctgattctagca

SEQ ID NO: 835485 - DNA, 496 bp, Homo sapiens
cgcggaaagccacagggaggtgaccatgggaagaggggtcagagcctgcttatattccaggcaatatctggagcatcatggggacaaaacttctgaaaaacaatttttacatgcaagcaattatttttcacatcgattaatccaatcctgtgattctatagcagatactcaggcagaaccatgctttgagaatttccgctattatctgatatttaaaaatgtgtttggctcccacattgctggagagtgcatacatggtatagttcctttagtccagaagttgaagctctaaacagtaaaataaacatgtcacatgtttattcacatactgtccaaacacacaccaactgcactttgtggttggtttgaarttttgatttcagtttctgtgtttatttatttttctcttaagaaacaatgtgaatatcctgtactgggatagggttggagctgggggaggcggctctttccatatgatgggagaaactgaagttag

SEQ ID NO: 835486 - DNA, 548 bp, Homo sapiens
cgatcttgaaattcttctttagaaggactattttacgtgggcaactctatatatagttgcgacatttattcctttttttttttaaacaaagaaaagtttttgcaatactttatcacaaaagttaaccgtactgacattctacctgttttaaaatacttatttaaaactctatatcctctcatatttgtgacaaatatatagcatagtagttaaaagcccaaaagataaagctaaactatctatgctcatagtcttttctacattcagtagctctgtgtctttaggaaacttacctaacttccctgaacctcagtttctttgtatgtaaaaaggaaataataacaatacctacctcataaggttatcatgaagtttcaacgaattaatacatatgggatatagcacaatgcctacctcctgggaggtagtcaataaaggttagttattactttagttagtaccttttagacctagaaaacttactsaatctttttaagtttcatatttctcatatattataatgtaaatatttactcttttttccttaa

SEQ ID NO: 835487 - DNA, 473 bp, Homo sapiens
gtgtgtatgtgtgtgtgtgtgtggtggtctggaragggcagaacagagcataggacttttcagtttccctgcacatgggcaccaactacgaggaataaataaccaactttaactcagtcaatccagacgttttccttcctttagcggtggctttttatttctctctcaccaggttagatggacacaaggctaaaaacagggattcccagacagtcctgtgctctcgctgccaccctcaactcctgccaccaagaaatgtcaatgaaagaggactgtcagcccacagggctgcggattcctttgtgccactcacaggcttctgcaccactgccctggaagccaaatattaataccaatatggaggaagcctgaaccccgcctctgagctcttcatccctcttctacctctttctttgcccaatattctctcttcttcctccctaggtgtgtgagagctcccacactggctgttt

SEQ ID NO: 835488 - DNA, 609 bp, Homo sapiens
tatcttcacctattatatatttatttatttccatctctacccctagaacccaaackctttgagagcagggacttttgttttgttcattagtatattactggcatttatattaataatggacacatagtaaacactcaaaaaataatttttaaatgaattgaatgagtaccccaaaggaacacatctaaaactataacttataataatacatttctcccctgtggacacagggagaaacatgtaggactggggacagattcggcaagtcttcccatcacactgggctttagggcccccatgtgagagcctagagtcttcatgtactaactacatcaatcaatagaccaacagtccagcccaaaccctctgttatcaaagaacagcagcatatgagaggcttcaatcttgagtgtgtgggggcataagtatttttttcttttctatctcaaccaccactctcccaattataataaatgaataaagtagattgaagctaagaaaaaaaatacagcaaaattagaagctggcaaaaaaacaaacccactgcctggggcagcctggggctgatggatgatgacagctagcagacaaatcctgttccccattcta

SEQ ID NO: 835489 - DNA, 558 bp, Homo sapiens
atatatatatatatttttttttttttttttgagacggagtcttgctccgttgcccaggctggagtgcagtggcacgatctcggstcactgtaagctctgcctcctaggttcacgccgttctcctgcctcagcctcccaagtagctgggactataggcacttgccaccacacccggctaatacttcgtatttttagtagagatggggtttcaccttgttagccaggatggtctcaatctcctgacctcgttatccacctgccttggcctcccaaagtgctgggattacaggcgtgagccaccgtgcccggcctcctttccaatatttataccatcttcttcttacctcattgcatcttttgccagggcttccaacatgacatggaaaaacagaggggacagtgtcctgcttgtcttgaacctgactttgatagaattacttctaatgaatttctattagatataatatttctaggtaattggagtgattataaagttccaaaagtttccttctattctagattgctaaggattttcaccagatattagatgttattaga

SEQ ID NO: 835490 - DNA, 584 bp, Homo sapiens
gctaaatgaagagagtgggtaagccctcctcctttggcccttttcttccttgaatgaggactacgtgagtactattatgaggatgagtgctggtcagttgagatttgatcagggacttgtcatctcccctacagatctctgtcccttttgaatagggctatacacacagtggaaatcacatgtggtcacagctacctgagaccggcatacaagccttcgcctcttcctccagtgctgggaagagttaatgttcctgtgatggagtgccagttgaagtcattgactggcatttaagagccatgttgacacatgagtatgtgctgcaactttaaatgcttgaggcacatcaggggtggcaaggcacgtgggcaggggcccccaagtctcagccaactccagggtatgtgttcttcagaggaagggcctctactctctaaatgttctcaggctcttgctgagtgtgcgttgttcaattggaaagggtaactgtgcacctatgagacacccctgtaaaacactcatctgccacacacagcaagcttcwtttcttggtgaggtgctttggatacccgcttctctcccct

SEQ ID NO: 835491 - DNA, 720 bp, Homo sapiens
caaaagaatacatacaagtggccagtaaacgtatgaagaaatgtgcagtatccctaatcataacagaaatgtgaataaaaactgcaatgggataccatctcacactagtcagaatggctattattaaaaagtcaataaacaatagatgctgatgaggttgcagagaaaagggaaaacttatacactgttggtgggaatgtaaatgagtccagccaccgtggaaagcagtctgaagatttctcgacgaacttaaaacagagctaccattcaacgtaacaatcccattattgggtatataaccaaaggaaaataaatcattcaacaaaaaggtacatgcacttatatgttcatcattgcactattcacaatagtgaagacagggaatcaacccaggtacccatcaatggtaaactggataaagaaaatgtggtacatataaaccaggaaatactaggcagtcataaaattgaataaaattatgtcctttacaacaacatgatacatctggaggccataatcctacgcaaattaatgcaggaacagaaaatcaaataccacctattctcacttataagtgggagctaaacattgagcatacatggacataaatataagaacaatagacactgcagataaccgaggggrcatgggttgaaaaaccacctatctggtactatgctcactacctaggtgacaggatccataccccaaacctcagaa

SEQ ID NO: 835492 - DNA, 511 bp, Homo sapiens
ctctctggaagtgtctgtcttatgcagtttttgataagggatgaaatatgccctggtctcccacagtgcccccaggcttgctaggattcggaaattccagccaggcaaaattctagtcagaccggttgtctgctctcaaaccctgtttcctgttaagatgtttatcaatgacaatgtgtgcccagcaggacatggaccttcatcagtaattctagttttgccctggccttgtgatctcattctgcctctctgcccttgtgatattttattgcctttgaagcaagtgatctctgtgacccactccctattcatacacccctccccttttgaaacccttaataaaaacttgctggttttgtggttcaaggggcgtcatggaacctgctgatatgtgatgtcacccccggagtcccagctgtaaaatttctctcttttgtactctactctttatttctcagactgaccracacttagggaaaatagaaaagaaactacattgaaatattggggg

SEQ ID NO: 835493 - DNA, 504 bp, Homo sapiens
atttctgattgcacgtatttggatcctctcctttttcttggttaatatagctagtagtctatcaattttatttattttttcaagaaacctaacttcagtgatcttttgtatggayttttgtagctcaatttcattaagctcttctctaattttagttagtttttttctcctagctttggggttggtttgttcacatttttctgctttctttaggtgcaaagtcaaattgtgaatttgagatctctctaaattcttgatgaaggtgtttagaactacaaactttcctcttaacactgctttggctgtatcccaaagattttaatatgttgtttccctatttttgttaatttcaaaaattttttaaatttctgccttaattttaatgctgtcccagaagttgttccagagcaagttgttttattgccatgtatttctgtagttttgagagatcttcttgatattgatttatatttttatcatgctgtggtctgagtctgtgcttgg

SEQ ID NO: 835494 - DNA, 534 bp, Homo sapiens
atgtgtcctttgatacactaattttaaaattttgataaagttcaatttcctagatgtttttgtctcatacttttggtgttatgtctaaaaaaccattgcttaacaaaacgtcatgcaaagtttcccgtrtgttctctcttctaaaagttttgtaattttggcttttacacttagatttaaatccaatttaggttcatttttgcctattgtgtgaaatagggggtccaaataaattctttgcctgaagaactttgaaaagactattcttttcaacccataattgggttgaaaaggcaattgtgaagactattttcacacaatttttaaaggactgttttttccccattaaatatttttggaattcaaatctaaaatcaaacgatcataaatgtaagctatatttctggatgctcaattctatttatttgtctgttcttatgtagtacacactgtattattatagttctgtaataaatctcattatcaggaagtattaatcttccaactttgatattctttttaagtgttactttg

SEQ ID NO: 835495 - DNA, 619 bp, Homo sapiens
tcatgagaatcataatgactttagcacaccaattccagtctccataatggccttccaggactgcagggggccaatcagcgccttcctcctggagaaaacagtgattctaaagtttggaaaggctctcaaaagtagtaaaataggtcataaaacagagttaaatatgttttatatagcttcacagactgatgtgccgtagaatttattgaggtacttaaatggattttgggctggccccttgtgggacatctgattctgtctttatcctggaaaaagtgttaggcagcctagcaaggctgctttcctttacccaaaccaaggcacatttgagatttcacagggccatgctggtgcgaatgtctccagaagataagggtcattctagaagagagagaggctggattaagggtagaggaggcatgggaagttactgggcaaatgtccagcattggattagagactaattaaatacacatcctttattttctcatcttttttctgcctggcctctcaaaacgtagattgggaagactatatggagaatatatgtatatatatatagatatatayacacacacacacacacacacacacacacacacggaattcatatatatat

SEQ ID NO: 835496 - DNA, 646 bp, Homo sapiens
ttcaacgtactttacctgataatataatctgaagaatgaagtgacagtgtatttttaaggattccttaattatgttaacatatttcagattaaaatgaatayatacacacacacatcatgtaaaatatgacatttggaacatttctcatataatggtaaatgagttaacatatagtaataatcataataaacaggcagcaagttatattctgagattcctttatggctcatagtctaaatggttatgattttgtgccattttgaaataatcaaaggaattccctgaaatagtgatggagtgtcaactcatttacagtcagttttattagggtctgtgtggaaaggacaccaattcaaaatactagaacttgtttctgacctcatggctagagcaaaaatggtgttttagacacctttataaataacagtgccagcaacttagactccatactaatttattaattggttaatttactgcctactagtctactaaaagccttgtaacatggctttactgatagatgacagttcaggtagttaaattctgtgaaatccagatctcctaaaaataattatcagaatagctaataatattatagttagcaaaccaattatttaaaaaatcgatataaaggatctgacatgt

SEQ ID NO: 835497 - DNA, 627 bp, Homo sapiens
tctctaatgatcagttatgttgagctttttttcatatgtttgttggctgcataaatgtctttttttgagaagcgtctgttcayatactttgcccactttgtgatggggttgttttttcttgtaaatatgttcaagttccttgtaaattatggatattagacctttggcagatggtagattgcaaagattttctctcattctgtaggttgcctgttctctctgatgatagtttcttttgctgtgcagaagctctttagtttaattagatctaatttgtcaattttggcttttattgcaattgtttttggcattttcattatgaagtctttgcccatgtctatgtcctgaatggtattgcctgggttttcttttaggtttttatggttttgggttttaaatttaagcctttaatccatcttgagttaatttttgtgtacagtgtaaggaaaaggaacagtttcagttttctgaatatggctagccagttttcccagcactatttattgaatgggagattctttccccattgcttgcttttttcaggtttgtcaaagatcagatggttgtagatgtgtgttgttatttctgagggctctgttctgttccattgctctatatgtctgtttt

SEQ ID NO: 835498 - DNA, 593 bp, Homo sapiens
agtgatggcaactagcagagagaagtttctctttagatataatggaagtttttaaaaatttttattttttgtagagatgggggtcttgctgtgttgcccaggctggcctygaactcctggctttaaacaatcttcccatcttgacctcctaaagtgctgggattacagatgtgagtcaccttcccgcccactgaaatgtatttttattgaaatgacttagatgcttttcaattagaaaagtgttttactgcaacagaagtaaactctacttgagtccaataacagagggggtttgtttctctttctgtttttgtgtttaatcagaggtccagagagaggcaggccaagattattgcagctgctttgtgatgtcaacgtgcatcaaggactcaggcatctctattgccacggttcctcatagttggaagttggctactgtgcctctagtcatcatatttgaatacaaaaaaggggaaaaatgaagggccccagagctgaaaggacatgccagtctgcctctttccagattgttccatagtcttgtctagtagtgtgtgagacccacgggcagtgtgttggtgatgtattggcaa

SEQ ID NO: 835499 - DNA, 608 bp, Homo sapiens
ttggaactgtttcagaaggaatggtaccagctcctcttgatacctctggtagaattcggctgtgaatccatctggtcctggactttctttggtcggtaggttattaattattgcctcaatttcagagcctcttattggtctattcagagattcagcttcttcctggtttagtcttgggagggtgtatgtgtccaggaatttatccatttcttctagattttctacttcatttgcatagagatgtttgtagtattctctgatggtagttgtatttctgtgggattggtggtgatatccccttcattagtttttattgggtctatttgatttttctctcctcttcattagtcttgctagtggtctatcaattttgttgatcttttcgaaaaaccacctcctggattcattgatttttttttttttttgaagagttttttgtttatctatctccttcagttctgctctgatcttagttatttcttgccttctgctagcttttgaatgtgttcgctctygcttctctagttcttttaattgtgatgttagggtgtcaattttagatctttcctgctttctcttgtgggcatttagtgctatacatttccctc

SEQ ID NO: 835500 - DNA, 497 bp, Homo sapiens
cctcagtcagtaagtggcatcctggaaagatcacactgtgaacccggagtacccagtggttctgaatccctgcgtgaccctgggcgggtcactgccctccgtgaacactggactcgctcttagacttggcgaggattgcacacacctggccctcaatggggcacataccttttactttgccacagactcccccaaccattgcccaacccagagccaccccacactctacccttggctatctggcccctgaaggctttgagtttgtgacccctgaaagccaagcttcaagagggctcagttttagttccgactgtgccctggatgggctgcgtgaccttccacaagcccctgggccccattccgcaaaccttccacrtggccagcgtgcggtgcggggagatggtggtgggaagtgggaatacgactgaacagctggaaagacaggggaggggaactgacatgaattggatgccccaagcagcagaggtcaccagcag

SEQ ID NO: 835501 - DNA, 497 bp, Homo sapiens
cctcagtcagtaagtggcatcctggaaagatcacactgtgaacccggagtacccagtggttctgaatccctgcgtgaccctgggcgggtcactgccctccgtgaacactggactcgctcttagacttggcgaggattgcacacacctggccctcaatggggcacataccttttactttgccacagactcccccaaccattgcccaacccagagccaccccacactctacccttggctatctggcccctgaaggctttgagtttgtgacccctgaaagccaagcttcaagagggctcagttttagttccgactgtgccctggatgggctgcgtgaccttccacaagcccctgggccccattccgcaaaccttccacgtggccagcgtgcggtgcggggagatggtggtgggaagtgggaatacgactgaacagctggaaagacaggggaggggaactgacatgaattggakgccccaagcagcagaggtcaccagcag

SEQ ID NO: 835502 - DNA, 565 bp, Homo sapiens
gagctaaagcaagggaagcatttccccttcccytggctgaaagctcagctgaccccgaggctcttctggtcatgcttaggtatgtacattttatgtcacgaaatccagtatcgacttagagatttaaagcagccacccaaagatattaaatgactcttgcatttttcttcaaagagaaatcttcttcctcctgccctagttaaggccttagttgggggctgccagctgccagggactgggcatggtggcttttgtctattctctcccgaatacccctctccccacttgctggttgctttcagagtctaagtggaggtggtgggtgaggatgcagggaagcggatggggagcaggggaatagggcagtttttacttgactgtatgattgccagctctctgggtgtggcagatggtgaaagctctttctggagggttccctgtgttcttcagaagttcccatctcagccaggcttggtggctcacgcctataatcccagcactttggaaggcggaggcgggcagatcactggagcccaggagtactagaccagcccgagcaacatgg

SEQ ID NO: 835503 - DNA, 644 bp, Homo sapiens; identical to SEQ ID NO: 812913

SEQ ID NO: 835504 - DNA, 584 bp, Homo sapiens
gggagaaaacattctttgtaggtagagaaaagagccccgtaaaggcacggggcttcaaagttcatattgtrtttaaggaacaagaggaattcaatgtggttagaaattaagaaaaaggaagaggcaaaaagaggaattggaggcaatttcccagaggccttgtgttccaagctaaggagtttgtcttgatcctgtaaggcgcctggaaaatttttatttatttatttttattttttatttttttgagatggagtctcgctcggtcgcccaggctggagtgcagtggtgcgatctcggctcactgcaacctctgtcacctgggttcaagcgattctcctgcttcagcctcctgagaggctgaaattacaggtgcgcaccaccacgcccagctaatttttgtatttttagtagagacggggtttcaccgtgttggtcaggctggtctcaaactcctgacctcgtgatccaccctccttagcctcccaaagtgctaggattacaggcgtgagccaccacaccctgccttaaagcaatgttgtaaggcaggtttaggctaaattacatgaaattgccaatatttgatg

SEQ ID NO: 835505 - DNA, 593 bp, Homo sapiens
gagtctcttgcctgtctttctcagttcccctaattcctgctccatcgagctctgcctaggccacccatagttttcttgtttctaccccaggtggctaattaactcactagcacgtttagccagatgcaaactcataatagtttacatcgaacacagtacacttcaacggcatgccttctgccagagcatcagagtagcagccaatggcatttctagggtctcttggaggaaggagctggcatctgagctacctcgggctccaggtcagctaaggcaggaggctgcagttctgctggtggtcattgggaggagcccgcgcgaaggaagcgggcgggggaaggtgtaggaaggcgatcctgcaggtggagaggcccggggagacttttcccacctgagtcacttctccagtgaaggtccacgtcaggcccggaggctccacccagctacggggctgctgcaaaagaacacacgcrgtggagagaccacaagacttacagacccaggaactcccttgctggcagcaccctccttcagggcccctttggtcatctttatgctcaaatgcacgtcctttatcagagctctgctttgca

SEQ ID NO: 835506 - DNA, 561 bp, Homo sapiens
atccatctggtgttgatttttgtataaagtgagagatgaggatccagtttcatccttctacatgtggcttgcaagtatcccagcaccatttgttgaatagggtgccctttccccactttgtttckctttgctttgtctaagataagttgactgttaagtgtctggctttatttctgggttctctattctgttccattggtctacatgtctatttttataccatgtattttataccatgtatacaacatgtttataccatgttgtttcagtggtcttatagtatagtttgaagtcaggtaatgtgatgcctccagatttgttctttttgcttaatcttgctttggctatgtgggctcttttttggttccatttcacttttagaatagttttttctagttctgtgaagaatgatgattgtattttggtgggaattgcattgaatttgtagattgcttttggcagtgtgctcatgttcacaatattgattctacccatttgtgagcatgaaatgtgtttccatttgtttgtgtcatccatgatttcttttagcagtgttttgta

SEQ ID NO: 835507 - DNA, 624 bp, Homo sapiens
gtactccatgaatatgtacaaaaattaggtatcaatttttaaaagtacaataaaaaaagaaatcaaggatcaggaaactaasggccgctacccaaattaaaagtaacaattcattgctctgaactttagtcatttttcagatccagaacccattgattaaaagagaggtaagaccaatgtcaagaagtgtatttcctagattagcttctaacattttcatagtttgaactcttacatttaaatctttaatttatcttgggttaatttttgtatatggtgaaaggtaggtgtccaattttattcttctgcatagggctagccagttatcccagcaccatttattaaataaggagttatttcctttttgcttgtttttgttggccttggcaaagaatttttagctaagtccccaaaagcaattgcaacaccaaaaaaaatatgttatggacctatgtgatgtaattaattaaactgaagagcttttgcacagcaaaagaaactattaagagaataaacagacaatttacagaatgggagaaaatattacaaacaattcattcagcaaaggtataatatccagaatatataaggaacttaaacaaatcaacaagcaaaaaccaaata

SEQ ID NO: 835508 - DNA, 622 bp, Homo sapiens
acacctgctctgtgttctttgtaagaatgtcatgatccaagtaagaggatgccttatgtgacttagcaggaaaaggtcctgagcaactraaatgggaatcaaattgggaacaaggaatcaacttgtgcctcggcagtattatcaatcacagtctagaaatgcagcagcaacaaccagtgacatgtttgcagatagttgattgctgatctttcatggtacccctgctcttctcaaatttctgttcatccattcaacaaatattcactgacaacacactatgtaaccaggaaccattgcaggcaccggaggtacagctgtgaaccaagcaaaatgcctctcctcaaggagctaagattctaggtagtggaaatagaacataaacagacgacaattacacattctattccaaatagtaatcaatagtatgaagaaaaaaatgtagagtgaaagggatagagaggcagttttggggtgaaaccttttgtaatgtaaacagcaaattttcctgtttattaaatttatagagctcacaatgcattagggcaaaccaagatgtccaagacagacacattccttagaaatgatgtttacttaataatatcaataaatattttgttttcac

SEQ ID NO: 835509 - DNA, 582 bp, Homo sapiens
aaaaatggttaactcctctgcccttaaaacataaaagaaagaaaatatttaatatagaatgtttggcatttcccactagttagtagggaggaaaggaaaatttcttcatacaaccasagcagtcctaaaacagttcattttaaaatggacgaaccaattagcattgatgaatgtggctccttctggatggtttattgaaggaagtagtacaatgggggatgaagaagacaatgagtgacatttgccttagtggtaacacacagaatagatgtccccttccaaagatcctggtcctcaaagcttgctccactctagaaaccaaggtcagctcacgtgaggagctccccaggtgtgctgggaacggctattccttgtgtcaccaccgcaagtatgcacagaaaggacagctgggcacctgtgcgaacgtggtggctcaaaggcatgactggaaactaccacctggacaaaaagccagtgtgctttggctctctaggaggtcattgcctggaacaatgttccaatgtagtggctgctcatgctcaacaaacggttcttgaattgtacttcctataatccaacctg

SEQ ID NO: 835510 - DNA, 504 bp, Homo sapiens
atgtctgtgattttcctagtgtcatttatagccaacatttattcatttccagtactgtataatattttattgcattaaccttcaaaacttaatgctgtgtgatatggaggttgcttccagttttgcactattgtaaacaatattgcaattaacatttttgtacaagactctgaatataaaatcaaattttctttagtgttatactagttagtgggagtgtattcatattttcaactttattaattaatgacaaattgctttgcaacatggtagaaacaacatatcttcatccacctcagcattgaatgagcattcctatttttcaacaagctcatcaacagtcattactgtcagatttggttttctttctattttttctacttactyctaaccaacaggtttgaaatgatatttcatggttttataaatcttgatcattattaatcttggggctctcttctacactggaaattgtaattgataatataattaattgatatttaa

SEQ ID NO: 835511 - DNA, 641 bp, Homo sapiens
ttgttaagggaatgcatatatatatcatctagaataaaggagggcattatgtaattaggaatcattgtcaaaaaatcaagtatggtagattataaaacttgttaaaaaggaaacattattaaaggataagggaaaaagttataatgatgaaataacaactgaaattctagaagacaatgggatagcatgtgtgggagaaataataagaaaagataatttaaaaattaggttaaaagaaacttaaaactatttggttgactatgatagggttagagaacatttctaaacatgtgagaggatagaaatattcattaaattaaatttgtatatttatttcatcaaaacatctaactctatggtttactttataaactatgaggaagacacagatattcaaaatatttccaatataatttgaaaatgagttgattcatgtcatccatatctcagaaatacagcttctttcctaattctactattacttcatatattgatctataaaagttgaaacatatttacctgtgattttcttttctgtattatcataatcratactgcaaaattagtttttcagctacatctgaaatgtggccattttatcaaagtacacggtacaccatggaaagtggctgtcatggtat

SEQ ID NO: 835512 - DNA, 594 bp, Homo sapiens
tttacaatgtttggtttctgatagtgtaagtcttccaggtttctgcttctttcaagatttggctatattttagctttctgagaagctgatcctgaagttcmtatgaaagtaaaatttaccagcaccatttgttaaatagggaatcctttccctacttcttgtttttgtcaggtttgtcaaagttcagatagttgtagatgtgtggtattatttctgagggctctgttctgttccattggtctatatctctgtttcggtaacagtaccatcctgttttggttactgtagccttgtagtatagtttgaagtcaggtagcgtgatgcctccagctttgttctttcggcataggattgacttagcaatgcgggctcttttttggttccatatgaactttaaagtagttttttccaattctgtgaagaaagtcattggtagcttgatggggatggcattgaatctataaattaccttgggcagtatggccattttcacgatatttattcttcctatccatggaaaactgtagaaagctgaaattggatcccttccttacaccgtatacaaaaattaattcaacatggattaaagactta

SEQ ID NO: 835513 - DNA, 594 bp, Homo sapiens
tttacaatgtttggtttctgatagtgtaagtcttccaggtttctgcttctttcaagatttggctatattttagctttctgagaagctgatcctgaagttcatatgaaagtaaaatttaccagcaccatttgttaaatagggaatcctttccctacttcttgtttttgtcaggtttgtcaaagttcagatagttgtagatgtgtggtattatttctgagggctctgttctgttccattggtctatatctctgtttcggtaacagtaccatcctgttttggttactgtagccttgtagtatagtttgaagtcaggtagcgtgatgcctccagctttgttctttcggcataggattgacttagcaatgcgggctcttttttggttccatatgaactttaaagtagttttttccaattctgtgaagaaagtcattggtagcttgatggggatggcattgaatctataaattaccttgggcagtatggccattttcacgatatttattcttcctatccatggaaaactgtagaaagctgaaaytggatcccttccttacaccgtatacaaaaattaattcaacatggattaaagactta

SEQ ID NO: 835514 - DNA, 521 bp, Homo sapiens
tcttagtcacaggacgagataggaggtcggcacaaggtacaggtcacaaagaccttgctgataaaacaggatgtggcaaagaagccagccaaatcccaccaaaaccaagatggagacgaaagtgacctctggtcatcctaactgctcattatgtgttaattattgtacattagcatgctagaagacactctcaccagcgccaccactatttacaaatgccatttcaatgtcaggaaaataccctatatggtccaaaagggggatgaaccctcagttccaggaatggcccacctggaaaactcatgaataatttaccccttgattagcatataatcaagaaataaccataaaaatggtcagccagcagccctcagggctgctctgtgtatggagtarccattcttttattctttcactttcttaagaaactgctttcactttatggactcgctgcaaattctttcttgtgtgagatccaggaaccctctcttggggtctggattgggaccactttccagtaa

SEQ ID NO: 835515 - DNA, 615 bp, Homo sapiens
gttaaatacatgtttggaataattaagagcatggcttttcaataaattaaaaagtaacagcgtattttaggaagctggcaaaagtcaaatgagcaaaattgattattgtagcaaagaattggataaagttgttggaagtatgaggctggattagcacttacaaagatttttcaaattatttcttatactttcttgtttctgtttttttcacagttaactgccaatattctcacatacttgtataactgtgatagtcattgaaaactcttcacaaaatatttttattctcattccaggtaaatagtgaactgaagtttcacccccgctttgaattaaatgacatgcttcaaaataagctgatgtggtatttatcactttcaggtgaaagttctatgaatcagggcacaatttgccaccctctctttctccccaccacagggactgaccatttttttcaatagtaagcagctgctatgtcacctcatgaactcacgaggatgacaaagaaaatggccaacagctgatggagcaaaakctggaaatagtactttctttaaaaatatcaaggctcagggttcttactgcagtataaccagtccatcctcacagatataa

SEQ ID NO: 835516 - DNA, 548 bp, Homo sapiens
taagggtcttagagttgtatcctcagtttcaactgggatggtgctgacaactcattccttcccctcctctgcagatgggcggcccctctacgtgctcaggctggggcagatggacaccaaaggcttggtgagagcgctcggggaggaagccctgctgagatacgtaagtgcgcggctgcgagactccaggtgccactgtggcgtcactttttttctctgccagtaggattggggtgttaaccagcctgttagaacaaacatgaattgcttatgtagttaggactgaaaatatattaatatcgtcttaaaatttcaaaaggagacacagaagttataaaagtgtttctcacagtggaagcgtcagtgaggcagtcagggtctcccccgagatgcctgtgtagcagcagtttgagtcttttcattcactcccatgtggaattgccctctcttgggaygccactcacagcagacctcttgatagcattctttccactggcccttcgttaacgcgagctcttggcgtctttctccagaccctcctgaatgcc

SEQ ID NO: 835517 - DNA, 629 bp, Homo sapiens
tgtcccagacttggaatgagtcattttaacaggaacgcctgggttcaatcgggatgttagagattctctttgtaatgggctgctcattgtttctaagtaaattcacttaaactcaccacacatacacatttaaagataaaaatacctcatgaattcatattaaccttccaattcaaatctgagactacagggcttcttctttttttttttttttttttttttttgagacggagtcttgctttgttgcccaagctggagtgcaatggcacaatctcgcctcactgcaacctccgcctcccgggttcaagcgattctcctgcctcagcctcccaaggagctgggattataggcgtgcaccaccatgcccggttaatttttttatttttagtagcgatagggtttcacctggccaggctggtctcgaactcctgacctcaggtgatccgcccaccctggtctcccagcgatgggattacaggcgtgagccaccacacctggcgactacagggcttctatttaaccactccctgatctatcttccacacagacaaccttcaacacaggacctggggaaasctggctgaggacagcccctaattactcacttgttaccatacaaaaactcagca

SEQ ID NO: 835518 - DNA, 476 bp, Homo sapiens
gagcaaaccagaaatggtctgagccctcccttcccccatcctcagaggggcctgcccctttaggtaaacacaaggaggcaccgaggctgctgtacaagagttggttcctgctcacyccacaaactctacttccacctactgcaaaaggttctgtccttttttttaaaaaaaaaaaaaaaaaaagaaacccagtgaggggtggggtaggtgtgtgtggaggagaggagaaaaggacaagtgatagtctccccacctcccagtaagccgcaggtgcagagactccaagcctgcctcagggcccttccggcatctgtgcaggagggtctcgcagaaaaaaccaggaccacgacctgggaggacccggtcaccccactgtctggaccaccagtgggaggtaagtgtaagaaccaagggcaagggcctccctgggcggggctagagatcccctggaaagggccatgcaccgcgcgatcccc

SEQ ID NO: 835519 - DNA, 576 bp, Homo sapiens
tcccacatattttggtatgctgtcctttaattctcattcagttttatagatttcttaattttctttgagacttcctcattgacgtggatatttagargtgtactgttcaatttccaagtgtttagagattttcctgtagtctttctgttactgattttttttttttttttttgaaacagagtctcactctgtcacccaggctgaagtgcagtggcaccatcacagctcaaccccaccccccatcagcagtcttggccccacaatccctaggctcaagcaattctcgtgcttcagcctcccaagtagttgggactacaggcatgtgccaccacacccggctattttttgtaactttagtagagtcggggtttcaccatgttggccaggctggtctcaaactcctgacctcaagtcatccacatcacttctggcctccgtagtttcagatgagataatttgaactggtgtccctataggtaatgtgttgtttctctggctgttctgaggagattttttgtctttagttttcagaagtttaatgatgatatctcagtgtagatttctttggcttcttct

SEQ ID NO: 835520 - DNA, 549 bp, Homo sapiens
ctcgtgcattcccactcagcgctgctcaagccatccagtccccggcatgttctttctgcggactctgatctgtcctcagtggagaggggcttctcctgctgtggggctgcctcctcygaacagccggagcatgcacttgtctcaatggtcgggggaggcccaggtctctctgcacactggaatcttcaggaactttaaaaagtacccaccccagaacaattaaatcagaatatctgggcctggagcttttttcagtgctccctgggctgagaaccatgggtctggtagagggaacccagagatcaaggtggaaattccacttctgctacaaaccagctctgtgctcttcaacacggtccttcaacatctgagccccagttttcttatctgctctgtgggggacagcaatgcccgtgccatgggtggggttggggataatatacctattgtttcactcttcctggggcgctactgcacccccaggtagatggtgagtgatggagggcagggagcctgactatagcctggacgccagtgcttccctcagtg

SEQ ID NO: 835521 - DNA, 549 bp, Homo sapiens
ctcgtgcattcccactcagcgctgctcaagccatccagtccccggcatgttctttctgcggactctgatctgtcctcagtggagaggggcttctcctgctgtggggctgcctcctccgaacagccggagcakgcacttgtctcaatggtcgggggaggcccaggtctctctgcacactggaatcttcaggaactttaaaaagtacccaccccagaacaattaaatcagaatatctgggcctggagcttttttcagtgctccctgggctgagaaccatgggtctggtagagggaacccagagatcaaggtggaaattccacttctgctacaaaccagctctgtgctcttcaacacggtccttcaacatctgagccccagttttcttatctgctctgtgggggacagcaatgcccgtgccatgggtggggttggggataatatacctattgtttcactcttcctggggcgctactgcacccccaggtagatggtgagtgatggagggcagggagcctgactatagcctggacgccagtgcttccctcagtg

SEQ ID NO: 835522 - DNA, 671 bp, Homo sapiens
tctatttaataaagtatgaatagatatagatggatattttaaagtttattttattatatattttttcctttaaacttatgcaagaaaagattgctcaatcctggcttagagggwtgaggacagaacaatgaaaagcaactctgtttgcaaagtcagagagactaaagactgtgggaaggaagagccagagaagaaggagaaccaaaatcagataagaaaagcagttcaagaaggtggccaggagagggaatggaggcattgctttgcagaactgaagttgatagagaactgaagggaaaatggttgcaattggcacataagaggccatcagtagctctggagtgtttgtgggggtggaagttggatttcagaatgctaagatataaatgttgtgaaaggataagaagtccagcattgagttatctctctcttgagaaacgtggaggcaataggttggagagaaattgaagggttgcttaagaatagaacaggatacccagcactttgggaggccgaggtgggaggatctcttgaggacaggagttcgagaccaacctgggcaacacagggagaccccccccccccaccttccaccaaccccccccccccaaaaagaaaaagaaaagaaatagaccaggactcagggcagttcctataaaccaagagagatt

SEQ ID NO: 835523 - DNA, 565 bp, Homo sapiens
aaaaaaaacttggttctttgaaatgataaacaaaattgatagaccattagtgagattaaccaagaaaagaagagagaagattsaaaaaagctcaattagaagtgaaatgggagctattacaaccaatatcacagaaatacaaaagatcatttaaggtcactatgaacatcttttattcacacaaactagaaaatctagagaagatgaataaattcctggaaatatacaacactcctgattaaatcaggaagaaatggaaactctgaacagaccagtaacaagcagtgagacttaaacagtattggtagaagggctgaggcagggcttgtttgtctgacataacgtagaagagtcttggaacatgtcctgggtccagggtccaaaaccccttgtggcctatggaacaccaagctctgtgccaaagagtggaaggctgccccacagcactacaatctaaatccagggcataaaaccccttgtggcttggatggaatcagggctcagggcataaaacccctcttagcctctggaatgtgtccagactcactggccccttgctccttgc

SEQ ID NO: 835524 - DNA, 565 bp, Homo sapiens
aaaaaaaacttggttctttgaaatgataaacaaaattgatagaccattagtgagattaaccaagaaaagaagagagaagattcaaaaaagctcaattagaagtgaaatgggagctattacaaccaatatcacagaaatacaaaagatcatttaaggtcactatgaacatcttttattcacacaaactagaaaatctagagaagatgaataaattcctggaaatatacaacactcctgattaaatcaggaagaaatggaaactctgaacagaccagtaacaagcagtgagacttaaacagtattggtagaagggctgaggcagggcttgtttgtctgacataacgtagaagagtcttggaacatgtcctgggtccagggtccaaaaccccttgtggcctatggaacaccaagctctgtgccaaagagtggaaggctgccccacagcactacaatctaaayccagggcataaaaccccttgtggcttggatggaatcagggctcagggcataaaacccctcttagcctctggaatgtgtccagactcactggccccttgctccttgc

SEQ ID NO: 835525 - DNA, 637 bp, Homo sapiens
atgaaatttaaagtagtttttttctaattctgtgaagaaagtcaatgttrgcttgtgggaatagcattgaatctataaattactttgcgcagtgcagtatggccattttcatgatattgattcttcctaccaatgagcatgaaatgtttttccatttgtttgtgtcctctcttatttccttgatcagtagtttgtagttcttcttgaaggaggtccttcacatcccttgtaagttttattcctaggtattttattctctttgtagcaattgtgaatgggggttcactcatgatttggctctctgtttgtctattactggtgataggaatgcttgtgatttttgcacattgattttgtatcctgagattttgctgaagttgctcatcagcttaaggagattttggcctgagataatggggttttctaaatatacaattacgtcatctgcaaacagagataatttgacttcctctgttccaattgaatatctttaatttctttcccttgcctgattgccctgtccagaacttccaatactatgacgaataggagtggtgacagagggcatccctgtcttgtgctggttttcaagagaatgcttctagcttttgcccattcaaaatgatattggctgtgg

SEQ ID NO: 835526 - DNA, 588 bp, Homo sapiens
ggtcaataaaaagaaatgacatgtctatttcagttgagtatgcatctgttggttgcatttgctctgaattcacaaactaaggttgtatttatagcattttgcaaagttctacaggtggctaggtaatatcaactaacattgattaaatggacacaaaatgtttttaagtgatactgataggtaatctccaatttgtagactcgtcaaagtagatattatgatcctaatattattgaagatgatcacagtaactatagtaaactaggatttactgagtgtatactacaggacactccctgtgctcagtgcattatctgcgcagcctcaatcagtcttctgagtttattgttcctgttttttcatgaggaaattgaagcctgagagcttgtgcaacttgcctaagattaaacaagtagaaaaagttagaggtaagactggaatctggatgactccattgcctggacaattacccctgtatcacacttccagagtaccttcataagggctgcrctaaagtcaagtgttggccttgagtttggctccaatttgtagttcaagtttgctttgactttgggctttggaaggcca

SEQ ID NO: 835527 - DNA, 457 bp, Homo sapiens
ttttcttttcataacgtgtcataaaaatttatacaaaaagataaatattttatagataaatgggcatattattcataatatacaattcacaaaggataaatgacaaatattaacaaagtggaaagatgcaaacttattagaaacaaattgaaaattaaaacaagataatgactaccatctgacagagcaggagcattgccatcctggacaagccactcattctaaagttcaccttaataaaaaccacctaaatccaaagggcatcagcctaatggctaaggtcagaataaccataaaccacaaataactcctccaaccagaaacattccaaactcctccctgaccagagacatggtagcctcgagataacccctctctgggccggaaatatgtctgcyccaagataacctcctctccttccagagagtttcccaacccaccataaacttctccatac

SEQ ID NO: 835528 - DNA, 526 bp, Homo sapiens
tttttaaaaaatgaaaattataccaagcacagactcagaccacagcatgataaaaatataaatcaatatcaagaagatctctcaaaactacagaaatacatggcaataaaacaacttgctctggaacaacttctgggacagcattaaaattaaggcagaaatttaaaaaatttttgaaattaacaaaaatagggaaacaacatattaaaatctttgggatacagccaaagcagtgttaagaggaaagtttgtagttctaaacaccttcatcaagaatttagagagatctcaaattcacaatttgactttgcacctaaagaaagcagaaaaatgtgaacaaaccaaccccaaagctaggagaaaaaaactaactaaaattagagaagagcttaatgaaattgagctacaaaartccatacaaaagatcactgaagttaggtttcttgaaaaaataaataaaattgatagactactagctatattaaccaagaaaaaggagaggatccaaatacgtgcaatcagaaat

SEQ ID NO: 835529 - DNA, 510 bp, Homo sapiens
ccccaatatttcaatgtagtttcttttctattttccctaagtgtyggtcagtctgagaaataaagagtagagtacaaaagagagaaattttacagctgggactccgggggtgacatcacatatcagcaggttccatgacgccccttgaaccacaaaaccagcaagtttttattaagggtttcaaaaggggaggggtgtatgaatagggagtgggtcacagagatcacttgcttcaaaggcaataaaatatcacaagggcagagaggcagaatgagatcacaaggccagggcaaaactagaattactgatgaaggtccatgtcctgctgggcacacattgtcattgataaacatcttaacaggaaacagggtttgagagcagacaaccggtctgactagaattttgcctggctggaatttccgaatcctagcaagcctgggggcactgtgggagaccagggcatatttcatcccttatcaaaaactgcataagacagacacttccagagag

SEQ ID NO: 835530 - DNA, 581 bp, Homo sapiens
atagtataaaaacagtcttttaagtcaataatgactataggccaatctcgaggaatcaccatgggggaagggagcccctgctgaagggacccccataagtttcaaattagcactgatagcacgtaagtcatgcaaaagtctccatttaccagacttcttgggaatgacaaaaatgggtgaattccgagggctgtttgatggttgtatatggccagcttttaattgttcctcaactaattcatgggcttgttgtaatgtctctccctttaaaggctactgctctatccaaataggattttgagagagccacttcgggggtaggggaggaataacagtggctattattagaaagaggtttgctgttcacataatccattaaattctgccatccagaggaggtattgactgctctttaaagttgttttagttatcactgaccagtcccatagggttatacagaagttgtctgctatggtctcaattaatcctttcatacatgggctagtggcttcattttctctaatagttttccttatctccttatargtgttgaaaatgatggctttatatacctgattgcc

SEQ ID NO: 835531 - DNA, 231 bp, Homo sapiens
ttctttttcattaaacgtttactttaattttatagacttgaagcacaataactactaagaatcttgggaaaatatatyactcatgactacctggtgaatgaaaatatgaattacttaagagaatgtataaaatttatacatatatacaaatggattctactattataattactcaatgcaagtaacctcccatacatttaacttcattattaagtgggagaatgggttaat

SEQ ID NO: 835532 - DNA, 560 bp, Homo sapiens
ctattatgtttctctgaggaatgttgatagcaacctgtcttaatcayccacataaatactgtatgcgttgtgaactcttaggagcactggctgttacaacatgctagaacttggttatcaaagagccataaactctcaaggttggaaatgaccttggagttcatctagttcaccttctatcatgcccagatggccataaagatatcccagatgaatatttgcctcgcctctgtttcaatgcctccaatcactaactctagtgagatactcatccaatcgtcttgcagcttcatttgttaagaagtacataattgaggtgaatttcatcatcatacttaagtcttgtatgacttcatacataagtcatacaggccttacttccagatgtaagtcctggttctgctactagagacagacagagcacctgtgacactctttaaggacttaaaaactcttgctttcttttgtggctgttatgagttaggggctaggtcttttgccagaatcacatagacttgaatccaggcatcctcactctctgtgtgttgtcagaaatatta

SEQ ID NO: 835533 - DNA, 623 bp, Homo sapiens
ttagtttcagttcctgcaagaaaatttagtccaataggcagactctgttaggatattgcttggtcaatgacaaaagttacagtccaagatcaacaaaaccctatttgaaaagattaaaattcagccttttcctgctttctaggtttctgttttactattcactgattacccccacttgggtattttaagttattacacattcaagatatccaaaaacaacttcatccatctattctacaaactgccgtggcaatcacatgcaaattgttacctactccaaaccaaagaattaactttcacctctttcacccattcccaatcaatcaacgaattctgtaagctcactttgtaagtatcacttgagtctatctccactgccaaaaccccagttcagcctgacaagcatcttctcttgcctggattttgcaatgccctcctaaatggcctccctgactctacttctgtccctttcaaatccattcccagactgaagccagagtggccatttaaaactacaactttgttcatgttttgctttcatgatctttttatcatcctgaggataatgtacggatccaytaggatggcctgtgaggatctctgtaatcagacctatgaccaca

SEQ ID NO: 835534 - DNA, 496 bp, Homo sapiens
tattaaagatgcattgatatgcctacagcatgatagatgcacatgaaatactcctataacagataacacaaagaagatagctttttataactcaaacaaaatgtttctaagtcccaggcaataacctgctaacttgaagacatgtttatttctgctataaataccagtgtataaaatgggttaagacccctctggagatttttttccatgtgaattgaattttgaataatatatggtacgtactatagtgaaagtttcttaactgatcttgtaacagagaaaatgtacaaaacacatattttggtgtctgaatactgatattctcttctcaaactggaaaactaaccagagtcacggtcaaagataaaacagtaaaaactcatatttgttkattcatccattcattcattacatgtttattgagcacctatttgtgctagccaatgtactaactacttactaaattcccattcttcttagttactgagagaaaaag

SEQ ID NO: 835535 - DNA, 638 bp, Homo sapiens
tacctgacttcaaactacactacagggctatagtaactaaaagagcatagcactggtataaaaacagacacatagactaatggaacagaatagagaccccacaaataaagccacacacctacaatcatctgatcttcaacaaaaatgacaaaaacaagcaatggagaaataagtccctattcaataaacggttctggaataactgcctagccacgtgcacaagattgaaactggcgcccttccttctaccatatataaaaaatcaatgcaagatgacttaaagactcctggagaaagggcaaagcaagatggctgaatagaaggctctactgatcattcttcctgcaaggacaccaagttaacaactatccattaaaaaaataccttctcttaataacaaaaatcagatgagcactcatagtgcctggttttaacttcatattgtagctggattgataaggaatcagagagactgatggggttcaggaggatatttattatttaggtgcaccagcccagtcggattaayatccaaagtcccaaacaaagagtcgttaccttttaacattttgtggggtggggggagatcaatgcagggggaagcatactacagaagagagaaacaaagacagttattc

SEQ ID NO: 835536 - DNA, 615 bp, Homo sapiens
gtatccctgagtctggtgactacgacagggtgctktccatgggtgtcaaagcggctttcacccatattaatggggtgcccaagggggtgggaatatctgctcttacccacatacgccctatcccctctgctgtcagtagcctttgagttttctagacctcatttatgccatggatactagaatgacatttatccatgaaacaggaggtttggcttaatcagcaggaattagtcatgcttacctgttctgtgccttttaacttccattattgtctgcctctggatcccttagatccagttttctttcctagggctttgacctgaagcttggaattgaatttgggacaaaaatgtgttttggggggactctttatcataaactgaatgctaaggtgaagctgtaaaattgagtcctcttccaacaagggagagaaaaggatatcctgtgacatgccaagaaaactggcagctatagttatgcttgctaagattgggtgatgggtcttgactttgtttggctcccttgatcttgctttcctaaaaaggaaaactctgagtaatgggcaccctatttattcctatcacctggcagaattttcaggataattgctcagaa

SEQ ID NO: 835537 - DNA, 630 bp, Homo sapiens
ttcaaaaatggggaagttgaggtactataaaaggattgaaaatgagcaataaaccggtgaagtctaaattataaatyattgttgtaaatttggtttaaagttggatgttagtcatttgtgtgaaattctagaacaggcaaaactaatctatggtgaaagaattcaaaacaattgtttctgggaaagcagggattgagtaggatgagttaaaaggaaaccttctgaaataatgaaaatgtgttctatcatgataagggtttgtgttatacaggtgtgcacatttgtcaaaactcattgtactgtattcttaaggtcagtacatttcactgtgtgtgattatacctgaatttaaaaaataaatatgttaacaatattgagccaggtgcggtgctcatgcctgtaatctcagcactttgggaggctgaggtgggcggatcacttgaggtcaggagtttgagaccagcctggccaacatggtgaaaccccatctctactaaaaatacaaaaagtagccgggtgtggtggcatgtgcctgtaatcccagctacatgggaggctgaggcacaagaatcagttgaacctgggaggcagaggttgcagtgagccgagatcacaccactgcactccagc

SEQ ID NO: 835538 - DNA, 632 bp, Homo sapiens
actttacaagggtatgtgggagctctaaatattaaggtgtgaaatggctagcagcactggaataagtctacaggaggttttgcttgaatattaaatayagaggccatgattattgattacttaatggccagtcctagatatttaaaccaccctggagatctggagatggggaggagatgggtgaagatgttctcaacctttttagccagactctcttctattatgttgcactcatagggcttatgttttgagataattggtctaactaaataaagttaattatttaataactgtttgtttgcatatattgatctcttaaccaaatagacataactgccaacttttgagagcttttgagcaatatatatgaatattttcatattgggttcatgtgatttttaggccagacaaaataattcttttactaaaaaagaattttttattaaaaaatttttatttaatccatgtgtctatggcccaagtaaatgtatgattttcacatggtgttttgcttttgatatttatttatatatcctaaagttcagaaattttacattagaaataagtaaacaggtccacaaaggacctattgctcttaaacgtattctattctcattattgataatcctgag

SEQ ID NO: 835539 - DNA, 519 bp, Homo sapiens
agtaaatgtatgattttcacatggtgttttgcttttgatatttatttatatatcctaaagttcagaaattttacattagaaataagtaaacaggtccacaaaggacctattgctcttaaacgtattctattctcattattgataatcctgagtgacaatgtaggcaacattaaacaagcaaaatatggtgattgggtcactaagaagtgaagatctctctaactctttaatcttccaatgtgtaaatatttgataaaaacctgcccttttgtttaactttaatttttcttttgaggagagaaagcattttaactacataccaaagaatagacagatgcaaacaaaccttgactgctacttgcccgataaaggaaaaaactggtcgtctggtctgtttattgttttgtaaattgaaagatatataaaataatggttccaacatgttctagtaaagtcatcaggatcttmaatgagttggtgagacttaaagggagaaaaataaatccctaaggaacattt

SEQ ID NO: 835540 - DNA, 634 bp, Homo sapiens
gattccagtaaaatccaacataccttcttgccaaaaaccatcaagaaactaagcattgaaggaacgtacctcacaataagagccatctatgaaaaacccataacctacataatattgaatgggtaaaagctggacacattccccttgggaactgaaacaagatgacattctcatccaccactcatattcaatatagtgtttgaagtgctagtcagagcaattagacaagggaaaggaataaaaggcatccaaggaggaagagaagtcaaattatgtctcatcagtgacactgtaattctatatctagaaccctaaagattctgccaaaaaacttctataattgagaatttcaataaggtgtcaggatacaaaatcattatataaaaattagtagcatttctatacatcaatatcattcaagctgagagtcaaatcaataatgcaatctcatttacaatagccacacagcaaaacaaaatatctaggtatccatctaaccaaagaggtraaagagccctacaaggagaacaataaaacactgctgaatgaagtcatagatgaaacaaataaatggaaaaacatttccggctcagggattggaagaatcggtatcattataatgtcatactgctca

SEQ ID NO: 835541 - DNA, 343 bp, Homo sapiens
ggaagggagaaaaaaggaaagaaagcaagaacgtgagaaagaaagaatatgagaaaagaaggaagaaaagggagggagaaaggaagggagagaggagggaaggaagaataagaggaaagaaagaaagaaggaaagaaggaaggaaggagaaaaaaagaaaaagaaagaaaggaaaagaaaaaagaaaagaaaaggaagaggaaaagaagaaaggaaggaagaaggcaagggaagggaagagaagacaaaggaagatggaaagaaggaaggaaaaccacaaayattagaaattctgtgtttgttagagaatatgccatactgttttttttttttttcacttgaa

SEQ ID NO: 835542 - DNA, 516 bp, Homo sapiens
aaaataaaaaaataaaaaagaataaaaaataattataattgtcactttttttccttctctagactctgtattgctcarttatattagtcacttttagattttttaaaaatgtggactatctgtgtgtcatgcatagattgtcacctattttattgccccatgagtacaaaatttattctttaaactttacacgcttcaccttgatatacactgatgtcaatcactcttgcattttgcctggcacttggtgagcctttttctttttcttttgagacagggtctcactctgtctcacaagctggaatgcagtgtcatgatcgtggctcactgcaggctcaacctccctggaatcaggtgatcctcccacttcagcctcccaagtagctggaagtacagctgtgccccaccacacccagctaatttttctattttttgtagaggtggggtttctccatgttgctcaggcaggtcttgaactcctgagctcaagcaatacacccaccttagcttcccaaa

SEQ ID NO: 835543 - DNA, 630 bp, Homo sapiens
aacatttctgccctctatttgcaagtatgccttcaaaccaacattattaagctcagatgaaactctttggagagtggaatgagaccagaaatagacacttgtttaagaaatatttacttaaagcatgtaaaattttatacttaattgccagaaaattccactaagcctatttcctgagattcctgtctgcatcatgaaacaatctgattggtttaagattagttctttattttaaacattccatatgtagttcacttttcttattatactgagtaacaccgtttggatttccatcatccagcacaaatcctattattatgattaatgataaagtaaatcaaacttaagcaaaaacataaagaacttatattcttcaaacttgagatactaagtaaaaaaaacaaagtcacaatttatttcacactgtattcaatttattatgctaggaaacaatttgtacaggatcgtatcaaatatatatgaaatattttacattaaacctgtgagttcatttaaatgaataaggtattctgaggaaaaggttraattctcactatgagtagtgtcagcctttattacattatagcaaattcacccatcagcacaagcttggatgttttattaacaaac

SEQ ID NO: 835544 - DNA, 614 bp, Homo sapiens
atttgctgtaatgatgcttaaaatttggttttactatagacataaaaattatgatttgtaaaaatatcttagctaaaaactaccttcccatctgctttagctcctagagagtacaaaatgtacccataagcctgaacaaaaggctcaagcccaacttctgagaacacaagagttgggtaattcacataccaggaaggatgctgaagaggagcagaatatgccaccccaaaaatattccatattggcataaggatcatttttgagctgaaggaaattgagaagcagcaggaagaattctctggtgtcaactttctgcctaaaatcacagcataaattttcctttgtaaaagtgacataggtctccatttttaaaggtgttctcctctcctgtacctggaagaggtaaacaactcttatctgtatgacaaaccatactaaacagcctttatctacaatactagtcacattttcacaatttactgcccctaggagcccaaatcccttttttttgctgatttcttctctgcaatttattgcccttcattaaagtggtayatatgcctcggggtctaactgccttttggggtttccacttctttttctgatacctcaag

SEQ ID NO: 835545 - DNA, 639 bp, Homo sapiens
tattagcaagaaacaattgtgaaaagacaattaaaaaaacacttatgttagcattgaaaaacacaaaatacttgagaagaaattcaagataagatatgacagtcycacacaatgaaaactactaaatttttctgagaattaacaaacagaaagatagtctgtgttcactgaggtgaatgatgttgtgagaggctaccacaaggcaatttcttattcacttccctggttctgatggcatgggattctccttgcccttcctctgcctctatgtcccttgcttcccaccgcacttcctttggcacagctgcagactataaaattatctaacacataattgttgctctcaagtaatttaaatctttgcaaagacgcaaagttttcttgattctggcaataagatgtatatgttaatttttctagtgttggccctgaaggcaaaataaatatctcaaaggtaggtcttcatctacttcctctattgaaaatctccattgttaaatctaaattaaaaacctgtatcaaacaaaaggaaaatcaacagattatttgcagttttaatgattattgtaaagttggaaataattcatttgctaccaagctaaaaaatgcaactgcttcattcaataataaccaaggaca

SEQ ID NO: 835546 - DNA, 601 bp, Homo sapiens
aagtaatatcagtttacaaagtccaatccctaaacctcacccctcctgaaagtttagccatgtcttcgtctcataactaaacaatccaggtactgagtctatgtttcctgctctggcctggagcatcacttattaatttgtatgatatttgtaaatacataaggaaggaattaaccataaaagaaaaatagatgcatttaccatacaaatgagaaatgttatttcaaaaagcaatgtaaacccatgtgaaatccaagtgacaaactcaaaacatgttttcacatctatgtcagagctggtgaattcttatttttcacacttgatgcttttgctcgcccactaatatttctccgatttgagctagcttcccgggacttctcatcctcagaagagttgctccttgcccactttgtcagtgtgattgtctcagtgctttcagtctctgtgagtaaaataatcaaaatgaaaatataaaaatacgtattttttctagtctttgagcagcaaagatctttcttaccatgaaaaattcacaggagccataagsaaagagtcagatttggccgcgtagacatttaaacaaaattcgtaatagacaatg

SEQ ID NO: 835547 - DNA, 497 bp, Homo sapiens
cagaaataatgccacacacctacaaccatctaatcttcaacaaagttgacaaaaacaagcaatagagaaaggactccgtattcaacaaatggtgctggaataactggctagccmtatgcaggttaaaactggaccctttcatacagcatatacaaaactcaactcaagatagattaaagacttaaaagtaaagcctaaaactataaaaactctggaaaataacctaggaaatatgctttggacataggacctggcaaagatttcatgatgaagacaccaaaaacaattgtgacaaaaataaaaacagataaatgggacctaattaaactaaagagcttctgcacagcaaaataatctatggacaacatgaaaaaaacaacctacagaatggaagaatatatctgcaaactatgcatctgacaaagttctaatattcagactctataagaaccataaatttacaacagaaaaaaaattaaaaagtgggcaaaggtcat

SEQ ID NO: 835548 - DNA, 566 bp, Homo sapiens
ttaaaattagctttttcaacattaaaaaatattrggttcatgcaaacaaaaagcttgagaattaagaatatattctgtaatttttatagctctcaactgatacaaattttcaagatctctgtagttttagataatcatcaggttagttgaaagtaaaacagaactctgtgaatttgtatttgatgagtgatttgaaattctaaaagcacttgcccttaatggaaaatattgaagacacctaaagcaaaattttgtacaaagttattacacactaaatgctctcacagccaccatattaaaggaacaaagcctgagaatgtcacctggtctagcaagaatgtttttgttagattgtgctaggttgttgagttgtcagaataagataaatggagctgagcagtaccattaacctgtgacatttttgacaatgcaagggtatgtgctgtgcaaaaagtagactacttttttcttttctatctctcaatttataatagaaataagaaaagatagattaaatgttttaatgaaagacaaaaacagttagaaaaagcttatcttgaataata

SEQ ID NO: 835549 - DNA, 580 bp, Homo sapiens
ccagctttgtgagaatctgcccataggatcccattccagctttatattcatacagaggctacaaggctgagaaatcactttgcatcattcagccactgrcagggcggagactctgaattttggttttcagggccctgtggctatggaaggaagataagaatttctttcagggcaaacagaagctttcagtttctttatgtggactttgagctgataattcaaattcccgagcctatcctttccctactttctcccacgcagttaggagcaaacagccaacctcattgtactccttggtttgactaaaatgtgctaaggcatcaaatacatggtcacccagaaccttgtcttctgtaagtgtttgattaggagtaactgtaagggataattggaaggatggccgagaaaggaatgaggccaatagacccaagttcaggcaagctgatttattgtcagtcctgccaggccacctcttgacaaaagcagaggaggcagccccacttacaggctatagcaaggttttatagggtgtagaactgggtcaaggtgaaggaaaaagaaaagagacggggcggggggg

SEQ ID NO: 835550 - DNA, 627 bp, Homo sapiens
aatattatccaagctgggagaatgtgtggttccaaagactgactacaaaataaattatgagcttaaatggattaaaatcatattaaatatgtagaaacttcaaaactccacaaatcmaaagtatgtcatgtacggatagaaattttttcttcactgatgagatagaaaaaggatttgtctggcacaatgtatgaccctttgtctattcaaaaatgatcacagctaatgcaaaacatttaacagaaagataaatttaatgttaacaagcacatttgataattgtcccaggaaagattataggtaactggatggaagtatttttcaagtaatctaggatagtcaacattttaaatgcaccacagagacatttatctcagcaattcagcaaagcagcatcaactcttgagtcagaataaaagctttcagcttctcttttgagaagattctgagcatttacttcatttatagtaaggctctctcaaatttttctctaagatttcccagaacctttctgaggcttcatgcaatttatataagtcacttaacaagcacttgttgagctgttaccatgtgtctggcactcttctaggtgctctctatagacaaagaataaaatagacaatctat

SEQ ID NO: 835551 - DNA, 629 bp, Homo sapiens
atagttttacaatttattgcttagggaataatgacaaaaaaagtctgtacgtgttcagtacataagcaatatttttttttcctgaatccacatttggttgaatcgatgcgtatgaaacccatggatattaaaagctgactgtacatgctgctgctaaatggccctataaaattattttgccaatttacacaacttccagtagtatatgagaaagtttgacttcccaaatatgtgctaactcttgacatcactaattcttaggttttacctgatgggcaagtaatgatatttcatgcttctactcattcaaatgtatgcaattcgcagtgtgttaacacaatatttgtatttctttcccttttacttattttttacttttgtattgattgtccttttcatgttagtgtataagatatctatattttcttgatattaattcactatgtgttatatagaacaaacatacccttccaagtattttttctggagggcatggaactttttcttaattttcatttgataaaatcagtcattcttttcctttctaatgtctatgtctttcttaccygaagattataagaatacacttttacttttatatctggcttctttaagtttagctttttcta

SEQ ID NO: 835552 - DNA, 488 bp, Homo sapiens
tattctcttattgtatgggtatactcgcaatttgttcagctgctcacttagtcatagacagttgaactacttctagttttggctgttatgagcaaaactgccatattcattcatgtaaaaaawttttttaaatattttctactttttttctggggtaaattcctgtgtgtaaacttttgagtttttgtacagttacgtttataagaatctacaaaatcttcttccaaaacagttgtttgattttatattctcaccagcagtgtatgagagtgctggttgctctatacccagcaatacttggagtggttagacattttcactattagccataatagtggctatattgctatcttggggtttaacgtgaatttccctgataacagtgaggttgaatatctcttcgtgctcttactggccattcctacatcttcttgtgtgaagtaaatgttcaaatctccctatgatgttactgggtttttggccttcct

SEQ ID NO: 835553 - DNA, 583 bp, Homo sapiens
ggaggggaagcatgcaggtgagcaggtacagaggctgggatgaatgctactgggtgctggcaggagtggaactctgtgtggccccatggcagcrtctaggggttgcctgtgacccctggagccccagaagatgtatgttacagtgtgctcctttagctttgtcatccgtggatggcttaagtgttaaatagctcagtggagggtcagtgtgacagcccttcgcacctgcacccaggtctttgtccaatgtccaggaggaatgaggtcacatgaacaaatttgagggtggtgaattcagaggattttactgagggtggaagtggctctcagcaggatgaggagctggaaaggggatggagtgggaaggtggtcttctcctctctggggaacccctttctgatcgtccgcagctgaacctctctccaacagtagtgtctgatgtccagctgctgcttctcctgacctttagatgcttcttttcttttctactgctctgctacaccactgtgctgctctgttgctctgctgctctgctgcccttctgccagtggaaactgggggttttatgggtacaagatggggg

SEQ ID NO: 835554 - DNA, 536 bp, Homo sapiens
taagttttgggtgtttgctacatagcaaaagctaattgatactgttcccaaggagtggaaaacttctgtaacaaaaaacaaaaaattctggcattggttttgggattgggcaatgggtagaggctagaaaaatggcaaggaagctgccatagcaacctagaaaaatggcaacccatgctataaaatagggcaattggtcaataatttttgaagtggtttgttatgcagcaatagcctactgatacaccatgtgaattatagcaaggaatagctaaggcaaaacaaaacattggatgagtagcatagttcattctaaagaaccactaaggcttgctcaggaatatgtactaattcaggtggcatctgttaactatcactgagcataatattggaggataaatctgctttgcttattgccacccccgtagcttagaagctactcctaaaacagcaaggatgtcactgtrgcagtgggcaaggattaattccctcatttatttattcatttattaattcaacaaatatttttaaatttc

SEQ ID NO: 835555 - DNA, 471 bp, Homo sapiens
gataatgccattgaatactatttgcggcttaacagtgtatctttgccatttcattttttaaaaacgtgtccagtttaattatgcaaraagacattggtgacggcttcttagccaatgagatagtatttgttttccgcaacttattcttctctctggaacccagcatgcattacaaggcagtggcaggctttaaatgtatcatttattttcattatatagcacttaaaaggtagccttcttctaattcagcatgccgtgtcaaagcagccagacttctcataagccctgataccaaattacctgtggctgtggatacttgaaaactacttaagcagctttcacaattaaaaaaaaaatggcatgaatgcaaaattcctcaatattactttggaaaaaagatctctatttggcatttgccacattttagacttctctgaaaagtgtgtttcaaagaaattgtattttgttttt

SEQ ID NO: 835556 - DNA, 521 bp, Homo sapiens
aagtaattgcaaatacttataattatatgagcaagactatgtctctgagtagttaaaatagctaaaaatrttctacttgttatctagtatcagcaggcagacgaaagcaaattaataatcactccacagatttggacatttaaaggtatttttcattgagtttttcaaacgagttatacgtataactttacgtggcttgtaaattagactggctacccaccatcagattattaaaactggaaaaccaaaaatcacaatcctgaaattctcgaaatgtggtgttcttatttcattgagtttgaaaattctgttgggataagccaacatatttattatggccttctgcattatggtaacatcttaaaagccgaaactgaattgtactgatagaagaactaatctaacctctattaataagactttaactcagaaagagatagaatttttcacttactttcttccaatggctttatctggcttattttcatcctcctaagattgattaaaagctgttgactatc

SEQ ID NO: 835557 - DNA, 625 bp, Homo sapiens
tatctattccaaaagctaataaaatattagtcccttaaccctgtcatccaatgaaaacataaaatgttttcttacttctagagttcaagcaaaaaaaaatcacacatttttaaaggycatagtaattgagtagcagaaacatttattaacagtaaggctgcttaatgcagactgaatttatttattcactcttgaggggccgttagattgtacaattctgtaaagtccttagtatgagaatggcatcagcttcagaaacctaagaaatagttgaactggggagacaagtaaataaatacaaagagaaaaacttactgggagcacagaaatatgtgcgctaactctttttgagagaaccgtaaaagattttttttggaaaatattaattttgttctgtaatgtaacacatgaaaaaggattgttagagaaaattatatgttggagtactttttgtttacactggaaacaaaacatttctgcacaatggtctgttgcttaagattcctggagaatcacttctgtgtttagatagttttttaataattaaaaaattaacatttataaaattagaaatagttgtattattttatttaatatttctttatgttgaatatttaatgtccat

SEQ ID NO: 835558 - DNA, 600 bp, Homo sapiens
aaacattctgggtttgaagccaagtcttgggtggctgtgttgctttgcagctgtagtttaaattagaaacattctagtttacagagatctagattttttaaaaagacctttatagcatataaagagaaagtattagcctcagcttacttgattcagaatgaattgaatgcaaaacatattcagattaaagagacatgtacctttgagagtgtttataatgagaggcaattaatctcactgttaagatagagcttactatgaatttaaattttatgttgattgctttaaataaacctcaccttcattctcccctcacttgtcttcaggtgatcggttatgtttgtttataatgtaagtatgaaaatcctggtcataactggtaatagaacaacatacagattgcaggcacttcatctgtgttttgatacagtgtaaatgagcccattctccctacctcccgagcatgaccttggaggtttggtcctacagcttgccttatcatacaccacccaccccatgcacacacaaagtcaggcacacacacctcaagaacgcttcaycgggcttcaacattgtatagccttacagcacactagactt

SEQ ID NO: 835559 - DNA, 670 bp, Homo sapiens
caggtagttagagacacagggcatgtttgtggtcagtcccttgttatccttgaaaagtaaaagactttattagcgtctttcctaactcttgggaagaaaatcaggtggtaatcattttcttgttgttgtttcyagtttggtgtgaatgtggtgtttcactgatagacaaatttacctataagggaaaactcagcctagtagaaatacatctagtaaagaattcccaggatgaacaaagcactgtggtaggcttgaggaaatgggccaaggcattggaaagggtatatgtgttttttttcatcaggggagaaagaataaatatttaaattaaacattctaatcatatgatattatttagtatcataaaaatcacaaagctaccttttcttttagttttatctgttattcatgcttgtcttggggaatatattattctacttttactctttttacatatatttttatactccaagacaaaaatcaaccattctttttcatattttcagataatagccttattttttaggtttgtcatgttcaataagcctactacaagtgtataggatgtacaccattaatcctttcaatgtttagaccctcatttccataccaccgaaatgagcattgagtcacattctgtgtaggcctatacagaatgcattcatccttg

SEQ ID NO: 835560 - DNA, 670 bp, Homo sapiens
caggtagttagagacacagggcatgtttgtggtcagtcccttgttatccttgaaaagtaaaagactttattagcgtctttcctaactcttgggaagaaaatcaggtggtaatcattttcttgttgttgtttccagtttggtgtgaatgtggtgtttcactgatagacaaatttacctataagggaaaactcagcctagtagaaatacatctagtaaagaattcccaggatgaacaaagcactgtggtaggcttgaggaaatgggccaaggcattggaaagggtatatgtgttttttttcatcaggggagaaagaataaatatttaaattaaacattctaatcatatgatattatttagtatcataaaaatcacaaagctaccttttcttttagttttatctgttattcatgcttgtcttggggaatatattattctacttttactctttttacatatatttttatactccaagacaaaaatcaaccattctttttcatattttcagataatagccttattttttaggtttgtcatgttcaataagcctactacaagtgtataggatgtacaccattaatcctttcaatgyttagaccctcatttccataccaccgaaatgagcattgagtcacattctgtgtaggcctatacagaatgcattcatccttg

SEQ ID NO: 835561 - DNA, 612 bp, Homo sapiens
ctgagtcagtcacctgggagagagagcttgggttgaggtccaaagacagccttgaaaatggtgctaggctgatagaatagaaagtcatgaagtatgggagctacagaagcaggaggatgagcagcaggatgcaagatggtcctaaagaggtaccagagttctagacaatgaaggatgaaagcaacatccagggcagacacagtcctctgtttggtagtgtctagtttcaggatagaaggattatgtttaggacggctttaaatgaactttgtggggcttgactggttcctgctagcagctctaggaggaacatttgaattttaagagaaagcaagcctcaacgtaaagcaatgacttgtgagggtttcatttcagcaacaggaagcacatgtcactggaggtcactggagttcagccttcccaagagtcctgagattccacccatgagtggtcggctgttctgcctgtaggtgccaactcttagaattgcagaggctctctaaatttccaagtaaacattgagtgtgcctggatgctcargcagaaaattgaaatacctttgggtccagttagagaccttcctagctttcagctgccttacttttgctgaaa

SEQ ID NO: 835562 - DNA, 637 bp, Homo sapiens
atcatgtggtgtttgaatgacaggatttattgtcgaggcaatgggtaagtacacaaargtctggataggatgtggccatatcagagatctgccccaggaagactgctctggcatcgatgccaagatagagtcagtggaccaggggaagcagagaccagctcagagcaggattcccagtgaaggaaaggacgaagaggcaaacgggagtctgtgagggggtggtgatatttgtgctggaagaggtgtctgagttgcttatctgggaatcactgtagagaattgtcaggccaagttttgaattaagcataaggagaaataatttatgtagctataaaagcccagagtgggtgactgagttggtggcttacatggtctctaaattgagtaatgctatgtcagagacaggaaggcaaaggcatctcagccgtgggattcatctgcaatgtcttcttcaaggcgtaaatatgtttttattagctttatgcatataaccataaggaattagaacatcagagagaagaagaccctcataaaattgggatcttttttagcacaggtgccaggatgtcaggtatcaggtcactttcagatgattcaccacagcgtccctttccttgctgctggtggtcactctaca

SEQ ID NO: 835563 - DNA, 623 bp, Homo sapiens
aaatgcatgtaatacatacatgatatgcacctcattaatcatagtttcattatttcgactacttaagcataagtataaatatattcgaaattagaaattccacaaaatatttagcttacaaatctggtctttttatcaacatcgggaatattatttcaagacagttgttataattgacattgtgctaaataaacactgtgcaattcaaaaacactggaaaaatgttgaagacacatctcaatataatttatcccatttctttttctcagaattttaccatagcatttcttcagggaacataaataattcaagaagtacataactcaaaagtcagtatgagtaaagaataagtaaggtgtggtgtctgaatgggcactatgaatgaaaagagggaaaacatttctgaatttcagtgcaagggataaaattataagtttcagtataagggatttggttggttggtttttatttattaggtttatttgtttacttatttacttattacttattttacttattttatttgtttgattacttggcttttgatgaaaacataggtttgtagggaagtgcaggktctggagtgcagtggcaccatctctgttcactgcaacctccgcctc

SEQ ID NO: 835564 - DNA, 615 bp, Homo sapiens
aaaagatttaaaattaatgttytaaactttcatttttaagacactaagaagtaaaattaaatctaaagtaagtagaaaaaaggaaataataataaaagtaggtatcagtgagctagaaaacagaaaagcaattaaaaaatcaacaaaggcaaaaaaacacatgttttaaaaatattaacaacttgttaaaccccaaacaacactgatgaagaaaaaaaagatagaagacataatatcaagggaaaaaaagcagagccatttttgcaatttctatagaaattgtaaggataatgcaataaatatatcctacaaaatgctcttagccagaacatgtaaatatgtaaagaattactacaaattaataaaaagaaaaacaaataatccaatttttttcaaaagtaaaaacattaaaaggtaattcacataagagaatacacaaatgtaaattaacaaataaatgtattagtcgtcaagaaaatgcaaagtaatggcaaaaactgcaattacttttgcaccaacctaatactaccacacctacataaggataactaaaattttaaaaactaacaaaattaagtttgggtgaagataaagaacaaccagaatctgcggaca

SEQ ID NO: 835565 - DNA, 616 bp, Homo sapiens
atttagggccaaagtctgctgtagctggctggtggtaatgtgggttgtaacgaaagtccattccactggggctgcaggctcctgtttggcactggrgtgggcctagaggctccatttatgggcaccagccttgtatcagggactgaggggcctgccctgtgctgagttttactgaagcaagtcagtactgggttgcaaggtgatgttctatgccacctctttttccttcccacaagcacatggtgtctttctccatgcagtgctacctggggctaggaaaggggtgaagtgggcaattccacacccactgaggctaagccaatattgaggtgtacctgaagaccacagctgctgagaccagtgcagtactgggatccacctaaggctgaaccttctgctgaggtttattcagagcctgaggttgctgttattggctagtggtgatgtgggctggaatatgaatccataccactggtgtcacaagttcatgtctggcaccaaggcaaatctagaagctctgtccatgggtattggtgtggtgtcaggggctgagggattccacccagtgttgggttttactattgcaggcctgttattgtgttgcaagccaatgttc

SEQ ID NO: 835566 - DNA, 608 bp, Homo sapiens
aaatattacatgttgtcttgacagtttatgattttcaaaatttgaattgtatgtgatttkacaaaatgtattattttgttatcaaatacatgttgttgcttgtaatgtcttttcctctgcattcaacttgaaaaattatatgccagtaagataaataaagatcctagtgaaacaatctcctaaatcaaggaaagagagagaaagaaacagacatatctagtttgtcttttctttattctattcagcctttaaacaacagatttaatgtctgagtttaactgcaaaaaataatagttcacaagaaacctccaaacttaaaaatcttatatttgacttggtatccctcttgctgatttactggcacccaagagttgcattaaatcagaagctaacagccattttttagtagatatgtcctcagttctataaaatggcttttcttttccttgcagagcaggcttaataaataaaaccctctttcacactggaattagacccaaactttattttaccttcatacaaaacaatctggatacaccatttctgaaataatgttgaaaaagatggcattatattgtagcacattccagtttgaagcgagtgaagct

SEQ ID NO: 835567 - DNA, 596 bp, Homo sapiens
tggcaccatggggccagaaggcagtgacccccctggacccagctttcactatcttgtgtctattatttctcaacctgccgatccacctagsaacaaagagagagctccgttgcattgcgggctgctggccagatcccgcgatagacatgaaaaaaattaactgtggggatatagacggatcattgatatacctattacactgattattcaccaatgcgttatatgaaaccagtgagcttctccatattctcttctgtttccttcactcatgctgtacttttgcttctctattcatggatcactgatctttgacgacagatatctaagataaaggaaggaacttctcctggtacatcttaaattccacaaggtgcacacttccttacacaaatgtagacttctagagagtttctccaaccaatgtggctcaactcatatgaaatcaaaagtgtgctgaactcttacaggaatactagtattcatacatttcagttgctcctcccatatttttgggggcttggctatgtgattttctttaatcaatgtgacatccacaaatagaatgcacagaatcttgaagagcaattgtatatttg

SEQ ID NO: 835568 - DNA, 579 bp, Homo sapiens
ctctctaccttcagtttactaatgaataaggaaggactgaaaggaaaaagagcaatggtttggcctatcttttctttccttctacatccttatttttccctgaaagtggctggcaartgcaagggagtaagaaaaggtgagaggtttccttggtcgtttttgtttcttagaatgccattgccttctttccgcattcataacaagttctgatttgaatggacagcatgaccttttggcagggacccagcttgctcagtgatagaaacaccttcatcttgtacttactttgcccaaactcccacgcattgtgggtacacccacattatgtggtccatgaggcatgacgaatgctacatgcaaatggaacagcaaggaatggcagacccatgtattgcatgcatctcctcaacatgcatgctccatcatcccatcagacttcacttacaagacacaagttcaaagagaaaattattaagaatttcaagatggtgatagcacaacattaaaccaagcacatggtccttttgcagacagggcctggtgagactgcacaggttgcatacctttgaagctggccct

SEQ ID NO: 835569 - DNA, 681 bp, Homo sapiens
taaggattcgccacactgttttccatagtggttgtactagtttacattcccatcagcagtgtagaaatgttcccttttcaccgcatccacaccaacatccattatttttttatttattgaytatggccattcttgcaggagtaaggtgatatcatgttgtggttttgatttgcatttccctgatcattaatgatgttgaacattttttcatatgtttgttggccatttgtatatcttcttttgagaattgtctattcatgtccttagcccacttttgataggactgtttgtttttctcttgctcatttgtttgagctctttttagattctggatattagtcctttgtcagatgtatagattgtgaagattttctcccactctgtgggttgtctgtttactctgatgactgttccttttgctgtgcaaaagttcttcagtttaattaagtcctagctatttatctttgtttttgttgcatttgcttttgggttcttggtcatgaaatctttgcctaggccaatgtctagaagggtttgtccaatgttatcttagagaatttttataatttcaggctttagatttaagtccttgatccatcttgagttgatttttgtataaggtgagagatgaggatccagtttcattatcctgtatgtggctagccaattatcccagcacca

SEQ ID NO: 835570 - DNA, 499 bp, Homo sapiens
ggtgatatcatgttgtggttttgatttgcatttccctgatcattaatgatgttgaacattttttcatatgtttgttggccatttgtatatcttcttttgagaattgtctattcatgtccttagcccacttttgataggactgtttgtttttctcttgctcatttgtttgagctctttttagattctggatattagtcctttgtcagatgtatagattgtgaagattttctcccactctgtgggttgtctgtttactctgatgactgttccttttgctgtgcaaaagttcttcagtttaattaagtcctagctatttatctttgtttttgttgcatttgcttttgggttcttggtcatgaaatctttgcctaggccaatgtctagaagggtttgtccaatgttatcttagagaatttttataatttcaggctttagatttaagtccttgatccatcttgagttgatttttgtataaggtgrgagatgaggatccagtttc

SEQ ID NO: 835571 - DNA, 594 bp, Homo sapiens
tccgccctgcaagccaccccaaatacaaartaaaaattgcattgtatttgtcaacaatataaaatgtgaataagtgcatctttagaaaatactctgcaaatgaagcttcatcatccatctccaggtactcatacaacccatgtgttgcccctaagctcttcttacatcaaaattctggaaccttcactggctccacaaatgaatgtcttcttgttcttggcaagttgtctggccacatttagtctcagattctttggctggaaagcaacctcccagggctatagtggggactatagtgagatgacatacaaaccatctgtttgtgcccactccccacttttcctgacagaagcttggtcatggtctagcagaaagtagcctttgctactgtgacttgggagctacaaagcaaaggggaaagtggaacttgctttacctaggtcctcgtttgtctgaatctagcccaatatttggagtagctgagttctcacagctccgtgctttccttgaaagggaagtcactcatctgacctaagaggcagaaaccgcaagggcaaaactccgaaactaagctcattaaaatatggatcacag

SEQ ID NO: 835572 - DNA, 550 bp, Homo sapiens
tttaaatcagatatgggtaagattctaggcacaattcatcctgagacaaattcctcctccagctgtgaacttgtgacatccaacaagttatgtgcttccratatacaaaggtagggcaggcataggatagacattcccgtttcaaaagggagcaacagaaaagaagaaatggacaacaggtctcaaataactcaaaaacccaccaaggcaaacagcattaaatcttgaggctttagaataatcttcaactacatgtcctgcctttcagatacactgggctggggttggatcaccaaggctccagggactctgcctccatggcctcactgggcacagctcacatggcagttctcaagggttagagtcttgtgcctgtggctctcccaggctagagttgcatgttggtgggtctacaggtttggtgtctcaggggtgaccccattcccatggctccactagacactgctgtactgtggggttctctgtggtgaccctgaccccatggctccactgggcattgccctagtaggggacctctgcagcagcccca

SEQ ID NO: 835573 - DNA, 526 bp, Homo sapiens
atagtcctcatttccatctaagacgttatcagaatagcctttactctttatatttctgccagcattctgatcacaaccatttagataacttctgagaagactgaaatcctttctatagctctccctttcttttgtgtttatcctagtccatttcctgcttattataacaaaatgcctgaaactgggtaatttataaagaaaaaaatgtatttattacagttatagagtctgaaaagtccaagatggagaggcgccatctggtgagggtcttcttcctgctgaggattttctgcagagtcccaaggcagtgcagggcttcacatggtgggagggctaagtgtattacattaggtctcgcttcctcttcttataaagccaccagttccactcccatgataacccattaatccattagcctattaaccctttaatccattcatccattaatcatctatttatgagtgcaaagccctcatsagccaatcacctcttaaaatttcacagcactgccacattggggattaaa

SEQ ID NO: 835574 - DNA, 506 bp, Homo sapiens
atgagctggaaatgcctgatctcccttggattaatgtagaggaagggatccaaaggcttagggaaattgggatggtggagtggattagtcaatttagacctactcatcccagctgggagggtctagaagatatacacttgaccaatgtcttgtgaaatagatttgtgagggcaacacctgcatctttgaaggaccctgtcattgctcttctctgtatgtcagatctaacagtgggaactacagtcactcaactacaaaatttaaatacaatgggaataattggattctgagggggcaggggccaagtggcagcactcaaccatcaaaggtgggcgtagctaccataatagacagcagaggcaaagcagcaatcagaatagtctgaattgtatagggctgtggcattggctaattaatcatagttcctagaagtgaaattgatacgaagcctaytgcattcctacttaatttataggagtggaaaacttctaggttgaatggacaaa

SEQ ID NO: 835575 - DNA, 506 bp, Homo sapiens
atgagctggaaatgcctgatctcccttggattaatgtagaggaagggatccaaaggcttagggaaattgggatggtggagtggattagtcaatttagacctactcatcccagctgggagggtctagaagatatacacttgaccaatgtcttgtgaaatagatttgtgagggcaacacctgcatctttgaaggaccctgtcattgctcttctctgtatgtcagatctaacagtgggaactacagtcactcaactacaaaatttaaatacaatgggaataattggattctgagggggcaggggccaagtggcagcactcaaccatcaaaggtgggcgtagctaccataatagacagcagaggcaaagcagcaatcagaatagtctgaattgtatagggctgtggcattggctaattaatcatagttcctagaagtgaaattgatacgaagcctactgcattcctacttaatttataggagyggaaaacttctaggttgaatggacaaa

SEQ ID NO: 835576 - DNA, 594 bp, Homo sapiens
ggtgggataatgtctatgaagtattaatggattatctttctttgacaccttctcatcttttagcacttcccttctttgattgyctcagggaagggttgttacagaagaatgcagatttaaaaagagtgtcttcctagcttttaagtttcaaaacctaggcccttaaggaaactgaaaagacttagggcaattttttttaaaaaaagaagaaaagataggataagaacgaggtttcaggcctgaagggtgaaagaagagtcaaggtgatgcaaggagagcttcgatgcttggggtccttgagaaaagggcatcttggcttcctcaccccatccttcaggttgagttgcgacccaagggagtctgcagaaaccctggctaggtttaggagatccaagaacacagataacgtcctgcaggtggcaagaccctggagaagaaccgacatcttagacggctttacccacatgtcagggcggtacagaaaccatggaatcacttctatgtgtccaagaagggacagaaatgaagacctgccccacgtatcatgggagcacctgagtgagaagcagaacaatcgctgcattcccaagaggg

SEQ ID NO: 835577 - DNA, 602 bp, Homo sapiens
aaaaaagaatcctaaaacttatagggtccacaaaagacccagaattgccaaacctgtcatgaacacaaagaacaaaactggagtaatcacattacctgacttcaaattaaactacagagctatagtarccaaaacaacatgataatggcatagaaacagacacatagaccaatggaacagaatacaggaccaagaagcaaatccatacatctatagtaaactcattttcaacaaagcaagaacatacattgagggaaggacagtgtctctaaagctgctgggaaaatgatatctatatgcagaacaatgaaactagatccctatctctcataatatacaaaaatcaaatcaaaatggattaaagacaaatctaatacctcaaactatgaaactgcttgaagaaaatattggagaacccttccaggatattggagtgcgtaaagatttcttgagtaataccccttaagcacaggaaaccaaagcaaaaatgaacaagtgggatcacgtcaagttaaaaaacttctgcacaggaaaagaaacagacaatcaacgaagtgaagagacaatccacagaatgggagaaaatatttgcaaactacttt

SEQ ID NO: 835578 - DNA, 556 bp, Homo sapiens
  misc_feature 1, 2, 3, 4, 5, 6, 7, 8, 9: n = A,T,C or G
nnnnnnnnncctgctttatctcagtatttcaaaaaaggagggcaaattcaaagaaatgtatactctgctttccctaacaagagctaacatagaaggggagagaaggattataaactcaacttctttattttttaaaaatgagatattatctacatttcaggacttcagtgtcaattaatatttttgactattgtatttttaatacatgtatttcaaatttagtcaattattcaacatcaaggtttttggaagagttcctagaaaaagtcacctgcccgccaaataatttctataccaaatgtatcccagtgtttgaatttaatatatctgatcattaaaaattatttataacttaacttgaattagcatatgtagattaaacctcttcccagccatgtccttagggaacagaactgactttcagttaggttttgagaaagaatgagagaggatcgaccgagagggggcagttagattgtgtatcaaaagaacctcaaggtaagatgcatcaytggtgctctgggcatctggaaggcagatggggtatagagtggag

SEQ ID NO: 835579 - DNA, 541 bp, Homo sapiens
tgtcaggctgattattaaccatttacactgtttacggatctctgcttctctcaggttatactaaattatttttgccacttgtgaagaaaaacctacttgcgaattctttcccwgtttgtttgtttgtttgtttgtatgaaatggcagccttggcctcattctttcaggcaggactcatgtcttattactaaagagctttcccaagaaactcattttatcatcgtcaataggatttggacagcttgcagccagcttcaataatattagttatcctctggcaccaatttaaaaaataatattatagataaaacaaacagtatgggaaaacagaaaaaataggaaactgatctgataaaatattttctgttatatatttgtgctcttgatcttgttgcgttataagtatgcacactattttgtgtgtgaattttttttcacttaagttcattataaggtttcgttgtctatcatagttataaacattttggttaaacaaactgtattattaagctcaggctcccataaaaaaaaattccataga

SEQ ID NO: 835580 - DNA, 541 bp, Homo sapiens
tgtcaggctgattattaaccatttacactgtttacggatctctgcttctctcaggttatactaaattatttttgccacttgtgaagaaaaacctacttgcgaattctttccctgtttgtttgtttgtttgtttgtatgaaatggcagccttggcctcattctttcaggcaggactcatgtcttattactaaagagctttcccaagaaactcattttatcatcgtcaataggatttggacagcttgcagccagcttcaataatattagttatcctctggcaccaatttaaaaaataatattatagataaaacaaacagtatgggaaaacagaaaaaataggaaactgatctgataaaatattttctgttatatatttgtgctcttgatcttgttgcgttataagtatgcacactattttgtgtgtgaattttttttcacttaagttcattataaggtttcgttgtctatcatagtkataaacattttggttaaacaaactgtattattaagctcaggctcccataaaaaaaaattccataga

SEQ ID NO: 835581 - DNA, 642 bp, Homo sapiens
ctctcttctgtgcctcgttgtctgccttcttgaagaatgtaagcaatttacatggcggagaagacaatccwatcaaaaggcacagcatgagcaaggtcataaacacttgaaagtgtcctaatttattcctcagcgttgaggtaaagtaagtgttccactgagaatgaaagatggcatacattagaaaagattgcattggagggaagcatgatagcatgaagggtctccagagtcatcctgaagattttgggctttattcatgcgagcttacctaaatttccatataggtttataggaatggaagcatgaatgtttcctgattatacttagtcgtgttctatttaaacagaaacaaatttttgtcgaatggtgaagtcgaatctattatactaattaaaagaaaaataaatctggaaatgtgggttgggggcagaatatgataatcattgaatggcatgctatggaataactatttaggaacagaaaagtcatgattagctcaggggaactatcataaatatgagggatatttaaaaccttggcatctgtttggagttaaatagacctgcatttcaatacttgctcccctacctaccagtatcattggaatactagcaagagacacttcaattccttaggcct

SEQ ID NO: 835582 - DNA, 652 bp, Homo sapiens
atacatacatctggatagcatatatacatgaggttgtatggcatcatggaaagcaggttgacttgagtgcaatgtgacacaggcatgaatgacaatcttgctccactaagcatcaagatgttgaccttggtaawcccttgaactccaggctgtatagcatgctgcagtgttcactggtagctctatcacttaattactttaagtaaatttccttttgctttatttctatcccctgtaaaaggggaccatgaatactatcataagtagggccacaaatctcctattgcatcttcatgcaaattagaaaatattgcctcctcttcaagataatttatttccatttgtgagaaaatatatacacccatgctatgtgcaatatttatgtcactccagtaccttggataacctgagcaactgtacctgacactctgctcagggtttttgtcaggatcaaaggagataatccatgtaaccttcacagcacagtatctggcacatatgaatcattcattcatgtcagtaatcatcatgaatctttatcataaacatcatcttctttatcatggaaagaatagcatttaaccagaatagataaagtgagaaaaaaactagcataggttaaagctatggcacatgaaaaggtatggaataa

SEQ ID NO: 835583 - DNA, 658 bp, Homo sapiens
ccaaggtatctttcttcagtacaaaaatagaaactatgaggtttggatccctcctacccaascccttcttcacctatctttgcctgaacttctctcctttgagagcaatttctgccatcctgaaaatcagaaaagctaatgttatgaagtttttagaaaaacaaacaaacaaacaaacaaacaaaacccaaagtcagttatattgcctgaacttcaacagggccaatatagcaattaataaactgatgagatgctttgtcctactgaaaattccataggcagagagtagaggtatttcagggtagaatgatggaagacatggggagagggagagagaaaaaaaggcatcaccattaaaaataagttcttagaacacgacatcctttagtgcttcatttagcaaaatatgtcattttagaagcacttctgagtgaaagtcaaatgtaaattttatacactgactataaagaataaagcgtcctccgggaagaaatgtgctcacacatgaaaggtaagaagccttcatccacaaccccaaatgctagattagttgtagataaatgatggattgaatagtttctgggaagactccttgctcagtcttcagctttgtccctgtagagtcctgcaagatcgtttgtttacagtacatcgtctt

SEQ ID NO: 835584 - DNA, 655 bp, Homo sapiens
tctcatatgctttccctttaatctgtaagatcatttcagcttttctacctaacgaaaagcttagctttgtgactctcatatattagctcattgcaaagtgacctctaaatcaccrttacttagaaacacggaccatacttctatctgttttatagtttctatagtctactttcagtgccttattctactatataattttaaagggcagtatctgtttgctaataacctcccacctgaattctattttatttctctgacctatgtcaaagatagaaagttcagaaggaaattataaaaggatttctatcttatatccaaggggaaaggtcagtgtatgaatataagaagttcattaaaatcctactacctaaataaagtttaaaatttcacaacaacggaaacataatagaatcattggtcaattcatgcagattcacatctcacctaatgacttatagacattttcatttttcatagatgcttctcttcctagtacccaagagacttgttctttttattgcattgttcaattagaagtgatcactcccaaagccagtgtgaaacaatccttttgggatggccttccataattttcaaatgacaatgtatttttaaattaggtagcctgaaggattcttttaggaattgatcctgc

SEQ ID NO: 835585 - DNA, 634 bp, Homo sapiens
aaagtctgcctgctaagacccttcttcaaaaccagtaatacctaagccaggatgttgataattactaaaacatttttgaattcaaaataacgtccaaagactaaaaaaaaagaatagcatagcataagcatttttgtttgaagtttcaagtatcactgtgtctggctgatgccccaaggaagtcctgtggtaaagctgtcaggggaagctgtaggtaagcacttgaaaaacatggtaaaaacaggttccagctgaggcagtcttaacacagctcctaatggccaggctccctttggctcaccttgttaagcatctgcctgaagcccacaaagaacccagtttgaggctcagctgctgtaataagcggaatgaacacatggagactccaactagcagatggggacttgctgattgagagagactgatctagtgtctggccacctgttggcagacacagcactcctggcacccccctctccacctagcaaattcagacagaagggagacaggaagagaactgatttcttaaaggaatagatgcaagaaaaacatttgttaagccaaacatcacgtgtgagagcggayagagtcaatcaatgatgttgttttcgtcacagcatatgggagtatgagt

SEQ ID NO: 835586 - DNA, 490 bp, Homo sapiens
ttttaggaggaaggaataggaccaatgttagctaaagtgtagagatggagagcaccagaggttttgttaaagtaaattatttaaatyagtgaaaggcagggtactcattcgtttcttataattgttttccttttaaccttgctcccaatagaatttctgcaagctattcatactattttagagtagaaaggttcagacctctgttttcatcatacaggtgacattacccccattttacagatgaggctctgagaagtaatttgtatcacacagaaaaaaaaaatgggactttcatttattgtgaacttagtatgtgccaggtactgtactaaggattttatatacatttattatctcatttgatcttcaaaaaaaaaacaaaaaacaaaatcctgtgagaacgtttcctaaaactaacttctttcactctttatgtcttcggacaggctgttcctcctgccttacaagtcttccttttcctttacctggt

SEQ ID NO: 835587 - DNA, 634 bp, Homo sapiens
ttattcccctcctcctccacrtaaatagttatggcaagagaaaaggaaaggaaaatgagaggaaaagaagagaaggagggagagatggagggagggagggaagaaggagagaaggagggagggagggaggaaacccatcatgactttgtggtaagggtcctgggatcatttgatttgtcttggcctctttctctattagtaaaaataggcttagatcacagacaggaaaagtgctttgaaaggcatgaaaagcccctgcaaatgggaggaagaagagagtcatttctgtcatagctcctcaccaactgagtgatgccccttggcttccaggcagaaatgaatccgagggcccagggcccagtcaggagaacaaccccactgactcttcatccaggaccccactccagcatggaggctgggaggcaggggcaggggagagggtgtgggaacgacaagcatggccctggtgctgcgctctaggttccacccccgctgctcttccccttccttagtaggtaagtggctagagcatggatgctggagccaagggcctgggttagaatttaggctttgccccttcttatctgcgtggccttaagcaggtcccctaatctccctgtgcctcaatttcctg

SEQ ID NO: 835588 - DNA, 607 bp, Homo sapiens
cagtaggtaagacctgtgactgggatagcggggaagccgtgggaatgcaggggagtcttccggggaaaagtggtgtctgagctagactctgaaggatgaggcagagttcagcaaagaagagcagggggtagggtccatgctgcaggcagagggaacagcagaagcaaacgcccaattgttggaggcggagtgagtcacaggtagcttggtggactggaggacaggactgtgtgagcaacaggggaggtgagcagggacaggtatacctttgctaaaaaatatttattgagtgcatgctaattgtgaaagaccttgaatgacattcccaaatcctgaatcatctcccttcctgggccctggcctaagtgtctgtaacatttgtaatgaggatttgtttctaaatttagttaattgctgtttggcttttcccatctcatgggaatagctctactagagggagtgggccaggaaactggcctcaagaccaggaatagcagcagggacatcatagtccaggagaggagagatagcaaggrtggcagccaagggcatggcctggccccttatggtgtttccacctggcctttgcactatcttcttggctgcc

SEQ ID NO: 835589 - DNA, 610 bp, Homo sapiens
catgggcttttctttctgtctggagcaccatctcttttatgcatattctttacctgatgatattctcattttccaggtctggtgcagatgtcctttgtgaaaggtcctctgacccttccaggtagattttattttcttcttccctcccttatccatctatcatcacccaccatccatctctttatgccttacccataaggatttctggctgtctaggtagagttctttgctgcctcccctgtgatctcacagcactttgaaaaacaaatgagcaccccagtcaattgcatatatttattttttgtacttgtgtctgttggctccaccagcctgggagctccctgagggatggctgggtctgactctgttttgccccaggcattgcccagcacagagtccacttcctgtttttcgcatttggtctgtttctcaaagaagagttttcaatatctgcaatgattttgggctgagactgagagcatttttttgatgccaagagagacatgtacaaatcactactgttagatggggagaattgaactggagaagtyactaataagtggatcctttcgctttccccaggaccatagggtgatcctagaactgtaga

SEQ ID NO: 835590 - DNA, 617 bp, Homo sapiens
aaaaactgaagaataaatctgacaaaagatgtgtaatacctytatgctgaaaattattgaacaatattgagagaaatctcaactcctaaatcagtggaaagatatagtatgttcacagtctggaagattcaatatttttgtgatgtcaattatgtacaaattaatctacatattcagtacaatctcaatcaaaattcaagcaggtttttcattggagattaaaaagttgattttaaaatatttatattcagggatctagaactgccaagaatactttgaattaaaaaaaaaagttcaaggacttaactaaaacctcactataaagctataataattaaaagttcatgttggtgcaagaaaagacaaacagaccaatggaatggaaccgagagcccagaaacagatctatacttatacagtcactttatttatataaaactactgcaattatagggagaaaggatggtcttttaaatacatgatgctggaacaaatgcatatttctatattttaaaaaaataacctgggctgttcttcacagtgtccacaaaattaatttcatatgaatcatagtcgtaaatgctaaagggaaaacaatacaaattttagaagaaaat

SEQ ID NO: 835591 - DNA, 624 bp, Homo sapiens
gccaacattaccttgacaccaaagccagaagaagatgctacaagaaaagaaaatagtagctcaatattcctaatgaatattaatttaaaaaactctcaaaaaatactagcaaacagaactcagcaacatattaaaaggattatacaccatggccaagtagtatttattaatgaaattcaaggaagattcaatatatgtaaatcaatcaatgtaatacaacaccttaatagaatgaagtttaaataaaaatacaagaatcttctcaattaatacagaaaaatacacttgtcagaacgcatcaacctttaacaaaaaaacttaataaactaggaatagaaagatatttgaaatatgaaaaacgacccacagataatattatatccaatgctgaaagactgaaagttttctcctaaatcaggaacaagaatacttgctttgacttcttctgtttgacatggtattattgacagttttagccagagctattaggcaagaaaaawaaaaagccaaagaaaattgaaaattagtaaaattatctctgctcacagatgacataatcttgtatgtagacaactacacacacaaacacacacacatcagatgtattaggccattcttggatca

SEQ ID NO: 835592 - DNA, 549 bp, Homo sapiens
ataaagcatgttagtgtgggtgaagtaaaagtgtagagtttttatatttaattgaatataatttgttatcagcttaaaatagattgttataactataagaaggtttctgtaagtcccattgtatgcacaaaaaatgatactgtggaagacacatgaataaaaaggagaaagaagtcaaagaatgtaattaaaagaaatttaaaaaaacacaaagcaaggtagcaagagaggaaaacagggataaaaatagctacaagatagacagaaaacaataacaaaatggcaatagaaatttcttccctctcaattattactttaaatataaatggattaaatttccaaatcaaaaaatagtggctgaatgaataaaaataagctcacattatatgctttctacaatagactcactttagatttctggacacaaatcagttgagagagaaaggataatacatatatatatatatattccatgcaaatrttaaccgaaagagagcaaaggaaagctatacttatatcatacacaatattctttcagttaaaaactgt

SEQ ID NO: 835593 - DNA, 659 bp, Homo sapiens
gataatatgaagggttatgatattcttaaataattcttaaatgtgacaaaattagtgatgtaatttttttaaatgctatacctcatgtgagctcactggcattgtttgactaatactatttgtctacttaagtatttcaatatttgagtacatcgtgaaccaacccatgtaacatatatctaaatcatatctgccaagatgtagcaactgagagtcttgatcacacttccattcttaagtttataaggacttataattcttaattctgtgtttcgaactgagtttctgttattaagctgcagaaacatcttaagactttggtttatttagtttgactgtttcttgattttttaatttgtcttcctttgtaaatgaagacatgatcatctttaaatatattacggatcttatgcactacaagcaagggcagtttcataagcttagagatagagtttatgattcgttttcagccagctgtttccttgacagcacactaggcctcttgctattgagctgctctgaactctacacttgcyaccttacccttttatttatcttctcacgtacaagtgtcccccggagctttgcggagcctctcccatggtaaccacatgatcaatatttcctccttgattgatatgattgtagaacacaaaatg

SEQ ID NO: 835594 - DNA, 633 bp, Homo sapiens
acagaaaatgtttgattcagtcttgaggagtcagtctgtttcctaatgcttgctgtgtcctctgcatatagtaatgctcttctgttcttatggagcatggagcatttaggtgccatcaatacctatgtctgatgccaaactaaacctaagtgattaagtcatttgattaaaaggcctgtcttttgtgttgtctaatactgaggagaggaagaagtgatgactcataaccatgagattgctagtcacgaagatgagtcagggccagttttcttttccattgatcatataaaacatgaacacatgtgtactttgcagtcctagaaactttcattaattatgaaaagttagaaaattttgtttacagtatttataaactctcaaggaatattatggaagcttcactcccatgatgtaattaaggatgaaaacgatgtgtatgtgtggccaaaatctgaaaaacaataaaataaaaatgatttaggtctctttcaacccagtctccaggaatgcctctgactaaatttcttcatctgtaaaatgggatattgctagtcatcatctmtaagactgttgtagggactaaataagataacatatgtgaagagcttagcagtgcctgagccccactgtgca

SEQ ID NO: 835595 - DNA, 530 bp, Homo sapiens
cattaccttcattagctaaaaaatgagaatagtaacagtgcagacaggagaaatagccgttttctrcattttctacatttatggaggaaatgcaaactgctatgacacgtttcctggtgaactgaaatcccaattagtcagcaactccacaatatatttttaaaagtgtccttggcacctaaatgaaaacagctctatagagaggttgggaaggtaaagaaaagaacgcaagtaaagtggtttccttcacttttttttttttttttttgagatggggtcttgctccttgccctgcctggagtgtagtggtgtgatctcggctcactgcaacctctgcctcccgggttcaagtgattctcctgactcagcctcccgagtagctggaattacagtcacatgccaccacacctggctaattttgtatttttagtagagatggggtttcaccatgttaaccaggctggtctcaaactcctgacctcaggtgatccacccttctcaccctcccaaagtggcatgagccaccacgc

SEQ ID NO: 835596 - DNA, 652 bp, Homo sapiens
  misc_feature 331, 354, 355: n = A,T,C or G
cctgctatatttttaatctttaaaactacagtaaaatttgaaagaataatgcagtgaacattcatactcttaaactggagtcatcaattgttttaatttgccactttcgctttattgataatgcaccrccttcatttttctaactgtttgaaaacaacttttaccatttggatgcagactttcaatggtagaaaattgaaaagctttctgaatttatagacttagtaattttgacatttagtgaacattttcttgatttactttaatagttttgcaagtagaatggtaagatgcagtataaatacaatatactaagtatatttattcaggnatgctaggagaccaatttgcttnngcaactgtggagataatatataaatgagaaaaacaaaggctgtgctaaaaataaacaaactcattcaatttgttcatcatatttaaagcatgaatcaggtttgaaatgccatttgcagataatgccaccaccaaaagaatatcgcattttctttgtatcatctttgtttacttagtacaaatacagttattgacaaccaaagaatggtagtttagacctcagaaagcacatttgtattttttaaaactaggtttccctttatatgtagttcttactggtataatggagactccgatg

SEQ ID NO: 835597 - DNA, 592 bp, Homo sapiens
tgattctctaatcatattatctatgtcttagttgggttgacaagtcacaatacaagaattaaataaaagaattgattagattataaagaatgaaacaagtaatgtaattcaggtagtccaagcgaaatttgaaagaaaatgccaactaacagaaccatgttctgacagatcaaacagaaagatttgaatgttcatttgccatttaggaaaatataaaaataaacactgtatatacattatcagatagaagttctagcattaaatatatcaaaataagtatgtttcttaacaaaaaatattaaaaaataataattaatgaacatataactaatagatattgaatacttatgtgcctgatgctctaagtgttctcaaataactcttaaaataatatggggtaggtgatattatcatgttcatatgacagttaagcaatctgccatttagagtaatgagaaaacaattcatgtggccagactccatctgcctccaacttatacaaattaaaaaaaaaattcaactctrcttacctcagtgataaccttgctacctagtaatattcatggttaaagtctgctacacagaatgctat

SEQ ID NO: 835598 - DNA, 608 bp, Homo sapiens
aaacaccccttaagatttttgtaatgaggaccatttgcaagctaatgcgatcagatgtcaatcccttcccgtactacccactggaggtcagctgaaaaagaaatctcatactagaagtcaattgggytgccaaagtccaggccagcccttcaggggtgatggctaaatgatgcagcagggtgaagtaaaaaagaaaggcaaagagtagtagtaaggaatttattataagtcccatcaaactatctgagctataaactaagggcagaactcccaggataacagcaaaggttgatctgatgagcacaggttcaacatttacaaacttgaatcgaagctgaagagtgcctcagctatctcctctaatttctccctaatctttttttttttttttttgacgaataacttctccatgtaaatataagtaacagcaaaggaaaactagtgcagaccataaggaaaaaactcattcattcgttgaaaagagaaaacattaagtgcattactgatcaacggatcagtaccgtatttagtggtttggctacctcagtaaataatacagacaccagctctcatggaacgtcattctagtaaagaagacagacaatata

SEQ ID NO: 835599 - DNA, 609 bp, Homo sapiens
agcaaatgctaaggaaatttgttacctccatacctaccttacaagaagtcttgaagggartgctaaacatagaaaggaaagactattaccagccactacaaaaatacactgaaatgcagagaccagtgacactataaagcaacctcccatacaaatctgcataataaccaactaacgacataataggatcaaatccacatatattaacactaaccttcaatgtaaatgggctaaatgccccaattaaaaatcacagagtggcaagatgaatagagaaacaagacccatgggtatgctgtcttcaacagtctctctcatatacactgacacccataggctgaaagtgaagggatggagaaaaatctaccaagcaaatggagaacagaaaaacagcagagattgttactttaatttcagacagaacagactttaaaccaacaaaaatcaaaaaacataaggaagggcattacataatggtaaagggctccattcaataagaagacctaactatcataaatatgtatacacctaacacaggagcactcacattcataacacaagttcttagagacctatgaagagacttagataagtacacaatgacagtgg

SEQ ID NO: 835600 - DNA, 440 bp, Homo sapiens
ccttgtatcccatagcttagatgtatctcttaaactcaaaagcacctgtactcttagacttggctctctaggactgatatttgtcctgtgtactgtgtccagccaagtagaaaggaggaattgtcattctctgatagccactgtataggtaacagagttctacctctgtaatattatcacatgtgcctccaataaatctttcatgcaacgtagatgtgggaacacgtaaaaggacaggaactggagatttcatgaagcttatagacgttgtatgaattggtttgtgtcatatttttgtaactgtcagtatacgtggcaaagtatggactgtgatttacyttcattgtaatatagttaaggaggctgtgaagaagtaaataaccctcttcgaattcaaacatgtcagtgactcacatacattttttaccaatgtgaacata

SEQ ID NO: 835601 - DNA, 636 bp, Homo sapiens
tcttctacatttgtttttcatctgtatttctgagtgattgtcagtttctctcttgtggtgtcatattctggttttaaaatcaatgatcttaaccttatagaatcaggttaggagcattacttctttttcattccctcaaagattttatgtaaaattagaattatttttttcttctatattaggtagaatttacctgcaaaactagctaggcataatgttttggttatagatgactctttttttttcctgttgatttaatttctttcatagttttggaaagagccaaatttgcttttgggtcagttttagtaacttttttctctgtgttttgttcaattggtacaatgttacacataatattcttgtaatatctttctaaaaatctctgctacaattgtagttttaaaagtgtttttgcttggatactcttcaggcaacagatgtagtattgccccaaactttgtgaaggtggacctacgcataagaattcccaaggaatatttttgcctattttctgtttgtccaaataggccaaacagtcacccatcttttcattctctaagtttttkaaatttttttgttgctagttaagtgatgaagtctgtttcctttcaggcagatcacagtttatgtggc

SEQ ID NO: 835602 - DNA, 600 bp, Homo sapiens
agcgcccagccaaatgtacattcttttagtgatgtttgtacaaatatatacttgtatagtttggatatgttacttatggagcaattgctgtcttcttcattaatacttttgcaattttgattgagctgtgcatccacattaaaataattcattttttaaaattagctttcgtgtactatgcccttacttcaaaaacattatttctttgctcataagcttaatttccttttattgctatatcattggatgtgtttcttcaagttgctgaagaatgataaataaatgggtgatgtactttatgagtccttccaaatataagcgtgaatttttattgcctttatacatgataatcaatttggcctgagacaatgtttggttatatcctccccaccctcaaactatgtaaatattgccctagattttcttgcaaatgtttctgagaagaaaagtcttggcccaatctgaattttgattatttattggttatagatatagatgtaggtatatagacatagacacwgactggtatatctaggtatagatataaacatagatataaagatatgtttttatctagaggtcttacagatgttaaaaaat

SEQ ID NO: 835603 - DNA, 613 bp, Homo sapiens
gttgtgacagaggccataggatccgtaaagtctaaattctacctggcccttcactaagaatgtttgcyggcccctgttctatacctttccagactctatccagatcctcactattcatttgttatgttagaaaacactgtctcacatcacaaaagtgctatagcacttgttttctggactgttttgtatcccatttgcttaactgtttgatgaatatgtcagcttgtttaactttttgtttctgtatcttctttccagtgaagtttagagcaccttttaggcagaaactcttagacatctttggtatacccataccacacgtagtgcagagatgtgagtgtgtattaaacttagattgaaattagtttattagtacttaacgtgtttacatcttttaaagatatataaatttcacttatattttctactatgtctatccttagtctttttaccaattgacagttcttattgtagtattttttagcttgatggttaactgtttttcccctagcggaaccttttttcccaaatgaaattttacgataaaccataacgtataaaatagataaaacagattgttctgttccacctgacctccttctgcctattatcc

SEQ ID NO: 835604 - DNA, 537 bp, Homo sapiens
gtgcatctgagtttggaattctagggaagcgtaagatctggacatagagtagggagtccttggtaagcacttgcggtcacttagagaggatgtgtagaaaaggaaagcagccctgggtctgtgtcctgatggcactccaacattttgaggtttgaggttgggcagaatgaggaggagacaggagaaactgaggaacttgtagggcaggaagaacacctggaaagtgtggagtcatgaaagtgaagagtagagagctttgtaagaagggagtcgtgaactgagcagcatggtgcggagaggtcaggtacgataaggacagagaagaccattggattcagcctcaaggagatccttgttgcccttaagtgttgaccttgacaagagcagtgtcagcccagggatgaggacagaagcctagctgcaaagrggtgaggagggaatagcaggggaggaagcagtagtgcctccagacatctccttcagggaattgtgctgtaaagaagagcagagaaatgaggatgtagctggaaggagaaa

SEQ ID NO: 835605 - DNA, 564 bp, Homo sapiens
aatgtttgattcaagatctggatcaaggaaagtaaaaagtaattggggattttttttggtccagaaaacaaggaagtgctcaatggaggtcacattaaaaggacacaagaaagtatgctccctggccaaatttgggacaatttaagtattctaaaaaatagtgatggtaatgggtaatcacaattcagttaaaaattacaaaaacaagttcgtataaatgttaataaagggtgagagtgggggacaggaagacagctcttctttacaaaagaatgcctgctgatacacagagaagaaatgacataattagaaagtcaccgttttgcaaccccagtggaacaattaatttgggcaaaaatcatcactggatgctaaaaccattgggtgaaacatgttgggcactacatgcacacggtcgtctcagagtatcatcttgacacttcgagtatcatttcacagatcatacttattacaaagtagggggaaratacctttataatgtagagatctggaggccaacaccttgacccagtgatcaaggttggcatcaccagcagcaggaca

SEQ ID NO: 835606 - DNA, 548 bp, Homo sapiens
ggaatgacaccctgtgtacaattgtgctgcagcacttattacactatygtgtaatctgcttattgactcatttggtactaagcttcttgcagatagagcacttgttcattcattcactcattctacaaatatttgttgagcatatactttgtgccaaacactgcccaagaccttggtgtcagcgcagttttaagaactgacaagattccttctctcacagaacacagtattttccaatggagatagactggcagtggacaagtaaacaaataataagtaagaaaaatattaatgataagctacatgtattgataatttaaatagagaaacgtgatataaagagacaagtgtgtgctttagatagaggaagaagcctgggcaacatagtaagacctcatctctactagaaaaaaatagctgggtgtggtggtatgtgcctgtggtcccagctactcaagaggctgaggcaggaggattgcttgagcccaggagactgaggttgcagtgagctgtgattgcaccactgcactccagcctgagcggacaac

SEQ ID NO: 835607 - DNA, 548 bp, Homo sapiens
ggaatgacaccctgtgtacaattgtgctgcagcacttattacactatcgtgtaatctgcttattgactcatttggtactaagcttcttgcagatagagcacttgttcattcattcactcattctacaaatatttgttgagcatatactttgtgccaaacactgcccaagaccttggtgtcagcgcagttttaagaactgacaagattccttctctcacagaacacagtattttccaatggagatagactggcagtggacaagtaaacaaataataagtaagaaaaatattaatgataagctacatgtattgataatttaaatagagaaacgtgatataaagagacaagtgtgtgctttagatagaggaagaagcctgggcaacatagtaagacctcatctctactagaaaaaaatagctgggtgtggtggtatgtgcytgtggtcccagctactcaagaggctgaggcaggaggattgcttgagcccaggagactgaggttgcagtgagctgtgattgcaccactgcactccagcctgagcggacaac

SEQ ID NO: 835608 - DNA, 656 bp, Homo sapiens
agctgccatgtctcctcacttgtattattctaactgttcttgctgcctctcctggattctggcagtgtattctgaatacagcaaccagagtaaaacttctaaattaggccagtcatgttatttagcttcttagaggcctctggtttatatctttgatctctcacaagaatctcactaaactccattaggatagagaacttgatgtgattggtcactactatatctccagttcttgggagagagaatgcttgatgtgtaggaactatttcttcatatttttgaattaattatattctggaagcatgatgtctcaaagatagaaatttgagcaccctctgtcactcttcagaaggtgattggaagtgtggaaggagaccctagatcagtgactcagtgaagcaaagaatgtcaacttcatccttctagagaaatgtccaaaatgtatgctaactggagacattaagagacatatgacaccaacatgctgagtgatttatcagagcattggcaaggtacagaatttaccccatatgattcaaatgaagatggttctacgaaaggaatgcatrtggtatgtgatcaggattaaaggagcagaagcagcaggaaaccattaatacccactagggctgaaggaacaaggagagaaaacagta

SEQ ID NO: 835609 - DNA, 657 bp, Homo sapiens
gcattgggttagaacatgttcctttagctcatcgtaattttttattacccatcttttgaagcctactgtcarttcatccgtctgatcctccattcagttctgcgcccttgatggagagacattgcaatcatttggaggagaagaggcaagcactctggccttttggattttcagcatttttcattgattctcatcttcgtgagtttgtctagttttggtctttgaggctgctgacccttggatggggcttttgtgggggccttgttgttgttgatgctgttgttgtcactttctgcttgtttttctttcaaaagtcaggtccctcttctgtagggatgctgcaatttggtgggggttcatttcaggccttattcgtctgatttgctcctgtgcctggagatgtcactcaaggaggctggagagcagcaaagatggttgcctactccttctgggagctctgccctcgaggggcactgacctgatgccaatgggggttccccttccccgtgtggctctcagggtggccgccacaccacactgctcttccttctctccgtgggtcacgacagccttctagtcaattttgatgagagaacctggataccttggttgccggtgaaggattctcatgcttattatagttttcttctatgggag

SEQ ID NO: 835610 - DNA, 617 bp, Homo sapiens
ggtggatccaaggttctagcctattcaatctgattccaaagtctgcacccttaaccagatgacatgytgcctcatagtttttctttctgtgcccccatctccttattgaagctatactttggatagattttcaaaaaattatgaatgatcatcagaatttactttagccaggcaggccgggcatggtggctcatgtctgttatctcagcactttgggaggccaaggcgggaggatcacttaaggtcaggagttcgagaccagcctggccaatttggtgaaaccccatctctacacaaaaattagctgggcgtggtggcacaagcctgtaatcccggctactcaggaagctgaggcaggagaaatgcttgaacctgggaggcggacattgcagtgagcctagatcatgtcactgcactccagcctgggtcacagagtaagattctgtctcaaaaaaaagaatttactttagccaggcaaactggtgttggcccatgatcaaaaataagtcatcatctaaaaaagaaaattttttaaaaaatgaattataacattattctttctttttatggatttttttccttttattgattttcacctatgccatgaacattgcttt

SEQ ID NO: 835611 - DNA, 508 bp, Homo sapiens
atggcaagacttttttctaggaagggcttcagataaaagttcaaaggaaatgaaaatcctaaagcatcagttgccaagataaaagcctcaacatcaggtaaggcatacacagcatctgagaggtaccaataaataggctctaataagccagaaccgtatcaggggagtctatggggaaagggatttatctcctttttttgttcaaaaagacaattaatcacacacctgtctactatttgctccaaaaacgcaagaggccgggacaaccccactcctatcttagtttttccttctcctgtgacccaaaagcacccttacttaagtggcagaaattaaaagaatcacgttttctccaagcatggctaatgtactttcttgcaaatgtaaaccatgtgggcagaagtgcacattaycttctaagcatttccaggtacagatgctccttagcatgggattaggtcctgtcctgataaatccatcataagttgaaaatattattaagtcaaaa

SEQ ID NO: 835612 - DNA, 567 bp, Homo sapiens
taaaatgtagcagaaagcatcaacagaactttatgactggctggataaagggggataagggagaggaaggagtcaagattaacaccttattttcttgcctgagcaattatctgagggtggtgccatccattgtcatgtggcagattaacaagttctaggggtaaggataaatacagttttgaatttcataaatttgaggcacctgttcaggagaataatactaggctagaccagagatacagatttgggagtcaccagcatatcaaaggcaaaatcaagtagggagaaagtactaagaagaaaatacagcatagaagaaagcccttaggataaccaattagtaaatgactaaattaaccattatacaactctaaattacgcaagtgctaaaaattataattaggaaaaatgctttacgatattctgttgcatttaagagatatatcataaaaccaaatgtattacctctatgtacttacaagggaacatcctaggcccttctctggacattcytagagaacctcatgccctcatatttcttatggcagtggaaggttgggacaagga

SEQ ID NO: 835613 - DNA, 535 bp, Homo sapiens
cacatcatagggatatatcatagtttatttattcattcacccagtgaagaacatctttggtggagtgcatggtaagagtaaatctagttttacaagaagctgccaaactgttttgcacagtggctgtaccattttgcatttctaccagcagtgaaggagttcctgttgctccatgtactcaccagcatttgatgttgtcagtgttttggatttttacaatcctaatcaatgtgtactggtatctcatttttttaaatttgcaattccataatgacatatgatgttgaacatattttcttatgcttatttgtcacttgtataccttctttgattatgtgtgtgtgttcagatcttttgcccattttttaattgggttgttcattttcttattcctgagttttaaaagttttwaaatattttagataatagtcctttatcatacatgtcttttgcaaatatttttctcccagtctgtcacttatcattctcttgacagtgtcttttgcagagcagaaatattaaattttaatgcagt

SEQ ID NO: 835614 - DNA, 554 bp, Homo sapiens
ctttattttaaagagtaatctttttcaatatacggaacacttcacaaatttgggtatcacccttgcaaaagggccatgctaatctctgtattgttccaattttagtataygtgctgccaaagcaagcactaaactaatattatttcattttcattcacagttattatcttaggataaatgaggagacatgacattaggattaaagggtatgcaaaatctaaggtttttgacacatacaatctattgctcttccgaatcgatgcctgaactaatttatatgctcactagcaacgtacaagcatgcctattcactacactcaacaaggagaccctttgagagtaggaaaaaatgcatttattttactgtgtaatagttattatttactattttgatacagtgttttaaatttgtgcctttgattgctaacaaaattgaactttttaaatatttgatgttcttgtatttcttctttgtaaactgtctgttcatgacctttgtctacttttctattaggctgttcatttcttaacatagtaattaaaaaaaaacaggt

SEQ ID NO: 835615 - DNA, 641 bp, Homo sapiens
caacttgctgttcttatactttaaaaaatatggcattgccttgagttttgttcttttcttccagcttctgaggaagaagttgtgcctaagtggccrttgacgctcttctctctccttccttcagttccgatttgtccctctatcttggctccttccaagcagcctgtaatgtgttcaagctacctccatcttatgctatcaactctcctttaacttagaatattcttttatttctcaccttttctgcttttcttcacagccagattcctcaagcaggtaatctttgatgacattttgtactgagtgcctatttttcacttttcaatccaatgtaatgaggcctgtgcctctaaccctgcaatgagatgtcactggtgaatcctgccaataacctcttgggtactaatcccctggatctatccgaattttctgatcatttcttctaaacttccatttccaaccttacattcctccccttcaatgcctgcattctccacgggtttatctttggccttcatttctttttactttttttgttcgtttgttttggtggggtaatctctttcatgtccatgacttgaactactacctttagactcataattcctataccagtacctctggttagggtcataggcctc

SEQ ID NO: 835616 - DNA, 595 bp, Homo sapiens
cagaaatctcctaattttaaaatacaccaaataaacatgtctattgggcataattttaaccaaatgacttacggtttgtgacctctaaaatagtttttatttttgcaatatgtttagagtaatttaaaatatgaatgaaggaattatacaactactaagatatggttgaatattggcatatatcaaagatctaacttgttagaagaggcatatgtctcaggcttcaaacctgaaatattcatctcccatttttaatacagatataggatttaaaagtctgtttcttttttccattgcttttcgggaagatttcagtctctctactgactgtcaatcccttccctccccctcttccacatgaaggtagcatggtttttagcatagtgcctggcacataagtaagcccaaatgtagacacatgcagcataacaatgtttcagtcatctgctgaccgcgtatacagtgatggtcccataagattataatattgtatttttactgtacattttctatgtttaratacacaaatacctaccactgtgttttaattgcctacagtattcgggacagtaatatgctgtacaggtttgtagcc

SEQ ID NO: 835617 - DNA, 593 bp, Homo sapiens
ttgcattttttaattgtgctttctttggcctttataatttctttatcatttcttgttgaaggtaaataagaaggaagagttgaagatttctctgtattactttatcagccacacacctagagacaacatggaaatgtgggtaggaaatattttgaatgcttatattaaaaactatagtggtatatgattttttgaaaattcatatagtttaacgacagaaactgtctctgataagggaaacaaaattggatgtagaagtaaaaagagcatgactaaacaaatgactgcatcagcaaaatgaaatgtattgaaacagacaaatcatcacatcagaatgaagttacttcctgaatttaccacatgaaaaaaaaactgtggaaattaacaagaaattagccatctgtatttgttacaatatagatatagctgcatgtgagagagaccaaaaatagcttaataaactggcttatctgtcttgtctgagtggctttgcctgcaagtcatcaggggcctgcactaatactatcttctctgcaatctcaagtgygttgagattggtaccaggtgataccaggtctgcattcaaaccagga

SEQ ID NO: 835618 - DNA, 625 bp, Homo sapiens
atgtcacttccttgcttaaactctttaatgattatccattgctctgatgaaggtggtcaaaaaattcttagccttaataacagtgaagaggagtaggaaagggctagatcttgagctcccmtgcttcctcctgcattattctctatgcttggcttctctacatttccttattcctctaactatcaaaattcttcacctgggcacctgacacacactatttctactgcttacatgcttgtactgcctcttagtcaatcaatgccccgacccctcctttcttttgtattaggatcatttattttcctggtggaaaactgaagattctttttaaatcaactcttatttatccaactttcttttggcctttaagcaacagttaattacttccttgggaagccttcccttcctcccctggtcaatttgggaccctattactgtagctcagcctgtaatttttttcttgtaattctcattacaattgcaatcatttttgtaattttttaaagatatatgtctcccttgtggaactggaactttcacttactcacagacccagcccagttcctgagacaatgcctgggatctagtacttataaacatatctttgttgagtgaaagagtgaat

SEQ ID NO: 835619 - DNA, 582 bp, Homo sapiens
ggatgcatacactgatttatttaatccttaaataaacttacaaagtaacccatctttcaaaagagaaaaataagtgtagacaagacaaataactttcacaaaatcactgttagccagtaatagattcacatttaaatatcatcatcatcatcaccgtcatcatcgacacggataacacttactgaactctcatatgagccaagccctgtgttaaatatttttccgtgcattatcttattgcaccctcatgaaaacattataagagagatacaagtattattcctttatgtaaatgaagaaaatgagtttcaaagaggttaggctacttgtttaaggtcacacagcagctagtaaatgttagaattagcattttaaacttttattttggtctgatatcaggacccaatctcttagtcactacccagtattttgcttttatgaacactgacgactgtctttaaacccctaggaaagtaaataactaaggcagttatccacatttctccatttaaagcatactttcttctacaatacctagaamatgaaagatttgttttttacctattaaattatccagataat

SEQ ID NO: 835620 - DNA, 575 bp, Homo sapiens; identical to SEQ ID NO: 832970

SEQ ID NO: 835621 - DNA, 575 bp, Homo sapiens; identical to SEQ ID NO: 832971

SEQ ID NO: 835622 - DNA, 522 bp, Homo sapiens
caggtgttgttttagatgacagtaattcagcaatgtctaacttcattgataacagacttaatctactgatttgggtygaccccttgcatttagggagccaaagggaaaaatcttacagggtgaaaatatctacatctaaggcctctgcttcatgtatagcctaaacatatgctctaaatctgagaaaagttttaagatctttgctttgccttggaaactatagctggcaagatctagcaaaacttacagaatagaaattccagcaggacctacagaacagatctggagccctggcaatgcttttcagggggcactaatatagtttggtcaatgcagcggtccccaaatcattctgtatgcaggcagatcaaagattgacatgtgcaaatgaagtgattctgacaacattaacatgctgattgcagctaagtgcactgcttgttcaacagttcttcagtagactaaaaaatatttaattgaagtaatgagaaaccaaaaacatttcttattcatgatattata

SEQ ID NO: 835623 - DNA, 582 bp, Homo sapiens
tgtgctatgaggtgggaagtgggttaacgtaaactcctaagagtgtttcttgaaaaaaagttaagtgccttcgagtgcactccatgttgactgtcctatggccttaggtgcacacatctgggtgcccagcataattccagagaaccgcggctcctcagcagatgccttttggagagggaagatgttcctatcctgctgacggggggaaagaatctgtccacattgacctgcacctgctgagtgccaggccatagatcgtttttactggtcatagtgatattctggggtctagaatggatatggtctgaatttcatgtctggtaaattcttattgtaaatatatattttgtagcgatagggtcttgtcatattgaccaggctggtctggaactcctgggctcaagcgatcctcctgccttggcttcccaaagtgcaggatttgcaagtgtgagctcctatgcccagccaaaaaggtttgttttttttttttttktttttttttttttttaactcactgccagattttaattcatttccaagtactaggagttagtctgtctggtgagcctgagctatgtgcag

SEQ ID NO: 835624 - DNA, 624 bp, Homo sapiens
atccccttccttttcgtgctccaggagagaattaattcygataagaaacatttacaacctattctctctgaagcctgctacctggggcttcctctgcataatgggaaccctggtctccacaacctctcatcttaacccagacattctcttctgttgattctaggtctttagatgataatacaactttttcaaccaattgtcaatcagaaaatctttgaatgtatctatgacttgaagcctctgctttgagttgtcctgccttcccggaccaaaccacgtacattttctatgtattgatttatttcttgtatctccctaatatatataaaaccaaactgtaacctgaccaccttgggcaggatctcctgaggtctgtgtcacgggctattggtcactcatatttggctcagaataaatctccaagtattttatagagtttgactgtttttgtagacacctgggacaggaactcttggcagagcagacccctggaggcagcacccctgctgctgtgcctgctttcaaaaccccatggctcgtccttcgtcccctcctctctgtctctctgtgacttgaagaaggatgaaaggcggcctgcaggtggaccacaaaagtgggaagcat

SEQ ID NO: 835625 - DNA, 541 bp, Homo sapiens
gatccctgcaacctgagacgggtaccttctatgggaagaaagggctttgcagatgtgcttgcagtaaggctcttgagatgagaagcctgtcctggattactcgggtgagtcctaaatgtaatcaaggcatccttgcaagagggaagcacagggacacgtcagaagaggagggggcgacatgacccgggggcagagattggcatgatgcagccacaagccaagggaggctggcagcccccaggagcggggatgggccagaaacagattctcccctggagcctctggagggagcacagccctgtccacccttgatcttggctcagtgagattcatttcagacttctggcccacagagctgtgagagaggcatttgtattagtccgttttcacaatgctgataaagacatacccgagactgggcaacttacaaaagaaagaggtttattggacttacagttccacrtggctggggaggcctcacatcatggcagaagatgaaaggcacgtctcacatggcagcagccgagagagagagagcttg

SEQ ID NO: 835626 - DNA, 638 bp, Homo sapiens
tacagcccccacagaggttcccaaacacaacttccccttcgtccccccagcacccgccgaactaccgaggctcctctgcacctgccccgtgccactctccagcggccyctgcagcccactcacctccaaggattcacgggggtctcggggccttcagaggctggggcgggtgacaagagccagcaagcccctgcccctgcctagcatctgcttaagccagggagggtccccaggactcaccacagcccccagggctccaagccttccctctgctgggcagttggcccagggaaggggagctggcctgggtaatgtcacgggggcaccgcagcacgcggcagccaagtggtgggggccgatggagaggccggcaggtcttttattgaaaatattcactgtgaacttcagaacaaaacgaagatccccacgggtcccaaaggaagggagaattcccaggggttgtgttctgaacgcagaggaggtgggggccggcaagtggggtgctgacagccagtgccacgggacccatgtggccggaggcttggccagtggctcagcagatgacaggcggaaaatccctgtcaccagtctggtacatgctccagagcccctgatttggacatcatctggaagcctgg

SEQ ID NO: 835627 - DNA, 599 bp, Homo sapiens
tgatcaaaaaactcgaaagagctctcagtttcatgggagacacacatacacacacacagataatagtgctatgtgacaagtgctgggggaacatggtatgttgtgtctctttgtgaggcagagatgacagatgtstgagtcttgaaggaaaattgtagctttccagtttgagaagacttgaagggtgctctgggcagaggaacagtcttgtgtatagatctggaggcatgcaggtgcattggggaatattttcttggagtggagacaggtgataaggctgacaggctagagtaggcgaggcttgtaggagtttttggcttcatcctgtatgtggtggggaagcaataccatgttttgtttttttttttttttcagagggagtgacccaatgataatgataactggggctccctggagaatgattggaaattagaagacaccttgatattctcaaccagagataacagagccctgagagcaggaagggggttagtagggtgagtgaggtgtttactgaggtacggaggagaaagaaaatgaggctagagtctcattctagggacctggattggtggaactttggtcagcggagaagggga

SEQ ID NO: 835628 - DNA, 623 bp, Homo sapiens
ccaccttccatcctttctctttcctttccttccagtatttactgaaygtctgccgagaccctggcacgttactaggtgcctgccttgaagccatttaggagaaatggcgttctccaaacaaaagtattccgttgccattcacgtttctctctctccccctctctggccacatggagctgggcagaggtgtttttttttccttttctctttttctctgtctctgcttgtttctctgagaagataaaagctggcctttggctccccgctaggggacaggcccattacagccctctgttcctttccctgctttctctgacactgtgaggctgagacacagtgagtcctgctcagctgggcctgtgttcatcccattagcattgtggccacttcagggcctctgggattgagttctctggagccagaacagtttcataacccctagaggaggccaaagtcgtcccagccttctgggtccaaaggttctctcccatgtggctcctgcctcaataacctacctccattttttttttttagtttgtttctgcctcaggcacattttctctgtaatttttggaacccaaatataagggaaatctcatttgctccgttctgactcatttaca

SEQ ID NO: 835629 - DNA, 633 bp, Homo sapiens
cattttacttcagtttgctatgaaaatttcagaaacctatttctgaagatataattacctaaaatcgcatcatccaagaagcctgttcagactggaatgcagagctgcaaaacattccaagcagtcggatttttagaggatgaagcttccaggtccaaacagagtagcttcttagtacctttgggcctttcacactttttagtcttgcagctacagtgaagaagagcagcatcattaattagctgtgtaaccctgccaccccccaccctgcattccccgcccaggaaccctcataaggcctcagggtcctcaactgtaagataggaagggtgtctgacctctaaggtttctctcaactccaaaattctgtgattctgtataggtgctttgcgcttgattttaagtttctacacaaatattactctaaaaaaagaaagtcaatgtaaaaacatttgggaataaaagaagaaattccagtattccaccaatttaacaaagtaatttttttttgcattgtatcttctgtgtcttaatcctcatgggtgccttgtaaaartagttgcaattgtagtttacacataattttgtctttcacattttatttagttttatatcacaaatattcatatcttt

SEQ ID NO: 835630 - DNA, 566 bp, Homo sapiens
gcattttgtattttttgtttgttaaagttgacaatcctagctggttgagaactctgggatgccctccagggagaagaactgaggaccaggtggcagcagcatgcagacaggaaggtrgtgggtgacacctgggcaaaaggtagggagcgtccccccaccctcctcctgggaggcagcgtatggccgtgcagagcaggactccagagtcagattgcttgggtttgaatctcagctctgccacttggtagttattttgggcaacatacttaaccttctcctcagtttcctcatctgtaaaatggggataacctactttgtgtggttatgaaaattaaataaattaatatttgtatagcacttagaacagtccttgagacatagtaagcattctataagcatttcataaatataaagcaaaagaaattagccaagccaacccacagataaggggagtgagtctacgagatttaataatcataaaacaagaatgaacatttatggaacacttactatgtgacaagatactgtgcaacatgtttgttctatatcagctcatttaatcctta

SEQ ID NO: 835631 - DNA, 583 bp, Homo sapiens
ttgttctaaggcagggatggcaaatttttctgtaaagggccagatagtaaatattttagctctgtgggtcctgcaaatatgaaaacaaatgagcttggctgtgttccagtaaaactttatttacaaaacatgggcaggccaaatttggctggcaggctgtagtttgccaactccttctctagggtttacaatacacatcttgaagttttcacggtatacctttaaaaaatattttaccactttatattttaagaactatgctacagtatacttccattttcttcctctcctactttgtgctgttgttgtcatattgccataattttacttctacacgttataaactctacaataaataccctgctatttttacttaagcaatgatctcttttaaaagatttttttaacgagaaaaatataactattttttatttatgtactgattcaccatttctggtgctgctcatttatctgtctagatccaagtttccatcygatgtaattttcttctgcctcagttgggattcggaatggctgcaattgctaggggcaggtcaggtatccgtctttttccacatgcccc

SEQ ID NO: 835632 - DNA, 583 bp, Homo sapiens
ttgttctaaggcagggatggcaaatttttctgtaaagggccagatagtaaatattttagctctgtgggtcctgcaaatatgaaaacaaatgagcttggctgtgttccagtaaaactttatttacaaaacatgggcaggccaaatttggctggcaggctgtagtttgccaactccttctctagggtttacaatacacatcttgaagttttcacggtatacctttaaaaaatattttaccactttatattttaagaactatgctacagtatacttccattttcttcctctcctactttgtgctgttgttgtcatattgccataattttacttctacacgttataaactctacaataaataccctgctatttttacttaagcaatgatctcttttaaaagatttttttaacgagaaaaatataactattttttatttatgtactgattcaccatttctggtgctgctcatttatctgtctagatccaagtttccatccgatgtaattttcttctgcctcagttgggattsggaatggctgcaattgctaggggcaggtcaggtatccgtctttttccacatgcccc

SEQ ID NO: 835633 - DNA, 592 bp, Homo sapiens
gggaaaaaactataataaaattcatatgcaaccaaaaagtcgcccaaatagccaaagcagtcctaagtaaagagaacaaagccagtggcttgatgttacgcaagttcaaactatactataaagctacaataaccaaaacagcatggtagtggtacaaaaaaagacacatagaccaatggaacagattagaaaacacagaaattaaaaaaaaaaaatgcaaacctacagccatctgatctttcatcaaaaataagcaacagggaaagaactccctatttaataaatgctgctgggatagctggctagctttatatgcagaagaatgaaacttgtcccctacctttcaccatgtacaaaaattaattcagaatggattaaagatttaaatgtaagacctcaaactataagaatcctagaagaaaacctgggaaacaccattctgggtatcagctgtgggaagaaatttatgactaaattctcaaaagcarttgcaacaaaaatgaaaattgacaagtgggacttaatcaaactaaagagcttctatacaacaaaagtaactaccaacagagtaaacagacaacctacagaatgg

SEQ ID NO: 835634 - DNA, 458 bp, Homo sapiens
acatgtgtgcatgttgctctctcatggaccttctccctcttcctaaatcttaggcttcttgtggtactgtgatctgcctgacacttgttcattatggagtacctaatggcaaagtggccacatgtggagattgctgagttcagtgcttcccaaaccaagtggtagtagtttgtctttatatttagaggcattcttctaatttaaataatgtatgaatgtctttaaaagaaaaaaatccatacccacaatgttgacttatacagtttttattttaatgatactttttttgcttttatctatttttttgagatgaggtcttgctgtgttgccctgggtggtgttgaactcctggcttcaagtgatcctccaacctcagcctcctgagwagctgagattacaggcatgagccaccacacctggctttaatgctactttgtttataaagaaaaaagtcagat

SEQ ID NO: 835635 - DNA, 506 bp, Homo sapiens
gaagagagccttctgcttctgacgttggcaaagagcctgaggactggcagtaacaagtcaccccctcttacccgaggaagtgaactgcagggatgttagctgatcaggacatttttttttctcatgaaagaataaagactatgctaaagaaaaaatagtgctggactgagactccaaagctctgcacagtggagtatgggagagatcgtttgggcatagaaattttaaagtcataagtttgtaaccctgtgccttttccatttacctcatattatggtaaaacatgtgactttgagtggcaccacttatttttaagcctccaagtgggattgttttgcaaaatgttatctgaaatagctgaatatattgatttgatgaatacagctatttaataatgttcttatttattggaaattatcmgctcaaaatagaaatttgttttggaaagacattggactatgcagtcaattgttcgtttctctactttaggaatggctaataataga

SEQ ID NO: 835636 - DNA, 625 bp, Homo sapiens
aaggaacgagctgggctttggcagctagggagaccgggggtagggtccaggcgacttcaccttccagctctgtgaccttggtcaagtcacgtcgtctcctggagcctccagcagtgaccgctgctggagtctcctgtgccccacccccattccctaatcgggttaaaataaacagagggctgccttgaaggagaaaggaaatgacagccgcgtgcggtgtgcctggggggagtgatcggaaaaagagagggtcctagtctgggtcgggaggggaatgagcagggtgagggcagggtcgcaaactcaaacgcctacggggccggtcgataatataaattggcgctgcaggctaggcgatgtaagggatggtcttgcttccacaaagagatatgagctctcctatatttcttgagacacgaggccctctctcggtctgtcttttgtttcccacttttgatagagaagggttatgaaaaatgttttgctttcctcttaagtctactataaaaaacaccagctaaagctccagaggcaaccatacagacgctgggctccatcgccagggaggcaaagggcagtgctggggacaggcacaaggatccsatctcaaggggcagctgccttt

SEQ ID NO: 835637 - DNA, 609 bp, Homo sapiens
cccaagcacgtccgcccctgctgagatgcgctccagcctctcagagcagcccacaggccgactggcttcaaggtcggcatgacctccttctgggccattcaccacccagcagccccagctccctccgggcctcggcgccaggactgtggctgctctccctgctgtcctcagcctctcccaccaccggctgtggaccaggtcctgggcagcagcttagattcaccagcaggtcgaaaccaggcctggcccctctctagagcccgcccacttgtgggaggcagatactggtgagatcatccaagtggtaagtccaaggttaccgcccaaagtcagagttcagtcagacaagggctggtggcatgagcacataactggggggcccgatctggggcatccaggagggcttcctggaggagatgtcaccaagctgtataagatgcctcaatagcccaggggtctccaaggatgctcacctgtcccccatcatggacaagaaaaccattcattaaactctttgctgtcttgtccctgctggtctgggtcccttttctctttccccctccctactcagctycccccacccaccttaatcccattcctggctccacc

SEQ ID NO: 835638 - DNA, 621 bp, Homo sapiens
gagaaatgaaaattgcctaccttatgttttcccttcattctgcatgtgtctacatcggcctgtctagatttccatgtcagtttctgcagggatcaagaaagaaatcaattagagcccagaggttgttgcrtttgattttagaagtaagagttcccttggggagactaaaggctgaacatatatttattgaaagctttctgcaccctttctccatgattaattcaccgtaacaacaaagattccagatgaaaacgtccgtttaattttgaactcctatctattcattaaaccacaaatggtcttcttctgtttgagataaagatgaaggagaaaagaaagaagaataaacagagtgtggaaatttttcataaactatccaaattaatttgccaaattatgctcatttggataaaatatatgtccttgccctttcctttcagttgataaatcaatttttataaagaaggcttttttcttaaaatatcagaagtcattttcttaaacataaagaggacattcactctaggtggacaaagatttaattcaggttatactccttcacatagattaatggactgaagggatcttctactcctatggcacaggttttattaactaaaa

SEQ ID NO: 835639 - DNA, 561 bp, Homo sapiens
ctgctaactacacatacagcgtgtcgcatagtgacacgtgctaaggagaaacttaaagctrggtcaaaggagtgagtggggttggggcaacagcaggcccctcgttcaagcagagaccccaaggaagcctggtgggagccatggggaggagggcagaagaatgtgccggggagagggatcaggaagtgcagaagccttgaggagaagcatgcttggcgtgtaaatgaagccacatatgcaggaagcctggcatggaatccaggtgctcagcaaatgccagctctctatttcaagtcccgcagaaagaaccccacgcatgtgtccttttcctgagaacgaaagcacaaggattctacagggcaagactgtgccaagtgttccttcagcctaagattcaggcaacattcgagctccaccaccagtttttgagcccttgccaggcaccagtctctgggatgggcaaccagggatacaagatgatcaagacaagggctctgtcctcagggaaccgcaaagagtcacagagacaggcagtgacaatgcagtcattgcaacgatgag

SEQ ID NO: 835640 - DNA, 483 bp, Homo sapiens
catcgctcaatcccatattgtcatgattacctyaccccctatgacatcaccccctcctacatttatctccagcaagaacacctggaaatgccacaccatacacttagcatgctgtaggaaatgacaccaactcagacctgcgcttaggcaaggccgagttgggcagcacaaaatatccaaagtgctttacaaataaaggagacctggagaggtggaaggtctaactgaactcagcagctgtgtgatgttggacaagttatttcacctctttgagcctctgtgccctcatccgcaaaaggggggcaaggtggggttgggatagtatggcccatgcaagactgtggtaagaattaaatgagccaaagcattttaagtgcttagcacagggcctagcacatagtaggtgggcagtaggtgacaatcatcatcatcattatcacactgtcagagtgctttgtaaaatgtaggaatgggaagtagtaa

SEQ ID NO: 835641 - DNA, 542 bp, Homo sapiens
taaacagcagttaaagagaaaaattaactttttctgcatggtttcctgatacacagtttggatttggtctcattttwatattatttatatataacatatataaataattggagataaaaatgtagatctaagatagaacaaaataaccactttcttaatataatacatgaaagccaaataacactagatgttaggaacttaattttacatgttttgcattagttaataaatataattgaatgtacagaaaaataatcttttagtcagcctcattttcacatacatatgttgatagtggtaaaatcgtcaccatttttcatatactttcacatatactcactaacgtctatacagagcaatcacaatggttgcgctaaaaagaccctaaatatgttggataaactgttcccatgctttagagttatttaagcaaaagatttaaaaaatctactggatgtactaataattattatcattattatatatatattccacataatttttcagacatcattttctttctcactgtatatatatgtgtg

SEQ ID NO: 835642 - DNA, 630 bp, Homo sapiens
tcctttccatgtttgcctggaagatggcctgacagcacctgtctacagtacagtattgaggcacacaggaccttggaaataaaagggaatattacaaatactgcagakacacaaggattagttgtttgtttgtttaaggtaagcagagatgagcaatttgcttttcggattccaaaaaagatttgttctccttctttaaagcagcaattcacgccagagacctaagtgagctgtcattttctctgagtgttttctttttttcataggcaccagtctacatctcctggctgactaacgcatcaaacaaagcaggcttaggtaaattgaaagagagaagctctcctgagtccaacttatgtttttctggcaacaactgagctcactcgattaatacttaaggagagcactgcattgaggcacaagtgctagcccagccagggatgctctcagccatggctgcacacgacaatcatcagaaagccctttcacactgggcagggtgtgctgctttttaagtattccttggcgattttcacctgcagtccaggttagccattgtataatttgaacagcactgaaactcaggaaaaattaaccttcagtatctaatataatcgggtttattcaaga

SEQ ID NO: 835643 - DNA, 544 bp, Homo sapiens
gtataaatattttttaaaatgatagtttacctcatgttaaaatggckcaaataaattttgagttttctttagtggaagttgaattagcatattaagttaactaagccattggcaacgtttatttacaaagagcatgtactcaatgggggagatattcgctgttttattgttgatgttttagtttgctttgctttgcttttatctataatgaataattcatgaatcccaatccatcttggttgaccattaatgctcctaggcatgatcataaacacacaaaacatgggctcagggatataaaataatttgctgaagccagttggaaagcgcagaatcaggaccgaagcccaggtctctagaccctgttctttctacttgttgatctcttcggaaaaattatcaatcttccaagcatgatttttagtgttttctattttatcaatattttctactgctgtggaagacacactcaatgttttaactaaaagaggtatatctttaataaatcggtcacgtaatttctttcacaaaatcacttttttgc

SEQ ID NO: 835644 - DNA, 544 bp, Homo sapiens
gtataaatattttttaaaatgatagtttacctcatgttaaaatggcgcaaataaattttgagttttctttagtggaagttgaattagcatattaagttaactaagccattggcaacgtttatttacaaagarcatgtactcaatgggggagatattcgctgttttattgttgatgttttagtttgctttgctttgcttttatctataatgaataattcatgaatcccaatccatcttggttgaccattaatgctcctaggcatgatcataaacacacaaaacatgggctcagggatataaaataatttgctgaagccagttggaaagcgcagaatcaggaccgaagcccaggtctctagaccctgttctttctacttgttgatctcttcggaaaaattatcaatcttccaagcatgatttttagtgttttctattttatcaatattttctactgctgtggaagacacactcaatgttttaactaaaagaggtatatctttaataaatcggtcacgtaatttctttcacaaaatcacttttttgc

SEQ ID NO: 835645 - DNA, 609 bp, Homo sapiens
tggtataaatattttttaaaatgatagtttacctcatgttaaaatggcgcaaataaattttgagttttctttagtggaagttgaattagcatattaagttaactaagccattggcaacgtttatttacaaagagcatgtactcaatgggggagatattcgctgttttattgttgatgttttagtttgctttgctttgcttttatctataatgaataattcatgaatcccaatccatcttggttgaccattaatgctcctaggcatgatcataaacacacaaaacatgggctcagggatataaaataatttgctgaagccagttggaaagcgcagaatcaggaccgaagcccaggtctctagaccctgttctttctacttgttgatctcttcggaaaaattatcaatcttccaagcatgatttttagtgttttctattttatcaatattttctactgctgtggaagacacactcaatgttttaactaaaagaggtatatctttaataaatcggtcacgtaatttctttcacaaaatcacttttttgcacaaaaacttttcatttaccaactcacttcctaayggaagggatccccctgatgcacgtgcgt

SEQ ID NO: 835646 - DNA, 544 bp, Homo sapiens
gtcaaatccaagagcattttcacgagaccgtaacctgcaggcccaagccacaagtttagtaaggctgtagtttacagctctcgcagacatgatgtcacyagccttgtgtgagtgcatggtggcacagacagaggtcacacactgtcacacactgatacacatgtacaggatgacagaatcacagtgtctcacttacacatgcaggcacacacgtgcacaggcttgcacaccatacacactgtcacacactgatacacatgtacaggatgacaaaatcacacagtgtctcacatatgcagacacacacatgcataggcttacacaccttatacactgccacacttctgtgtgcacggacacgcactgccacactcacacaccaagaaacactcaagcatactctagtgaaccagtcacctggggagatggggcatcctctgcttcaagtagatttaaatgctgttagtgaaagtgagtggaaaacttgaagtctgaggaactgagcaagtgtggctcttggagtctgcatccttagattcagctg

SEQ ID NO: 835647 - DNA, 544 bp, Homo sapiens
gtcaaatccaagagcattttcacgagaccgtaacctgcaggcccaagccacaagtttagtaaggctgtagtttacagctctcgcagacatgatgtcaccagccttgtgtgagtgcatggtggcacagacagaggtcacacactgtcacacactgatacacatgtacaggatgacagaatcacagtgtctcacttacacatgcaggcacacacgtgcacaggcttgcacaccatacacactgtcacacactgatacacatgtacaggatgacaaaatcacacagtgtctcacatatgcagacacacacatgcataggcttacacaccttatacactgccacacttctgtgtgcacggacacgcactgccacactcacacaccaagaaacactcaagcatactctagtgaaccagtcacctggggagatggggcatcctctgcttcaagtagatttaaatgctgttagtgaaagtragtggaaaacttgaagtctgaggaactgagcaagtgtggctcttggagtctgcatccttagattcagctg

SEQ ID NO: 835648 - DNA, 527 bp, Homo sapiens
cttactctgtgtgttatgtttgccacactctcgcgtgcacatggaatgctgactgcacagagtactaagtgtgttctgtgtgccacgcgcttgtgtgcatgcacaatgatgactgcacagtttactgtgttccatgtgccgtgctcttgcttgtacatggaatgctgaccgcacagcttactaagtgcctactgtgtgccatgctctcatgcgtatgcacaatgctgactgcacagcttactatgtgtgttctgtgtgccacgctcttgtgtgcatgtggaattctgatggcacagcttactgtgtgtgttctgtgtgccacagttttgtgtgcacatggaatgctgactgcacagcttactaagtgtgtaccgtgtgccatgctctcgtgtacatggacaatgctgactgcataacttactaactgtgctctgtgtgctacactcttgtgtgcmtgtggaatgctgaatttatctcagctgatgacttactttcattgttcatttaacgctagaaatgttaggact

SEQ ID NO: 835649 - DNA, 591 bp, Homo sapiens
aagcaaaatcccacaccaaaagagaggagaaaggaaggcagctatgcaggcagttagggcagatccttggtagaattctttccaacaaagagcagcctgaaaaatcaagcagcaagcacagataggaagcaaggtctaccataaaaacacctttgttccttcagtatgatattggctgtgagtttgtcataaatagcttttactattttgagatacattccatcaatacctagtttattcagagtttttagcatgaagaggttttgaattttattgaaggctttttctgcatctattgagataatcatgaggtttttgtcattggttctgtttatgtgatggattacatttactgacttgtgtatgttgaaccagccttgcatcctaaggacgaagctgacttgatcgtggtggctggatttggtttgtcagtatttaattgaggattttcacatcgatgttaatcagggatattggcctgaattttmttttttgttgttgttgtgtctctgccaggttttggtatcaggatgatgctggcctcataaaatgagttagggaggatcccctctttttttgttgtttggaata

SEQ ID NO: 835650 - DNA, 526 bp, Homo sapiens
ctagacttgtggattcactagatgatgaacaataaagatggggtgaaacattgttatgaggttgaaaactaaagaaatttttagtcatgttacccaaggtgaagaaaatgctaaactgttcttggctagtgttttattataaaaaaaataagcactgcatataattatttgtaagaaatatatattcattaagatatctttaaacagaaagacctgttaaaaaagtattaatggttgaattgattggtaaatagtctaaatgttgtgaccagaggttaatagaaacctagtagtgcatttctcctcagagcaatgacagtatttgatgaacaatcttcatcattcatggaaactttgtataacataactactgtgaatgttgagaatttcctatagcttgcatttgtcyttaaagccccaaagtgagacatataatttcttcttacattttattgtccaaagcaagtcacatgtccattataggcttcaatgcactaaggaagaataattttactaccggtaaggg

SEQ ID NO: 835651 - DNA, 595 bp, Homo sapiens
tacaataaaaataattagatgataactaatataacacctaatgtacaaagaaaaattagcattataaaatcttgaagcagaggttaaggatactgaaacaaatggggttattttgtttgtatcttttagtttaggttaccatgctctaaatctttttgtacttactatagtgctatctgcactcagtaaatacttatgggaagaagggaaaggaaggaggaaggaaaggaaggaaacaaggaaggaaggaagggagaaaaaaacagaaggaaggaaagaaggattggagaaataaataatcttcatgccaatatagtagagagaaagaacacaattgaatattgagtaagtgttatcaaatttatgtgcatgcaagatgacataaaagtgactacaaaatctggacagaattgtacacatatttgtgcagtaaagtagtagagaaataaaacttcccttatctccctgaaagacaagaggacctactttgtgattatctctggtatcgtgaaagacttttaagctaatctcagagaarcgtgtttatactttcaatggtcaggaggtcctggatcttatattgaaaatgaaaagg

SEQ ID NO: 835652 - DNA, 638 bp, Homo sapiens
gccgtcatcaaattcctgcctgaggatacatatctctgggctgattaaataaacacagcttaattcaattaaagtggatcagaacctgcataaactctgctggcagccagaggagttgctcacgaatccttcatttttataaatgagtgatggttcgcctgctcaggggcttgcccagaaaatggaaggggcttctgcatagacacagctccctctggccaggggaaagcattgattgggtttgttttttttgttgttgttttttttttttttgagacagagtctcactctgtcacccaggctggagggcagtggtgtgatctccactcactgcaagctccgccccccggggttcatgccattctcctgcctcagcctcccgagtagctgggactacaggtgcccgtcaccacgcccggctaatttttttgtttttttagtagagacggggtttcacagtgttcgccaggttggtctcaatctcctgaccttgtgatctgcccgcctcggcctcccaaagtgctgggattacaggcatgagccaccgygcccagcctgatggggtatttttattgaggggaccaggtggatttggaagctttttgtgctttctgggggagtaggcatcatgtccagtt

SEQ ID NO: 835653 - DNA, 672 bp, Homo sapiens
tgtttgtgtttattgttattaccggttacatacacaaaaactttggaacaatgttaaaagaaaaattggctcacaatttcaccacctctacaaatcaacatgtttttatttcttttactttataacagacacttccatctggatacaggcaaaactcacacacgtgatgtcatgaacaattgaattatgcacgtaattcctactcaaatacacacaggtgtatgatcatttttacagctttatagttgagaaaataagtattgttgttactgtgcagccagagcacaggtctgcacaagttcagacttgaccctgcctcctaccccctcgagcaagctgggatctcagcaagctcttcctctagctctctaccaactgccatgtccagatggcagtcacatacctgaatcaaggagagtcactcaagctttggagcaggggcctcctggccacaattatctttagaaatttaaatgtggcagagaaaagctgtcatgaactgggaagtagctaaagtggactctgccaatcaaagtaaaagaacatctggccttagcccaactgggccctacttccactctcagcawagacttgcagagccttgctgcactcatttgctgtgctgtcacttgggccaattagtaataatgagctccctccagcaagggtgat

SEQ ID NO: 835654 - DNA, 544 bp, Homo sapiens
  misc_feature 447: n = A,T,C or G
agcctggatgcatgtctgttgaggctggcccatgggatatttctctggcctgggatgagggtgcacagctgctcagtcaaycttggggtatgcctgtgaggcacagcccatggggctgtttctgtggcctgggacacaggtgcacggctgctcagctggcctgggaacatgtcttctgggcatggactgtatggttgtttctcaagcctgagatgtgggcatgaggcctttgggcaggctagggatgtgtccaaggcgggcaggtgatccactgggctgtttctcaggccctgagcacaagcatgaaactacaccactggctttgggggcatatcagcttcttggtaactcaggtacttctcccactcaggggaggacacacagtagttcggctagctcaagggtgggtttgtcctgggtgggactggcagactgttcctctagctngaagtgtatgtgtatgggtttgttccctggtgtgtaggaccagagtctcagctgatgatcggctcaggctggggttgtggcgttcagccacccatgt

SEQ ID NO: 835655 - DNA, 618 bp, Homo sapiens
atttatagggtgtaaaattcagaatggattagaaaagcctttctatgttcagcccaacacatcctaaatcaacgtcccctgaatggaccagagcaatctctggctggcctagtggggaggttgtcatggcaactgactggcaagctcagccagtggaatgtgaatgcaaacaatagagtgataagactgtgtacagagcagcatactaaggctgcttctgcccaggtacagtggcacataggtgaaagtgtgaaactgttgctgcattttgtaacttcttaacaatctctggcagctcatttgaaatttaccaagtgccctttcccagatgttggtaaaaacattcctgctgatagataacagaagctatggaaaaatcagcacccagctgataggtgcagaggtatacaaagccctggagggctgttggaataacactactcaaaaattttctgaaggaggttgaagcaggtttaaggtaaatcttatgactcttcagtgccatcttgtgtccttttagatactgacaatttactagaagcccactctcagaccgatcattaggcagcarcagggcagacatggaaaagttagagctggattatattggagcttggt

SEQ ID NO: 835656 - DNA, 621 bp, Homo sapiens
gtcacccattccaggaaaataaaacttctaactccaaatatataggaaacattttagtcattaatttatattcaagtaacatttattgagaacctaatattcaccagtattgtgctaagcactgaaacaaagaaccaagacgcaggattatcaggccccttgccctccaagagccctcaccagtggggaatataaacacataaagcaataatgacgatctgcaataagtcaggttatgctggctgctataacaaaccaacccccatcagatctcagtgacttaatgtaattaatgttgatttctagtgtatgtaacaaaatgatgcaggtgtttctgatcagttggtaggtttttgccaaaaggttatccaaggacctaggttcattgtgtcttgtggcttcaacatcttctgcacttggtttccaaagttacattaagaacacaaccagtatcagggacggaagaaggattattaccacagattckacaaacatcaaaaaacacaaaatgaagtaaaaattttgaatagccttgtagctattaagtaaattaaatctgttatttaagcccttctcacaaacaaaactccaggcccagagggtttcactggtgaattctat

SEQ ID NO: 835657 - DNA, 673 bp, Homo sapiens
ctcattatcctctactgaagccattgctgtttccttcgaaatgcctaccacaatttggaattgtttcatgtatgtctttttcataaaagaatgttaattgtaagaggggccacgccgagtgatcttatatatgcctgtggcctcagcccctggcacattctgggtacgcagcagccactgcaggcccaatccagccacagacatgttctacaagtgtgaggtaggaaaagcaaacattttcctgtatattcccaccactctcaatacttcacttctgacaccaatgtgtgggattttttcccacactgaccaattctccgacagacaccagcttcaattcaattcaattctgataccatccggagttactgcagatcctataggttaaaggctcagtcctacaagactgtgccctacttcagacaccagtcacaagcaggaagtctctggggaaccacaacttttttcctgtttggctacaaatcaaaagttcccatgatccctttttcaggtttgataatttgctagagcagatcatagaacccaggaaaactgtttacttactattgctgatttcttccaaakgatgttttaaaggatataaatcaacagccggataaaggaacacatagagtgaggtctggaaggatcccgagtgcaggagcttctaccc

SEQ ID NO: 835658 - DNA, 595 bp, Homo sapiens
gttcaatagtaaacagccactccatcaacaaggaattagagcagctttaggaggaggcagatccacagacaagggtatatccagaaagcccaggcttacagcggggagscccctaggccaggtctgagaatctgatatgggactggtccctgcagatgggtcaggagagcagcaccagaaaaaccacatcttttgggctcacagacctcttcataagtcattcccaacctcctgaggagcagcacgctggccagctctgatggagttcacaagttcactccactaacaaagcctgaacctctgagtccagcccacagtcatgtttcactcaggctttcaaggagctggtgttcattgaacatttccacagctgagaaaggtcccaagtcctcagagctgttgttgtttgtgtgttaacctctcagggactccaagaagagtaatgttacaaagaactccagctccagaggcaggagaaacctgagttctaatcccaactttgccacttattagctgtttgaccttgaacaagtcgcctcaccttttaaaatatcaattcctcatctgcaaaacagcgcctaccttgcggccattg

SEQ ID NO: 835659 - DNA, 595 bp, Homo sapiens
gttcaatagtaaacagccactccatcaacaaggaattagagcagctttaggaggaggcagatccacagacaagggtatatccagaaagcccaggcttacagcggggaggcccctaggccaggtctgagaatctgatatgggactggtccctgcagatgggtcaggagagcagcaccagaaaaaccacatcttttgggctcacagacctcttcataagtcattcccaacctcctgaggagcagcacgctggccagctctgatggagttcacaagttcactccactaacaaagcctgaacctctgagtccagcccacagtcatgtttcactcaggctttcaaggagctggtgttcattgaacatttccacagctgagaaaggtcccaagtcctcagagctgttgttgtttgtgtgttaacctctcagggactccaagaagagtaatgttacaaagaactccagctccagaggcaggagaaacctgagttctaatcccaactttgccacttattagctgtttgaccttgaacaagtygcctcaccttttaaaatatcaattcctcatctgcaaaacagcgcctaccttgcggccattg

SEQ ID NO: 835660 - DNA, 595 bp, Homo sapiens
gttcaatagtaaacagccactccatcaacaaggaattagagcagctttaggaggaggcagatccacagacaagggtatatccagaaagcccaggcttacagcggggaggcccctaggccaggtctgagaatctgatatgggactggtccctgcagatgggtcaggagagcagcaccagaaaaaccacatcttttgggctcacagacctcttcataagtcattcccaacctcctgaggagcagcacgctggccagctctgatggagttcacaagttcactccactaacaaagcctgaacctctgagtccagcccacagtcatgtttcactcaggctttcaaggagctggtgttcattgaacatttccacagctgagaaaggtcccaagtcctcagagctgttgttgtttgtgtgttaacctctcagggactccaagaagagtaatgttacaaagaactccagctccagaggcaggagaaacctgagttctaatcccaactttgccacttattagctgtttgaccttgaacaagtcgcctcaccttttaaaatatcaattcctcatctgcaaaacagygcctaccttgcggccattg

SEQ ID NO: 835661 - DNA, 396 bp, Homo sapiens
ctacaggccgcatgcaagtctgaaatccaatagggcagtcattaaaccttaaagttcccaaatgatctcctttgactccatgtctcacatccaggtcacactgatgcaagaggtgggctaccatgrccttgggcagctccaaccctgtggctttgcagtgtacagccccccaccccagctgttttcatggctggcttgagtgtctgtggcttttccaggcacatggtgcaagctgtcagtgaatctaccattctgggatctggagaatggtagtcctcttctcacagctccaccaggcagtgcccctgtggggaccctgtgtggggactctgatcccacatttcccttttgcactgccatagcagaggttctccatgagggctccacacttgcagc

SEQ ID NO: 835662 - DNA, 572 bp, Homo sapiens
tggattgtttgtttatgtgtttgtgtcccagagtgctctttttaacaagtagtaatttttgytcaggtattttcagggactcttaaaaacaggaaattttgggatcatttcctctgactcactgctcactaaaataatagctgttactctccacagatgctgcagttggagaagaaacttgaacgtgaacttgaggatgatgcacgagttattgcttgccggttccctttcccacattggactccagaccacgtcacgggggaggggatagacacagtgtgggcatatgatgcaagcacttttagaggccgtgaaaagaggccctgtacatcgatgcatttccagctgcccattcaagcataaacttgactgggagtgtttttctgaaatattgtagtcttccctgatcttgtagagacttacagctgtgtccttagcaaaggagcataattgtctttggtttggaatgagaaattactattactttccttaactgttggagaaaacaaacgaagaaaaacaggtagatttaaaatctgcttttgatgctattttcttaaaaattgtactta

SEQ ID NO: 835663 - DNA, 452 bp, Homo sapiens; identical to SEQ ID NO: 821745

SEQ ID NO: 835664 - DNA, 623 bp, Homo sapiens
ggaatcaacgctactggcaccttgatttgagactcctagcctccagaactgtgagrcaatacatacatttctcttgtttaagccattcaatttgttgtacttttgttatggaagccctacagttactttacttttccgtacattaatatttttgaatgatcactctttatttgtcttcaccctcatgaaagcaaaatgtacaaatagaagtctagcatttatgaaagcacttggcatgaagcaagataacaaaaatatctacataatataattttttaacatatttctttttacttatttatttacttacttattatactttaagttctgggatacatgtgcagaacgtgcaggtttgttacataggtatacacgtgccatggtggtttgctgcacctatcaacacatcacctacgttaggtatttctcctaatgttatccttcctccagccccctcaccctctaacaggccccagtgtgtgatgttccactccccatgtccctgtgttctctttgttcagctcccacctatgagtgagaacatgtggtgtttggttttctgttcttgtgttagtttgctgagaatgatggtttctagcttcatcgatgtccctgaaaaggac

SEQ ID NO: 835665 - DNA, 631 bp, Homo sapiens
  misc_feature 14: n = A,T,C or G
tattgcatttccanactgcagaatatttgcactgagtaaaatagatgccatttttttactaagtaattaaaacattgtcagaggatatgcttttaaaaattatcacaatagctgtaaagtcarttgtgttaatattggcaatctgtcccttctatttagaattttgtgccttagtctctgataattgcatcatttacaaatcccctctttacataaacatggcctttcacctaaccctctaaattaatcagccctcttttgattacagtgacagaaactcaaatcaaaatagcataagcaatttaaataataacaacaataaatgatgaaagtttattagttatcttagctggaaggatttttaaagatgtagaaataaaatgagtaactgtagagtcagtgcctcagagactcacctcgtcatgaggtaggactttttccctccatcactttcttacctcttcttagctacatctacatgaaggcattctccacttggaaaaaaagacggaggcacaacctcccatagaaaagagtttctttctcccattatcaatatatctgcttggattctgcttggctatttgcttggattaaatgtttactttttagatacattactgctaataga

SEQ ID NO: 835666 - DNA, 606 bp, Homo sapiens
aataaactcatgaaaagatggtcaacatctttttatgtgaatcattagagaaatgtaaattaaaaccacaatgagaaatccctgcctacctattacaatggctaaagtgtaaaaacctgactatacgaagygctggcttggttatggagtaactgatactctcatacactgctgctagaaatgtaaaatagcacattttggcagtttcttaaataattaaatatattcttctcacacaatccagccactccacgcctaggtatatactcaaaactaaaatgcttatacaaacacttgtccatgaatgttcataagagctttatttgtgatacacagaaactggaaacaaaataagtgcccatcaacttgggaatatataaataaactgtgctatatccatacaataaaatattattccacaacaaaaagaaataaatgatttttcccaccacaacacagaagaatcacagaataattatgctgagtaaaagaaatcagacaaaagtcatatatgtaacagtatgatttcatttatataaaattctacacgatgcaaagtaatgtacagtgactaatcagggattgcctggggacaggatgggggct

SEQ ID NO: 835667 - DNA, 620 bp, Homo sapiens
atatattgaggtgatcacggcttttgtcttttatttaaataatatattacatcaattaattttcagatgatgaaccaatctggcattcctgagataaatctcaactgatamtgatgtataattttttttgttttgagacaagagttttgctcttgttgcccgggctggagtgcaatggcatgatctcggctcaccaaaacctccgcttcccaggttcaagtgattctcctgcttcagcctcccaagtactagcttggattacaggcatgcgccaccatgcctggctaattttgtatttttagtagagatgaggtttctccatgttggtcaggctggtctcaaactcccaacctcaggtgatctgcccaccttggcctcccaaagtgctgggattacaggcgtgagccaccgcacccggctgatgtatacttctttttatatggggttaatttgataattgacaatgatgtatagtcttttctatatggggctggatttttttcttcaattttcagagactttatattgttggtattttttaaaaaatgtatttcatgagttaaattcttattttacttgggagagagtctaccaaggtgcttatatcaccattctgaaag

SEQ ID NO: 835668 - DNA, 551 bp, Homo sapiens
gttggcccaaagtcgtatacataggccacctttattcatcacacagttttccttaatcctcatctctgccagccttgaccacagaacttacttttctttttctttttctttttgcacatacattttaaagtgagtgatagcccttcatttttttttttttaatatacagtgggacctcgtttagggagggatggaatttagggtctcactttagtgcaaaaggtaataatctcagagacaaggctgttcttgagagggagcgggagtgctttgggaaagtaccacattggatcccagtataacatttctaaataagtccatgatagctatgctatttttctttagcagttttgttggaactgttgctgtttctttagttaagcactcagaatacatttatgtatcttttaacattggtatcatctttagcacacatgagatcctggaaacatatgagaccttggcatacaytgactgagtaaacagcagattcaccttttccatctcacagtcacttagggcttacactttttcaggggaattgtggactt

SEQ ID NO: 835669 - DNA, 514 bp, Homo sapiens
ggcgtgatcatagctaacgcagccttgatctcttaggttcaagcagatcctctggcttaagcctctcaaagtgctgggattataggaatgggccgccatgcttggacagcaaaacttttaaaattttcattttaaattatgttttcttaagtgtttttacttaatccttagtgtgaaagtctcctattactgaaagactaattcattcctgtctttgtagttttgactttcattaatctaatggatttgaggatccacatctaaaactttaagaattaatgtacattatgtaatgtcatttgccttgcaaacagttgtttttttttttccccccctgaggtcagactaatttattgacagttttgttgtgcttgacaagtaacaggtgctaacatytttttcagtcttgtcacagggactagagggtctaggtcaccatgttcattaatgtagtccaggaaattttatttctcctgtggctaatcatttacatttgacatgaatctgtcatctg

SEQ ID NO: 835670 - DNA, 576 bp, Homo sapiens
atgtaaatgacgagttaatgggtgcagcacaccaacatggctcatgtatacatatgtaacaaacctgcatgttgtgcacatgtaccctagaacttaaagtataataaamaaaattacaaaaaaaagaatatagtttgggattatctagtgtaactagcaattcaaatatatgattgtattttctataatatttacatcaaagccttaattttaaacttatttgcacatatttctgtaacataactaatgcactgaatattcccattcatattgtccttatgtggtattatggttaacaacttaagtccttcatatttcctactggagtatatatagtctgtgaacgatctatgcatctggaatttttgtaattctcaatgtgatttgcttatacctagtagaataagttgaatgtggtataaatttataaactaattcattcattaattaaaaataataaagaagatacttggtaacttctcaaaaaaaaatttagaagattatgcttttgttgataatctcttctcagcctgcagcctttttatcaaatacttgctatagcagttgtgttcttag

SEQ ID NO: 835671 - DNA, 597 bp, Homo sapiens
gctttccattatgattgtgggtccagtcatgtgacttgccttgttcaatgagatgtcaatgaaaatgacagtaacaaaggcttgaaaagttcttacatagtgtgatttgtcctctttcttgctgtttgggattcctatgaatactattcactgaagaagcccaggctggcttgttgaaaaatgaaaaacaaatggcccaggtactttcattaggaacagggctgccctgctgagaggcagcgggccccagaaaaatgagtgaacccacttgagtctgagagcaatcaaagtaccaacaaagaattaaaagatacacaaatgttatattatgtatcacaagttttactgatacaaaaattggttctaggagtggggtgctactattaaaaatatcctaaaacatttggcattggattcaggatcaggtttggttggcaatacaaaagagtctaggaaattgtcagcaaagacttgatactatcccaaacaaaacaataaaaaaaaaaattgaactacgaaagcagagagtaaactgstaaagtagatttgctaaatggtgacccagattatatagttgtggaaaaaatggtaaaaact

SEQ ID NO: 835672 - DNA, 608 bp, Homo sapiens
tataaaaagctgcttaatattgaggtgagacggccatgggcacacttaggctatactataactctgtataaacaagcatccatgtttcaatcttttctttgaggaaataatgtacctttttatgccaaaggacatttcctccacctgtgctttatacctctattctttcctctgcagggattctgctccatctgtaattcatagtctattgtatttttaatgtttccctttttctgcctgcttccatcaaaatattaaaatagttgatgttcatccatcatcagaataatcctccttccagcctatgttactatggaatcagctatcattgtctttcattgacatctttctctttcattcacaataactcttgtagaaagttaaatatgtcattgcttttgctattattcaatattccattcaatattttatgtgcttaactttgtttactactcctgtccagttcccacactgagaaaagtttgaggatagagatagagaggtagagatacagatttgagaatcatcaaaatttaaaygatttttgcagctatgtgagggaaagaccatctcccagggaaaatgtatggcatgaaaagtccaaaggg

SEQ ID NO: 835673 - DNA, 553 bp, Homo sapiens
tatctgacaataggctcttggggygtagacctctgaatcatctttgtgtccctataagatacctttttactgggtgctaactaatgtccattgacttaaataatataataaaagatagactatcttcttttgctcttgttaatgctgcttccaatgcactgtggccattcctggcattgagggtagggttggtttgtgggcacaaagcccaacctttaattcctagtgtagaggatcaggcctaacatttattaagcaattgtattgtcaggcattgttccagatgcttaacatgtaatatcaccatgacaaatctatggggtaagaattatcattaatcctattttatgcttgagaaaactgaagttcagaatagttaagtgaactttttcaaggacacacagctagaaagcaagcaaggattttgaatccaagcatctgatccaggatctgtgctcttgacttttcaatggaccacacttacctttcttgtcctctcccctcttcttctatatctctgcagcctcccgtcctgacctgcaaaacttccctg

SEQ ID NO: 835674 - DNA, 703 bp, Homo sapiens
gcagttttaccactacttcgaggacaaagaaaacatttacattctctggaatactgcagtagaagggtaagtgtcaactcctatttgagaacatttgcttaccccgaattaacatggtattcaaagtattttatctgggattttagctgtggcagcacttacactgcaaagttaactttcattgctcatcctgcaaagggaaaccagtgattttgataactgttttgacagattctcttttttccttctcctcttcttagtcaatggctcatattttgaaagcaagaaaggtgttgacagagccagaagttcgatactacctcaggcagatgtgtctggactgaaataccttcatgaacaagaaatcttgcacagagatctcaaactaggtaagtcattgacgccaaaagctgagtttgtgttagagttcttttttctctctctgtttttttttacatattaatgttcttaattgggatctggtgtctgcaatcttgcttttgaatgggcgactttcatataacaattggctgcctggctccaaagtggatgtgtgtgtacttggttagaacgcattttcaaagggattcacatttgtttgtttatcatctagggaacttttttattaatgaagccatggaactaaaagttggggacttcggtctggcagccagrctagaacccttggaacacagaaggaggt

SEQ ID NO: 835675 - DNA, 705 bp, Homo sapiens
gcagttttaccactacttcgaggacaaagaaaacatttacattctcttggaatactgcagtagaagggtaagtgtcaactcctatttgagaacatttgcttaccccgaattaacatggtattcaaagtattttatctgggattttagctgtggcagcacttacactgcaaagttaactttcattgctcatcctgcaaagggaaaccagtgattttgataactgttttgacagattctcttttttccttctcctcttcttagtcaatggctcatattttgaaagcaagaaaggtgttgacagagccagaagttcgatactacctcaggcagattgtgtctggactgaaataccttcatgaacagaaatcttgcacagagatctcaaactaggtaagtcattgacgccaaagctgagttttgtgttagagttcttttttctctctctgtttttttttacatattaatgttcttaattgggatctggtgtctgcaatcttgcttttgaatgggcgactttcatataacattggctgcctggctccaaagtggatgtgtgtgtacttggttagaacgcattttcaaagggattcacattttgttttgtttatcatctagggaacttttttattaatgaagccatggaactaaaagttggggacttcggtctggcagccagrctagaacccttggaacacagaaggaggt

SEQ ID NO: 835676 - DNA, 499 bp, Homo sapiens
aatgtttcagaggtccggtaataaaatctataaatcatagcaatgttaatttaaagaaatacttattaaatgcccactatggactagacagagcaccctgtgcctctaaattgattatgaaagcagtcaatgaagtcttttcttggcttaaaatgtataaaatgccacgacgtccctggctttagttggttaacaacactttgcatgtgggctaaaacaacgtgtgtgcatttttaaaaattaccaaaactcatttggtcagatctcaattgaattttcagatgccaaaagtcaaatgtttccaaatagaaattcagtatagattttaagattttgtttaagattttgtctcccatcaagtcatgtcaagagaaccaagtttaartagtggaatagttcctaacacgatctcaatattttgtctttccagaacgatatgtggtaccccaaattatctctctcctgaagtcctcaacaaacaaggacatggctgtgaatc

SEQ ID NO: 835677 - DNA, 542 bp, Homo sapiens
aacctgtctcaggctcaatatctacctttctgaaaaacattttttatgaaaatggctttgtgtccatctcgtatcctgttattttcagctcattgagacatggcattgaatatatctcttacatggcrttgcatatatctctaaaaagagaaacattttttctccacacctaattttcttcacctctatcaattcttccttggctatacctttacttaactcctatgtctgcaaggcttttgaagttcctttgcaaagatccattttaaactttctgtatattgtaatttaagttttctgtttctttctcccatctgctagtcaaattttcttctcagcagaaaacctcaccattgcttcatttccacacatggaaggcattcaagcatagcaactgggagtcacagttgtactgaaatgagaaggaaatgtgcttcccaacacagcgtcagcatctccaaccagaggccatttgtctttttttttttatttttttttttggcttttcagcaaatgactgctaaaggaaagtctctcaaaac

SEQ ID NO: 835678 - DNA, 590 bp, Homo sapiens
ttatcatctctaaaggtgtatctgcagatggtytgagtccaggcttttaacagccatgattccccctatgaattactgagaatggctaggaaatttctgagacttatttggtaaataacttccacaacattctgtacattccggtaagaaaatatacaagtctaaaagaccagtctcaagggcaaagaaaaggggaaaactaggacctgaaatagaaaacagctttgaatgtttttatcaagcaggatcactcattattcagagaaatcactttctctgtgccaagactgaactgggcatttggatccataggagctaggtaatgtctttgcaacatttggagcctgtaatgtgtcactgacatgagaatattgaacttgggcaaattagaccctatttaaaatcaggttgtttctattcactatgcaacctgcaggatcagcaatagaagtagcaaccccagtgctttcacataaactatgtcacatcacagagttgtgaggtagaaatgctgatctgcactagctgtggccacagtaccattgaccacttgcttaatcatgactgacactgagtgtatttttctagct

SEQ ID NO: 835679 - DNA, 427 bp, Homo sapiens
gagctttaacctctttgagcctcaattttcccacctgtaaaatccagttgacataccagcgcgaggctataacagggactaactgagatgaactaggcaaactgcttagcayagcatggcagtcagctcaggatgccgtcaccaaatcccacagacttggtgcttaaataccagaaatttgctttctcacagttctggaagccacaagtccaagattaaggtttggtttcttctgacgcctctctccttggcttgcagatggctgccttctcactggatcttcacatggtcacccctcggtctctgtgtgtcagggttctaatctcttcttacaaggacaccgatcatatcggattggagcccacacatatgacctaatttgaccttaactacctctttaatggccctgtctccaaatacattccaa

SEQ ID NO: 835680 - DNA, 601 bp, Homo sapiens
tttccttatctgaattgccctgccctctccctagcagtttgacaggagtgaaagtggratgcccccccatagttgaccaggccaggtaagccctagcttgcctttaggacagttttgagaaggtgaaattcaagcaggaagaccttatctgttctgccaggaggctgaatcatgcagattgcattttcaggttaagcagctagaaggaggaacgggcctggcaaactcaacataacacattcaactccaccccagtttcaccctaatggcatcttttcttggtagtatttgaaaaagagtgactaaagaaatattttcctttctgttttatttattcttatctatttgatttttattctttgatatcataagatagccccgtctaaattttctccaaactatcatttatcgagtggcaccaatgtttgggaaaattcattgccagcaatcaagcatgatgtgctctttttagaaatgttcattgattttcctctaaatcattgccagggtggatacgtacattttacaacatgaataaccagaaatgagagtcaaactcctggaaaattcattgacttggttcaggttaaacagtggatcc

SEQ ID NO: 835681 - DNA, 499 bp, Homo sapiens
caccgatgctgggccctgggctcagaaccgactgtgtggtctcatcaytagctggcaggtgccatcattacaccggtaacatgagaggcttcaagcactaggtctcaaataagtaggcacagaggggcctgcctcccactctaatgagggggaaataacggagatgtggacagggttgggaggtgggtagagtgtaaccagactatttatcacatggcacaactcagaacgctggggaacagagtcaagtgggccactgtgacagtggatgagggcataatctgggtgggctgcctggaggaagcatcagccaagctgagatctggaggaaagggactcggagagggaaggaggaaagggtcaccacgggtccttggcaccaggccgaggaacgagtgcgtcagagtgctcctccgatgaacttcaagtaaacaggcagggctcgggggaatgtctaggcccctaccctgcctgccatctctggctggcaccagcacgg

SEQ ID NO: 835682 - DNA, 539 bp, Homo sapiens
ccataggcagggcgtcccagtgagtgttcagctctcagcagagacgaagcccacagtgggtagctcctctctgcagctggtagtcctgatgtctgcttagctctcaacagagaggagactctggagtgcgtaaggggcaggaggcagagggccctcccagctcccaagagcacagagacttccgggaccacagccatggctgggcagctgcagctgcacccagaagggagaggatctgctcctgctcgctctgatccccaagcacagggatgcctggctccagggctgcggctcggtggccacaacagcagccagggaacaggaggctcccgtcctgccaactcacaaggaggcagggttttcacctattcccagctcccaccagctctgtggagtgcacagccctagctacacgtctcacactgatggcgtcacggcagtggctggtccagatgggctgccgctgccatcaatcacatctctgaagaggwatatctaactgcttcatgctgacagggggcctggttttggggaaaatg

SEQ ID NO: 835683 - DNA, 656 bp, Homo sapiens
ttctaaataattcaataatcctatatgatcttaaaaaatacttttcatatctttcttttggagaaaaaatgaaatttatcctgattcagaaatgaaacaataatagagtataagtagaactyaagaaaattccaaaagagattattctctcttaaataattcagtgtggaaatgaattgggtttagtgtgataatctctttgagagatctctaaaatgataaagtataatttaaagcatctgtggcctacttattaaattattaatgtcaagtgagaaagtgttattgctggtgctgaaccaaaaaatttgtctgtgcgtgcaaaagggttctttttaaaatttttccctaacaagtgtgagcaggactttggtttggttgtgtgctttcttcatatatcacaaataccatttgatatgcaaaatcattgggaaagcatcaattatgcagaggcagttaagtgaagtatactaatatgcaatgattctaaactaccacagggtggtaggagattcactttccacaacatttatctaattagcagaactaactgctttgctatacttctaccacaatcaaatcccttattaaaaactatatcattgttactgctcaataagagtgaataaaatctccaaggcaaaaattataccttt

SEQ ID NO: 835684 - DNA, 603 bp, Homo sapiens
gcacgggttctcttgttccatcagaatacataaatgttctgaaagaagtgtcygccaactttcccattgaatgatcaagtgcaaaacaatccagcaagataattttatgatgattagttttggaagattaataactttctcttttacctctgctctttctaagatgttagaattgacgttctcatttacagacacattaaaaatattttacaatgtattaaataatctgctcaatttaaacattttggaaaacaagaatatcataaagaaaaatatgtaaattagctgaaattgtatctctttgatagatccatgttaaaattcccttgaactattttttttttagtttgaggtataaagatatctcacatatccacacatatacataggtgcatatatatgattatacacatattttggccatgctatataaggagacttttaaattataccttattaatttaaaactaagttgcaacaatttttatttcaactctaattatgctttgctttaaaaaaaaaggcaacagtccaaatgtggggtccaaaatttctattattaattcaggatagattcctagaatcacttggttaaagggaata

SEQ ID NO: 835685 - DNA, 647 bp, Homo sapiens
attaaggcttggtctggagtattggcaggcagtatgtagtggaaaggatatattggggaggaagtaaagggattgcactgaaaaaatgttaattatccattgaatktggggtgagggggagtctgaaaaattaggatttagcatgggtatctgtatggataatgacagtggaaaattggaaggaggaaggcaagcatgttataaggtaagaaaataacaaattcactttaaaaatgctgtttgaagtcctatagggcacttctgtggaggcaatttttaacaaggatatagagcttatatgagttttttggcttagtatatatatttgagaatcatcagcttataagacataattaaaacaaagtcctaaataaaatgaatagtgattgagaaaagagcaaaatatcgagaacttatttataaacctactaacagatgtacttttaattattgccttctgtttgaaactttatttgtaatactagattttctaaaatttaattttttaatttcttttccattaactggaattttaaatgattcattttattataaataagcgaattgctggtgctttaataattttatcactcggttttttggtgttataatagttgggattctccagagaaatagactatagaacc

SEQ ID NO: 835686 - DNA, 284 bp, Homo sapiens
tctgtgaatttgggctatagtatgggttattttgtaaactctggtatggggttatctatttacttatctgttttcttatccagaatgtaacttccttaattcacgagccatgccatatccatttatatatctccatggtatctaatgctaacatacattagctactcactgttamgtgtttgaattgagaaatgttgaatggaatggaagatggttataggtcaaagagcacatattacattctaagaatcgtttacaaatctatagtgatggaaagccattgg

SEQ ID NO: 835687 - DNA, 632 bp, Homo sapiens
acaggaacaaattcgcacatttcagtactgaccttgaatgtaaataagctaaatgccccaattaaaaggcacagaatggcaaattggataaaaaataatgacccatttgtatgctgtcttcaaaagaactatctcacatgcaatgacacccataagctcaaactaaatgatggagaaaaatctactaagaaaatgaaaaacagaaaaaaagcaggggttgctagtctagtttcagacaaaacaaactttaaaccaacaacaatttgaaaattacaaaaaatgggaatcaaataatggtaaagggttcagttcaggaagaagacctaactgccctaaatctatacagacccagcaaaggagcacccagtttcataaagcagcttcttagagacctatgaagaaacttagataacaacaaaataacagtgggagacttcaacatcccactgacaatattagatagatcattaaggcagagaactaacaaagatattcaggatctgaacttgacacttgaccaaatggtcctaataaacatctatagaactccccaccccaaaacaatggaatatacattyttcttgtcaccatatggcacatactctaaagtcaaccacacaattggacataaa

SEQ ID NO: 835688 - DNA, 521 bp, Homo sapiens
gcaaaaatatgggtccaggctaaattcccatcgaccaatgagtgaatacataaatatacaacagaatactacctgccktaaaagggaatgaaataattgcattcagagcaacctggatgtagttggagatgattattctaagtgaagtaattcaggattggaaaaccaaacatcgtatgttctcacttataagtgggagctaagctatgaagacacgaaggtataagaatgatataatggactctggggattctgggagaaggatgggaggggagtgaaggataaaagacaacacattgggtacagagtatgctgcttgggtgatgggcgcactaaaatctcagaaatcaccactaaaccaccactaaggcaatctgcagattcaacgcaatccttatcaaaataccaatgacgttcttcacagaaatagaaaaaaactattctaaaatgtatatggaatcaccaaaaacccagaaaaaccaaagctatcctgagcaaaagaatgaaaatggaggaattgc

SEQ ID NO: 835689 - DNA, 539 bp, Homo sapiens
aaatagaaaaaaactattctaaaatgtatatggaatcaccaaaaacccagaaaaaccaaagctatcctgagcaaaagaatgaaaatggaggaattgctttacctgactaaattatactacaaagctattggatactattcagcaataattaagaatgagatcctgtcatttgcaaaaacatggatggacctggaggttattatgttaagcgaaataaatcagacacacaaagacaaactttgcatgttctcacttacttgtgggatgtaaaaaatcaaaacaattaaacccattttgatcaagagtaggttggttaccagagagactgcaaagggtagtggagggtgggaggaaagtggtgatagttaatgggtgcaaaattaaaatagttagaattaatgaataagacctaatatttgatggcacgatggggtgattatagtcaakaataatttaattgtacatttaaaaattactaaaataatataattgtattgtttgtaacacaaagtataaatgcttgaggggctgaatacccc

SEQ ID NO: 835690 - DNA, 489 bp, Homo sapiens
  misc_feature 1, 2, 3, 4, 5, 6, 7, 8, 9, 10, 11, 12, 13, 14, 15, 16, 17,18, 19, 20, 21, 22, 23, 24, 25, 26, 27, 28, 29, 30, 31,32, 33, 34, 35, 36, 37, 38, 39, 40, 41: n = A,T,C or G
nnnnnnnnnnnnnnnnnnnnnnnnnnnnnnnnnnnnnnnnngaaatgttctcaattgtcatggcgatgcttaggaaagacacattttaaaggaggtgaaagtgaaraatcatattggtttcacaaagtttaggattttaacttgtacttagctggaaagacagccctacctggtattaagtcacaaggtcctcataaaattttaaaagtttagactgaaattttcatagaatttcttgtcctactttcttatttgatggaggagaacactcaaatctcaaaagcttcagtgaaattttcatagaatttctggtcccaccctcttattttatggacgagaacacttaaatctaaaaagtttaagtgacatcccaaggtcacacagctttctccctacatgttgtcttacaaacccctcatatgcacttgtttagagcaggaaccaagctatcttcatggctgatctaccacccagaagtcattatgggga

SEQ ID NO: 835691 - DNA, 551 bp, Homo sapiens
tcgttggaacaactgggactccaggaggatagggtgactgacgtttttgactgagtgacccattgttgggggaggacaggggacataggagcacagaccgccatctcctcaggggagtgtatgacaggctctccttttgccatcagtaagacttctcctttatcaataacaaatttcagatatttcactttgatctaaacccctgatggagtcagacacacaataaattatataaatgctctagtaagatttgcttaaaagccttgagagctaaatctgttccatgcacctgctaatcagaccaactcagcatgtttattaatggtctccatccagaaggaggaaactcagacagcttcccaagatagtaagcagttgttctcaactctcccataagacagagaagcagggactccaaaacaacccarctcctgctgcccagatcttaaatatgatagctccttagagttaatggcatgcagtgctcatgaaagatctaaaagttaccatcagtacgtctctatcccatgctcacgtctcaaagatgcaaa

SEQ ID NO: 835692 - DNA, 666 bp, Homo sapiens
aaactcatgagcacagttacaagatttatctagcaattccagtcagtaacccaggagttggcgagtggtcaggtggatgtgaggaaaagctaaagtctcaactgatcagaaaatgctgatcagggaagccagtgaagtctcctgcagaaagtatgaaactgggaatactaaaagggctccagggactaacagtcccgatgaggacaaaagcagattctgttattttactggtgttttcattcttttcaggatgggtacattgtgctgttactgaatccccaggctgagacaaaagatgcagggttttgatattttgaagatgagaaaactacctaccttgtaaacttcaccaggagtcattgtctaaccatgttttagttactcaactacaggttttggcattcagtttctctgccatactatacaccactaatagattgtatctatatatttccctgcttccttatcctccggcttgataaagcttccccacatgtactcataagagtccgtgtaacatctctgcattctgtgayaatggcgagatgtttctatttagaagcttactaggatgtaccgttatttaagaggaggtcacccacatacctgatctgttctgtctctcaactctgtgtccacaaactcctgaggatccttggttttgaa

SEQ ID NO: 835693 - DNA, 666 bp, Homo sapiens
aaactcatgagcacagttacaagatttatctagcaattccagtcagtaacccaggagttggcgagtggtcaggtggatgtgaggaaaagctaaagtctcaactgatcagaaaatgctgatcagggaagccagtgaagtctcctgcagaaagtatgaaactgggaatactaaaagggctccagggactaacagtcccgatgaggacaaaagcagattctgttattttactggtgttttcattcttttcaggatgggtacattgtgctgttactgaatccccaggctgagacaaaagatgcagggttttgatattttgaagatgagaaaactacctaccttgtaaacttcaccaggagtcattgtctaaccatgttttagttactcaactacaggttttggcattcagtttctctgccatactatacaccactaatagattgtatctatatatttccctgcttccttatcctccggcttgataaagcttccccacatgtactcataagagtccgtgtaacatctctgcattctgtgataatggcgagatstttctatttagaagcttactaggatgtaccgttatttaagaggaggtcacccacatacctgatctgttctgtctctcaactctgtgtccacaaactcctgaggatccttggttttgaa

SEQ ID NO: 835694 - DNA, 626 bp, Homo sapiens
tgctgaatgcagcttatcaagatataagtgaatcagtagccttgagtcttggaaattttttrtctcttctgtttgttcccaaagaccatcacttacaaagcccatagtgacaggtgaacccttagactgcagcacaatggtaggaaggagatactcttggtaaaatgaattgtatagggtgtgctggctgaggttcaaccatcatagctaaaaagggctagttgtctttcagacacttcatctgagggcttgtcacctctcctttactatagtaaagacatgaattgacctctcccctttgtatcaactgatgggtcccagagaaagacaccagatgacttataactcatatgaaggtaagacacaggagtggcagaacctggaagaggaggaaaaggggttaaaagggccaaggacctgggggtcgttggggaggtagacggtataagggggagggaagaaggagaatcttttgatgggaggttagctgaaagggtcgcctcagagactaggaccaagatcctgtaccaagcagagagcttggaaacatactgaacagacaagagatgtcatcctgtggccttgacatagttaggaagtttttattggattagaagtaaagacat

SEQ ID NO: 835695 - DNA, 600 bp, Homo sapiens
atcaagggagaggctattcgtctataaggcagaggttatatggggcaggggttcccaacccctgggccrcagacaggtctagtctgtgacctgttaggaactgggctgcacagcaggaagtgagcagtgggccagcaagcattatcgcctgagctccacctcctatcggttcctcggcagcaatagattctcatagaaatgcaaactttattgtgaactgcacatgcgggggatctaagttacatgctccttacaagaatctaatgcctgacgatctgaaggtggaacagttttatccctaaaccgtccacccccgtggaaaaattgccttccaggaaactggtccctggtgccaaaaaggttggggaccactgatacaggaaatttctgaactgtctgtccaattttgctgtgaacccataactgctctgtgagagaggctatgaggaaattggcattgccatgctttgctgacaaatatgcaactttgcacaatcactctgaaagcaaatttagcactatctaataaaactacatatgcacttgtcttttgactcaacaattccgattctggggtatatcttcctaccctgaagatac

SEQ ID NO: 835696 - DNA, 644 bp, Homo sapiens
aatcaaaaacaataaatgttggtgtcgatgcggtgaacagggaacacttctacactgctggtgggaatgtaaactastacaaccactatggaaaacagtgtggagattccttaaagaactgaaagtagaactaccattttatccagcaattccactactggctatctatccagagaaaaagaagtcattatatgaaaaagatacttgcacacgcatgtttaaagcagcacaatttgcaattgcaaaaacgtggaaccaacccaaatgcacatcaatcaatgagtggataaactgtaaaaaatatatataccatatatataccatacataaataccatatatataccatatataaataccatatatataccatatacatatcatatataccatatatatacacaccagatgtaccatatatgtaccatatatataccacatatatgtaccatatatataccacatatatgtaccatatatataccacatatatatacatcatatatatgccatatatgtatataccacatatatatatgatggactactactcaggcatataaagtaatgaattaatggcatttgcagcaacctcgatgagattggagactattattctaagtgaagtaactcaggaatggaaaa

SEQ ID NO: 835697 - DNA, 503 bp, Homo sapiens
gtttgccatgtgtgccttttttctttaatgaatgtagtgcaatattagcaaaagcattgaggcaaaacaatgggataatagcccaaacagggaaaacrttattttattcacatcataattatagttttattttcttttcttcctaaacaaataaaggtttaaattcagttttttgttttatcttattattactgccggtcagtaaattacattatttttattcttcaaaaatatatgtgaatttcataactttcgatcttcatggcatgaaccgaagaaagtaccctattagctgtttcaatcaaagggtgatttaaatagcacagtgcacccttctagaaaatggggacatatttttgttttaacatttatatctagaggcttagtattatataataaatttatctcacttgcttataaaaccgatttccatatatgacatgcattataatagtttaacataattatcgaatgaagctatcaatctcactacagaggctttc

SEQ ID NO: 835698 - DNA, 538 bp, Homo sapiens
taatttgaatgtgaacttatttgaaattttaaaatttcaattyataaaatatattttatttttccttctttccgactctaagtaccttatgtggtgcacgtgaaattaattccagctctgtcctcaaagcagagtcaatgtctgcatactgtccagactaatcttggctcctaagagggcaagggatttagaaaatcaattaaaatactaaaatggttaattttattctttagaagaaaattactgtgctctccattaactggatataccttttacaattaagtatacagaagagtataaatggtttcaaatactaaatttccttatccaaggtaaacttttcataaagttagtatgttttaatcatagatatttttgacataaatgtgaacattaataatgttagtatacatgatgagcctatacagtgctatttgggacccacgtattctcctgaggaaaaaaaaaattaagacaattgggagcccccaggaaagatttttatatctaaatattgttatgactcttgcttgatgtt

SEQ ID NO: 835699 - DNA, 522 bp, Homo sapiens
tttttaactctttatgtggtgaatcacatttattgatttgcatgtgttgaactaaccttacatcccaagaatatarcctacttgagttatggggaattaatttttttgtatgctattgaattcagtttgctagtattttgttgaggatttttacatctatgtgcctgagtgacatttgtttatagttttcttttttcattgtgtttttgctgggctttgaaatcaggaaataatgctggctttgtagaataagttaagaaggagtacctcctccttgattttttggaatagttttagtagaagtggacgagctccttgcatgtctggtagaatttggctatgaatctagctgctgtataatttttattttatttttgtctttggttcataggtttttaattattgatgcaatatcaaaactcgacatttgtttgttcagtgtttcaacttattcctgattcaatcttgggaacttgtgtgtttccaggaatttatccattttctctagatttttctcatttg

SEQ ID NO: 835700 - DNA, 654 bp, Homo sapiens
ggatcaacacgctccgcccactgctgccagtgcccacatccactatccaagggccttaggccttccctgcttactgccactgctgccagcacatcaatacaccatccaggagcatgggattaaatggccttatcttccatttccgacacttatgcacatcatccaggaagcttaggtcttccctacttactgccactactgccggcacatgaatataccacccaggaacctggggattacatggccccaccctccttttccgacacttatgcacatcatctaggggcctaaggacagccctgccctgcctactactgccatcactggtgcctgaatgctggccttcctggagtcactgtctccagcaaagccttaccacagcctccactaacaaccactgtctaagtcactgaggaactcacaggaacctctgatgctgactgcagccaaaaaaaatcatttggagactacactactatgcccatccagaatcaaagccatgtgaccttactcaaccaacactgtagatacacctataggaaawagtattttcctacaaaaaccaatccataaaatagatagaagagacttacaacaaatgcacagatataaacttaagaacacaagaaacatgaaaaaaagcaaggaagcata

SEQ ID NO: 835701 - DNA, 615 bp, Homo sapiens
cttatattcaataaacaagacagatagaaagaaacaagaaagtgtgatacatactctgggaaaaataacagttcatataagctgtctctgagtggtcctatatgttagatttagaagaaaaagtcttcaaagaaactattcacagaactaatgaaaatgatgtttaaataattaaaggaaagtatgatagcaatgaccccaatgatcgaatgaatagaaaatttcagcagagataaaaatcatataaaagaaccaactggaagttctgaagttaaaatatactagaatatttcataaaaataaaagatcaaataatcaggaagatataataattttaagtgtatttcacctaaaaacagtgtcccagaatatgtgaagcaaaaaaactaagaattgaaagtatagacaacaataatagctggagatttcaatacccactcttaataattgatagaatgcctagaccgtaaattggctaggktaaagaaaatttgagcaatgctatcaaccaacttaatataactgacatttatagaacgctccacccaaagagttcagaatacacattcttttcaagtttatttggaaaattctgcagatagatgatgtactggg

SEQ ID NO: 835702 - DNA, 515 bp, Homo sapiens
ttggctgaggaggcctcaggaaacttacaatcatggcggaatgcaaaggggaagcaaggcaccttcttcacaaggcagcaggaaagagaaatgccgagcaaagggggaagagccccttataaaaccgtcagatctcatgacaactcaatatcacaagaacagaaggggggaaatcaccccataatccaattaccttcacctgatctctcccttgatacatggggattatgaggattataattcaagaccagatttgtgtggagacacaaagcctaaccataacacacttgtatgttataaagatggcttctttccttaagcctcacaaaccaacctctgctagcttcaaacttttcttcttcctcctgtctgtcagccttcatataattaaagagagcaagtgccttgctctggattaggctttggtttaagaaaatgttgtggctgatttgatstatccagaccactcaaactttctccatatcagcaatatggctgttctgctttcttatcat

SEQ ID NO: 835703 - DNA, 647 bp, Homo sapiens
acacctcagacatctatcacctctatgatgtcctatcacccttcttcccagccattacccaagttgggttagatgtcactcttgttggttcccattatatgaaaaataacaagctattttgtgggtttttattcttgtatctggctcctcaaggaggcttagctacttaaggtcaagacctataagttagtcttcttgagaattctcagtaccgagctcagtgcctatgatgagaatccagcatttgtgttgagtaaagaaattcctaattcatttgtcatgaaggcctaactctatcttaaattttttatttctgatggttcaaactatagtatgagtaaacattttggacacactgattgtgttgaaatgcactaatatgagatgattaaaattgctttaatagaaatcctctgcggacaaaatgcaacagttaaacgccgcacaccaggaggcattaatgaaactggagagacttgagtaagtgggagatttacaagtaaaataaatgcaatttcaaaatgcaaaatgaattgtaagyagtattttacaaccctatattccaccttaagtctcttttatctcccttaataaatagcagagtatttgagtttgccttttcttaaaaaaaaaaaaagaaaaaacta

SEQ ID NO: 835704 - DNA, 481 bp, Homo sapiens
gtcttatgaaacacatattaagtacataattatagtgttgcatgtacaaaaattgtactatttaaagaagaaatgtagagaaaatgggagcagsattttcagggatcagtacaaatttagcaggcagaccggagtgggataatgatattctaggaggaccctactggtcaaagaaagatcacttatacttgtctaaacataagatcagaattaccagattgtagggtgcagtagggaactggtgggagatgagactagacaggaagagagttaagagccatgtaatgaaaggctttgaatgtcctgctaaggagcttgatctttggcctatagacaaatgtgagcaattaagtaggtaagtgatgtgttcagaatttaattttaccctcattacagagaacatggacctaatttctttgttctttcccattactagaatggtaaatcaccaagtttattatatctaatatataaaaatgtt

SEQ ID NO: 835705 - DNA, 481 bp, Homo sapiens
gtcttatgaaacacatattaagtacataattatagtgttgcatgtacaaaaattgtactatttaaagaagaaatgtagagaaaatgggagcaggattttcagggatcagtacaaatttagcaggcagaccggagtgggataatgatattctaggaggaccctactggtcaaagaaagatcacttatacttgtctaaacataagatcagaattaccagattgtagggtgcagtagggaactggtgggagatgagactagacaggaagagagttaagagccatgtaatgaaaggctttgaatgtcctgctaaggagcttgatctttggcctatagacaaatgtgagcaattaagtaggtaagtgatgtgttcagaatttaattttaccctcatyacagagaacatggacctaatttctttgttctttcccattactagaatggtaaatcaccaagtttattatatctaatatataaaaatgtt

SEQ ID NO: 835706 - DNA, 584 bp, Homo sapiens
catagcgtacaaagaagctggctatcccaccctaatcttttattataaagataggggtctcatgttgcctgcttttttactgyacatgtggcaacaaagaaaatggaagagggaacctccatgttgaatattcctggcttccaagtatcccttttctattggcatagctgccagcatttacctatgcaggcttttagcttgcttacctatgcttgcagcttgatttttcaggctgctttttgttagaaaagaaattatttgggggctgctttttataaaatggaagccttaccgagggctctcttaccctcactatctgcctaaataatttctagctcctgtatcaatatgagatggcgtatagttgcactgagctagaagataatgaaattatataatcagaattttatatcaggaagggacctaaaagataaattaacccaaacatagcattttaaactataaaatataagattcagaaagattgactttttcaaagtcagattagtttgggtcatagtcaatatcacaattcagtttaatggaacagaaatatattgagcacttactatgtgacaggttct

SEQ ID NO: 835707 - DNA, 560 bp, Homo sapiens
ttccttctttttttattattatacttgaagttttagggyacatgtgcacaatgttcaggtttgttacatatgtatacatgtgccatgtgggtgtgctgcacccattaactcatcatttaacattaggtatatctcctaatgctatccctctcccctccccccaccccacaacaggccccggtgtgtgatgttccccttcctgtgtccatgagttctcattgttcaattcccacctatgagtgagaacatgcggtgtttggttttttgtccttgtgatagtctgctgagaatgatggtttccagcttcatccatgtccctacaaaggacatgagctcatcatttttatggctgcatagtattccatggtgtatatgtgccacattttcttaatccagtctatcattgttggatatttgggttgattccaagtctttgctattgtgaatagtgccacaataaacatacgtgtgcatgtgtctttatagcagcacgttttataatcctttgggtatacacccagtaatgggatggctgggtcaaatggtatttctagttctag

SEQ ID NO: 835708 - DNA, 599 bp, Homo sapiens
tatagagctatggtataaacatgaaacgagaagtctccttcaaattgkgggttttatttacattttgagacatgttcaaatacatataaagagacatattagctaaataaaacaaattttaagatgattctgtgagtgtcctcatcttcccatttcaactatttgttcattaaacttatgaaatttaactaatatttcttatgcacagcaacacattacttcaataatacaaaagaagaatatcatgtggctaataaataactaattatttaaataatcaatgtaaggtctagaaattttttaaaaactcattgatattaccagtattaatgtaactctctgaatttgtatgctcaggagtattcatatctcaaactattttcaaggttttactttataactaacagtttacatatctacacactaaaaacatgattactcttagtaaacataaatgtatttcaactacaagattaaaattttacaaatgtcaaaatatagataaaatcataaccctcaatattggtaatttctacaatatgtatagatgtttacaattcttatttgttttacatattagagactttttaaaactatgc

SEQ ID NO: 835709 - DNA, 599 bp, Homo sapiens
tatagagctatggtataaacatgaaacgagaagtctccttcaaattggkggttttatttacattttgagacatgttcaaatacatataaagagacatattagctaaataaaacaaattttaagatgattctgtgagtgtcctcatcttcccatttcaactatttgttcattaaacttatgaaatttaactaatatttcttatgcacagcaacacattacttcaataatacaaaagaagaatatcatgtggctaataaataactaattatttaaataatcaatgtaaggtctagaaattttttaaaaactcattgatattaccagtattaatgtaactctctgaatttgtatgctcaggagtattcatatctcaaactattttcaaggttttactttataactaacagtttacatatctacacactaaaaacatgattactcttagtaaacataaatgtatttcaactacaagattaaaattttacaaatgtcaaaatatagataaaatcataaccctcaatattggtaatttctacaatatgtatagatgtttacaattcttatttgttttacatattagagactttttaaaactatgc

SEQ ID NO: 835710 - DNA, 470 bp, Homo sapiens
cttcatcctctccatttacatagggagtacccaaaataatcagtggaatcctctagggggtatttaagytccccaaaattctgtaatggggcctttgagcccctattctcaggctgctcccacactgtgtagtgtactttcattttcaagaaaacccttcgttccttccttgctttgttttggtgttttgtccaattctttgttcaagatgccaagaacctcacagcctccaccactaacagtttggggaaggggtaggagtggctaggcagtgggtgcttactgctgattgattgggggtgtaatcaccctataattgcacccccaagcaatcagcagcagggactcattgatccccctgtggctgaatcacttctaggtggggctacaggagtggttggtgggtccaggtggagccatcatcagtgtcagacatgcaaaaaaatctgcaaagatatctcaaaatgcca

SEQ ID NO: 835711 - DNA, 581 bp, Homo sapiens
tccaccgttaacctgaacatgatgtcatagctgtgtggggaaggcggaaggtctgacagctcrtctttctatgatggatttttaaaagattcccactaccagagtactgctttggctgcacttgtgatatcagtcattttgatgttgataaaaacacaggtgcctcgtccaagaggctggagatgcacggtgtatgggacctgggagggtagggaagggtgaggctagggtgatacagtggatcgggtcggcatccatcgtcctctgtttctcacaggtggctgctatgcagtgatttgggctcctgcaaggggggcttgtggctgagatctcttttttttttttttttttttttttgagatgaggtctcactatgtcgaccaggctggtcctgaactcctgggctcacatgaactcctaccttggtctcccacagtgttgggactgcaagcatgagccaccgtgcccggcctacatctcttaaggctacttgaggcagtacttgccaggcaagcattgctgtctctcaaacttcctgggaaacagttttttcctcctagaatttcctcctggaatataac

SEQ ID NO: 835712 - DNA, 613 bp, Homo sapiens
tctgtcctaggaatagaaatgtacattaaattttaattatcagctagtttatttacataaaactgaacaaatcttgcatagtgagtacacgtgagattgtattatctaatgcaattcaatttyatatccatgacgatttacaaatatgcatattcaacatatgtctgagaaaaaagtggatttttaatgtatttatgtgatttgtgttaatagaaatgtttagggtcgtcttaaacttcacattgtacattgaattatgagagttactgtgtagtaagtatgctacacttgtaaaaatatttccctttaaaggagcttaaacatactgggagattcccagagagacaaaaacacctataaaatttagagagtgatatgatgaagcactcattttttaaaaactgaattcactatatttcagatttttttaattcaaaatggaatcattcatcattgaatatcttttttctctacactacctttaaaacaaactaaatatttcatttgtttctgtagttagggataggttagaataaatatgacaatagcgccaatgattgaataagtactatgaattagtactatgttattattttactgttataaatgtgcc

SEQ ID NO: 835713 - DNA, 467 bp, Homo sapiens
gtgttagccaggatgatgtcaatctcctgaccttgtgatctgccccctcagcctcccaaagtgctgggattacagatgtgagtcaccaaaccctgcccaagggtacattgttgrtaagtctacagtactgtatgctagtgttcaaggacttcaccttcagtcaccactcactcactgacttacccagagcaacttttagtcctgcaagatccattcatggtaagtgttctatacaggtgcaccattttttaaatagtttatactacatttttactgtatctttttatgtttagatatgtgtggatactcaaatatcactgctttaaaattgtatacaatagtcggtatagtaacatgctgtataggtttgtcgcctaagaacaataggctccaccatatggcttgggagtgtagtaggctacaccacgtaggcttgtgtaagtacgttctgtgatgttcacacaaca

SEQ ID NO: 835714 - DNA, 416 bp, Homo sapiens
gtggggaataattagctttagactaaatactgytctcattccatataattcaccttattaacaaaccaaaaaaatcatatgagtatcgcagtaaacatagatgttgaataaaatccaacatccatttctgatcaaacttctcagcaaactagaaacagaaggaaaattccttaacctaataaagggcatatatgaaaaacctacagctctggccagtataatcagttaagaggaagaaataaagacatccagatttgaacagaagaagaaaaattatctctatgtgcagatgacatgatctgatggactgtacaaaagagctaccagaactaataagctagtttagcaagtttgcaggatataagatcaatatataaaaatcagttttacttcaatatactcacaacgaacaatca

SEQ ID NO: 835715 - DNA, 416 bp, Homo sapiens
gtggggaataattagctttagactaaatactgttctcattccatataattcaccttattaacaaaccaaaaaaatcatatgagtatcgcagtaaacatagatgttgaataaaatccaacatccatttctgatcaaacttctcagcaaactagaaacagaaggaaaattccttaacctaataaagggcatatatgaaaaacctacagctctggccagtataatcagttaagaggaagaaataaagacatccagatttgaacagaagaagaaaaattatctctatgtgmagatgacatgatctgatggactgtacaaaagagctaccagaactaataagctagtttagcaagtttgcaggatataagatcaatatataaaaatcagttttacttcaatatactcacaacgaacaatca

SEQ ID NO: 835716 - DNA, 673 bp, Homo sapiens
ataagccagtgatcctcaattaagggatccacccttcagggatgagaaccatattggattcttggggggaatctgtgggagtgtattgtttgaaaaagcgtatttktgtgtgtgtgtatgttggagatacaaagtgaatacacttggattgagccctataattaatatggtttgacaccttcattggtaagatggggccttgcttatgcatactgttaaatgaaaattgtaggagcccattgttttggactaagctccttcaccaggccccaacagactagactaaaagtcaaaatggggtcacccatgctgaggtcctgtgtcatctccggccagcttcaattggcataataatgaagttccctctgccttacaacaaaaataacctgatgttaaccaatcaattatttgtttattgttatttccctgctgtcttacaaggaaggtaactttgaaacaaccagtctgctttttgtcctttggttctgctttcttcagtttttctctgtctataaaaccaacctcctctgctcagcttatcagaacactttatttttacagaaggaagtgttgcctgattctagaatcacaaacaaagccagttaagatctttaaatgttatcttttgaccaatctggtgaccataaaagggaccataaggagactactaatt

SEQ ID NO: 835717 - DNA, 557 bp, Homo sapiens
tatttctcaccctcctttatatgttgctttatcatttaaactataaacggtgtaagagtttatgracacatggggataaaacagattattttatgcaactataaaatttgtaaagaaaaattactcacaaatgtcagcatgtgtgtcatactttattcattcgtaaaattagtatatagaacaataaaacctaaaattttattaaatataaaaatgtatactatgcacattaaattttatattttcaattttgttctttttgcaagaaaattttgctacttaataaaagattatctgatatgatgtatatatttgaaggctgactgagtgagtgatatgttggaaatattttcttgctaaatatgttttcagttacttaaaagatgcaataagttgtaaggccttaatatagttgcagtactaatgtaatctatttggtcctttctgcaatagatggaaataagtgactaagaaattaacaaagtataagtccttctggaaattcaagataataaagagcaactttatttaatattccacaaatgttctatttacat

SEQ ID NO: 835718 - DNA, 615 bp, Homo sapiens
gcgagactccgtctcaaaaaaacaaaacaaacaarccaacaaaaacttacatataattttttgtaaaaaaaaaaaaatgtatgctagacctatatgctggaatcaaggaaacaatgatgaaggaaataaaagaaaacctataaaatggagagatatagcatgatcatggattgtaaggctcaatatttttaagctgtcaattatatctaattcaccatatagatttggtataatgccaatcaaaatctatgaaaatgtttttctcggtgttgacaaaatgattaaaaatttatatggaaatgcaaaggcactagaatagacaaacaactataaaaaattggaggatttggtactactgaaattgaagacattataaagtcacagtaaacaaaagtgtcttaagtctcacaacttgtacaaaaattaactcaaaaatatcatagacctgcataaaataaaagattatataactttagaagaaaacataagagaaaatttacataacctcaagtttgacaggttttagatattgatggcagtggccacttcagagggcctgccagtgtcatcatgctgactgcagcaggtagactaggcccaagttgcacccaagct

SEQ ID NO: 835719 - DNA, 521 bp, Homo sapiens
tcatgcttctttcctcccctgaaaagaggatgcctaggatgaacattaactcgacccaagtrtacaacttaggttcccaaaattgataaactggatctgccaccccataagggtcatccaaaaatggcttaagttccttttttaaactttggaattcttgacctggttaagggaggattcacaaagccaatagctcctcctccttgtggcacctctttttaggggaagagagttgaggctgactccttaggtgtggagggaagtgggacattttgaatatcgtttttacattgttctatcccatgatggagtcttttggggaagggtactttggctgagaagaaataggttcatggtataagattcccaacaatctggattgtaaggaggaggaataatgtgagcaggggagggatctggagtttgaactgggacagcagtggctgcctgaggggaagggttaggagaactgagcgagggaagatggtctagaggatcccatatgctggattctttaggcc

SEQ ID NO: 835720 - DNA, 521 bp, Homo sapiens
tcatgcttctttcctcccctgaaaagaggatgcctaggatgaacattaactcgacccaagtgtacaacttaggttcccaaaattgataaactggatctgccaccccataagsgtcatccaaaaatggcttaagttccttttttaaactttggaattcttgacctggttaagggaggattcacaaagccaatagctcctcctccttgtggcacctctttttaggggaagagagttgaggctgactccttaggtgtggagggaagtgggacattttgaatatcgtttttacattgttctatcccatgatggagtcttttggggaagggtactttggctgagaagaaataggttcatggtataagattcccaacaatctggattgtaaggaggaggaataatgtgagcaggggagggatctggagtttgaactgggacagcagtggctgcctgaggggaagggttaggagaactgagcgagggaagatggtctagaggatcccatatgctggattctttaggcc

SEQ ID NO: 835721 - DNA, 521 bp, Homo sapiens
tcatgcttctttcctcccctgaaaagaggatgcctaggatgaacattaactcgacccaagtgtacaacttaggttcccaaaattgataaactggatctgccaccccataagggtcatccaaaaatggcttaagttccttttttaaactttggaattcttgacctggttaagggaggattcacaaagccaatagctcctcctccttgtggcacctctttttaggggaagagagttgaggctgactccttaggtgtggagggaagtgggacattttgaatatcgtttttacattgttctatcccatgatggagtcttttggggaagggtactttggctgagaagaaataggttcatggtataagattcccaacaatctggattgtaaggaggaggaataatgtgagcaggggagggatctggagtttgaactgggacagcagtggctgcctgaggggaagggttaggagaactgagygagggaagatggtctagaggatcccatatgctggattctttaggcc

SEQ ID NO: 835722 - DNA, 610 bp, Homo sapiens
cccaggctggagtgtagtggtgcgatcttggctcgctgcaccctctgcctcccaggttcaagcaattctcctgtctcagcctccygagtagctgagattacaagtgcccatcaccacgcctggctaatttttgtattgttagtagagatgagggtttcaccaagttggccaggctggtctcagactcctgacctcaggtgatctggtccccttggcctcccaaagggctgggattacaggcatgagccacagtgcctggcctctacctccatttttatattgcttttctctgtgtgtggttttgggtttcaaatctttctctcctgtgttttatgagatctcagtcattgactttagagcccactctaactccaggatgatctcatctcaaggtccttaacttaattatgtctgcagagatcctatttccaaataaggtcacatccaaaggtactgggagtcaggacagagacatatctttttgggggctgccattcaatccattacatggtccttctgggcacaacgatctgggcacctgcgcaggttgcacacccatgaagtgggcactgcgtaagtccctggaaatctcagctccacacagaggatt

SEQ ID NO: 835723 - DNA, 610 bp, Homo sapiens
cccaggctggagtgtagtggtgcgatcttggctcgctgcaccctctgcctcccaggttcaagcaattctcctgtctcagcctcctgagtagctgagattacaagtgcccatcaccacgcctggctaatttttgtattgttagtagagatgagggtttcaccaagttggccaggctggtctcagactcctgacctcaggtgatctggtccccttggcctcccaaagggctgggattacaggcatgagccacagtgcctggcctctacctccatttttatattgcttttctctgtgtgtggttttgggtttcaaatctttctctcctgtgttttatgagatctcagtcattgactttagagcccactctaactccaggatgatctcatctcaaggtccttaacttaattatgtctgcagagatcctatttccaaataaggtcacatccaaaggtactgggagtcaggacagagacatatctttttgggggcygccattcaatccattacatggtccttctgggcacaacgatctgggcacctgcgcaggttgcacacccatgaagtgggcactgcgtaagtccctggaaatctcagctccacacagaggatt

SEQ ID NO: 835724 - DNA, 610 bp, Homo sapiens
cccaggctggagtgtagtggtgcgatcttggctcgctgcaccctctgcctcccaggttcaagcaattctcctgtctcagcctcctgagtagctgagattacaagtgcccatcaccacgcctggctaatttttgtattgttagtagagatgagggtttcaccaagttggccaggctggtctcagactcctgacctcaggtgatctggtccccttggcctcccaaagggctgggattacaggcatgagccacagtgcctggcctctacctccatttttatattgcttttctctgtgtgtggttttgggtttcaaatctttctctcctgtgttttatgagatctcagtcattgactttagagcccactctaactccaggatgatctcatctcaaggtccttaacttaattatgtctgcagagatcctatttccaaataaggtcacatccaaaggtactgggagtcaggacagagacatatctttttgggggctgccattcaatccattacatggtccttctgggcacaacgatctgggcacctgcrcaggttgcacacccatgaagtgggcactgcgtaagtccctggaaatctcagctccacacagaggatt

SEQ ID NO: 835725 - DNA, 644 bp, Homo sapiens
tggaaattaaacaatttgctcctgaatgaacagtrggtcaataaagaaattaagaaggaagttgaaaaatttcttgaaacaaatattaatggaaacacaatataccaaaactcgtgagatacagcaaaagtagtattaagaggcaagtttatagctataagtgcctacatcaaaaaagaagaaaaacttcaagtaaacatcctactgatgcattttaaagaactagaaaagcaagagcaaaccaaaccccaaattagtagaagaaaagaaacaataaatatcagagaagaaataaatgaaattgaaataaaaaaattaaaaagatcgatgaaacaaaaagtcggctttttgaaaagttaaacaaaattgacaaacctttagccagactaagaaaaaagagagaagattcaaataaataaaatcagagatgaaaatggacacaagcgatactgcagaaattcacagaatcattagtagctactatgaacaactacaggacaataaattggaaaatctataagatatggacaaatttctagacacatacagcttatcaagattgaccatgaagaaatctaaaacctgaacagaccaattacaagcaacaagatcaaagctgtaataaaaagtctcccagtaaagaa

SEQ ID NO: 835726 - DNA, 609 bp, Homo sapiens
gaaaattgcaaacatatttatattgttagtattgcctcttgtttaatcatttttcaacaaaatgtacaatggactactgcattttaaaacaattccaaaagcacacttaaaacttaacaagaaaattcttactatctatatattttgtaaaaaaagctgaatgcaaaaataaatctagcaccctactgacaataaacagccaatattaacatcattctccaataacagtaccaactgattttaggactggggaagggattataaaagacaggcccggacatcttgtctcagaaaggaagaaagtgcccaacacacacacatgcacatccacacgcacacacactttgatgcgggtacttcaaaggagcacaccggccccctgaaatgagctcataatggccaaaccaagaaatatttgagcaaaaccaaaaaaaaacaattcaatagtattaaattatagcccaaagtataaaataaatatccatgagcacatacagatacagatagacatataggtagrtagatagatagatagatagatagatagatagatagatagatagatgatagatagatagaacaaatctcccaatgtagaaatattccaag

SEQ ID NO: 835727 - DNA, 584 bp, Homo sapiens
atggttccacttcaaccaagtcttgtcaatccaaactcttaggcctcttagtcccctcttcccttgagcattgctgccatyacttctttatttcccaacaagaacttggaagtaccttctgaaaatggtcttctggttctagatatgtttctcccatttcctttcccatactgctagagtaggccccctctgtattattaaaatataatcctgattaaatcatacaaaggttaaaaattcttcaatagttcccatggccgacatgataaattcctaatatttgtatcgtgtatgaggagatttgacatcaccactagagggtgggcactgtgttgttctgacaagggacccaaatgcttagcatggtgcttgacatatagtgcataagcaatcaccatttgccagtaaagagaaaatttttaaagttgatttgtctatctcatgttcatctttccacccaataacctctccagtaaggagtgactcgtgtctccaagttgtgctgaacggcttccaactcttcaaaggtaacatacgttcatgcctctccccctgccctccagcccaggctaccctatgtgtct

SEQ ID NO: 835728 - DNA, 623 bp, Homo sapiens
caatacatatgatatttacattgtgagattcctctaagagatgtttcaactaatcttctatttctcaatggaaatattgagaaatagagggaattgaggcaatttctcaattgcctgagaaatactgaytgtacaatgacaatcatgaaaggaactcgaggtggtctacctttcctacaaatacatattgatttctttccataaacatttggtcagcatcagtgaggtaggggctaagggacaacaagatagggactaagaataaaattggtgaagaaaaatagacatgatccctatttctatggaaattaaaatttaataatttagtaatcacaatgactataaaataagtaactgaaataattgctctaaagaaaaataaaacatggctttatggaagtatttaaactatggaattagaaaagccttcttgaggaggtaataagctgagatataaaatatttaacggtaatctagtcacagggggaggaacgcatgtttcagggagaagaaacatatctgcatgtgaaagttccatgaaagatggagcattagtgtggtcaaggaagggaaattgttcagtgtgttgcctcacagatggcatcagtggacacccatcctgg

SEQ ID NO: 835729 - DNA, 597 bp, Homo sapiens
tttgcaatagaaaaggaaagttagaagaaagcaaaaataagagtttccagggaagcctctggtcagaggaagacgaagcggggctcatgtaaccaygggggactctaattgctttctttgcaccaaagacaaactgcggagagctcaattcaacaaatatgtctggagtactttccatgtactcagcattttgcttggcaatggggattcaacggtaaacaaggtgcaattgctctctttgaggagatgacatcaactgtacaaatacaaaggaaacacagtaatttcaataaaaagatgtgcactcaggggaagcacaaaaagagtatgcctggcatcctagagaggaagattactggtttaagaatgactaatattagctagagaatggagggaagggatggagatggaggaggatatggggcaactgcgagacaaagaagaccattaggaaaagacaaagaatgaaggtaacagtttgacatgcagaagatacttggagacagaagatacttagttggtggatttttatccattctgccattctatatcttttaagtggagcatttaggtcatttacattcaatgttagtattg

SEQ ID NO: 835730 - DNA, 504 bp, Homo sapiens
aatgcaatatataaaggctttagaggccgggtacggkggctcacacctgtaatcccagcactttgggaggccgaggcaggcagatcacgagatcaagagactgagaccatcctggccaacatggtgaaattccgtctctactaaaaatacaaaaactagctgggtgtggtggtgcctgtagtcccaggtacttaggaggctgaggcaggagaatcgcttgaacctgggaggcagaggttgcagtgagccgagattgcgccactgcactccagcctgggcgacagagcaggactccgtctcaaaaataaataaataaaaataaataaataaaggctttagactgttgacattcttaaatccagagatataagaaatcagatgtgcttatgtaaattgctattttatcacagccttaacatctaatttaccaaaagaagaaaataaatccaatgaaagtataaaggtattttcagaaatagaattgactaagcagaaagttagtat

SEQ ID NO: 835731 - DNA, 635 bp, Homo sapiens
ctagcttgcctctggtgtagttgttttaataacaaggagaaattccttctattagcagtcatgaccagtccatcatttggattgatatatctgttagctgaatttcatgacctaaagttaagacttaaaacttccctctaattgtttggaaattccatatcctgtcgcaattaagttacaagaacttgcactcagtggacaaacactgactcccactctgcacacagtactgtacgaagatgctgaggatataattatgatcggtcctctgtgcaaggcatccaaagctcaatttttcaaatgcttttaagagtgcaacagatgactgtgtttatatgtgcacacacatgtgccagagctgctttactttcatctgggttaaatttttgagtttctaagaaaaaaattcgtaggaatagagaattcattgactgaaagtctgaaaacaactgatgtgaccttgatcttattattgctcttctgtttaacagctttagtggctctcataggccaatgtccagactcattagyatactgcatcatgattttctgcatcatcttttaagagctccagtaaaatggttcatttcccagtttacctgcagagcctcacctgtcctctccaggtgctagcc

SEQ ID NO: 835732 - DNA, 632 bp, Homo sapiens
ttgaatcctctctgcatccttagaataaaacccacttgattgagatgaataatcattttgataygctgttggatttggtttgctagtatttcattgaggatttttgcttttctgttcgcagggatattgccctgtagttttttgtttttgttgtatcctcacctgattttggtgtcaagctgatgctaattttgtagaatgaattagggagaaatactttctccttaattttttgaaatagtttcagtaagattggcaccagctcttctttgtaaacttggtaagattcagctgtgaatccatccgatttggggcttttttgttttaatatttttattattgattcaatttcattactcgttattggtctgttttgaatttctctttcttcctatttcaatcttgggatgttgtatgtttctagaaatttatccatttcctctaggttttctagtttgtgcacatagagatgaatctcaaataatcttttgcctttttgtggtatcagttatgtcacatttattatttctgattgtgcttatttgaatgttctctccctttttcttggttaacctagctaatggtttattgattttgtttatcctttcaaagaaaacatttttcattttgtt

SEQ ID NO: 835733 - DNA, 632 bp, Homo sapiens
ttgaatcctctctgcatccttagaataaaacccacttgattgagatgaataatcattttgatacgctgttggatttggtttgctagtatttcattgaggatttttgcttttctgttcgcagggatattgccctgtagttttttgtttttgttgtatcctcacctgattttggtgtcaagctgatgctaattttgtagaatgaattagggagaaatactttctccttaattttttgaaatagtttcagtaagattggcaccagctcttctttgtaaacttggtaagattcagctgtgaatccatccgatttggggcttttttgttttaatatttttattattgattcaatttcattactcgttattggtctgttttgaatttctctttcttcctatttcaatcttgggatgttgtatgtttctagaaatttatccatttcctctaggttttctagtttgtgcacatagagatgaatctcaaataatcttttgcctttttgtggtatcagttatgtcacatttattatttctgattgtgcttatttgartgttctctccctttttcttggttaacctagctaatggtttattgattttgtttatcctttcaaagaaaacatttttcattttgtt

SEQ ID NO: 835734 - DNA, 501 bp, Homo sapiens
ccatttatgaagcttagctgggcagggtatgcgtttcttggatgacatttattttttctttaagggggcaaaaaataggtccccattctcttccggcttggaagatttattttgagatgtctgctgttactttgaagttatttcctgtatagataattttatgcttcactctagctgactttaagatttgttcttttacattgaacttggatagtctgctggctgtatgcattggtggtgttagtcttgtataatatcttacatgtattctctgaatttattttattgtattagttgtctacatctctagtaagtctgaaaaaatttcccctaattattccctcaaatatacttctaatctttttactttttctttttctccctcaggaatgccrataagtcttcagtttggttggctttatataatcctgtatttcttcaaggctttgttcatttttaaaaaatcttttttttttttttttttttgggctgggatagttc

SEQ ID NO: 835735 - DNA, 654 bp, Homo sapiens
acttcagctttatctcatcttatgtaaatattttgtatatatactgaatgtgcataaatatatacatgcacattagtgctaatgtatttatatatacataatatagcaataaaatattcatatttggggtatataatgaagatttgctaaccccagttggatcccacaagcacctcaaatctaatatgtacaaaactgaactccacaccatcacccttcaaaaacttgtttgtctgcctctcccgtcttacgaaatgataccacctgctgctcacttgcctacattggaagggtcagggtccttcgcaactcctcgttcttcctttcattaacatccatagagtcctgtccattgtggcagccagaagcctttgtcctcttccttcaacccttacaggccccatctggtgtggcttctgctctcctctgtctcgctaattacaagaatctcctaagtgaccttccttcctacagtgctgctgtctcctgacccccagttcaagccgcagaagactgatctttcaaaaacaacaaatcataggctgcatcttcttaagagcrctcagtagtttcccaatgcccttggatacactccaatctcttcttcttcagcagcacagcgcctgctggcatctgtagcctcccctccctcac

SEQ ID NO: 835736 - DNA, 672 bp, Homo sapiens
aagaaaaaaattctgtactttactctccaaagcatcaattcaaaaaacataactacttcagctttttctacaaaaatgctgatggagaaaaagagtcctcagrcatattaaaatgtgcaagggtaatcatagtttgagagaaaatattagatatttttaaagcaaaagattaggaaaggttaaattattttaaaagttttacaaaacgtatttacttacaactgttccagaaagtctccataaaacagtattgttcctctagcgctttacttttagagaatgctgaaccaactgtcctgctctgttactaactcaactgtttatcatgtatgtgtaagcgccaggcacttcttacctctggcaaatatgtaaaagaaggaattcactggtcttatccaatcattctgggaataatcttgttaacattttcacaggctctttttctaaagagaatgtgctttacgcaataaaaattacaaaaataaaaagcagcttcttatcaagcaattttaaaattggagaatccaattttttgtttcctttataaagttataaatgcagattctcaacatatacaaaatctttaattatcttaattcatcgtttgatctgattgctaagaagcacatctgtataatattttttaaagccttaaaattacttgtaggatga

SEQ ID NO: 835737 - DNA, 641 bp, Homo sapiens
gattgctaagaagcacatctgtataatattttttaaagccttaaaattacttgtaggatgatagtttgaagaaagctgagtatataaaaataaaattcagagaaaaaagcaggcatttaattttgtaaaaagaaaaaaagaaccaggtaaacttcctggcagatgccctaaattgtctcccagtaggtccagggcaaacatcattttctaccacagaagcctcaatacggccaatggaagctggtatttctgtttcatggcttcacttctactaacattctactgtgaaggccctgatgtgaaaggagaagaatttaaacagctagattttatagtcagtccttttctaaatcaaagtgcatctttgcaacaattccgatttttccagaatgttcaaaatcaaatgcagactattctaatatgagtgacagaaactttgatacaaaattacatgtcccattactttcactgacagaagcattatttcttcttccatgtgtgcaatactgattgataaggttatagctcaaaatatcacaagaactgtgactggcacttgctttctagccttgactgtctcttatayagctctacgtactttgtacctacatctgtctccacaacaaacatttttaagaagg

SEQ ID NO: 835738 - DNA, 393 bp, Homo sapiens
gccattcttttctgcttttctatcatttttcaatttctgctgcagttaccaaggaaaaatagttaaagtagccaataatgaatgtttaaaacattaaaaaatcataccttatacrtgctagaaacagtaatttcaacatactaggtggacttttggcagtgtgttcttcccatcacactatttgtaatccgaatattcattttgtgtttttttccatgtcgggctgcctttgattttcctagattgttgttgttgttgttcttgttgttgttagtagaggaaaatatacagtgtcattaattctgctgcaagtctctcatggggtggaccttgttaggagtacagaatgatctgattcaatttcaccctgttctgtacagttttcaatgtctt

SEQ ID NO: 835739 - DNA, 474 bp, Homo sapiens
gagcaagtctctaacaaggcactgaayacactgagtctgaggtcagagcctgagtccaccagtggtgggagggtttgccatgttctatggccccggctctttgacccttcccttaagttgacttggtctgccataaatcaagttgctaatccttcatacctgaaccactgctaaagtagctactcttaatcctttgacttcagcttttcttccaacctactcctttcccattagtcaaacttactaaaataccactatttattaaatctattgctttttcaaaaaagtttggggccccacatgcctgtataatatagccatgcttttgctgtgcagcctaatgtttaacactggtttcttggagtcttattctgccctccaaacctgaaagaacagtgtgtgattccagcaagccctcaatctcactgtccctcagacacatggaagtccctctttccttgctcacaagcttcc

SEQ ID NO: 835740 - DNA, 620 bp, Homo sapiens
ttactagcttaaatgctctgtttcaagtgttattatatacttgctaatttggttctttattgtggagaaagagaggcatccaatccccctagtaagccatcttaaagccctttataactattttgttgttatttctttttattcccagggtatttaatggagattttatactctggagtcttagtagaagttcatttaaaatttattaattatccttttttttctggttgccatcttattgtttcgatttttattattttcttatagtctaatatacagctaaattatttgtaaatatttgtacatatatcagaatagaagttattcccgattattggatatccatttttgatacatatttaaaacatatgagaagaattaagttgaatgaaaagtgatttaatatgagaaaatatattgatatataaagggagaattattataaaatgacttcaagaaatacagaaaattatttgacaaaaattcgaacactttcatgtgaaacaagaagtayccatcaatataacagcatacaaattctttacatagaaaaagatttattgttttcaactcttttaaaccaacttgttttatcacttccaaatttgttattattacta

SEQ ID NO: 835741 - DNA, 634 bp, Homo sapiens
gtaaaagttacagttgtctccattcaatactcaagcagttatatttcaagcttaacataattcgagactttaaaatccccagatatgaaaaaaatcctcaataaaagtgattattattaataacattaataatactacttaattcctttcgtatgctcatttttctctatttttgtaaatgaatttgaaaaatacattttcattttctcaggcaccattctatcaaaatgaaacattgctttgcagatttaatgaaaagcaacagttccaataaatgaataggacaagtccaacaaatgagaatggacaaactagtttaagcaaaaatgagaattgtcccaatctcaattttatcctggtgaatcttaattagagttgtggtaagctgcattagtgttaataaggattaatgtcatagtgataagcagaacatacaaatcaataaatgctgctgtatcaatatatgaacagagacgcaaatagccatttgggttcttaacagtgaactwggtagggagttaaatacttgttatgtggatttaatatatttgagaagtaggtgagtcttgcttgtacactacagtctaacattgcctaaagaacagtgctgtgaaacttcacagacaaatggaaa

SEQ ID NO: 835742 - DNA, 576 bp, Homo sapiens
cagattggaatggcctgatcatagcttactgcaccctcaatctcctgggctcaagcaatcctctcacytcagccttcctagtaggtgggactgcagttgcatgccatcacagatggattatctatctatctatctatctatctatctatctatttatttatttttgtagaaacagggtcttactatgttgcccaggccatttgtgaacttatggtctcaagttaatcctttcacttcagcctctaaatgtgctggagttaaaggtgtgagccactgcatcccacactaccctcacttttgatgtggatttgaagttcaggagtctctaagactatcctcaatttcagttattcactagaaggtctaaacagaaatcactggaagctgttatagtgagttgtggtttattacagaaaaaagatacaggttaaagacagtcaagagaggttatgcatgggacagaatccagaaaattattcgtgcagtgttcttcacccagcggagtaatgaacagtgttaacttttctagcaataatgtgtgaaaaaacgtgtcaaccagagagtgctcagtagcag

SEQ ID NO: 835743 - DNA, 614 bp, Homo sapiens
ctagaatatggaagctttttttgactttagtttggaatttcaagtrcaattctaacgtttgttttatttaaaaaatgtattattaaataatctgaaaagtcttcctaaataatttgagagtatttatttgctgacatgttgcgtcattagctccaaacactttttggtgtatttcctacaaacaaggaccttttctagcataaccacaatacaaccatcaaaattagaaaattgacgctgataattttgctgctgttcagtgttcagataatcttcagggtattgtttgtttgttttttgagacagagtttcactcctgttgcccaggctggattacagttcagtcttccaagttttgccacttgatgtctttcagagcaaaaggatctgtttcagaaccataccaccttgtatctagttgtttaccttagcctccttcatctgtaacagtttcccaggctttaactgactcccacaaccttgacagctttgacagttacaggagagttattttgtagaatgccccttagcttggatttgtctgatgtttcctcattcaggtcattcgggttgtgtacctttggcaggaatatcacaaaagtgatgctgtattc

SEQ ID NO: 835744 - DNA, 665 bp, Homo sapiens
tgtggacacatgctttcatttcttttgagtaaataggataggaatggttagatcatatagtaggtgtattttaactttctaagacactgagaacctgttttccaaaatggtatatttctgcattcctgccagcagtatatgagagtcccagctcctccacagcatcaccactcttggtgtggccagtctttttaactttagccactctagtaggtgcttagtgatatctcattgtggttttggcatacattttcttaatgactgttaatgttaagcttctttttatgctcttatttgccatctgtattacctttagtgaagtgtctgttcatatcttttgaccgctttttatggagttctttgttttcacattatgtgtatatgtattatttatattctggatacaagttaggtatgtgatttgcaaatattttctgccagtctgtggctcgtcatttcagtctcttaacagtgcctttcaaacagcagttttcagttttaatgaagtccaaatttatcagtttgtccttttaatatrgtgcttttggtttggtatataagaaatctttgcctaacctaaggttacgaaggtttatgttttcttcttgaagtttagagtttttactacgtatacttaagcataatttatatctacagtttatagg

SEQ ID NO: 835745 - DNA, 602 bp, Homo sapiens
tttgtcaattattctatggaaacaattgtttttttctacccctcaacacctccacccctactttttaagactttttttttttttttgagacagagtcgctctgttgcccaggstggagggcaatggcacaacctcggctcactgcaacctccgcctcccggtttaagcatttctcttgcctcagcctcccacgtagctgggattacaggcatctgccaccatgcctgactaatttttgtatttttcagtagagaaggtgtttcaccatgttggccaggctggtctcaaactcctgacctcaagtgatccacccgcctcagcctcccaaagtgctggaattataggcatgagcgcctggctcaagactttcaaatctaacacattttattttttaatagaatgtattctttaaaagttttagattgtaagaaaaacagaagatagtacagagaattcccatataccctgcatctagtttatctctatcacccaggctggagttgagtggcacggtcacagctcactacagcctcaactcctgggctcaagcaatcctcccgcctcaggctgctgaggaccacaggtgcacaccaccatgcctt

SEQ ID NO: 835746 - DNA, 525 bp, Homo sapiens
attgctccagcactattttttgaaaagactatcctttctttattgaattattcttgcactttcataaaaaagtcagtttactatacttatctgggtctatatggggrcttgctattattttccattgatctatgtatctaatttgccaacaccatgctttcttgattattgtagctttatagtaagtcttaaatcatatgagttctctaactttattcttccattttagttttgtattagctaatctcagttctttgcattaccatataaattttgcaacaattatgccaacatataaaaaaagtttgctgggattgtgactgggattacattgaatccgtggttcaatgtgaaaaaaattaatatctttacaatgttaaatctttccatccatgaacatgaaatatcacccaatctcattagactttcttcaacttattttatcagagttttctggtattccacatacagctccttgatatattttgtcaaatttacccctaagtatttcattttttggtgata

SEQ ID NO: 835747 - DNA, 535 bp, Homo sapiens
tacagcatccatgtggtcactccgtgaatgattctttgttgtttcctcctgtctctcccgtgagattgaaagcacatcaagggcaggcctgtcacaaagcctctttgtgttctgtagctatgcgtggagcgaatgaacaaggttgggcttgtctggacctgggcacggtcactgaatgttcttggcctctgtaaggaagggcatccccttggcagttagcagggcaggcacaaggggcatagcatccccagaacatgatgaagggcacctttgaaaagctagagaggctttggatagagctggaattgtctggtgacacgtgctcattcatactacatggtcattatactacgtggtcttagaatatgtcaaattctcaccttttcatccacccacaattcactgagttcccgttcagtgccagcttctgtgatgggtaatagyagtgggaaacatgcagaactggatgatcaagtttagaatgagatcgtgcctactgtcggagcagtccaggaggggtgaccccaggatccct

SEQ ID NO: 835748 - DNA, 535 bp, Homo sapiens
tacagcatccatgtggtcactccgtgaatgattctttgttgtttcctcctgtctctcccgtgagattgaaagcacatcaagggcaggcctgtcacaaagcctctttgtgttctgtagctatgcgtggagcgaatgaacaaggttgggcttgtctggacctgggcacggtcactgaatgttcttggcctctgtaaggaagggcatccccttggcagttagcagggcaggcacaaggggcatagcatccccagaacatgatgaagggcacctttgaaaagctagagaggctttggatagagctggaattgtctggtgacacgtgctcattcatactacatggtcattatactacgtggtcttagaatatgtcaaattctcaccttttcatccacccacaattcactgagttcccgttcagtgccagcttctgtgatgggtaatagcrgtgggaaacatgcagaactggatgatcaagtttagaatgagatcgtgcctactgtcggagcagtccaggaggggtgaccccaggatccct

SEQ ID NO: 835749 - DNA, 618 bp, Homo sapiens
aatgaaagatctctacaatgaaaattataaaatattgatgcaagaaattgaaaaggacacaaaaaaatggaaagatattctatgttcatgagttggaagaatcaatgttgtcaaaatgtttatactatcgaaagccatctacagattcagtgcaatcctatccaaataccaatgacattcttcacagaaatagaacaaagaatcttaaatttatatatatatatgtgtgtgtgtgtgtgtgtgtgtgtatatatatatatggaaccacaaaagatgcagaatagctaaagctgtcctgaccaaaaagaacaaaactgtagaaaccacattacctgacttcaaattatattacagagctatagtcactaaaacagcatgagactgacataaaaacagattttaagccccttatatattctggttatttattaatcccataaagaccaatggaacagaatagagaacccagaaacaaattcattcatctgtagtgaactcatgtttgacaaagatgccaaaamcatacattgggaaaaggacgatctcctcttcagtaaatggtgctaggaaaactggatagccatatgcagaagaatgaaactagaccactatctcttg

SEQ ID NO: 835750 - DNA, 375 bp, Homo sapiens
tgggcacccagagaagtgggagtcagagaaaacggccttttcagccacaacatttgtgaacatctttcaggtcttggatttttttaaracactgtgcggatggttcccagaaaggtaagcagagaacagaggctgagtacctgatgttgatttaggatcggcaggggaagcaggatgccacactgagaacatctcctcagaatgtcataggctgctttatctcctctaggggagctggtcctgggcttgggctctgacatcaaaagtggatccaaggttttgtttttgcttcttggtgctttctttgatgaactttcagaatgaagaggaaatctgtttatacttcttgtctttggacgaacatctttctccatc

SEQ ID NO: 835751 - DNA, 599 bp, Homo sapiens
agtttccacttgggggtgatagatacagggcacgtctgctcacgttcaactccatcagccaaagcaaatcacatgactgaagccaaaggcaatggagcaggggaaattgctrtaggagaagcaaggattgaataatttcaaacaatgttacgatctacaacaaagggtgttttacaatgccataaatttacactaattttttcttgcactaaattcctcagaatagcattcaaagccgacaataatgtggctctaatctgtatcccagcctcagaacccactactcctttataaaacttctgtgatctagtaacctagtacttctcataattctatgaaagcacttgcatttgtaagcccacatggtcttatgtactttgtctatccttcccgtaacacatttatggactagcgttagtagatttcttgagtttcctcaaatgaaccacactctttcatgattgagttcaattattttctctgcctggtatgttctttagttacctcttaccttgcatcttgaattactgcctgtccttcaaggaccaagtcttcctggtcttggtcgtgaaatctccctacatgcacatagtcagaat

SEQ ID NO: 835752 - DNA, 558 bp, Homo sapiens
atgaggatacatgtcagttgcttcagtcagccttaaagagcttctctatgaaacacctkcaattgactttatatatatattatatatatattagatattacaggtgtataaatatacacacacacacatatatattacaggtgtataaatacacacatatatattacaggtgtataaatacacacacacatatatatatattacaggtgtataaatacacacacacacacacacacacacacacatccctatatattttcctctgaactactgaattttaagtcattactgaagagagtattctcgatccaatgaatctatactcaaatgtttagagcacattataagagtccacaaacttgagacttaattataaattatgcaaaatatacatttattaaattgtcaaaaatagcaatgggatctttttttcattcatcgtctgtcttccacagtagtgaatagagcagtggggtaatagctgggaaatctgaacaagtcattcagctaaaatcccagagatacagtgaggcgcctccacatgcaccagcatgtcga

SEQ ID NO: 835753 - DNA, 571 bp, Homo sapiens
agaaagagagccagaactagtaacactgtgtgtgtgtgtgtgtgtgtgtgtgtgtgtgtgtataaagtcatgtgccacacaatggagtaccagtcaacaacagaccacatgtatgaagatagtctagaagattataataaagctgaacatttcctattgccatgtgacatcacagctatcacagggcaatcacttgctttttttttagatttagtttggtctaagtgtacagcgtttatgaagtctacagtagtgtttatcaatgtcctaggccttcgtgttcactcactgctccctcactcactcacccagggcaacttccagtcctgcaatctccattcataagtgccccagacagctgtaccactttttaaaaatcatttatattgtatttgtactgtgccgtttctatgtttagatatgtttagatacacaaataattcctgttgtgtttcaattgcatacagtattcagaacagtwacagtctgtatgggtttgtagcctaggatcaacaagctatatcatatagcctaggtatgtaacagggtacaatatctaggtttgtgtaag

SEQ ID NO: 835754 - DNA, 517 bp, Homo sapiens
tctctatttttgtgagccaacgtagaggtatggtactgatgatcaaggtttaattatgtggaagaagataacatggaaaatttcagaacagaaacaagagatatttttatctggacaggataggttaaatastgggtgacatacatctcacttggggccactgtggctaaatcatgaccactaatctaatataaacacggaacactttgttgatatttcagccacctgaaattataactcagtagggttaacaccaaattgttttaattaagcgtctaccagctgaacttgtgctcaaaatagaaatttggtttggtatgataaagttgtttttctttcatacctagtgtataggacaatatttgtacaactaagtgtgcttataaatgcctaatttgtaggaataataaaagttactggaggacacataattctttgtactcccctatcacatcagcgtactgttgatcaattattgacaatattgactgatcttgacagtactcggtcttctgtc

SEQ ID NO: 835755 - DNA, 517 bp, Homo sapiens
tctctatttttgtgagccaacgtagaggtatggtactgatgatcaaggtttaattatgtggaagaagataacatggaaaatttcagaacagaaacaagagatatttttatctggacaggataggttaaatactgggtgacatacatctcacttggggccactgtggctaaatcatgaccactaatctaatataaacacggaacactttgttgatatttcagccacctgaaattataactcagtagggttaacaccaaattgttttaattaagcgtctaccagctgaacttgtgctcaaaatagaaatttggtttggtatgataaagttgtttttctttcatacctagtgtataggacaatatttgtacaactaagtgtgcttataaatgcctaatttrtaggaataataaaagttactggaggacacataattctttgtactcccctatcacatcagcgtactgttgatcaattattgacaatattgactgatcttgacagtactcggtcttctgtc

SEQ ID NO: 835756 - DNA, 625 bp, Homo sapiens; identical to SEQ ID NO: 831929

SEQ ID NO: 835757 - DNA, 504 bp, Homo sapiens
gaagatgaggtcagagaagtgggtacacagagtcctgtgggtaacagagactgggaatgacctcagaggcctggaacgcactgagcgtgaagtggccatgagatgcggtcacatggcacccaggcaaacactgatatcatgagaatggcagaggaggaggaacatgaccaggggcaggacaaatcatgcggcatgatttcagaatggtggtttcaccctaaatggacattagatatgctaatcacaaacccacttccagttactctctgcccttgaaagcaaaaaaacatcatttactaacacttattctaaaaaccaaagttgcctgggccatgtgaactgtcattcattcaaactaactttgcctccaattagtttagatgtacctctctaataaagatgacgcactacttactaaatactctgttgtgcctgtcctttgcattttatgaatttaytctctttatagagatgtcagctttttctagttgattgagaattagc

SEQ ID NO: 835758 - DNA, 637 bp, Homo sapiens
tcccaaatgcaggagaaagccaggctgtggggcgggtggctcagtccrtggtgtgcactgctggtggggtgggcagtgggcacgtggccacattttccccacttgatatgccatgttggctgaaaagcaggagagacaattgtgtctttagaaaacttgaaggctggctgaacacggtggctcacgcctgtaatcccagcactttgggaggctgaggcaggcatatgacctgaggtcaggagttcaagaccagcctggccaacatggtgaaaccccatctctaccaaaaatacaaaaattagtcaggcatggtggcatgcacctgtaatcccagctacttgggaggctgagacacagaattgcttgaacctgggaggcggaggttgcagtgagccgagattgtgccagtgcactccagcctgggcgacacagcaagactccatctcaaaaaaaaagaaaaaaaaagaaagaaaaagaaaagaaaagaaaaaagaaaacttgaaggctgaagggtattttgctttccttttagaataaggggcctttccatttggtatcaatgcctgcccttgtcttgagtgggtcatatcccggtcatgggcatactggctgctgccttacctcatgggagagcccc

SEQ ID NO: 835759 - DNA, 637 bp, Homo sapiens
tcccaaatgcaggagaaagccaggctgtggggcgggtggctcagtccgtggtgtgcactgctggtggggtgggcagtgggcacgtggccacattttccccacttgatatgccatgttggctgaaaagcaggagagacaattgtgtctttagaaaacttgaaggctggctgaacacggtggctcacgcctgtaatcccagcactttgggaggctgaggcaggcatatgacctgaggtcaggagttcaagaccagcctggccaacatggtgaaaccccatctctaccaaaaatacaaaaattagtcaggcatggtggcatgcacctgtaatcccagctacttgggaggctgagacacagaattgcttgaacctgggaggcggaggttgcagtgagccgagattgtgccagtgcactccagcctgggcgacacagcaagactccatctcaaaaaaaaagaaaaaaaaagaaagaaaaagaaaagaaaagaaaaaagaaaacttgaaggctgaagggtattttgytttccttttagaataaggggcctttccatttggtatcaatgcctgcccttgtcttgagtgggtcatatcccggtcatgggcatactggctgctgccttacctcatgggagagcccc

SEQ ID NO: 835760 - DNA, 631 bp, Homo sapiens
gctgccctgcctggctcacctaatgccggatgcactgcctatgaatgtcttccccataaatcatggactcgctaggctctctgtgtctttcttaatttgtagttcttggtatcacaaacacccaaaactcctaggaatttttatttccaatttctagacttttcatgaaatatgggaagggtgtaaccagaaggactactacatggtacctttaggtcttgactgtcagtacccctccatcagcgtgagtcttgggcagagctgggcatcagtgaacagacacagtgaccaggtacctggccttcctcaccccttgctgccctctggccctcaaagccttgagcccctcaaaagccagtttgcagcagctctgggcccaggtctgggtggggactctggaatggggtacccagggtggaggcagctcaggaaccggctgcaggagggctgcgtgtcatccccatctccagtcatttagcacctcctgggcatgtctgggaacagggaagagtcagctcagacatgcctcctggtccacaccaaggctactcaccsggcattcggggaaggcctttcagctcactgagaggcacttgcttgccaaagggttttgaacagagcatacatttat

SEQ ID NO: 835761 - DNA, 580 bp, Homo sapiens
tgtagctgccttctgttgagcacgctctgtgctcggctctgtgtarggagtgtgtatccatgaccctatgggatcctcagaacagcatcgtgggagggctgtgggacccctcacactgaaggtggaaacggatgaggaacaggggttggtgcatgtcagcatggaggctgggccaagcctgccgtctccagcaccctcttcatgaaaggaaggtgtgggcaactggttccagggactccgtgcttgtggggacaggaatgtgactccaagttctttgtgaatgatactcaggcagacaagatgaatggcagtctgccgccattccccttggtgcttttgcactgagacccctccttcctgaggctgaattacaccggccgtgaaccccatcgggcagcgactgaagatgactctgcagacccgtgcctttcctcagtcatcaccaggtctgcacagacatcctgggcacttgctctgagccaggcgctcctgatggggtgctggggagactcggtgatgcctcttaccatgcgggaccagcactaatgcccacgggcacccttcaggcaacgtctccctg

SEQ ID NO: 835762 - DNA, 614 bp, Homo sapiens
tcttttcatcaaaacaggttatgaattttaccamcaggcattttgaattcaatgtgctccggccatcacccccaaacctccaactgcagcacccaggacttctcgaaccattggaataatgaggtctctcctgattctgcctctcacgttcctctggtatattcgggtctgctcattgtttggcattcttcttttttcataaacaaaacgtgtgtgtgtgtgtgtgtgtgtgtgtgtatgtgtgtgtgtgtgtgtgtgtgatgaaaaacttgcgtcaaatcgaaagctgtaagtcaaacaagtaattttgaaaagatgtggaaactgtggtttatgtgtgccaagaataaaggctggtaaccagggtttgagttgtaggttgattccacataatccaatcattttttttctagcaaattggttcttgaagttaagctgctggaaacacattatcaatcaacttccctcacgctgtttctctactgcctggtcctttgctcctctgaaagtcctccattaattacacacagtttgctccttgccaccaaagaccctgcgttttccacacaatgggtgaggtatgcaaatggtggaaacccatgaggccaatcaga

SEQ ID NO: 835763 - DNA, 554 bp, Homo sapiens
atttctgctgagaaatgcgtgaatattcacactaagaggaataaataaagattgcaaatggctccacattagatcagaacaggttttgctgccaaatgagttttcggccataataaaaaaaaaattattgattyttgggttgtggcactgcggatgggaggctgtggccctctgctccctccccatgctcttgtgggtgccggggaagacacccagggaagggcagctctgttgatctctggtgttgccaggcggaaacagcctctcccatcccccctgaagtctggcattcaggcacagtcctgagggtcctgggaacctgggtcaatgaccctgtggatcaagagtccatggatggccaggccagcagcccttagggtcctgggtcacatctccatggtgtggaagctctggggacccagggctgagctggcagccacagtggctgtggagtgagacttgaggtgaggacagtggctgattagcagcccaggaatcccaagaaaggaggagcagagacctcccctctgactgtgggaggacacaaaggagac

SEQ ID NO: 835764 - DNA, 622 bp, Homo sapiens
aagacaaggggtctgtggactccccaagcccactaractggctgcctctgcagggaagcagcgggccctgctggggctcctgccttgcgcaggtatgctaggtgcccccacgcctccctcccttaattctcaccatcaccccagaggcagctttagcgggggctcgcccagtgtgctgaagatggtccctgggggagtggaacctcacagtcctttcctctgacccgggccttgtgaacccttccccattcaattccgagaatcaggacgcactgcgctcctttgacaaccctgggggaatctgtaccaagtgacacaactagctcaggaatcccaggctggagaaggagttttgatcccagtgctggctccaagaccagggacatctgccaccagggcctcgcggggctgtagagaggctgctcagcaggatgcctgctcactctgttcttctgattattgtaaaaccacctttaaaaccatgattcccaatgggttggacgcattagcaagtctggattcatttttggacaaggaaacaattccactatttcctgtaacacaaactaacgtattctatgacattccttagatcggacgtctaaattggaaaatacacttt

SEQ ID NO: 835765 - DNA, 622 bp, Homo sapiens
aagacaaggggtctgtggactccccaagcccactagactggctgcctctgcagggaagcagcgggccctgctggggctcctgccttgcgcaggtatgctaggtgcccccacgcctccctcccttaattctcaccatcaccccagaggcagctttagcgggggctcgcccagtgtgctgaagatggtccctgggggagtggaacctcacagtcctttcctctgacccgggccttgtgaacccttccccattcaattccgagaatcaggacgcactgcgctcctttgacaaccctgggggaatctgtaccaagtgacacaactagctcaggaatcccaggctggagaaggagttttgatcccagtgctggctccaagaccagggacatctgccaccagggcctcgcggggctgtagagaggctgctcagcaggatgcctgctcactctgttcttctgattattgtaaaaccacctttaaaaccatgattcccaatggrttggacgcattagcaagtctggattcatttttggacaaggaaacaattccactatttcctgtaacacaaactaacgtattctatgacattccttagatcggacgtctaaattggaaaatacacttt

SEQ ID NO: 835766 - DNA, 570 bp, Homo sapiens
ctggggcgggatggcctcccgtggacactggggacgcctcccctcctcttggaaaatgcgtgtttctctcgcagtattgttctcagcacccgaacacaagctcttctctgcagatgaaaacttatcatttcatccatgtggaggctacttttacagactttgcagctgccctacaaaaggcttgaattttcacagcaagaaaatggataatttcataaagctgaggctcctgtttccaggctgccttgtagatcttctaggagcaggtgcaccgctctcctcaccgccctgctgggaatggctgttcaggcctcctggcgtcttcaaattgaacccgagaaggatcagagctgcagccgcgcaatcacagtctcgccgtatgtaagtcaggacgtcctcagagcgctgcctgcaccctctgggtagaagtcggcggaragggctctgtggctgttcccagtgacatgggcaccaggcagactgagaggaacaaacggcactgtccccaggggagtttgaagcaaatccagccacaccttgagggaagagtgactcacgtgcaaaatttgt

SEQ ID NO: 835767 - DNA, 450 bp, Homo sapiens
gcatgccagagccatggtgcccacgtgagacagtggggaggggcatgaaattttctcctactgttgttctgtgcccctttagcattcctgctggccagatccagtcataagcagaaggcaggggagccctgggtgcagcccaggtgaagcagtctctcgctcctgccaagcaccaagcaaagcaaaaactcaaacaggtccaggtggcagggcacagagaacagccagcacagttctccccctcaagaactttccacaatatcttccaagttctgaagccaacatcccgggagaaagctggttctgggctgaacagtacttcaaggaggagatgctcctccaggcaggaggacccattgagaktggcatctggggcacctggctttttagaagccttcttccttctagaaagacttcagcatgcttcatctctttctcagggatgttgag

SEQ ID NO: 835768 - DNA, 539 bp, Homo sapiens
ggctgaggcctggtctaaaggaaggctccgaggatcctgggtagagtttgctcagacagagtctctgtcatgaagaagccaaaacagaggccctggccaggagacacaattctctccagcccagaaccacttcagagcacttgccaaacaagatctaagatttgtagcagcaagctcttcagcaggctgacaaatacttacccgtgaaacagatcactgtttgcatgcggagcgccgccctctggggatgcagctcctagttgtggttcctcatttgttatgtgattgaaatatgaaaatcatttaatctggctacatagcttcaatatattgatattaactataaaaacaaattccgtccgcaggccaaatcagcagatgggtttcaaacattttaggaatataaagaggtcacttggcatgcggtaactcagataagcactgagcccagtgcatagcaggaggcccagggagtggcctcattcctttcccccmacctcctgctgtgtccttgtcatttctgtacacaataaaatctg

SEQ ID NO: 835769 - DNA, 489 bp, Homo sapiens
cctctcaaagtgctgggattacaggcgtgagccaccttgcctggcctgaggtatccttatatcccaagaaagagccaccttgcctggcctgaaggaagtatccttatatcccaagaaagctgtactcaagagtataatattgtaacaatcctaatatttggaatgtaggataagaacatgagagtggacagcttagtgaaaataaatttaaaaatttcaaataaaacaattagatttaaaaaatccatttataaatatcttagtataagaaacaaacaggttgatcacaaactgtcagaaaaatttctatattaagaagcaatgtatcgcaaatatcaaactaggaatattaattgttgaaataattcttagtttcttaaaacctagacttaagagttctaaattttctattgtgtccttcattcacaaattaaaatcccccaaattaacwacaaaatcaactgaaaataattcaaaagaaatcaccgt

SEQ ID NO: 835770 - DNA, 627 bp, Homo sapiens
attttttgtatagacaggttctcaccaatttcccaggctcgtcttgaactcttggacttgagtgatcctccctccttggcctcccaaagtgctgggatcacagrcatgagccaccgtgcctggcttaattttgttgttgttgttaatagataaattgtccttgtggtttctatattagtcactttcgagctttgttaaatggatcaacaaccttatatcccatcaactcttaatagttgactcacttgagtttaagttatatatcctggagcagtcatcttgacttttgctatttaatgatgtttcttgacagttagcaagttatatagcttgttctgggtgaaacccttctgccttgcatctttacccatttgtattccatttttacagtgatttatttcaaggcaatgaggacaaggaggatgcaaaatcaaaaaaggcattggatttaatggttaaaggtggtgtataagggacaggaatgcagtttgagtaaaatggtgaatacttctagataggcacaaaaattttatttcccctagttcactttttaaaaattaataaactttattttttagagcagttttagctttatggcaaaattgaggggaaagtagagttcccata

SEQ ID NO: 835771 - DNA, 509 bp, Homo sapiens
actttccaatgtgttactcagtttggggaattattctgattcttttggttaaraaatttaaggttaaaattgtcaatgtttgcctatttttttttttaaaaaaagaagttggcagcaaaagtcactaaactcccagattttgagtgaactgattaacatgtaatttcagtttttatggaaagaaatttggaatgttgtctacttcctcctaatttaggtgccttaattcaacatttgaaatggaaacatacagtctgtacaatcagctaattaaggattatagagatactgtcttgtctcttcttttcaaaaaaaaaagcatttgccatccagagattatgaatagtggttacaggtagcattctcatctttctatccttctttctccttttaccttctttttcattgtcattccttcctccccactgtacttcccttccttctgctcatcttcccttcagtcttcttgctgtttaggtttaatgtgcaaatggtttaggtaggttgcc

SEQ ID NO: 835772 - DNA, 449 bp, Homo sapiens
aagagaatcaatgcagaaaacttcactgttgtcttattttaagaaactgtcagcygggcgcagtggctcaagcctgtaatcccagcactttgggaggcagaggtgggtggatcacctgaggtcaggagttcaagaccagcctggccaacttggcaaaaccccatctctactaaaaaatacaaacaattagccaggcgtggtggtgggcacctgtaatcccagcaactcgggaggctgaagcacgagaattgcttgaacccaggcagcggaggttgcagtgagccgagatgacaccacttcactccagcctgggcaacagagagagactccatctcaaaaaaaaaaaaaaaaaagaaaaaagaaagaaaaagaaaactgttggcctggcgcagtggctcactcctgtaatcccagcacattaggaggctgaggcgggcagatcacctgag

SEQ ID NO: 835773 - DNA, 606 bp, Homo sapiens
aaaaatagggagttccttcaatgtattctctgtggttttataactacatgagaactacttgtaccagttccccacaaaaagagaaatatatgtacatratagtagacatttatttgagtaccacaaggtgcctggcatgtagtacattatctcagagtccatctaaaaatcaaatgggggtacttattatactatttaatggaaaagaaaaataaagctcagaaagaaaagggaaggtgcctaaattcccatacttggagtagatagcagagatggtattaaaacccaggcctatctgatgttatatcttgccactgtatcaccctacctactataaatacatgaaagtgtacacaatcacacagagagggtacacggtgccttacctgctcaatacaatctttggataatggtggtgaaggaaatgaagcaaaaaccaggactccaatatagagataagttaatgtcaccagcatataagcaatgcacaagtccctcacctgtaaatacagaacaaaagtcccataatactgaagaaccttgtagtaagtctaccttaataggctaaggagactaacaaataaatataaaatttgtctttttacc

SEQ ID NO: 835774 - DNA, 606 bp, Homo sapiens
aaaaatagggagttccttcaatgtattctctgtggttttataactacatgagaactacttgtaccagttccccacaaaaagagaaatatatgtacataatagtagacatttatttgagtaycacaaggtgcctggcatgtagtacattatctcagagtccatctaaaaatcaaatgggggtacttattatactatttaatggaaaagaaaaataaagctcagaaagaaaagggaaggtgcctaaattcccatacttggagtagatagcagagatggtattaaaacccaggcctatctgatgttatatcttgccactgtatcaccctacctactataaatacatgaaagtgtacacaatcacacagagagggtacacggtgccttacctgctcaatacaatctttggataatggtggtgaaggaaatgaagcaaaaaccaggactccaatatagagataagttaatgtcaccagcatataagcaatgcacaagtccctcacctgtaaatacagaacaaaagtcccataatactgaagaaccttgtagtaagtctaccttaataggctaaggagactaacaaataaatataaaatttgtctttttacc

SEQ ID NO: 835775 - DNA, 588 bp, Homo sapiens
gctataaatttccctcttaacactgccttagctgtgtcccagggattctggtatgttgtgtgtttgttctcattagtttcaaagaacttctttatttttgctttaactttattatttacccaaaagtcattcaggagcaggttaattttcatgtaattgcatggttttcagcaattttttaaagtcttgatgtctatttttactgtgtgatggtccaagagtgtgtttggtatgagttccattaatttgcatttactaaggattgtcgtatgtctgattgtgtggttaattttagagtatgtgccacgtggctatgagaagaatgtatattctcttgttttggggtggagagttctgtacaggtctattatatccatttggtccaattttgagtttaggtcctgaacatatctgttaattttctacctcaataaagtttgtaatactgtcagtagggggttgtagtctcccactattattgtgtgggwgcctaagtctctttgaaggtctctaagaacttgctttatgaatctgggtactcctgtgttgggtgcatatatgtttagcatagttaggtcttcttgttga

SEQ ID NO: 835776 - DNA, 593 bp, Homo sapiens
gttaggcacactcttgtataaccagctgttttcactcaacaatatgtcatggacatttttccatgccaattattcccaatctacatcaccatttaagcggccggcaaatactccattatacggatgtattctaaattaatcaaatccccattgataaacatttagtgttgcggtcaagggcacagactctggagcctcagagcgtggcatcattcctggctgtgcaactccccagctgggtgatggtcagcagaaacctagcatctctgagaagtttcctcatgtattaaatggaggtgcggttgtccctcggtatgcgtggggaattggttccaggagccccataccaaaatccacagatgctcaagttccttatataaaatggtgtgatatttgtatataacctgcacacatcctcctgtacactttaaatctctctggattacttataataccccatacaatgccaacacttcatttcattcttgtggattcaatgtagtagtamttggcgcatggcaaattcgggttttgctttttggaacttggcggaatttttttttctggaatattttccatgcatggttggttga

SEQ ID NO: 835777 - DNA, 593 bp, Homo sapiens
gttaggcacactcttgtataaccagctgttttcactcaacaatatgtcatggacatttttccatgccaattattcccaatctacatcaccatttaagcggccggcaaatactccattatacggatgtattctaaattaatcaaatccccattgataaacatttagtgttgcggtcaagggcacagactctggagcctcagagcgtggcatcattcctggctgtgcaactccccagctgggtgatggtcagcagaaacctagcatctctgagaagtttcctcatgtattaaatggaggtgcggttgtccctcggtatgcgtggggaattggttccaggagccccataccaaaatccacagatgctcaagttccttatataaaatggtgtgatatttgtatataacctgcacacatcctcctgtacactttaaatctctctggattacttataataccccatacaatgccaacacttcatttcattcttgtggattcaatgtagtagtaattggcgcatggcaaattcgggttttgctttttggaacttggcggaatttttttttcyggaatattttccatgcatggttggttga

SEQ ID NO: 835778 - DNA, 536 bp, Homo sapiens
ggatccctacctcacaccataccccaaaatkaacttaaaatggtggatcatacactaaagctaaaactatcaaacttagaaggaaacataggtgcaaatctttatgattttggattaggcaatgattctttagacatgataccaaaagtacaagtaaccaaagaagaaatagataaatttgacttcttcaaaattaaaaacttttgtacttcaaaggatgccatcaagaaaatggaagacagcccatagaatgatagaaactatttgcaaatcatatatgtgataagggacttgtagtcagatataactcttacaactcaacaaaaagaaacaaataatacaatttaaaaatgagctaaggatttgaatagacatttctttctcttttttttttttttaaaaaaaaaacagagtctcactctggcaaccaggttggaatgcagtggcatgactttgactcactgaaacctttgccttctgggttcaagtgattctcctgcctcagcttcctgaatagctgggattacaggcatgtg

SEQ ID NO: 835779 - DNA, 673 bp, Homo sapiens
atcccggggagcctgttctgcacctgtgctaagtgattcttttcattcagcatgcagtctgtccctgtctgctgcctgccagtctttcccccaaagtcccttcctgcttgaaaccctccttccctaaccccagagacacccctggcctgcactgccagctctttcttctgaaatacacctctccaaccggcccccatcagtctgctccattatccacctggaaccaacctccaaacctctgcaagggcagatgagagtgtctcctccagccctgttttccatggactgctttgggcacggatgaaattgttcagcttatcctgcaagttcctctgcaagactgcttatgtgctctagactcatagaacctggaattgaatcctagccctgccacatgctgcctcagtttccgcatctaaaataggaatagggctgctgacgtcaagggatcatcatgaggatgaattgagagaggaatgccagggggctgatacgcttcaaggagggggtccaggaaagagaaatgactttgaggaatgcaagaatgtcccctctgaccttgcacgtggcggtcttccggcctcaggacaccctccyccacttcccaagcctgggctaatctggtattctccaactcacttcctgtcctgtaggttagctcatcatctcatta

SEQ ID NO: 835780 - DNA, 625 bp, Homo sapiens
atatattgtcacatatgtcctgagttgtctcatacaacctcattatatgatgtagaacctgaagcccagagttrttaagtaaacttagtcttatagacattgtttgattgtatccatagaaattgctcataatatatcttttaataaaatacaataaaacagatctgtcttaaaatatagtgttcttaaatactcttacagaatattgtaatgtgtttatgttaaagtgatgttagaaatttcacaaaattaacggcccataaactctcaaagatcactcatgtcacttctcaagcagggcaggaggatcccagaagtgactgaagatagaaggaagaaataacgtttgctatacggagagtaatttatcttgtttatatcaactaggcacttggtcattaatattggtgccaatagaaagtgatgtggcaggtcattgcattgaaaaattgcaggaaacaagtagaaaataaagaaatcagtgccccctaaagtcgtgcagcctgacagcctttagcatatatcctttgtattggccatcttctgagtggtattttataatgcattaatcactacagtgtgcttataagcttaggttactatgtgatctttaaatgtctaatgt

SEQ ID NO: 835781 - DNA, 629 bp, Homo sapiens
agttgtaatgtgattaatttaattaccacaaattctgtatatgcaaaatttattcaaacagcaaaacagtaaaatgaggaagacatgtacaagtttatacacttcaatacttcaggtcktttctgaaaccccacctggagtaaagaggagtcatagatttgttgttgttatttttatttgtctctcttgcttcttgttatagtgtttcctacttggtttatataaagctggaatacttaggtgaaattcattgaaattaatgtatttacagtttttggaaaagtgatttttagtgacgatttttattttttttatatttcattgtcatttttgtgagacaatcccaatagtaaaatgccaaatgtacttttgtaggagagaatattgaagcaaagctcacaccaactaagtaattgctaatcgtcttccatgaggtaaactcagtaaagtagtatttttgttacccaagagtttcctgtcactgtgtgcttccctggcgcacatttggaggatgtggaggtgtctctggtcactgtggggggtgcatggcaacatattcaacttatgtgcatggcatttgaggttggggcatggaaaaatactgaggcactgtctgtatgtattttgtg

SEQ ID NO: 835782 - DNA, 583 bp, Homo sapiens
catggaggtgaaagggatattccagaaaagctgaagayaataaagcataactctgttccttagcaactacacattatatttacttttcacacctgcctctctgacagcagtgacaccctcttctcaacttaaaaaaatttcaaagatgaacaggctgcacttagttcttatagctccatttcctcagtttacagttcacagcacagactatcagaatcatagagtcacaaatataagggaggttagatgctgcaggtggtttgttctaagctatttattttaaatctaaagaaaacaaggcccaggtggttgaaatatatcagtgagcttgtgcatcttcagcacttttttatcacttattacacttgttcttatacatgatttttactacacttgaagtttttttagtctttttttccttagcttttttagtgcttgacacactgaaaatgctcaataaatgttcatcaaattgaactgaatttttgaatagaatccagtcataatgtaactcctggtcttgtcatctttccattattccaggttttcaaattatgcttcaaggaatctcattggcaataca

SEQ ID NO: 835783 - DNA, 583 bp, Homo sapiens
catggaggtgaaagggatattccagaaaagctgaagacaataaagcataactctgttccttagcaactacacattatatttacttttcacacctgcctctctgacagcagtgacaccctcttctcaacttaaaaaaatttcaaagatgaacaggctgcacttagttcttatagctccatttcctcagtttacagttcacagcacagactatcagaatcatagagtcacaaatataagggaggttagatgctgcaggtggtttgttctaagctatttattttaaatctaaagaaaacaaggcccaggtggttgaaatatatcagtgagcttgtgcatcttcagcacttttttatcacttattacacttgttcttatacatgatttttactacacttgaagtttttttagtctttttttccttagcttttttagtgcttgacacactgaaaatgctcaataaatgttcatcaaattgaactgaattwttgaatagaatccagtcataatgtaactcctggtcttgtcatctttccattattccaggttttcaaattatgcttcaaggaatctcattggcaataca

SEQ ID NO: 835784 - DNA, 427 bp, Homo sapiens
tgagtccagcagccacgctaatcgtttttaactggctgatgggtgcccggttattttcctccaattctaaggaaggataggacagaatagcaagtgaaagtggttcartattactcaccgctttggagaagcgccgtacgggccaccaaatgttaccggcgggtctttgttcttagagttcccaagatggtggcaggccactcccaagatggggcgggctgctcccaagatggcagcaagccttttgttctctgacctggggttcttggcctcacggattccaaggaatggaaccttgggccatgcgatgagtgatatagctctattagaagccatgggtcacagaaggaaccatggaacccagtgactagtgttcagctggattaggacgaacctgggcacttagccgtgcaggaacaacggcaag

SEQ ID NO: 835785 - DNA, 606 bp, Homo sapiens
ttatttttggagatcatgaaatctgtattaacaaggacttaagtctttagttaactataaatatttatagaaagaaagaaaaagaccatttatgttaatatatatgttaatattttaagctgtttatgaaatataaacatcaagaataaatcacagctgaatcagtcagtgcccccagtgtaaaacggatggacactgaaaggggtacttgtagagaatttaataaaagaactatatacagaagcataagccagggtcaagggagacagtgacagatgaggaagctcccagggaccagcacagctggaagttgctatcaaacctagatcttgaaggggcagggggagaaagcatttggcagaacctgtcaaaatctataccataaaaaggatgggtcatctgaaacaagctatgaccttaggaagaagacagccacggccaaaccatggcccaagaaagaggaagcaagggtaataaaccccatctgttttatattgccctstgatctcctgctggcacattcagtggttcaacaaacccatcaggaagccagaagaaaatgggagggaacaaagcttatagagtccatagaggtagacctcctag

SEQ ID NO: 835786 - DNA, 640 bp, Homo sapiens
gcttcacctccctgacaatggtttctaggcacacacctccattctgttcttgcttctattggtttctccttcatcactcgtcaataagaaacaacaacaaaacccaggcrtttggccaaatgacctttccacctgtcttatctttctgtctgatttcattctgtgatgacagaatggaaaatccttgaaggcaggtgctatacttattcataatttatattcaagaccaggcatcttttagatgtttattaaattttatataaaagcattaaaaaactttgatggaatgaccctggaaatactttatcttctctttttattttcttcttctcttttagtggctggtagaaaaaggaaaaggttggggggtaagtcatttagatggggaaagacatttctctaaatgtcaatacttatgaaacaccattttacacctttataaatgattatcttcctcagtactgatgaggcagtttcacattgctgctcaatttatttactcaggagaccaatttatttcactacctctgtactaactgtttgcattgacatctaggtctgctttgagcaagcaactgtgacaagttgtttattgaactgtaaacaggtattgtctgaagctaaacaatggctttatcta

SEQ ID NO: 835787 - DNA, 584 bp, Homo sapiens
ggcctcccaaagtgctgggattacaggtgtgagccaccgcgcccagccagatttttcacttttatgcatcktgagcagaatgtttgtttctcatatgtggtagactttctcaaagtatttgaaataatacattttttttttactaaattgcatttttatgtgaaaaactcccctaaagaaagttacattttcaaactgtaattttagattgaaagcacttttgtgagtgtttattttctctctttaaagtcttgtagcaaaaaaagaaaaaaaagtattgtagtcatcttatggcatatatattttgaagtcggtagcattgttatctgtagaaaaacttttctttttaattgaatatctacttcttttaaaaacctctttaccctagtgcacagtttatttcagggatagctataagtgtttctaccccatgaaatatgaaatggaagagagaatattaagattttaaaaatatgtacatgtttagcaatagaaacagcatattgtatcactttcagtaatatttgtcatattcgataaaattgatttcttccctgtttaatagctttgactttctataccca

SEQ ID NO: 835788 - DNA, 608 bp, Homo sapiens
tagagatcatttactcaacggattttcaaacgtatcttagctcaagaaccttttccacaaaagaaagcatcacagaaagcccccatgtgaaagaggtaaattctgagccaccctgattgaaacaggaagggagatcctgagctgctccacttctctgcttcccccaggccagcccagggcagtggtccctaaatcatggagctgatttagggaagtgaagcttagttggatgctgtattatgcaggatctgaatcctgtataaggttttgctgagcatttcgacaccagactaggagcatttgttcatgtttccctcagatggcccctctatgaataggctttgaacacgcacttccttttttaaaaaataacttgtattataagtttacatccatagtcatttacatcagtaagaataatgtcattagagaataaagaccataggatttggcatgcagggttatgggtgtcatagtagccccagcaccatttttatatcttgttttgattrtaagacatccaaaaactactggttgctgcaaaaggtaatttttcaaactattttattgaggaaaaatttatagaccatgaaaacacacatattaat

SEQ ID NO: 835789 - DNA, 491 bp, Homo sapiens
acccatcttccaggaagagtgggctgccccaggcgctgacgttaggcatggacacctgcctccaggctgcaaatcaggatatcggctaacatgccaccctccaaaggagccacttttccacttttccaaagatttttttcgatcgggaataactcttcatttcataattagaaatgtcttcaaatcaatcccccgtggcaagataaaagtaacaaatataacaagttaagtattaagcatagtacttgctatgtgcaggatattattctaagtgcattacatacagcagttcatttaattctcacaacaaacctgtgagtaaagtactattttataaatcccattttatacatgagaaactgaagcacagagacaytgagcagctggcccaggttacacactagcagaaggaccttttgacccagtaatctcacttctgggaataaattaaccaaaaagagtgaaaatttatatacacaaatatatttgtg

SEQ ID NO: 835790 - DNA, 612 bp, Homo sapiens
aaattgatatttctctttaaagaaagacacattgccaaaactgaggaagaaagcttgtttttaaaagattaccataaaagaaacagaaaagttaaycaaaagatttaccccccatctccaaaaagaccaaggcctagatggtcatgggcaattttattcaaataccaagatgttgtcatacctatgtcacttaaaatgtcccagagaataaaggaagatgatggcttctgtttcatgttatacataaccatgatataacaacattacaaggataccacaaactgggatagaaagccaagctcacttctggatataagtgcagatgtcctaaataaatacaaacaacctgaatccagcaatgtactaaaaggacaatacctcataaccagataagatttattccaggaatataagaatcattccacattaggacattcatcaatgtgacttactacataaataaagagaaaataatgttatcattttgatacatgcaaaaaagatacttgatataaataaaatgtccatacttttttcttttcttcctatttttttggtggtgaaatacatgtaaacataaaatttaccatcctaaccattttttaagtgtac

SEQ ID NO: 835791 - DNA, 574 bp, Homo sapiens
tagagacggggtttctccatgtagtccagactagtctggaactcctaggcacaagcaatccatctgcctcgaccttcctaagtgctcggattacaggcgtgagccactacacctggccaaacattttttaaaaatcaaaaagacatgctcacttcagtgacatcaagtaggacaaaagacaattcaataagttgatgatattttcagctttgatggaacgcatccacagcccctggcagagctcatcatcagggtcaggtccctgaaatcatccatgtcaggtcccaaatatcccgcttgtaaaactgcattgcattccatttacccatctcagaaagatagatggcgccatcagcctggttaggattggtttcagtgaccaagcatttctaatgagaacacactgcagaaaccaaccacttccttgcataagacattcagctacaaaccctggtggttaagctgcgatgggttctgccagctttgagcttgggtcacagacctgttcaagggcaagtgttcttccagcactccgagaaagagatgsctgttgatgcagatggcatcatacgaa

SEQ ID NO: 835792 - DNA, 598 bp, Homo sapiens
gtctaaggtgtctgttgtccttaggattatttctttgagcaaaaatgccaggagtggaattcctggatgaaaagataaggttgttgaataattattgcaaattctttgcaaaggttatgtaataatttatatgtcaacatcactgattagatttccttcttcatactacgtggagttcatttaaaaacaaaaataaacattatacaccatattctgctataacacaaatcaactatgctccctaaaccaaaggaaactgcagcgtgaagtcctttgacacaggggctgtctctttttttccatcatttcttgacagtagattaccaattgtaagtaataaaaccacctagaggggctgcatttcagagtagagctcaaagctagacagctcctagtgtgatgccctttttggctggctttctgtccaagtaattccatctcattcatgttcaatcaactaggaacttctactagaattttgaaaatgatttgtcattagtgrtaaatagtttaaaatgtttaaaggcaaagtggcactattaaattttaactttttcattcatttatttcttactacacatattaatagcagaaacat

SEQ ID NO: 835793 - DNA, 598 bp, Homo sapiens
gtctaaggtgtctgttgtccttaggattatttctttgagcaaaaatgccaggagtggaattcctggatgaaaagataaggttgttgaataattattgcaaattctttgcaaaggttatgtaataatttatatgtcaacatcactgattagatttccttcttcatactacgtggagttcatttaaaaacaaaaataaacattatacaccatattctgctataacacaaatcaactatgctccctaaaccaaaggaaactgcagcgtgaagtcctttgacacaggggctgtctctttttttccatcatttcttgacagtagattaccaattgtaagtaataaaaccacctagaggggctgcatttcagagtagagctcaaagctagacagctcctagtgtgatgccctttttggctggctttctgtccaagtaattccatctcattcatgttcaatcaactaggaacttctactagaattttgaaaatgatttgtcattagtggtaaatagtttaaaatgtttaaargcaaagtggcactattaaattttaactttttcattcatttatttcttactacacatattaatagcagaaacat

SEQ ID NO: 835794 - DNA, 650 bp, Homo sapiens
agttccagattgtgtgaaatgcaccaaaaaaaaaaaaaacaaaaacaaagaggttttgacatagtaagtctactaatcrctttttgtgactggaattagccaacagttagctttgagtagaaaagattaagaatgtcacatatttaatctgaggaaagagaaattaataatcccgcttctattcctgccccttactatcaaacaccatattagctaaagccagaaccccagagtaataatccagaactctgacatagcctagaggatggccattctatggaaacatatatggtgcaactgtgagatgtcaaccagacatacagaagttgagactgagttgggagccagaaaggtggagcagcagtgagaaagagtaaagtttgagtccaaaaccatagcaaaaatggatttgaggaatgttccaaatctcccacactctgctgccagagcccagcgttgcatgagaactgaatgctaattttccttttaaggataatagctatatttccttactcaagtactttataaatgtcataaggtgaagaaaattttattatttaagcagttgtctcctaaattcctcttagaagaatcatcttcctttggagaaatatcttgataattgattaggaaaaaaagctctactaggg

SEQ ID NO: 835795 - DNA, 614 bp, Homo sapiens
tggtcatatgttttcttactcttgtccttttggttgtcccaaytaattattctattttccgaatgtttcctatttgtagtattttgtggccacctggttggtctcagtgccattgcttctactgccctggtatataattgacataactggtagacttgtgtgtcccaaagcacaaagctgagcttcactcagaaactttggaggagtaatttcttatttgagtacaattattcagagcatgcctattattacatattgggcagaagtgggggaagaaggagttacgaagattgtcccactaattagtaacacaactattcaatgcttatgaaatttttctttcctgtgtgagcttgcaccagtcgtcacccatctgccatcttctacgagatataataaggttagggagatatttgtgtcttacttttgttttaagtaatccagaattccaaggccaaaatctaaaagaggacagggatagatacaggtagaggtgacaattgtcattgttattgttctcattttacagatgtgaaggcttagactggaagactttaaatacttgtccaaagttttagtgttggagtaaaaggaagagtcttgaattgaaccct

SEQ ID NO: 835796 - DNA, 537 bp, Homo sapiens
acatagtactctaagtcctatctagagcaatcaaaaaagagaaagatataaagggcatccaaattgaaaggaagaagtcaaattatccttgtttgctgatgaygtaaacttacatttggaaaaacctaaagattccacaagaaaactactagaacagataaacaaataagtaaagttgcaggatacaaaatcaacatacaaaaatcagtagcatttctatatgccaacaatgaaaaatgtgagaaagaaatccaaaacagtaatcccatttacaatagccacacataaaattaaataccttggaattaaccaaagaagtgaatgatctctataataaaaactataaaaccctgatgaaggaagttgaagaggacaccaaaaaaaatggaaaaatattctatgttcatagatgggaagaatcaatattgttaaaatgtccatgctatccaacacaatctacagattcaatgcaatctctatcaaaataccaatgacattcttcaaataaatagaaaagaaaattataaaatgtatatg

SEQ ID NO: 835797 - DNA, 676 bp, Homo sapiens
tcacttggaaatcttaaaggaacattgaacgtggggagccaaaatgggatgttgtatttctcaactttaccaacttctgaagacatttatttaacaattagctataattaatcttcctaattttggtgacaaaaattgatgagaaaaagtaaagcttctggtgagtctcatggtgactgagctctgctgaaagaaaatggacaaattattaagctagagttaagtctggcagaggaaaattcagcaggcagaacccagaaaatcaaactgaacaggctgaattgtctgatgaatgagtcagaagtgggtctgattccctaacctccatcagaaaggccacagcaagcttgctgctcacagattgctaagccgcattggctgctggcagaggacaaagtcagtgaaagagtgagtcagactccacctgggtttgtgaattttttgcagtttgcaaccccattttctcaataactgggctgctgacatttatttgttcactctattaataaaaaccatgctgctctcagctcagtaacattggacagaacatagttcactgcttccttggaaaaagcaaaatagccagcaatcagaattacccagaactaattggtaaattgtgtggggagagtacaggttatcaagttcaggatccragttcagtcacaaagtgtgc

SEQ ID NO: 835798 - DNA, 580 bp, Homo sapiens
agaatctgctcaagaaaattcatgcccagtcaaaaccactaccaatttcagttgggagcgtcctttgcctcatgacccctaccctattctgctgtctcttcttctctctcttgtctcttctgacatgattatcattagtttcacttatgtatatgctacaaacacccaatgtattattgttatcattgctttaaagaggtggttatcttttaagttaattaaagtttagaaaaatagtttatctttatttactttcctctctaacagtcttcctttctttatataaatgccagtttttgacatatgttagtttccattcctctgaagaacttttaacatttcttgcaaggaaggtctagtggcaatgaattttcttagatttttatctgagaaataaatagtttatttgagaaagtccttatttctctttcacttttatgaaatgatttgactacatatagagttgtaggctggctttttttrtttttcttctgacagtataaagatttagctacactctctgcttgcatggtttcagatgtaattattttctttttcctctgggtaaggtgtttaacta

SEQ ID NO: 835799 - DNA, 563 bp, Homo sapiens
acaaatattagtcattcctaaccttacctatcattctaatatttttggaatatctaatctttgcctgtgaccttactctgatagtakagtctgtattttcagagatgcattctgtggttgcaggtgttaaacgtcatacatataggaatacttatggccttatcattttgtaaattcttatggctaatgataacatcagaggtaaaaatgactctcccttctctgatacacttcaaatgttgcttggcacatttataaagctcttattgcaacaatagagactgaattctaccaactttgcattacaaattcaacagccaggagcatgtgtctacctaggcctgtgaacacaactctacaaatgaacctattttccaagaagaataccagtcttatttcctttcaagccttaatttccaaactctaggagactattctttattgtagctttcacaaatgcttagcggacactcacatgcacaaacacacacatagcatttgccaatcagaatgtcctagaaagagtaaacatcattgttttttaccctcattgcaaaagtgta

SEQ ID NO: 835800 - DNA, 228 bp, Homo sapiens
gaaaaaggaattctgtttacctttgggcatcctgtggaatgctcttcctgttactcttcttggtctgaggcaggtacccttattaaggctccaatagcatgtggcggcctctctcattttcctatcactgtattctaattacctggaaacttgcccatcktttccaccaagttttaggctacattatgacaaggatcctgtttgccttgcttactgtttcatttcttg

SEQ ID NO: 835801 - DNA, 602 bp, Homo sapiens
ttggatgcagtcaatcatgcttttcacagataaccacaaaaaaaagaaagatggtgaaatagtcaaaaaatattaagacctgaaggcatatataaataaaataaacacagaccgtttgtatcttgctcacagaaaaattctgatctcactcaatagtttttttttctaatacccaagttgaattgttctttatcaaacagaatattaaaattagttttcactgtcttagatttaagtgaggaatgaagccaatagatattacatttcagatttagactgtgatactgacagcagatcttcttcaggtagtcagtgataaactggcacagcaggaggacctgccccttcctaaaccttccatggcaatccataagcaattaaataacaatacagaaagagatcgggggctttcatcttgagtaccacccacagtgtattcagttatgcctgacccaatcttctccccatgttatacctgcgctctcagttctgtttctgaagcagcaccatgtagcatttacggtcttttcctcactgcttaatcactcaatatagatcacaatgcagaatatccaaaaragatgtcttggttttatccgaaa

SEQ ID NO: 835802 - DNA, 561 bp, Homo sapiens
ctctatcagtggctcctgcactcatatctgtagaagctccttcttgtccctagaatctgctcaagaaaatgcatgcccagtcaaaaccactaccaatttcagttgggagaggcctttgcctcatgacccctacccaattctgctggctgccttcccaagggtccagtgagatgtaatcagagatggcttccctgggctcaagctggagacagggagtgcaaggcacttcccactgctgctctacctttatatttgtgtgactctctaaatatatttcagctctagggaaggttaaatccttctcccttggtctggattttcagattccccagcagggacgtgtgttcagaggcatattttcccctctcacactttgggaactcacagttttttacctgttttgtgaaatttgcagtggcatgtcacttcttccaaaggatttgctaattcttttggttttcctggtatgttcctgcagtggtttttcgagcaaaagatcacartgtgagtttccacaggctgttctgtctgcccaagtgggagctgcacattagctttgtc

SEQ ID NO: 835803 - DNA, 407 bp, Homo sapiens
gttcaagaccagcctgaccaacatgaaaaaaacccatttctactaaaagtacaaaaactagctgggtgtggtggtgggtatctgtagtcccagctactcaggaggctgaggtgggagaatcacttgaacccaggaagcagaggttgcagtgagccaagatcacgctattgtactccagcctgggtgacagagtaagactctgtctcaaaaaaatatagtaataataataatcaaatgcaagtatcaaggacctaaagtgatcaaaaatttcataaaatcacaaagttggagaactgaaagcactgatgtgaaaacakaaagctctggcagccaaggcagtgtgccataggtttaagatttgacctcgaaatccatggaaaagaagggagcccagaaataaacccaca

SEQ ID NO: 835804 - DNA, 618 bp, Homo sapiens
taaattttagaaaaatgtctcacatttctaacattttttagtcacacctatgacattctatcaaatcaaataaaggtttttgttttttaaagtttagataataactgtcaaacaattaaccatgctaggtcttttgcccttaaaggtgttctatatactggataatcaaagtgagcaccttgcatggccttcaaggagttatttggaaagaaggcttaaactctaattttaaaaacaaaaatgaaaaaagaagaggtttgtgtttaaggaaatgtttttctttttaatgtaaaatcaagtcatcaaatgttactgattttcaaatctgattaagaatcataaaatctctaaaacaagtaatgagcttcatctcataattcagaactgcaatggagatagccaggtagtgatgaaatctgggtaactggtatatcttactcaaggcctgtttctccaaaacattcttcaagctcatattcacttttytaaactccctttcctctctccttccctttaagtaaaataaacaacttagaaagattgttataaaatacttccatactgtcttttagggatttcttaagagaaggagatttctgtatgtattacatacctaag

SEQ ID NO: 835805 - DNA, 618 bp, Homo sapiens
taaattttagaaaaatgtctcacatttctaacattttttagtcacacctatgacattctatcaaatcaaataaaggtttttgttttttaaagtttagataataactgtcaaacaattaaccatgctaggtcttttgcccttaaaggtgttctatatactggataatcaaagtgagcaccttgcatggccttcaaggagttatttggaaagaaggcttaaactctaattttaaaaacaaaaatgaaaaaagaagaggtttgtgtttaaggaaatgtttttctttttaatgtaaaatcaagtcatcaaatgttactgattttcaaatctgattaagaatcataaaatctctaaaacaagtaatgagcttcatctcataattcagaactgcaatggagatagccaggtagtgatgaaatctgggtaactggtatatcttactcaaggcctgtttctccaaaacattcttcaagctcatattcacttttttaaactccctttcctctctccttccctytaagtaaaataaacaacttagaaagattgttataaaatacttccatactgtcttttagggatttcttaagagaaggagatttctgtatgtattacatacctaag

SEQ ID NO: 835806 - DNA, 615 bp, Homo sapiens
atttagaactataaaagttacttcattgaaaaaggcgaataaaatgaacagaagtctggcaagattaagtaaaaacattggaggccatatagtaaatataagttatcatattaataatgtaaataaactaacaggtttttattgaattaggcttcgtctgtatgcgtatctgctgcctcccgatacattatctattcttaacctgcagaattgaatgcaactttttaaacaaagacattctgatgcactagttttttgttgtggttgttgttccactttgaggcaaggttgtagtattttccaattgagatgaaaaatgttaacattatttttatctctctcatggattcatgattcttccctttttttggtctttacaaaaatttcttaagataaaaaagctgaaactataaaagaaaagctaccatagttttaagatctgtttctcaacagacattatgtagagattgaaaagaagacaagccctaggaaatgatatttgtaataaataaaaccagcaaagaattagtgcagaaattgtacttaataaaaacttttakgaaccaataaaaaaagacaatccaatataaaaatgggcaaaatatgtgaacaaac

SEQ ID NO: 835807 - DNA, 586 bp, Homo sapiens
gttacaagatataaaggataatacaagtaattttaacaaacacataatttaatcccagatgaagagaatagaggagaggcaatacgtaaagagatgaaaatcgattttccaatatcaatgaaaatatgtatctatgaatctaggaattggaatgttcctcaagcaggataaatataaaggagtcaaaattgtaacatattgtagtaaaactttggaagaataaagacaaaaagaaaactttaaaagcagtctaagagacatagctaatgttcaacaatgttagctattttgaatattggtgtatttaacttatcagactgcttcctgaaccccagacggcatgagcagcttgtatacaattcacacatgatgacccaaatcaggagttgaataagcttccttttcttctcttgatttagcattatctcttgggcatgtctctgaactaggctctcaggtaattgtttccatatgctatctctttctgtcctcttgataamcctgtgagggggatactcacttgaaagagggagatgctggagcttgaggggcatttgtgatttgcccaaggtcatacatctaagat

SEQ ID NO: 835808 - DNA, 601 bp, Homo sapiens
tataattatgagtttgaagagtttgggcttatttgtatcagcttgtcactatttgtttattaacaacaagagcattgattattttcatttggttttgatgagaccctccaagaaagatgtgcctttgagactggttatgtagaaaaaaaaatgtgcttatgtaatcaagacggtaaaacactgggataaaactctgtattgcactttctgtttctgaggtgtgctgtgcacatgttagttgaccttaagaaaaaaaggatgtattcagtgtggcctttacaagagaagacaactggaactcatgcttatcatttctcacctcttgccatgaggcagtctttgtcattgatacatatccttactttgttattattttgttattactattctacaataaaacataaatttgtaagcattgtgactttggattttgtgagtcttcttttgccatcaaactctgtctaattgttgctgctagtgaaagcaagataaaaattaaaaaaaaaacaggaataataagtattgataatacttggaayaacaggaattttcatacagagctatttggagtatggattgatatggctaattttaaaagtga

SEQ ID NO: 835809 - DNA, 626 bp, Homo sapiens
gcatctataaggcaaacattaaaatttgctttctgaactattttgatacaactttattgggtgaatgaaataatgcaaagtagatggtgaagatatttgggtgttaagtcttcattatagaagacaatgaagaayatttaaaactaataaaccaagaaatagattaatttgttactggaattaagaaagcagaggaaaaagaagagggttgctgttgtttgcatttaagtcttattcattattactatttattttattttattttttacagtttccttttccttcaacttttattttaagtcccagggtacatgtgcaggatttgctggtttgttacatacgaaacatgtatcatggtggtttgctgcacagatcatcccatcacccaggtattaagcccagcatccattagctattcttcctgatgctctccttccctgcacctcacaggcctcaatgtgtgttgttcccctcaatgtgtccatgtgttctcatctttcagctcccacttataagtgagaacatatggtgtttgcttttctgttcctgcattagtttgctgagaataattgcttccagctccatccatgttcctgcattattttgctgaaaataatggcttccag

SEQ ID NO: 835810 - DNA, 543 bp, Homo sapiens
aataacagctatatttgctttcatctgctcatatcaaattcaaattcaacaatacataaaatcagacttttttataaaatagaaactttggatgaataactagtttgaataatgaaaaattgcaaaattaatttctgctgtgctatctgtgagagctacaggtcttcagaactctggaatgcatttatttgatctaacactattagtttgaagactctggcaccaggccagaatcctctgtgtgatccagaggcaatctcagggctgtgcccggtaggcctcgggggaaaactgccttgtccacaccagacttggtgcacggccagtcattactgttttctgtagagagtcgcagtcaacaattcagggtacctcaggctgagcattcccacgagtatccctagcccaggcgccgccatttggaggcctytttattagagggactcagctgaggtactcttcaggagactctgccaagaccttcttagtggaggattccaactaagccacttttctccactctgactcagtactttttacact

SEQ ID NO: 835811 - DNA, 548 bp, Homo sapiens
aacataatgtctcattatttgataattatatgaacactcaataaatctctacatgaaacataattagaacactttttttttacacattctcaggaaacatactttttaagcaattagattttattagatttcttaggaaatgaacgattatttaaaactagtcagaatatttttttcaaagagtaaaattaaggaaactcttatggggaaaatgattgtattattaagtataataacaaaatagtctctgttccttaattatatcaattcaatttgctaatgatattaatattattagcctgtatcagaatagatataatgcaaaacaatgttaaatcttattgaaagtaaatggcaatgatacaaagccctccttaaaaagagaattatctgtgtaatagccagcatgaaaatgatatgctttgggtattttttttwaattcccaataataattgatttgttaaagttgcatttgattttgaaaagtaggatatatgtaaatttttaactcactaatttgagtggattataaaaatatttgacatag

SEQ ID NO: 835812 - DNA, 612 bp, Homo sapiens
ttaaatatccaattaaaaagtaagtaaaactctaaattctcactttttattccatctattgctgaactcctctgatccccttcccagttaaaccacttgaaagaataatctacaatcatatcttcactttctcatcactttcatttttttcctaaaatctttccaaaatgaccccacattccactccttgaggaagctgctactatcacaagagatttgctaaatgtaataattagcaaaacttgtctctttactttcttgatccttcaacaccattcagtacagttgacatgtgtggaaacagtattttttcttgacttcggtcctaccattttcctgttttgtttttcttttatctcttccatttttgcttttctcccataaacttttttgctattttcttccatttgacacgtaagtgccctaaggtgcagttctaagttcccgtctcttcaagcaaatttttttttctaaataattaatttcatctagagcaayggttttttgtttgtttgtttttgtttgtttgtttcagatggagtctcactctgtttcccaggatggagtgcagtggcatgatctcggctcactgcaacctctgccttctgggtt

SEQ ID NO: 835813 - DNA, 423 bp, Homo sapiens
aatacataaagaattacattgttaaaaatcatgccagacatattgattgtaatgattatcataaaacatgtattattatcaaagtaaattaaccacatctaattcatcagtgttatagccagwgacaactagaattagagaatattaaaagtagaatgaaacattactatccagttcaagttcagaattttgtacgtatatgtacatatatagcccagaaacccaaagatgtgaagaaatggctagaatgtggcagaaactggagtttgactcagattcctatattgtagtgatttttccatgatgctccattagcccttaagtttcaagaatcaggataattggccaggaaaacacaaaattttcactaatttaaaaggtagatatcattggaaaagaacaggcaagtgacaaccaacagag

SEQ ID NO: 835814 - DNA, 647 bp, Homo sapiens
gattcagtattagtggataaggtaaaatggacaaagcatgaagaaattgcactgtttttttgtgggaaagattcgtatatcaaatccatcactttaggagttaccaaagcccartgtctcaatggtagaataataaaagtggagcactttcttggtcattcagttattttaattaaaaatgaaaaaatctacataatgaaaatctgaaattccatttgcaagttcatctggacaaaagatcatttctttttcttctttacctttaaaaacatatgactaaaagcatcaagtttcaagagaatatatattcattgctactgtattggtcatctaatagttatatttttataaataaatgcaaaatgtagtgttttgtcaactgctagaaaaaaatggctgtttcaatttggttatggacacactcctgccacctggtgtcatattatctaaattacagaatcacatctggaaatgcaaaaacattttaaaaattcaattatttaaagaaaaatatttctatgtatcctgtgtatattaaaattaattttgaagcaaaatgtagacattattacaaaaccaagctgtgatgaataaaattatttagaaatgcagaaaactattcaatattataatcattaaaaataaaa

SEQ ID NO: 835815 - DNA, 477 bp, Homo sapiens
ttattctacaaatttgactattttagatatctcacatcagtggaagcatgcagtatttgtctttttgcgaccaacttatttcacaaagagcataaaaattctcaatattcatccatgttgtcttgtattgcacaattttcttctttctaaagacagaagagtatttcattgtatgtattaccacattttctttatccatttatctgtcgatgggcacttagcttgtttctacatcttggctatcgtgaacagtgttgcaatgaacatggaaatgcaaattatctttttaatatactggtttcatttcattttgatatataccaataaatggaaggactggatcacatgatagttctgtttttagatttttgagaaaaactcattactattttcartaacagctgcaccattttgtatttcctccaacagtgtgcaagagttctagtttccccatatcttcaccaatacgattgtctt

SEQ ID NO: 835816 - DNA, 558 bp, Homo sapiens
ataatatgtgagatgttaaatttggcccaatatgacacatattcctcaacataaccccattcaccttcctctctttggtaataattacgtagagcagctggtgagaaaatgaagaccagctttgctgtgtccacctccttatagtcacttctttcctatctgctctccaccagcatgggaaaaactggggaccaggtgatcttgaactgatgagaatacactttgaggatacacttcaaccattatcatcttgactcttttccttcctgcctttctgtattataagtaggtgggggaggatgtctttggggttttatcttctatgattgggtttcaaaaatattattttgataccatgctagagtttcagaatattactagaccttaagaaaaagaaaacattttcataatacctgaggttatagatttatcaagcaattgattgttggttcaaytatatgacaagattgctgctttttaggtgattttttatactctgatatctccccctaaaattacatataatttaaaccttgtcttgaaaaagtgtgtgtaatt

SEQ ID NO: 835817 - DNA, 526 bp, Homo sapiens
atgaatctcagagcttttatgaggatcaaatataatagtttacttgaaagtagtttgtagactgtcaagttccaggtaaatgataaaataataggcactgtgtaagtgtaagagctgtgactagaaacgaacttatctaatgcccagatggtatgcttcccactttaaaaagatatgctaaagtagacttttggaagctattgatgtttcggtcagttgtgaaccgagctagtgcttcaaaaatgactaaaaggaagaagagaaaatagggagtagcagtcatattttatttgtgtatatgtttgtctctccatgaatttgtcagtcactttccagaggccaaacaagctataggcaagtctcctgtagcattagtgattaaacagaaaatgggmaacaaattagataatgtcaccatgacaaccagtgaggctatttaatacacatcgacatttttactgtatgtatttggtgaaaaactgacctaaaaatgttcatgcaatgagatttttgaattacaaattct

SEQ ID NO: 835818 - DNA, 630 bp, Homo sapiens
aaatctaggaggtttggagcagagttacctgactaccacaacagccacccaggtctcttgagatcctgttccccatggccatttcccagaagcccctctggctttcctcagcctcttcccttccttcatatctgaatacataggagctaggaagtcaggatcttattacaacagtggtgtgtttcccttggggcaccacaaattcatcatgaactaaatcagtatataaataaccgaacataagcaaacagatgaataaataataaacagcttccatggtgatgacactagggtctgtgcctatgggaatggagggagcagagtgtgttgcttctttgcaagtcaaggaatacttggatgcatcaaactgagagaaaagagggcaactaaagttacctgaagtggggagtaacacaagtgatttcttggactatttttgatccaaagcctatttattctcaactaggtgttaaactttagagtgagaaacaaggaaccagagttttcttactttatcatgcagctttccctataatttccaaatccatctcagtaggggtgacttaggccagaattgctgtcaatgctgcaaccacaaaacatggatccsagctcccagactacattaga

SEQ ID NO: 835819 - DNA, 635 bp, Homo sapiens
cctcatatcaacaggatcaaaatttttattcagagatgcgcttaaaaatagatgagacacaaaaattaaaaagcatcttcaygtgttttagaccccaatgctacctttgtattaaacttctttcatatacattttagttattattcaacagagatacaaaaagagtaaataaaataatcactactaggtggctggcaatcgttttaaatttttttatattaaggtctatgctaaatcttgtggaggagaaaagcagtcagctcaaaagtttgtgcccatctgtacagtgccagtaggggaaatagcaagattccactcaggaagaatatatagatgttcattgtagcctttatttatgtgaatatgtatctattaattattgtctatatttaaggtatacaatatgatgttctgaatatatatatatatacacacacacacacaaacactgaaattactacagtcaatcatattaacatataagtcacttcacatattggtaagagaacgtgtgtgtgtgtgtgtgtgtgtgtgtgtgtgtgtctgtgtgtgtgtttgtgtgtgtgtgtgtatgttaagagaatctaaaatctagtctcttggcaaatttccagtatacaatacaatattaggaa

SEQ ID NO: 835820 - DNA, 596 bp, Homo sapiens
tcagagaaaagaggagatacagtcacattcgctactgcataaatagctactgcttttctctaattcttgggtaaagtatcctgtcagaggaaacaaacaattcatagcctactaacttcacagtcacsgataagtaagtaaagagaatggggcagacattagtcataaactgaccctgaagcaaataaatttgatgctgactaaataaccatcaggaaattaggttttcttctgttactttaagtagaagcaaatacttcatgaaatatttgatgagtaaaaacattgaaaaatcatgaaaaaaagatgtgtaaaaaatagatatatcctaatttcttatataatccagctgtcagaaaatagatatacatcaattccaaattgatgtatgaattagctgttaaggaatttaagcatattttcggctttataaaagtgatcattattctcatcaataaaataaaatgtgtagcctaccattacaatcatagatactgtggaaaaagcctgacaaaatttttctactgagcaaaaatatgttaagattgtttttattgtattagaaaaatgtcataatattgtgttacagttgtaga

SEQ ID NO: 835821 - DNA, 639 bp, Homo sapiens
gaggttttccatttttacttctaatattttatcctttgtttgctgtaggtcagcttgatttctaggcagttgctctgattttctggtatttaacagatataaaatgtcttgttatctcttcaaattcatgaattccaacatttgtctacataattgtttgagcatctttattacgtaaaatacatttcacttggcatagtagtcagataacagaagtttgggagatataaacactatccctaaggaacatactcatctggaggaaaaagaaacatacataaataaatttagttctgtaaaaagcagaaattagtaaatgccaaaatggaggtattgataaaatgtgtgagagtctggagaaaggacagatagatcccagctgaaagaaaaaagaacagatatatgagagccatggtatttcagcctagccccaaagaatggtgatatttgcacaaatgtaattgcagagaagggaaccaaggtggaggtaacaatgtcaccaacagcaaagacaaagctaatcatggaaaagagaagagaactacatccttmgagtacattgtggcaaatgtttcacattcaccgttagcttgaaataatagcttcaattctagttccctcagcaacataaagaggaat

SEQ ID NO: 835822 - DNA, 637 bp, Homo sapiens
caagaaaattctcaaacttatcttcatctaagaacagggatgaaaagatgtagtgtcatttacatagttctcaatgttatatcctggcaatcttgtctgatgaatgacaaaaccakcatctatgcaaatgaagaaaatgagagagaagtgaatggatacttattttgggtgagtatcatgggtgcatttttaagttttgtttctcaaagctgctctgtgaaatagatttcacaaaagaggcaactgatactgtgatactcttggggaagacagcttccccaagtcatgattgtacccaagtgtgtttgaatcaaaagtccttactcttcccatgtattacatagactctctaaaagagttttatttttcttcccaagttccctagatttgaattcaatagtctttttatgttcacctactcttgtaaggaaaattttatatgtaataacagtaatccttaaagcaacctccatataattatatctggctgtgtttacataagtgttttaacatataatgtagttacagtattggctccatcttaccttttcttctactactaaatctacactaattattagttattaacttgtagttaaatattctatattttccttctctcagggtcattattaaa

SEQ ID NO: 835823 - DNA, 283 bp, Homo sapiens
gagtcacaggacgtgagtttggatcccagctctgccacttagtaattgtgtagatttgcacatgttgctggacctctctttgtctcagttttctgtaaactggggaaaatcttagtaaatctagctaaygtggttgttatgaagattctgtgtgtgtgtgtctgtgtgtgtgtatgtgtacaaagaaagtttagagcagcgtgtggcacgtaatgcatattatgtaagtgtagctccaatgtgagttgttacttgtagagaacagctatgtcaaaaccacacc

SEQ ID NO: 835824 - DNA, 525 bp, Homo sapiens
aaacatcttcaaacgcaaacgctgttttccaaccattaaaaagtttatgcgctgcttggtttccatggatacctgaggtaatagcctccttcctctcattgaagagtgaatgttgctcagttacttttttcctgttttttttcacttttgtcttcctgacttttttcttccatccctatttatgaaaacaaaaagataactaaattgaaacctgacaatgtaatttgtcagaggaaggcagcctgttttataagctcaggtgatttcatttttgttcacctgtttatttcatgacacttgcaggaaaaagaagaattttcatttgatcaaatcatttccatgatccatcaaacacacaagttaaaaagggaaatgctctcagtctttaataacagtcttaatcgtgtgtagagcagagattgacaaactatggcctgccggctaaatctggcccagtgccttttttttwataaataaagttttattggaatacagacacgttcatttgggtagacgttgtcgatg

SEQ ID NO: 835825 - DNA, 521 bp, Homo sapiens
cctttgcagaagtagtttactgacctattatatacaggaaagaatgagggcttgggtggcacttagtagtgttgtcacttttgtcattggccttgacctgactcagtctccgtattgttgagatgggaatgacgggaccctcagtagtgttttgggatataaggcacacggtaaaggaacaacaaataggaattacattccgtcgagattcttttgctagaaagatccaaagaaacctaccttgtgattctagatgttttttaggaaacccaaagaaagtatgaaaaagcccaagccaagtccttccactgttgttcccgggcctgtgtgtgctgtgtgtctttcctgggagaaggtcagagctggagtggggcactcgattccggcaagagaaggcaaacaaaagaagccacaacagtctaggaagaaatctttaatttctattcagctttaaagagtttgagagmgttttttcccctctgttaacaaacgagttcaagtacatgccttcatattataaa

SEQ ID NO: 835826 - DNA, 583 bp, Homo sapiens
ggatagctaagagaccccaacatctcagaagcctagaacaacaaagttcaattttgctgaagttacaggtcaccatggatcagcgtggaagttctgtccatgaagattcacactgatgaagcagctgccatcttggatgtggtggggtattgtgcccattatgaaaatcactctatggagggtccagctagcacttgcagttagatctgccagcctggaagtggttcacgtggttactgctcaggactcactacccagaacaaggaggagaggagatacacgaaaagtgtgagctctgcagattgttttaggtgtgtgtgtgtacgtgtgtggtatgggaaaggaggagtgaatgggccagtgaatgggaggaatcccctttgcccgctgctgcggggctgttgttctagggccaagtaccaagtgtgaagatacacagagggataatggcagaatggctcacggccaatcagctggtggcggacagtgcagasgcactacctctgggatgcaccgggtagtatgacatggagagagttcttcagtcttttgggcaagacacttcatctttgtgagcctctac

SEQ ID NO: 835827 - DNA, 541 bp, Homo sapiens
gtgttcctagaaccaaaataaatgggcagcatagttaagtctcatttggtttgcataagtagaaaagtcctagctctgattaccacaagcaggacttaagtaaacaaaaaaggaagaattagtcctcaaatacttctcagacttgagctaattcacagacctagggacctgtgaataaagacgatgggtctctgttagcaatcctgacatagtgccaaaaaataccgtaaatcttcctcctaaccttcctcaaagaaacatgcaaccatctaacagggtaactgtaccggggggaggaattaactacacttatcagggataactggacactggatctgaactgccattaattcagggagacataaaatgtgctactgtggtttctgtagtcagggtaggagcttacagaggtcaggtaaytaactgagttttagctgaggcctctctctagtcggtccagtaggtacctgaacccaccccatagttattctccgagtttggaacacatatttagaaaggacagatgcagcaactggcacag

SEQ ID NO: 835828 - DNA, 626 bp, Homo sapiens
acatttctcagaatccaaaatacagttccgttccaattytgaagaattacactagttagaaaagtatcagagttaaatgtactcctcttttctagcttataaaatatatcaatatagctaactacaaccttaatctattacattattatctcctgaaagacccagaacaagttcctcctctctaagtccccaaggctagcaaagttctacaattacaaagtgtttgttgctatagagcataaactggtgctttgtataacatttatcataattgtgaatccataagcttgaaaatgaaacaattatatttctaggcatttacacgaagaatcatttgtatgactgctcaaagatatggacaagaatgttagtgaatcattaattagagctaaaaattttgaaagaaataaaatgtgcatcaataagagattactgaaatacaatattccctcttatctgcggtttcatcttccctttcagttaccctgagtcaacctaggtccaaaaataagtgaatacagtacaataagatatttagagtgggagaaagaccacattcacattacttttattatagtatcttgttatgatggttctattattagttacatcgttaatctcttact

SEQ ID NO: 835829 - DNA, 641 bp, Homo sapiens
tagaacaaggatgataaatagtaaagggcttatagacagttcttaattatgacccttcaatatatgactctagcgattaagtgatttaatactgtgatgcctgttttacaaatacttatcaaatacttggagactctgaccctctgaggcatcttttttggtaataaaaatcctttgagaccttctgtttaagggctcaaaagatagtattaacaagtgtgccccccttccctgcccaggtaaagaataagtgttatatttaaatattaacatgcatataataaaatattaacagctattaaaatgtaacaaaataaaatacacttatcattaaaataagcatcgtagaattaatcagtctatgatgattcagtcccttggaatcacctttttgtagatggattattactatatttattacttatgaaaacatctattaaagggaattatcaggtgataaaatctggaaaaataatcattttctatttatacaagttattgatacgtttggggtaaactttgtgcaactaatgaggaaactaacatacaacacactcctgaggaaatcattaactagtatgtactyatgataattcatctcatttttcttgatgtctattttggtggactaaatttcatat

SEQ ID NO: 835830 - DNA, 634 bp, Homo sapiens
aaacatagacaatagcaaagcacactacatttctaatagcttaccaactgagaaatctacagatccacaaggyaaaatatgaaccttgatgaggtccttccaagttttcaaggacaaaaacttcctgaacttaagagctctctaaagaacttatttgccaaattgctgttagattccttttaaaaatgttttcttaaatttctcaatttttaagagtgagaaatttaattttatgtgccttttgaagaatagaattgtgttagaagaccaccaaataattcagggctgaaagcagggcaaaagaaaactgaggtagaaaagtatttatgtcaaagctactatagcacacataataacataaacacaaaacactaagaaagtagaaatagtgaacagaattcattagccagccattgcttttgctagttctcaaaatatgtctacctaattaatatataattttatagctctttatcatatgaagtgggctaataactacaactaaaatattctacctaagcattcttatctggacagtatatgtatatggtagtaggaaatgaaaaccagcttagaaaaccggcttggaaagtatagaacatgcgctatgctacagcctgtgtcctacataacc

SEQ ID NO: 835831 - DNA, 588 bp, Homo sapiens
ggagttgcttcttatagatgaccaaagaaaatagtttcttgagatggaaactcctcctggtggagatgctgtgaacattactgaaatracagcaaaagatttagaatattacataaacttagttgctaaagtagccatagggtttcagttttgaaagaggttctactgctagtaaaatgctatcaagcagcattgcatgctacagagaaacctttttgaagaaagagtcaaccaatgtagcaaacttctttgttgccttattttaagaaactggcactgactgcccagccttcagctgctaccaccctcatcagtcagcagtcatcaacaaacattgagttaggaccttccaccattaaagatgatgacttcctgaagggccagatgatggttagcatttttttttttagcagtaaagtattttaattttatttatttatttttgagacagagtcctgctctctcgcccaggctggagtgcagtggcgtgatctcgactcactgcaatctctgcttcctgggttcaagcgattctcctgcctcagcctcccatagtagctgggattacagatgtgcgccaccacatct

SEQ ID NO: 835832 - DNA, 529 bp, Homo sapiens
gtttgcatatttgcatagtttccatgccattctttgcaatttcctgatactttggtggctttattttgatcttctatttataaaaagagttggagttcttacctrtcttactagtttgtttttcccactgaacatctgtttgaggactgaacttctgtatttcttaacacttttctgcaggtttatgtaatggtgacaggatggtagatactcaactgatgtagtgggtggtcctaggctctgtcgcctatttgagatttattaaatgccatagactgttttgttgggggttctatatacaaatttttgtgttgacatagattttctgttctcttgggtatatactcagtattagaatttctgggtcaaatagtaactttatggttagctttttgaggaactgacggactgttttctaatgctgctgaatgacagtatgagtaatgtttgagagttccagtttctctacgtctttgccatcacctgtcatcatcagtctttttgatgataaccatcttagtggcatgaa

SEQ ID NO: 835833 - DNA, 597 bp, Homo sapiens
cttaaaaagtgggtatacaagaaacatgccccaacataataaaggccaaatatgacagacccacagctagcatcctactgaatggggaaaacctgaargcttttcctctaagatatggaagacaacaaggatgcccactttcaccactgttattcgacataatactggaagtcctagctagagcaatcagaaaaaaaatgaagaaataaagggcatctaaattggaaaagaagaagtcaaaaatcaaattatccctatttgtagatgatatgatcttatatttggaaaaaaaatctaaagactccatcaaaaaacagtactataatggataaattctgtaaagttgcagaatgtaaaatcaacgtacaaaaattcatagaatttttatgtgctgacaataaacaatctgaaagaaatcaagaacataatcccatttacaatagctccaaataaattaaatacctgggaattaaccaaataagtaaaagatctttaaaataaaaactactgaacatttatggaagagattgaagaggagacaagaaatggaaacttgttatatgtgcatggattggaagaatcaatattgttaaaata

SEQ ID NO: 835834 - DNA, 526 bp, Homo sapiens
gggttcagggtatggggaaatgaggagttagtakctaatgggcttggagtttcagtttgggaagataaaaaatgttctggagatggatggtgatgatggttcaacaatatgaatgtacttaatgccagtgaactgtacacttaaaaatggttaaatgctgaattttatattgggtatattttaccactataaaaaacatcaagaaaaaattttcccagactaatatccttgaggtcattggggaaaacatttccccaatgttttctttcagtaattttatagtttcaggtctcatatttaaatctttaaaccattttgagctactttttgcacatagtgaaagatggggatctagtttcatttttctgaatatagatatccagtttttacacaactgtttattaaagagactgtcctttcctcaatgtatgttcttggtacctttgttgaaaatgggttgtctgtaattgtgtggatttatttctgaattctctattctgttccattggcctatgggtttgtattt

SEQ ID NO: 835835 - DNA, 515 bp, Homo sapiens
gtttaaaatgtaggttctaattcaccaggtcttttatggcttggcctaagattctactttctaacaaacttccacatgaggtgttgctagtctgtagactacactttgagtatgagggccataaagcaccacttyttttagatggatgcctctatggcaaatgatttttgtttgagatactggacaaagagactagtctgctttctaggccaaagacctcatttcctacagagctgtccccagggctgagggattcgatatcccttgctgcacacctccacatatttgagctgtggcacctatgtatagaagctctgccctagggaaacttgcacatctataccagggacaagtgcatgagtattcatagttgcactgtttgtgaaaacaaaaaattggaaataacctaaaagtccattaatagcagaatgaataaataaattatattcttccattggatttctgaatagcagtgaaaatgaagtagagctgcactcattaacatgactgaatcc

SEQ ID NO: 835836 - DNA, 635 bp, Homo sapiens
ggagtgggaggggagtgggtatattctgagtactaacccagtttattgcttattacttgtataataaagcaaacataatgtgctttgtgagatgttttgatgttatccacgagagagtatcctacggggctccccaaggttaagaaagtggagccattgtagaattttatagttagaggatagaattaatgtgttttctttgtttgtttgtttgtttgtttgtttgtttgaaacagggtctcactctgtcacccaggctggagcgcagtggcacaatcctggctcaccgcaacctccgcttcccaggctcaaatgatcctcccatctcagcctcccaagtagctgggactacagtgtgtgcccgcacacccggctaagtttttgtgttgttggtagagactgggttttgccatgatgcccaggctggtcttgaactcctgagctcagagctccacccaccttggcctcccaaagtgctggaattataggcatgagccaccrcgcccggccctgaggatagaaataatgtgaaaggggtaggctgaccctctcttccttctcctccgtccctttaagattaccagacacgaccatttatggcacctacaggctcataaaggaaggcggaaaactcc

SEQ ID NO: 835837 - DNA, 465 bp, Homo sapiens
gtgctgttttttattttgagacggagtctcattctgtcacctargctggagtgcagtggtgcgatctgcaacctccgcctcctgggttcaagcgattttcctgcctcagcctctcaagtatctaggattacaggcacatgccaccataccttgagaagttttgtatttttagtagagacaaggttttaccatgttggccaggctggtcttgaactcctgacctcaagtgatctgcccacctcagcctcccaaaatgctgggattacaggtgtgagccactgtgcctggctaatatgcttttaatgatattaattttaattaattactaatatataatataacataaataaattagtattaatcaaattaatcggattaatattgatgaagttaatgtttgacctctatgattatattaatagtataaatacattttaatatttactaatagttaataagccttaa

SEQ ID NO: 835838 - DNA, 570 bp, Homo sapiens
cactggtctttctgcttttgctctcccattccctggggcaccagctggcggatgctttctacaaccccagcatgacgttcccctcacctgcttaaaaccctgcaaagagtccctgttgatatcargataaacttttttggcattgagggggttagagaatagttttgaataaatgtttttctactctctgcagcagactgaggaccagagcccttggcacgcccagccccaaacattttttcctgagggttggggggtatcgaagagccctctaacatcagagattctcccaaggggagtggtgttgagctctctaacattggggagctctgccagctccttgccaagatgctggcctagcttaggactcccttggccttctatgccttccctttccctttgctcctcccattcactgtagagtccattcagggtgcatgacctgggtgttgctaccagcagaggtgagagaaagagaaaaatgggagaaagacagagctgccagggagactcagcccccttctctcctgggatccttctttctcaccatcctgagtctgcaccctgatc

SEQ ID NO: 835839 - DNA, 626 bp, Homo sapiens
acagtttatgccagaagagaatggagtaacatatttaagatagacaagaagaaaagaaaatgtgaactaaagaaaagatgaactaaagattattatcaacactgacattcaagaataaagagcacagcaattatcaacatgcaaaaactctgaaatcttgttctgatgagtctttattgagaaatctactagagaatgaccctcaaactatcaaaaagaatagacactgacacagagactagtattgagcattaaataagtaatcatttgtagaactaatactaaatgaaggttaaaacacagagacaggctgggcgccatggctcacgtctgtaataccagtactttgggagcccgaggtagaaggatcacttgagctcaggagtttaagaccagtctgggcaaccatagcaatacctcatctctactaaaaataaaaataaaaaaattagccaggtgtgatggcacatgcctgtagtcccagctacttgggaggctgaggctrgaagatcacttgagcccaggagatagaagctgcagggcactatgatcacagcactgcacactctagcctgggcaacagagcaagactgtctcaaaaaaaaaaaaaaaaatgcagagagtat

SEQ ID NO: 835840 - DNA, 641 bp, Homo sapiens
agtacagtaccagagatattaattaggtactcagtaacagtatcactagctgaattaaatgtcacttcctctgggaaggtatccctgactrtacccatgtgagattaggtctctcccaaaatgttcacacagcatccagtactttaccttcatagcaccttgcatggtttgcaattatatataatttgtgcgatttgtttaatgtccatttgtggcataagaaatacatacttggtgttcgtaatttcctttgtgataggggaataggagcatcttttgttattcgtaacaagcccctttcaaccatacctgagtttatgctaatgaggtgactcttagtgggcccttagatagcttcaggatgaaggctggttgccagagaaaccaaccaagtgataaaagtgttggaactttcagttccaccaccagacctcaagggagaggaaaaggggtggagatagagttaatcaccaatggtcaacgatttaatcaaccaagcctacgtaatgcagcttccataaaaacccctagacagggttcagaaagctttcaggttggtgaacacatcaagatgctgggagggtggcatgtcaggaaaaggcatagaaactccatgcccctaccccctgtatcttgcccta

SEQ ID NO: 835841 - DNA, 622 bp, Homo sapiens
gacaatataggtaggcaaaaatagaaattcggcaaaagaaataaaaggtatccaagtcaaaaagaaagaataaaattatctctgttcacagattacatgattgtgtatgtagacaaccctaaagattccacactcaagaaaactgtcacaaataataaattcagcaaagtattaggataaaaaatcaacacataaaaattagttgcatttcaactcactagcagtgaacaatctgatatagaaattaagaaaatttcatttataataacatcaaaaagaatgaaatactcaggaattaaccaaggagatgaaagacatatactgaaaattatgaaacactgctgaaagaaattaaagaagacataaatagaaagatattccatgttcatggattagaagacttaatattatttaaatgacaatattagttagccaaagcaatctacaagtcaatgtaattcccacaaaattccaataacttatttgttttagataggggcttctctgacccccaaactagggtgtwgcagaatgatctcagctcactgcggcctccacttcctgaactcaagggatcctgccacctcagcatccccagtagctgggaccacagccatgtggc

SEQ ID NO: 835842 - DNA, 640 bp, Homo sapiens
aagcttcataagtgaaagagaagtaagatcctttttagacaagcaaatgctaagggaattagcattataaccagccttataagaggtctttaagggagtcctaaacatggaaatgagtgactgttacgggccaccacaaaaacacacacacttaagtaatagaccattgacactataaagcaactacacaatcaagcctagataacaaccatctaacaatatgatgacaggatcaaatcagcatacatcaatattaaccttgaatgtaaatgggctaaatgccccacttaaaaagtgctgagtagcaagtcagataaagaagcaaggcctaactctatgctgtcttcaagagacccatctcacatgcaatgacacccataaggccaaagtaaagggatggagaaaaatctatcaagcaaatggaaaacaaaccaaaaaaaaagattttatattaaaatatagcaggggttgctattcttattttcaacaaaactgtctttaaaccaacaatgatcaaaaaggacaaagaagggcattacataatgataaagcattcaatttgacaaaaggacttaactatcctaaatatrtattcccaacactggaacacccagatttgtaagacaagttcttatagacc

SEQ ID NO: 835843 - DNA, 625 bp, Homo sapiens
gaaaaagttgatggacttaacactacgtaactttatgatttactataaacatagaacagtaagacagtgtggttatagcataagaatcaataaatccrtgcaacagaatagagagcctggaaatagacctatgctttatagtcgtgattttaagaaggtaccaaagcaatccattgaggaagggaatttaaagatcttatagtcctagtccaactaacttactttacatataagtaagcaccaagtctttggtgtaaatggtgctaggataatgaagtattcatatagaaaaaaaatgaacctggccctctaccttattaagcaaaattaatttgggatggatcatagacttaaatgtaaaaactaaaaatcatacatattttaatagaatgcattggagaatatcttgatgagtaggggataggtggaagtttcctagaaaggtcacagaaagtaaacaccatatgaaaaaatttgataaacttcgtcaaaatttaaaactttttgtcagaaacatggttaagaaagtttacaggcaagcaacagactaggagaaaatattttccaaaacacataacctgccaaaggactggaatctaggatacatgaaaaagttcctacaact

SEQ ID NO: 835844 - DNA, 624 bp, Homo sapiens
ccaatgcagcagcataggcagctgggacctttaagaggtggttaggtcatgagggttctgtcctcgtgaatagattaatgccattttgggagkgggctcctgacaaaaggttgagtttggatgttccctccttctccctcctctgctcctccctctgcatccccattctctctcccgcttctgccattagatgatgcaggtctcaccaaatgtgggccttgaacttttgggactcccctccagaactgggagaaataaatctctgttctttataaattacccagtctcaggtattctgttagagcagcacaacacgaactaagacactccccctcagtaacgctgagtcctgggaagccagtgctcctggcctgactccgttactatcatcatccactcactcaggtttattcaaacactggaaagttcatctctacggctcctcctttatcagagcggggccagtttgtggtcatcctcctgtcacgtgggcatcagtgagtcacgtgggcatcagtgaggttggatgtacatggaggctcaaattacaaagtctgcatctgccttccagcaaggatcccagtctctcctggggtagggagtcacttcacctacacatttcca

SEQ ID NO: 835845 - DNA, 624 bp, Homo sapiens
ccaatgcagcagcataggcagctgggacctttaagaggtggttaggtcatgagggttctgtcctcgtgaatagattaatgccattttgggagtgggctcctgacaaaaggttgagtttggatgttccctccttctccctcctctgctcctccctctgcatccccattctctctcccgcttctgccattagatgatgcaggtctcaccaaatgtgggccttgaacttttgggactcccctccagaactgggagaaataaatctctgttctttataaattacccagtctcaggtattctgttagagcagcacaacacgaactaagacactccccctcagtaacgctgagtcctgggaagccagtgctcctggcctgactccgttactatcatcatccactcactcaggtttattcaaacactggaaagttcatctctacggctcctcctttatcagagcggggccagtttgtggtcatcctcctgtcacgtgggcatcagtgagtcacgtgggcatcagtgaggttggatgtacatggaggctcaaattacaragtctgcatctgccttccagcaaggatcccagtctctcctggggtagggagtcacttcacctacacatttcca

SEQ ID NO: 835846 - DNA, 655 bp, Homo sapiens
attaatggcattattaaaaaggatggccagagtgggtttgctctcttgtgctcttgcccttycaaccttccaacagcaaattgccccacacaagatgccagcaccttgatgttgtacttcccagcctccagaactatgagccaataaatgtatgttgagtataaattacccagcctcaggtattggggtatagcagcacaaaatggactacaacaataggtgatagaaaactcaacacacgctggcttaaatattaggaccattagttaactcatataactgacttaaatgttggcttaaactagtaactcaaacgcatcatggagctggcttctttccatttcttctctgcctttcaaaatgtcaacttcatcttagagtggacaccaatcatgttgcaatatagcttccagatgcttgcaggacaatatatatctctgctggagtggggggcctttctattaattatattaatataatatatctccccaaggagtagggggcctttctattagtcacgaaaaaagagacttttcttacttgaaccaaatagtgaagatattctttcagggtttatcccaggaattagaagtagaatcagtaccaccaaaaccacgggggttttggtaaacgctggagaggctgccacaatgtc

SEQ ID NO: 835847 - DNA, 617 bp, Homo sapiens
attcaagatggttcacacacctttgacactttggccaggtgttcgtttacttgtagctgaacacattcctagctgctacaggaattacccatcgccagatgaagaaactgaggcccagagattttaaataatttgtctgattgacacagcaggtcagtgatggaattggatgtcagccccacaaggctgacttcagatcctgcattattaaccacttaccttgtgttgtttggtaggatgaaatgaaattacttctataaagcactttggcattagcatgatgtctggcatgtggtacatgcttattaaactgttaagacctttcccacagtcacagctttgtgttagtgcttaacaatgtgtttcccatgggaaacaatgagatgcaaaccagagctgtccatgcttaaacaatccagcttaatggctatagtaggtgctcagtatgtttgctgagtgagtaaatgagtaattctcttaaataaagaaaattttctaagcatcacccttaggaggttactgtatgcattttttatgaggatgctaaaattttgttacgtattagsgtagatcagaagttcggtgtgtgaaccctaaatatctgagataggtctcaa

SEQ ID NO: 835848 - DNA, 542 bp, Homo sapiens
ttcaatccactgtttgtaggaatctttgaaakactgttgtctattttgtagtgtttaattaaaacagatgatacagaccagacatggtggctcatgcctgtaatcccagcactgtgggaggccgaggcgggcggatcacttgaagtcaggagagaccagcctggccaacatggcaaaacccatccctactaaaaattcaaaaattagctgggcatggtggcatgagcctgtagtcccagctactcaggaggctgaggcaggagaatcacttgaacctgggaggtggaggttgcaagtgagccaagatcgcaccactgcactccagcctgggtgacagagtgagactcttaaaaaaaaaaaaaaaaagtagatgataggccaagtgcagtggctcatgcctgtactcccagcactttccaaggccaaggcaggaggattgcttgagtccaggagttcaagacaagtctgggcaacatagagactccttgtctctacaaaaagtttttaaaaaattagccaagcatgaggcacatgctgtggtc

SEQ ID NO: 835849 - DNA, 592 bp, Homo sapiens
gctgccatttttaaaatacagaatcccaggccctactcttggagagcctgaccacaggcctgaagttgcatctaaaaaggcacatttttaaatgytctctaagtgattctgatggatgtcttttctcagcaacaccttgctactgagataaatgttcttcatagagatgagcaaaaaggagaaggggttttttactgctatcttagttagaaagtaaattcttacaggggcagagacttggctttatttgtcttcctttccaacacattgcttgtgaaataatagttaaacatctcatcaaagctttcatgaatttactgaggcccaggtttctgtataaataaagagaaaggctggaaggtaacaagttaagtcagttttcacctaaacataaatgaggtagaggaagagaatgcaggatctgtccttggagatttgaaggacttaaatgtttagcactaacatattgaacctaattcttagcttcagaggtagtgagggcaatcacccaagagatcaatgcttgctctcccctgaggatgaatacactcctgcctttcctattccataccccaaaccttatttctgacca

SEQ ID NO: 835850 - DNA, 612 bp, Homo sapiens
ctttgattaatgggtggcaaacttcagtctgcatgagaatcaattgtagaacacacacacacacacacacacacacacacayatatataataaaaatattatatacaaaagatatataataaaatatgctatatatagtatattttattgtggactatatatatatatatatatatagaagctctggagatggagatggagatatatatctcaatctccagagattatgattcagtagatctgcagggagatggggattacaaaagtctagtctagttttcatattattacaggcgaaactaaaagttgatctgcaagtattttgaggatcattactctagattttaaatcatttttgctaacctgggaaggcatatttcatattgggttgtgatcagacttttttctgaggcctgataaattgtcatacatttgaaccaagtaaggaaaaaacatctgcacagagatatcaggtacagccagtatacagtaatggggtaaaggaaaaatcttaggcactaaagtgcctgaatttgagctctaacttcactacagattagttattcatccctgggaaaattagtctccttctaccccatgtttctcctaggc

SEQ ID NO: 835851 - DNA, 637 bp, Homo sapiens
acatttttgtttctaaagtgatttgtgatttgtgctgtataaactgtataaaaggttctgtttttaaaggtggattttcattcctctggggacagtggtcgccaagacatytacattgtaagagaacacagtggaagatcctgtcctgattctcaaaaattattttctctgtatgattaaaagtttattccatttattttagtttgtgtttacttgattttgaggaagaaaatatttgactttgtgtaaagagtagggtatcagggtgttttttctgccgtgggagatgtgtatatatatagtattttggtgtatagtagaaaataagctttgtgcatctgtatttgagatatgttaatgacgtggagtaaagtcagctgtaagactttggaggcaaacaagttgtatatggttcatatggctctatggggaatttaattaccttttctgggcactttttttttttttttttttttaagtaatggtgaaatggtcccattggagagtctcctaaatagaccttccaggcagaaccgcaagctcaaaatctttgtatagttttgaaaattgaggagtagctttgtttggaagcctttctggtggtggtttttgttgttgttgttgttttgttgtttta

SEQ ID NO: 835852 - DNA, 595 bp, Homo sapiens
aggccttatcaccgctcacctgactgtggccacagtctcctccctgtcagcgtctccccgcccaatcracgcttcacacctttgcagctgctgattcccggaggaccacttacaccaagcactgtgagctgatcgatggcagagtctctccagctcatgagtcttcagtgactccccattgtccatggaaaacagaagacacctgaggccttgcacagtggaccttattctcatccctccctcaggagaatcctctgcctcgagccgaaggccgtgggctctgcagactccaggcctctccttcccagggcggtcttccctttccctatgctcaaggcacagcccaagtcccacctcctccattgcaagggacaccaccctctgaattcctgttggggaaagagcctagttttgcagccagataggcccgagttagagtctcagctcagttccaatcccattagctggttgcaagtcattaactttgtcaaccttcagtaaatggaaatcaggcccacactgtaggtgcctgggggtgctgatggttgagtggaatctgttcttttgaccttcccagcatctttccccttcccag

SEQ ID NO: 835853 - DNA, 595 bp, Homo sapiens
aggccttatcaccgctcacctgactgtggccacagtctcctccctgtcagcgtctccccgcccaatcaacgcttcacacctttgcagctgctgattcccggaggaccacttacaccragcactgtgagctgatcgatggcagagtctctccagctcatgagtcttcagtgactccccattgtccatggaaaacagaagacacctgaggccttgcacagtggaccttattctcatccctccctcaggagaatcctctgcctcgagccgaaggccgtgggctctgcagactccaggcctctccttcccagggcggtcttccctttccctatgctcaaggcacagcccaagtcccacctcctccattgcaagggacaccaccctctgaattcctgttggggaaagagcctagttttgcagccagataggcccgagttagagtctcagctcagttccaatcccattagctggttgcaagtcattaactttgtcaaccttcagtaaatggaaatcaggcccacactgtaggtgcctgggggtgctgatggttgagtggaatctgttcttttgaccttcccagcatctttccccttcccag

SEQ ID NO: 835854 - DNA, 589 bp, Homo sapiens
gcaggactggcaggcagccccacctgcaaccctggtgtgggatccacttggtgaagccagctggactccagagtctagtggggacttagagaacctttatgtctagctaagggattgtaaatacaccaatcagcaatctgtatctagctcaaggtttgtaaatgcaccaatcagtgctctgtatctagctaatctagtggggacttggagaacttttgtgtctagctcagggattgtaaatgcaccaaaacggaccaatcagctctctgtaaaatggaccaatcagcaggatgtgggtggggccagataagggaataaaagcaggctgccccaaccagcagtggcaccctgctggaatacctttccgcgttgtggaaactttgttcttttgctttttgcgatagatcttactgctgctcattctgggtcagccctgcctttatgagctgtaacactcaccgtgaaagtctgcggcttcactcctgaagctagcaagaccaygaatccacggggaggaacgaacaactccagacgcgccacgttaatatctgtaacaccccgtgcgaaggtctgcagctgcactcttgaa

SEQ ID NO: 835855 - DNA, 619 bp, Homo sapiens
tgccaggatttacatatttcaatatcccttccttgaaggctaagcatttcctcctacagtgacgtcacttctaagaattactcagggcttctgaaggggacttcccttcgtaaccgtatcccaagagctagaaaattctcatccttttaggaaaagtttgattttcagaagagatgcaatgtcatttgcagcaagcagatatgtggttgcctgggacagggaggtggggtcatggagcaggagggatggaatacagaagggtcacaagaaagctttgaaaggtgttggacatgtttcttatcttgattgtggtgatggttgcatgaatgaatacatgtgtcaaaactcatcaaactgtacacttacatatgtgcagttcattgtaggtcaattctaccttgagaaagctatttttaaaaagttatttgctgcaaaaagtagtgactaaggtccatcaccaagctgaggaatcccccttcctttattttttagtgaaaatgtaagagaatacttttctcctgtgtcttccaarttgacttggagccaattctcaattgtaggtggttgtttttttgttaaaaaaaatttttttatagaatcactgaaacaagtgatcttt

SEQ ID NO: 835856 - DNA, 528 bp, Homo sapiens
cctttgttaactcgaaaattcacctatattagttggccagtcactatgcaaccaagtttattagcacagacaaagacaggcctttcaaatagacagaatgtgtctacatatttgtcaccatatctagtctacagccttttacagagaagggtagcaaatagatttcaaaagtataatggagcctaacaatgatgtgatacacctgcatctatctacttactccccatggtgatttctctaccaaatatggactaaatacagataaagtactccatcaaacactgatataagcaaatgaataaaagagaattgtatgtaaatttcattaggatacctgtaaatactgtactagcatttagtgattgcctacaattaaaagtctctaaattccacaccactctaagattttaaactgaagttacrtcctgtgtatagaatagtgattttatttccattcttcaatgccaaaaatttactaagacaagtagatttcagccccccaacacatttttgtgattcacagttcca

SEQ ID NO: 835857 - DNA, 528 bp, Homo sapiens
cctttgttaactcgaaaattcacctatattagttggccagtcactatgcaaccaagtttattagcacagacaaagacaggcctttcaaatagacagaatgtgtctacatatttgtcaccatatctagtctacagccttttacagagaagggtagcaaatagatttcaaaagtataatggagcctaacaatgatgtgatacacctgcatctatctacttactccccatggtgatttctctaccaaatatggactaaatacagataaagtactccatcaaacactgatataagcaaatgaataaaagagaattgtatgtaaatttcattaggatacctgtaaatactgtactagcatttagtgattgcctacaattaaaagtctctaaattccacaccactctaagattttaaactgaagttacgtcctgtgtatagaatagtsattttatttccattcttcaatgccaaaaatttactaagacaagtagatttcagccccccaacacatttttgtgattcacagttcca

SEQ ID NO: 835858 - DNA, 528 bp, Homo sapiens
cctttgttaactcgaaaattcacctatattagttggccagtcactatgcaaccaagtttattagcacagacaaagacaggcctttcaaatagacagaatgtgtctacatatttgtcaccatatctagtctacagccttttacagagaagggtagcaaatagatttcaaaagtataatggagcctaacaatgatgtgatacacctgcatctatctacttactccccatggtgatttctctaccaaatatggactaaatacagataaagtactccatcaaacactgatataagcaaatgaataaaagagaattgtatgtaaatttcattaggatacctgtaaatactgtactagcatttagtgattgcctacaattaaaagtctctaaattccacaccactctaagattttaaactgaagttacgtcctgtgtatagaatagtgattttatttccattcttcaatgccaaaaatttactaagacaagtagatttcagcccyccaacacatttttgtgattcacagttcca

SEQ ID NO: 835859 - DNA, 565 bp, Homo sapiens
aaacatttaataactaaaaaaaaaaaaaaaaaaaagatccaaacaactgcattttaaaactacacctatttttaaaaaattgtgctgttagttgactttatcaaagagttactgtcaaacacaacatactgccaatattcttgcatttgcacataattattttttctttatatccatatgtataatgcttatactttttctagtaaaattataatgtatttgatggttaaaaaaccatctacttctccactgaaattaattcataaatttctcttttagttaaagaaagtggggaaggaggaagaaataggctggtagaaagatttccatgggtcttaggtttgtgcatttggtgagcagcagcactgaacagcttttgtttaagaccatcttttctattatttttgtataaaataccttctcctggggcaaaagttgagtgagttttcttacagacagggtttcccaagctcaaggtcccttagcagtgatgcacagcactcacctargctgttccatgtcactcccattgtagcaggacaagccacagacaaaacccctcaga

SEQ ID NO: 835860 - DNA, 573 bp, Homo sapiens
ctcaaaatatgactcattttgagaaaaatttatctctaactgtgagcttgtgaaatcaaacaagttatatacttccaaaatagaataatgggacaggcatggcgtagacattcccattcttaaaggggagaaaaaggcaagaaacaaggggtaataaatcccaagttagtccggaacccagtgaggcaaacaacattatatcttgaggctcgagaataatctctgactccacatcttagcttccagacgcactggagtggggattgggtccccattcccccaggagaccccactaccatggctttgctggatgaagcccacactgcagctctcaggaattggagttggatacttatggctcttcctggctggcactgcccgctggctggcactgcaggctctacaggtttggggcttttaggggtggctgtcttgcatggcctcactaagcattgccctattgggggctccctgcagtggtcttgaccctgyagctctgctgggcatggccgtagtggggactctctgccacaccctgccttgtggcagttcagagctttgagactgaggttg

SEQ ID NO: 835861 - DNA, 524 bp, Homo sapiens
aataaagctgcccagccaaaaaaaaaaaaaaaaaaaaaaaaaaaggcttgacaatattttgtagtgttggctacttaaatgtgaaaaatcaagtctgtaataaraatatgtgtgaaacattctataaaccatacagtaaaataaaaatatagggtggtattgaggtcaaacaaaaccattttggtgtcttttcctccaatctttcatatccagtaagtcatcccactaccacagcaaaccaactaggattggccgaaatcgtgcctgcttgcgccttctttctaaaaatttccatgtccccagcgtgcatgttctgtcgccttctgcccctttctgtcttgctgccgtactctccattggtcttgcctctgctgccttgtttcctttctgtacaagtgcaaggcaaagctctttcctttcccctgagcatctgtccctgtgcaaatttatcaggtttctctcgtctagcagagaaagaaaaatgaagtatcagcattatggcctatctgtgcactttttaaaat

SEQ ID NO: 835862 - DNA, 523 bp, Homo sapiens
tcaggcttcagtggctcatgatacctaaactttgacttgcctacctagactcatcctctacaatacacttaagaaacagaatgagcaggatgaggctagactcatcctctataacacacttaagaaacggagcgagcaggctgggtgcggtggctcatactgtaatctcaacactttgggaggccgaggtgggcagatcttttgagcccaggaattgaagaccagcccgggcaatatagtaagaccccatctctacaaaaaaaaagaaaagaaagaaaaaattagccaggcatagtggtgcacaactctagtcccagctactcaggaggctgaggtgacaggattgcttgagcccaggagttcaacgctacggtaagctgtgattgcaccacygcactcaagcctgggcaacagagcaagaccctgtctcaaaaagaaaatggagagagcaaaatggatagaacagtatgtgcacatgtgcacttaaccaaaggtaaagcatgggaatcatttatgcatgtga

SEQ ID NO: 835863 - DNA, 523 bp, Homo sapiens
tcaggcttcagtggctcatgatacctaaactttgacttgcctacctagactcatcctctacaatacacttaagaaacagaatgagcaggatgaggctagactcatcctctataacacacttaagaaacggagcgagcaggctgggtgcggtggctcatactgtaatctcaacactttgggaggccgaggtgggcagatcttttgagcccaggaattgaagaccagcccgggcaatatagtaagaccccatctctacaaaaaaaaagaaaagaaagaaaaaattagccaggcatagtggtgcacaactctagtcccagctactcaggaggctgaggtgacaggattgcttgagcccaggagttcaacgctacggtaagctgtgattgcaccactgcactcaagcctgggcaacagagcaagaccctgtctcaaaaagamaatggagagagcaaaatggatagaacagtatgtgcacatgtgcacttaaccaaaggtaaagcatgggaatcatttatgcatgtga

SEQ ID NO: 835864 - DNA, 618 bp, Homo sapiens
ccaaccaaaaaatccctagaccagattgattcagtcaaattctacaagatgtacaaagtgcttataccaattctactgaaactatttttttttwaatcaaggaggaaggactcctccctaactaattctacaaagccagcatcaccctgataccaaaacctaccaaagacacaacagaaaaaaaaaaaaaactccaggccaatatacctgatgaacatagatgcaaaaatcctcaacaaaatactagcaaaccaaatccaacagcacatcaaaaagttagttcaccacaatcaagtaggcttcattcctaggatgcaaggttggttcaacatacacgattcaagaaatgtgattgaccacagaaacagaattaaaaacaaaaaccatatgatcatctcaataaacacagaaaaagctttcaataaaacccaacattgcttcttgctaaaaaccctcaagaaactaggcatctaaggagcatacctccaaaaataagagccatctatgtaaaacccacagccaacatcatactgaatgggcaaaaaatactggaagcatttccctcaagagctggaacaacacaaagatgcccactctcaccactcctattcaacatag

SEQ ID NO: 835865 - DNA, 553 bp, Homo sapiens
cctgtaatcccaactactcaagagggtgaggcaggagaatcacttgaacctgggaggcagaggttgcagtgagccgagttcacaccattgtgctccagcctgggtgacaagagtgaaactctgtctcaaaaaaaaaaaaaagaaaagaaatagcaaattataattaaaatctacactttacatgcttagagggaaaaaagtgcaacacattaggtgcaatgcacatgttatttactctgtgcataagaattgtgcttgggcatctgaaaaagcctcaccccatttcctacattctgcaggtgctctgtgtatatttttagcattcatactcaatatattagatttatgtaatgtatatatatgcaagtgtatgtttatattatgttatagaagtaatataacttatgcaagatagtttttttaataaagagaaatgaaaatcagccataatttcatctygataaaccaccactgataatatgcttttctgggatttcctatgtgtttttttttcttttgtatttttatggatagggggaaaaaacttacctac

SEQ ID NO: 835866 - DNA, 545 bp, Homo sapiens
ccaggctggagtgcagtggtgccatcttggctcactgcaacctcctcttccagtgttcaarcgattctcctgcctcagcctcccaagtagctgggattacaggcgcccgccaccatgcccagtctctgttttttgatctatgcttttttttttgagacagggtctcgctctgtcacccaggctggagtgcagtggtatgatcacagctcactgcaacctctgcctcccaggctcaagcagattctcccacctccacctcctgagtagctgggactataggcgtgcgctaccacacccagctaactttaaaattttttgtaaagacggtgttttgccttgttgcacaggctggtctcaaactcctgggctcaagtgatcctcctgcctcagcctcccaaagtgctgggattccaggcgtgagccaggacacccagcctctgctacaagttctatacatatgggctcacttagtacccacgacaaccctttgaggtattattatccccattttccagatagaacactgaggttcagagaggctaagg

SEQ ID NO: 835867 - DNA, 618 bp, Homo sapiens
attactgtttcaatgtagttgggacaggaaggtttacgttaaacacaaaatgttmctcacatgtcacttgacttgaactgttcccatcagcaagaaaaattactgcaagaatgaaaggagttcacttttctctgtgactgttccaaagaagcggaagagcattttaagtttctccggtttccttgatgaatgtccctcaaacaacctaaaggacttaaaaaataagagaatggaagatgagttaaaatgccttaatgattcagaaaactacatccatattgctaccaagtaacaaaaagaaataattgttccagaagacaattctgtaatgataagaactagaaaattggtttagattcaaatggcatctggagagaactgaaatcaactagaaccagccttcttcaaagctgttcaaatcagacagcatttgctaccaaccacatttctccaacctatcttccaccacagagaaggcaccatctagccctcccagtcaattggggtcagtcagtgcacagctactttctcaatggctaataacatttataattcataatgttactacgtagtttgataagtaacaataacagtatctgaaaaaaatccttatctgag

SEQ ID NO: 835868 - DNA, 654 bp, Homo sapiens
taaaaactgaattcatatcaagtatcttttctgaccacagtcgaatagtattagaaatcagtaacagatagaactttaaaaactgtacaaatacatggaaattaaaatacacactcatgaacaaccaataaaagaaatgaaaaaaatacaagggaaattaaatatttattgaaacaagtaagaatagaaacacaacataaatcctgtgggatgcaccaaaggcaattctaagaggaaaagtgtatagctataaatgcctgcatcagaaaagtaggaagatctcaaatagcctgacagtacacctccagtaatgagaaaaacaagaacaatcaaatgctagaattcgcagaaaaaataccataaagattagagaagaaattttaaaaatagaaacaaaaaatacaaaaagtcaatgaaacaaaagctggggtgttttaaaaaaaatcaaaattgacgagttttaaccagatgaagttagataaaaagaaaacaaagtcataaagaaggcattagaactggtaacccagaaatacgaagcattaaaagattactaaaaacatcacaaasaaattgaaaaatctggaagtgaatacatttctagacacataacgaattcccaagatagaatgataaaaaataaaaataaaaaacctg

SEQ ID NO: 835869 - DNA, 551 bp, Homo sapiens
aaaaggcatccaaattggaaaaaaggagtcaaattgtctgtttccaggtgacatgaacatatatagagagaaccctaaagattccacaaaaaacctactagaaataataaattagtcaagttccaagatacagtatcaaaatataaaaatgaatactacacccatgcaccaatagtgaaatatctaagaaagaaatcgagaaagctatttcattaccaaaaaaatgatatctaggaataaacttaaccaaaaaggcaagagatcccaaaatgaaaacttcataaaacatagatgaaagatactaaagcagacacaagtaaatggaaagatatcccatctctatgcactagaagaatgttaaaatatgtgtatcacccaatgtgatctacagaatcaatgcaatccatgttcaattacaagacattcttcattgaaatagaaaaakaatctcaaaattcacatggaagttcaaaatacctcagatagacaaaagaatctggaataaaaagaaaagctggaggcatcacactacctgatttcaaaatatacta

SEQ ID NO: 835870 - DNA, 331 bp, Homo sapiens
tgcgcctccgtggcttacctcgctgcagctgttggtgacatcagagaccacagctcggctacagtggtagcaatgtggttgcagtgagccaagattgcatcactgctctgcagcctggcgacagagcaagacaccatcttaaaaaaaaaaaattgaacacagtgttttgcatctgtttcagaaaaacaaatgataccattatttaatatgctgcartaactagaagcctacttataaagttggtggcaaataagtcattggtatatgttaacttcctataatcacttacatgttcctaagagtcactttgtgtatttatataagaaggtca

SEQ ID NO: 835871 - DNA, 331 bp, Homo sapiens
tgcgcctccgtggcttacctcgctgcagctgttggtgacatcagagaccacagctcggctacagtggtagcaatgtggttgcagtgagccaagattgcatcactgctctgcagcctggcgacagagcaagacaccatcttaaaaaaaaaaaattgaacacagtgttttgcatctgtttcagaaaaacaaatgataccattatttaatatgctgcagtaactagaagcctacttataawgttggtggcaaataagtcattggtatatgttaacttcctataatcacttacatgttcctaagagtcactttgtgtatttatataagaaggtca

SEQ ID NO: 835872 - DNA, 563 bp, Homo sapiens
tagtggcatgcacttgtagtcttagctactagaggcgctgaggcaggacgatttcttgacctaggagttccaggtctcagtgtgttgtgatcgtgccatggtgccccagcctgagtgacacagcgagattatatcttaaaaaaaaagtaaaaagaaatgagtgagcatggcaggaatggggacacatagcaatattaaatagagtggtcagggttggcctcctaagtgaaaattgagcaaagacttgaaggaggggaaggagctggccaaggtactgagggaagagcattataggcagaaacaacagaataaagatgctaagagggaactccgtggtgtgtctgaagctcaggaaagaggattgtcgagcagagagggggagagaaggtaggggaggaggccagggagttgtgggactcagatcagtacagattgtgcaagccctgggaggctattgctggggctttggcttttatgctgtctgagatgggasatgcggaagggttctgagcagagaggtgacacgaactgtctattgatttaaaagcatcccatggtggctg

SEQ ID NO: 835873 - DNA, 563 bp, Homo sapiens
tagtggcatgcacttgtagtcttagctactagaggcgctgaggcaggacgatttcttgacctaggagttccaggtctcagtgtgttgtgatcgtgccatggtgccccagcctgagtgacacagcgagattatatcttaaaaaaaaagtaaaaagaaatgagtgagcatggcaggaatggggacacatagcaatattaaatagagtggtcagggttggcctcctaagtgaaaattgagcaaagacttgaaggaggggaaggagctggccaaggtactgagggaagagcattataggcagaaacaacagaataaagatgctaagagggaactccgtggtgtgtctgaagctcaggaaagaggattgtcgagcagagagggggagagaaggtaggggaggaggccagggagttgtgggactcagatcagtacagattgtgcaagccctgggaggctattgctggggctttggcttttatgctgtctgagatgggacatgcrgaagggttctgagcagagaggtgacacgaactgtctattgatttaaaagcatcccatggtggctg

SEQ ID NO: 835874 - DNA, 661 bp, Homo sapiens
gcccaagtagaggtttcccatgagactctgcttttttggcagccttctgtctggacaccaggcatttycatacatcttctgaaatatatatggaggctcccaagtctctagactagtgctccgtgcacccactggcttaacactatgtagaagcaaccaaggcctatagcttgcaccttctgaggcagtgacccaagctgtacctgtacatctttcagccaaggtcggagcaggagctggggctgctgggatgcaggcagcagtgtcctgaggctacacacagcagcagggccatggggctggcccaggaaaccattcttctctcctaggtcccaaggcccgtgacagcaagggctgttgcaaacatctctgaaatgcctccaagccttttccccacaattgtcttggctattagcactggcctccattttatgcaaatttctggagacttcatgaattttccccctgaaaatcagcttttctctttgaccacctggccaggctgcaaatgttccaaacttttgagctctgcttatcatttaaatataagttccaacttgaagtcatttccttggtcacacataacagcacagactgtttgatgcagacaggatccctcttgtgttatggtgcctagaagttcatttcaccagatatgcac

SEQ ID NO: 835875 - DNA, 661 bp, Homo sapiens
gcccaagtagaggtttcccatgagactctgcttttttggcagccttctgtctggacaccaggcatttccatacatcttctgaaatatatatggaggctcccaagtctctagactagtgctccgtgcacccactggcttaacactatgtagaagcaaccaaggcctatagcttgcaccttctgaggcagtgacccaagctgtacctgtacatctttcagccaaggtcggagcaggagctggggctgctgggatgcaggcagcagtgtcctgaggctacacacagcagcagggccatggggctggcccaggaaaccattcttctctcctaggtcccaaggcccgtgacagcaagggctgttgcaaacatctctgaaatgcctccaagccttttccccacaattgtcttggctattagcactggcctccattttatgcaaatttctggagacttcatgaattttccccctgaaaatcagcttttctctttgaccacctggccaggctgcaaatgttccaaacttttgagctctgcttatcatttaaatataagttccaacttgargtcatttccttggtcacacataacagcacagactgtttgatgcagacaggatccctcttgtgttatggtgcctagaagttcatttcaccagatatgcac

SEQ ID NO: 835876 - DNA, 640 bp, Homo sapiens
taaaatcccattattttcaacctataggtcctaccttattcaggtccacataaactagcaagcccttaaaacttttcataggcactcagacacccaaggagagagactgtcagaaaaaaacagagtcctggtaggtgtacctctatttccctaagtactctctaagtatctgtcttcctatgggctcccacttccagattccacttctgcagggctccacagaagtctccaatctttaaatcttcagtctatgaaagcacagattcctgaaaggatggcctcaaatgaccaggactaggagctctctatatccctgctcctgaaaaacaagctaactggagtctccatcacctgcccccagctagacacactaccaactacccaactgaactccatgactgatttgccagccaatcatgcccctgacccagcccacatggacatgggaaggacatcagtgaatcgggaaaagaggcagaggtgaggagacacctgtactgggccacagatctatgtagttcagcaatctccagccccttagtactccaggggctctaagccacccctttctaagtcaggatggaagyagatgacaccacatttctatctgctgcagacgctcctcccagtgtctcaaaat

SEQ ID NO: 835877 - DNA, 427 bp, Homo sapiens
ttcaagaaggcttcagatatttgcattaaaaagaarcccagtgctaacagccaagacaatcgggaaaagtcattgaagatatttcatagctccactttgcagtacttattttctgtgtggtcataatgaaaaggggattcattggctcatgggtcttcaggctgtaaagaaagcatggtggcttctacttctgggaagactcaggaagcctcccaatcataccagaaggaaagcagcaatgaaatgtttcatacggcaggagtaggagcaagactcacagaggaaagaggtgccaccgcctgttatacaaccagatctcatgagaactcactatcactaagtcagcatcaagaagatggtgcttaaccattggtgaaggatccaccccccaacacacctccaccccctactgtttccagacagaagc

SEQ ID NO: 835878 - DNA, 427 bp, Homo sapiens
ttcaagaaggcttcagatatttgcattaaaaagaaacccagtgctaacagccaagacaatcgggaaaagtcattgaagatatttcatagctccactttgcagtacttattttctgtgtggtcataatgaaaaggggattcattggctcatgggtcttcaggctgtaaagaaagcatggtggcttctacttctgggaagactcaggaagcctcccaatcataccagaaggaaagcagcaatgaaatgtttcatacggcaggagtaggagcaagactcacagaggaaagaggtgccacmgcctgttatacaaccagatctcatgagaactcactatcactaagtcagcatcaagaagatggtgcttaaccattggtgaaggatccaccccccaacacacctccaccccctactgtttccagacagaagc

SEQ ID NO: 835879 - DNA, 516 bp, Homo sapiens
accttacaaatctgaattagctcagattggctgctatctcctcaattattttctgataaataagaaacaaacagtaaatagcaacttgcagaaaatctaccagtagtacacaagggcagccaaacttcaaaattcttgccactcaaactctagacggttactatttactaaaatgtaaataataaaaagacttttctcaatcttgtcctccagaaagaaaagccataaagttcaaacactaaccaaaaaaagggtaaggagaaacgtttatatattggcgttccttttattagtgtcttcacatacaacactcctcaattttaaacaccgctttctttcagaagacaaaaccaagacaaaatggtagaaatcaaagggttacagactttgatttaaaaggcataaccttttcaaaaatgaragctatcgatggatcacttctgagaagaaattccctggcactaggatagaggttggaaaaccatctttccaggtgctctaaaatagaatcctctc

SEQ ID NO: 835880 - DNA, 623 bp, Homo sapiens
ttttaaaaaattatctacaaactaggaatagaagggagagtcctcaaattgcaaaatgcaacaagaaaaaacctaaaactagcattatcttacttaacagtgaaatactgaacacttttttcctaagaccaggaacaagtcaaagatatccaagaaataaaaagataactcagttttctaaagggacaaaagacttgaatagcctcttcaaaaaagaagtatcaaaaaccactagaagtataaaaagatagtcaacatgtaagaagtcatcagggaaatgcaaatgaaaaccacagtgagagagactgacctatatgttatatataagaagcccaccttaaatattatgctataggtagcttaagagaaaaaaaggatgagaaaagatataccattcaaagtagacttcaggcactacatagtgataaaagagatcgttcaccaagaagacatagtaatcctaagtgggtacatacctaacatctgaaatttaacayacaagaaataaaaatggttagaactgaaaagagaaaccgacaaagtcacaattatagttggggcctctattatagttggggagtttaacacttctctctcagtaatataggacaagcagacagaaa

SEQ ID NO: 835881 - DNA, 417 bp, Homo sapiens
gtgggagtcaggagaggctcctagagtgttgtccagattggcaacactcagggcaaagggccctagtgcggaggagctcgagcaccctgacctttgccccctcatctctttccagcccctcccctgcctcgtccatccctgccagccagcccctagcctcgggccccctttgcctcctgaagagaccagcctgtccctcagtcaccacctggtcaagctcccccatctcagccagaatggatggctgctcaggccccacacaggccccactccattggacagggccagcccttgtaccrcgttccacagcactagctccccatggcaccacttcctgtcccctggccacaaactgtccctagaagataccagcggggtcccagagtacagtctcagtgggatccccatccagagggg

SEQ ID NO: 835882 - DNA, 641 bp, Homo sapiens
aatgtctttttctcccaatgcgagaacacactaacacctaagacacacttttgccaaaaattagaacttgaatctgtccaggtctccagttctaatgctgagttttgaggaatacaggcaaccaaggaatgtgctaaatgacaccagagggatgtaattaataaaatccagattgcagaaaactctagaggacaaaccatccattttcaacaaacaaacaaacaaacaaaggggagtggagagaaatctatagatcaaaagaaatttttaaaaaattttttgagacagggtctcactctgtcacccagaatggagtgcaatggtccagtcatagctcactgcaacttcgaactcctaggctcaagccatcctcgcacctcagcctccagagtagctgggactacaggcatgtgccaccatgcccggctagttttttaaattttttttgtagagacggagtttcactctgttgcccaggctcgtcttgaattcctagcctcaagtaatcctcctgcctcrgcctcccaaagtgcttggattacaagcatgagccagcctcaaaagagacttaaaagacatattggccaattggccaatttcaatttggatcctagtttgaacaaaaaaattgttaaaaaaat

SEQ ID NO: 835883 - DNA, 454 bp, Homo sapiens
ttaaaaccctcacacatgatgtatagtaaatactgggaatgtatcatgcacaagatttaacctttgaaagtactcaagaaaatatcttagatcattctaatatatatttctaatactatttttaraaatatataaactctgtcattaagcatgaggaaggaccatataaaaaatctcaaaaaccttacaaatgatatgttgtcttctatcaaaaggaagatgtctttgggctgagaaaaatcaccaaagatttaaaaagagatcttactttttgtaaattaatcctttatcttaattcctaagattagatttttagaagggaaaattatcacagaggtaatattcaggcttccagcctgttggaagagaacaggatgaatgtgaccactgtgatgaggtgacagcaatggattccacgagtaattaagcttcatggaatgcatcaaaaagctta

SEQ ID NO: 835884 - DNA, 507 bp, Homo sapiens
atttgaaaaaattaaaatcatagcaagtaccttctcaggctgcatgtgataaaactagaaatyaataataaaaggtactttggaaactgaacaaataatatgaaaatcaaaacagcatatttctgagtgatgattaggtcagtgaagaaattaagaagaaaatgaaaaaatttcttgaatctaataaaaatggaaattcagacacaacttaccaaaacctatgtaatatggcaaaaacagtgctaagagggaagtttatagcaataagcacatacatcagaaaagtagaaggatttcaaacaaacaaccttatgatgcacctcaagcgactagaaaggaagaacaaaccaaactcaacattagtagaaggaaataaatagtaaagatcagaccagaaataaacaaaatggagacgtaaaaaagatacaaaaaaaaaagagacaaaaagttggttattttgaacaataaacaaaattgataaactgctagctacactaatcaagaaag

SEQ ID NO: 835885 - DNA, 520 bp, Homo sapiens
ctctagacattttccctatccttaatttatatttttgttgccttaatttacttttttacctttygtgtgttccttaactttgaattatagatgttgtttttgaccattttggctttttatgtttatactagaagattgaaagatttatatagcaccattacagcactggggtattttgagtttgattttgaagttacttctagtggtgaattatatactttcacatactttcatgatagtaattattgtccctttgctttcagttgtggcactcttaagcatttcttgtaagactggtctagtggtgatgaattccctcagcttttgcttatctgggaaggtctttatgtaaccttaatttctgaagaatagctttgctgggtatagtatttttggctgcagttgttttctttcagctgtctaaatgtatcatcccattttctcttggcctgtaagatttctgttgagaagtcaactaatgatataatggagattcccttgtatgtgacatgtcagtttt

SEQ ID NO: 835886 - DNA, 520 bp, Homo sapiens
ctctagacattttccctatccttaatttatatttttgttgccttaatttacttttttaccttttgtgtgttccttaactttgaattatagatgttgtttttgaccattttggctttttatgtttatactagaagattgaaagatttatatagcaccattacagcactggggtattttgagtttgattttgaagttacttctagtggtgaattatatactttcacatactttcatgatagtaattattgtccctttgctttcagttgtggcactcttaagcatttcttgtaagactggtctagtggtgatgaattccctcagcttttgcttatctgggaaggtctttatgtaaccttaatttctgaagaatagctttgctgggtatagtatttttggctgcagttgttttctttcagctgtctaaatgtatcatcccattttctcttggcctgtaagatttctgttgagaagtcaactaatgatmtaatggagattcccttgtatgtgacatgtcagtttt

SEQ ID NO: 835887 - DNA, 590 bp, Homo sapiens
ataccccgtctgatgttcttyttaatatccatggggggagagaatgatattactttcaatgtcgcaatgggtgtacacatacctgtgatattgtttctaatatccagggggagaggggataatattacacccaatattgaaggggttgtacacccgcactgtgatatttttcctaatatccaaatagggagaggatgatataactcccaatatcacagggagtgtacagcccccctgtgatactgtttttaatatccaggttgggatgctattcctcccaatatcgcagagtttgtacacccctctcgtggtattgttccaaatatccaaggatggagaaatcatataactgtcaatatcacaagagggaatacaccatcccatgatattgtttctaatatccagggtgggaaaaagaatgatatcactcccagtattgcaggatgtgtacacccccatgtgatattgctcttaatatccagaaggtggagtaatatattactcccaattttgaatggagtgtacacacccaccctgcggtattgttcctacagtccggtgcggggagaagatgatattactcccaatat

SEQ ID NO: 835888 - DNA, 629 bp, Homo sapiens
gggatatagaaacttatttgcaaagctgtgaacttccaatttttgtgaatgttcagaaagatgttagcygactagctttcaaatatactatttaattgctacattaggtaagagataatcttttaataaccacctatattaaaatttctccaattacgttcttctcatgtgatgaattctggacatttttttaaataagggcttaccacttattttctttgaaaattttaacacaattttttgttaaagagtatttatttttaaaaagtattttttaaacagttgcatatatataattttggggaggatgattctatccagtaaatttctttatttactaccaagtacatttcaaaatgagacacattctcacaactatattcagcctcaggaaataatttatgaatgaatattacttgaggcacacagagagaagtgactctgcaagacatattccataaaatatatgtatatttttcttgttttatgaaagatgacaaattttagagctctataatgttaaaaaatatataaattttttttcttagggaacactgaggaaaaaaattggattaaagcccacactaattctcaattctggaataaatattttctctcctttcaagcta

SEQ ID NO: 835889 - DNA, 537 bp, Homo sapiens
tagaatagttagtaaccccaaagattcagcattttttctggtaaaataaataaaaaaagaaaaagaaaagtgaaaatacataacacacacattttaaaacatattcaggttataataaaagaaaacttttgaaaaaatgtttgttttagtctaaggcaaacattaatcattaatcagctttctctcaattcttgctgctgctttgatagtaatgctcttttttttaataacagaaactgcaccttgtcttttctgatgccccatggtttaactcatataggacagtcatatttcaaacttttggagccacttgattattcagccctgtttgtcatcaaactgtagctgatatcatcacaaataaaattgtacatagtttaaatgatttattttctccagtggcctttgctaaaagtttcttaattttgactaaaatcatctgtacttgccagattttttaaaaaaaatattctgaaaatakgcaatgttgaatctgcatagcagtcttttatgtccagcaactattttaaggttctg

SEQ ID NO: 835890 - DNA, 595 bp, Homo sapiens
ccatgcttctaaccactgcctatgtgatggttctttgaaattcctccctccaagaagtggaatttaattccccccgtccattgaatgtgggccaaactcaggtgactcatttcyattaaatggagtaaagtggaagtgaagatgtgtggctttagcgactaggtcattcaaagtggctcctgtcttggttgttctgtctcttatacctattgggcatttaatctggggaaaaccagctgccatgttttgagctgctctgtggaaaggctaacatgaaaagatactgtggatcctacagacagcttcaaatgaggacctgaggccctcagaccagtagccagtatgaaactgaagcctcttgaccacagcctccatgagagtaatggaatcttgaccccctagtgaaccacagcctccatgagagtaaaattcaagatggagccttgacacccagtggagcctcgagatgactgcagtcttccaccaacagcttgattcatgaaagaccatcagccagagccacccagctaaggtgattctaggcccctactcctagaaaataaatatttgctgttttgactgccaagtgtttgat

SEQ ID NO: 835891 - DNA, 609 bp, Homo sapiens
atgtgccaggaattttgacaactcctccacaggaaagaatgcattctgttacaagattcctccctgacttacgctgagataattctctgccaagcaagcacagagatcaggtgccagcccttatgagaaatgaaagaaattaatctataatgggagttggaatagtgaccagctttattccactttgtatccttcctttccccaaagtatgtgaatcaactgggtctatgtgaacctgagagaagccttgtgaggatttttaacacaactaccattctctcggactcatttttgctttaaccatattatgacataccaagaaagttggattaataacaatgccaaattttaatgtaaacaattcctattgaaaaaaagacttaatcctttgctttgtgtgttaatgaaagttatctttcagtctcagattgcttcaagggtttatcacagttcttggactacacaggtgggtcacatttccttatgcagagaacaggtggagaaaatgtctaaagcaggcaaccagktgcctcttttagttttttctttttgcaatactctcaatgacctgtttcttaaactaaagcataagtattactttcatcttta

SEQ ID NO: 835892 - DNA, 627 bp, Homo sapiens
caaactaccctaataagatataaggcctatatttaggttataatactttttaatgacataaatgggctgcaaagagatcagctgtgttattctttggaatgggattcttttttacagatgaatttaggaaaagaataaagattagctggtcagtgaattaaatccacagaactgatttcataagcatggggtttgtatgaaaacatagccagtggttgtcttttgcagccatttgatactacatttaattaaggaataaagaatgagctagagcattcttttcccacatgaaaaaaaaagggaggactttaaacaataatcaccccaaagacatttgaagctgcaataattattaggtttaatttgggaaacttagaaaacttatgaaaaaggtgattattttgtcattttattttattcctacatttagcatagtatattaatatctttgtattaaaaaaacatatccaggattctaatgattagatttacatatgatacaaagtgactytgagattctggaaagatttatagaatggccaattatttgtttactactttaaggagaaatacaaagcttccagaatcacatttcaaactgaaaagaccatttaatccttaggataa

SEQ ID NO: 835893 - DNA, 613 bp, Homo sapiens
taatacaaactctacactttaacttagtcccctgcatcttaacttttcgttgcttctatttataatcttactgcctcttggaaagtattatagttgttatttttgatcagttcttttagtctctctacccaagatatgaataatttatacactgcaattgcagtgttacagtagtgtttttcagtgtacttaccattaccctatggccaccaccctggaactgtgctgagtcagacctctgaacccttagaaccttcttgtgcttgaatattggtatctttttctagatttgggaagttctgtattattaccctttgagtaaactttctacccctatctctctttctgcctgctctttaaggctaataactcttagatactctcttttgaggctattttctagatcttatatgcatgttccattctttttaattcttttttgtctcctatgactgtattttcaaatagtctgtcttcaagctcactaatactttcttttgcttgaacatttctgctggtaagagaccctgatgcattcttcagtatgtcggttgcatttttcaactccrgaatttcagcttgattctttgtacttatttcagtctttttgtta

SEQ ID NO: 835894 - DNA, 452 bp, Homo sapiens
aaagggaatgttcaaatctgtgacgtgaatgcagacattacaaagsagtttctgagaatgtttccgtctaggttttatatgaagatactcccgtttccaaagaaatccacaaagctatccaaatatccaattgcagattctacaaaaagcgtgtttccaagctgctctgtcaaacgaaatgttctattctgtgagttgaggacacgcatcacaaacaagtttctgcaaatgcttgtgtctggtttttatgggaagatatttccttgttcaccataggcctgaaaacactcgaaatgtccacttccagatactacagaaagagtgtctgaaacctgctctacgaaagggaatgttcaactctgtgacttaaaagcaagcatcacaaagaagcttctgagtatgctactgtctagtttttatgggaagatatttcgtttttcaacataggcctg

SEQ ID NO: 835895 - DNA, 452 bp, Homo sapiens
aaagggaatgttcaaatctgtgacgtgaatgcagacattacaaaggagtttctgagaatgtttcygtctaggttttatatgaagatactcccgtttccaaagaaatccacaaagctatccaaatatccaattgcagattctacaaaaagcgtgtttccaagctgctctgtcaaacgaaatgttctattctgtgagttgaggacacgcatcacaaacaagtttctgcaaatgcttgtgtctggtttttatgggaagatatttccttgttcaccataggcctgaaaacactcgaaatgtccacttccagatactacagaaagagtgtctgaaacctgctctacgaaagggaatgttcaactctgtgacttaaaagcaagcatcacaaagaagcttctgagtatgctactgtctagtttttatgggaagatatttcgtttttcaacataggcctg

SEQ ID NO: 835896 - DNA, 452 bp, Homo sapiens
aaagggaatgttcaaatctgtgacgtgaatgcagacattacaaaggagtttctgagaatgtttccgtctaggttttatatgaagatactcccgtttccaamgaaatccacaaagctatccaaatatccaattgcagattctacaaaaagcgtgtttccaagctgctctgtcaaacgaaatgttctattctgtgagttgaggacacgcatcacaaacaagtttctgcaaatgcttgtgtctggtttttatgggaagatatttccttgttcaccataggcctgaaaacactcgaaatgtccacttccagatactacagaaagagtgtctgaaacctgctctacgaaagggaatgttcaactctgtgacttaaaagcaagcatcacaaagaagcttctgagtatgctactgtctagtttttatgggaagatatttcgtttttcaacataggcctg

SEQ ID NO: 835897 - DNA, 645 bp, Homo sapiens
ttccctgtgtccctattcactctgctcagtgtggaaaggcagagccagaaagaggggcttcttgcccaggctgtgcgtcacaggcctgtgctcagagtgttaagtaggaagacaccagatgaggagcagaagccaggtgcatggagctccagcctcctttaaactggagtgggagaggggaaggcaggtccaggaggagatccagttgagatggcagaaagttgatgtgatttccatctctaagcctgggttttctcagtaacaggagaggtaacaggtagcaacccctgcaaggtggagggagagtggtagaggcttaggaagggtcgtaggaagatttggaaaagccacactttaaaggtaccattagagagagagctgagaagggacctgtgagaaacctcctggcagtgccgagtggcacatctgcttgggcaggttgggcacagctgaagtccagaagcaccctttattgtggttactgtgtgtatgtatggcaaccctcgagttgggcactgcacatcttacacagtaggaagacatacttggtgcatycaaactcatgcaatctactctctgaattttgacctcaacagataatactgctttgcaaagtctgaaggagagaaaatagttttaagggcc

SEQ ID NO: 835898 - DNA, 597 bp, Homo sapiens
cccgtggccacttcagtctcctactggtcggtgccggatccttttgtggccaccccaggtgtccagatayacacaggagactgtggctggggacccagatgaaagtcgagagtgtggtgagcacttccctgtccggatcatgtgagggatgggctcggtgtcacagtgtcctgcccagcccacctggccggacctccctctgggccagaacagcggatcatgaggacagtgtgaggaagctgccctcgggccagtcggggtctgaccccagggctccccaggccccgctgggcacacgtagacttactctgctgaaccttaaaggcgattcttgttatcggcatcaacgcctgttcgccttctaccagatacacgtcccacaggcgcagggtgagcccgagagagatctgtggggacagcaggtgtgaaagaacctggtccttccaggctggggctggtggctcgagctgcgcacactggggcttcagtctccagagtcagtgaccttccccatgagggtcgcctgagccctccaggacgctgggtcagacaaggtcttgaagctcctcatggggggcactcatttgagtggggatg

SEQ ID NO: 835899 - DNA, 598 bp, Homo sapiens
ttcagtctcctactggtcggtgccggatccttttgtggccaccccaggtgtccagatatayacaggagactgtggctggggacccagatgaaagtcgagagtgtggtgagcacttccctgtccggatcatgtgagggatgggctcggtgtcacagtgtcctgcccagcccacctggccggacctccctctgggccagaacagcggatcatgaggacagtgtgaggaagctgccctcgggccagtcggggtctgaccccagggctccccaggccccgctgggcacacgtagacttactctgctgaaccttaaaggcgattcttgttatcggcatcaacgcctgttcgccttctaccagatacacgtcccacaggcgcagggtgagcccgagagagatctgtggggacagcaggtgtgaaagaacctggtccttccaggctggggctggtggctcgagctgcgcacactggggcttcagtctccagagtcagtgaccttccccatgagggtcgcctgagccctccaggacgctgggtcagacaaggtcttgaagctcctcatggggggcactcatttgagtggggatgtggctcctggag

SEQ ID NO: 835900 - DNA, 536 bp, Homo sapiens
aatttaaatacaatgggaataattggatcccaaggtagcaggggctaagtggcagcactcaaccatgaaaggcaaggtgggcataactactgtaatggacagcagaggcaaagtggcaatcagaatagtctgactcgtgtagagctctggcattggctaattaatcatggtgttcctagaagtgaaattgataggaagcctactgcattcctacttaaattatacaaacaaagaacttccaggtcaaatggacaaacgactaatttgaatcataaaaacagagaatcacggcccctcaatcaatttccaggattgagccagtttagagacccaaaaacccttgaatgaagcggaggccgggtccccttgaggaaggaccccactacattactgacaatttatgcagtgaatctttctcccacccttccccaaggagacctccagccttttaccagggtractgtgcactggggaaggagaaatgatcatatattttggggacttctggacactggctctgatttggcgttgattcc

SEQ ID NO: 835901 - DNA, 511 bp, Homo sapiens
gggaaaataatcacctccttttgttccttcagaaacgtgactcacttatcttttttatcaaaaatgtcatagaatacctcatagaactaagaaaaaatgtgaatgggtsaaggaaagaattcaattaatagtatatttgaatcactgattacttcctttcctccccatttccctgggcagccaatgctgatgctgacatactgacacttgcctctcttattgtataggtactgctgagtgacttgaaaactaccaagtatacaagaaatacactttgaaaacaactgtacttatacacccaaaggggaaattctgaatatcttataactgaagttgtaagataacagcatccttagttatagctgtagcaagaaagagataggaaattgagcagggaaaaaccatctatgattgtgcccggatccaaaattttccagtgggtatgcttagtttggccctaggactggtctagacaagtgccttggatagctcccaaaatgcccatatgcag

SEQ ID NO: 835902 - DNA, 625 bp, Homo sapiens
tgctgggttgaacaatcagtttatgtttatctttttaagaaacaactaaactgttttccaaagcaatgtgctgttttacactctcagaagcaacgtatgaggcttcyggtttctctacatcatcaccaacattcagtagtgatggctttttattatagtcattctagtaagtctaactgcataacaaatgaccccaaaacttagtggcttaaaatcaaacatttattccacaatttctgtgggtccagaatccaagtgtcctaggtcctctggctttcagatttcaaacaaagctacaatcaaggtgttgtctgtggctgtagtcatctcaggttgattaggggtcagggggagaatctgctttcaaactcactcaagcggttgttggtaggattcagttccgtatgggctgttgtactgagggcctcagttcctcactgactgtgggctgaaagcctccctcagttctttgccacgtgggcttcaccatagggtggctcacaacagggcagctggcttccatcagagtgaccaatttgagagggcaagaaagtatgagcaagactgaagccagagtctttttgtaacctaatctagaaatgacagcccattacttagagtctgt

SEQ ID NO: 835903 - DNA, 625 bp, Homo sapiens
tgctgggttgaacaatcagtttatgtttatctttttaagaaacaactaaactgttttccaaagcaatgtgctgttttacactctcagaagcaacgtatgaggcttctggtttctctacatcatcaccaacattcagtagtgatggctttttattatagtcattctagtaagtctaactgcataacaaatgaccccaaaacttagtggcttaaaatcaaacatttattccacaatttctgtgggtccagaatccaagtgtcctaggtcctctggctttcagatttcaaacaaagctacaatcaaggtgttgtctgtggctgtagtcatctcaggttgattaggggtcagggggagaatctgctttcaaactcactcaagcggttgttggtaggattcagttccgtatgggctgttgtactgagggcctcagttcctcactgactgtgggctgaaagcctccctcagttctttgccacgtgggcttcaccatagggtggctcwcaacagggcagctggcttccatcagagtgaccaatttgagagggcaagaaagtatgagcaagactgaagccagagtctttttgtaacctaatctagaaatgacagcccattacttagagtctgt

SEQ ID NO: 835904 - DNA, 512 bp, Homo sapiens
tttagaaagtttattacaataaacaaaatagttacactccttgccttcaaggagcttttggtggtttttgtatccttttttttttctttgagacagggtcttgctctgtcacccaggctggagtgcagtggcatgatcataacctgaggctttcaagggatccacccacctcagcttcctgtataactggtgcacagcaccacagccagctaattatttcttaattttttgtagagacagggtgtttctatgttgcctagtctgatcttgaactcctggcctcaagcaatcctcctccctcggcctcccaaaggcttgggattacaggcatagccactgtgcccagctagagcttttgatcttaaaagaaggcattaaatcctaagtatttccatacccttgccagcactgagtttgtgcagtttaaaaagaaatcsatttcattttgttaggtaggaatggtgttttttgttgtcattgtttaaattagtgaggctgaacaatttttcttg

SEQ ID NO: 835905 - DNA, 654 bp, Homo sapiens
aatcagcaatagagcagggcatggtggctcacgcctgtaatcctagctctttgggaggctgtagcaggaggattgcttgaggccaggagcttgagaccagtctgggcaacatgatgagactttaaatgtagagctttcgtgcttgcaagaaagaaatgtgagtttgcaggtgacagaaaggaagcaggtcttgaaatcagagggaaaagattccagctaccattgcaattgctggtggcagtgggggctggggagaaaatgtcataagtcaagaacttggattttaaggcatacctaggaatgaagcaccttagtcctgggcctggtacagacagataatcctgtgtgaagctggaactctcaaagagtggcaccctcagtgaaaggacacatagcaaaaaatctactcaccagcccagagaggtgacaagaaaatacatattttcttgtctatctgtgtgtatgcatgtatgcacatatgtatgtatgtatgtatttcttgtctgtctttatatatgcagaagaaagagttagaaaaaagaatttctgcagagtcattaaaaacccagacctgcttttcacattgcttttgactttgcttaatactctcyttgtggtcaagaaacacttaaattaagaagttaacataaaaat

SEQ ID NO: 835906 - DNA, 555 bp, Homo sapiens
ttgtaacttggctaactctaattagttctgatattaacaggcccagcataggctgmtaaaaccctttgacaattttaaaatatatttttaactcttacttataacttctattcaacctctttgccaccaacaacaaattttagaacgaataaataagataatttctgatttcggcgagatgatgaaaatataacaggatgatagcacagagcaagggtcggcaaaccacagtagctcatgggtgaaatcctgcttttgtacaacctacaagccaagaatgtctttatatttttaaataattgaccagaaaatcaaataagggatattttattacatgtgaaaattgtacaaaattcaaacttcgaagacttattggaacagtcacacgtgtttgtttatattttgtctgtggctactttcaagctacaacagcagaaatgagtagttgtgacagagaccatgtggcccaggaagctaagaatatttattatctggcccttcacagaaaacatttgctgacccctgacatggaggatgacaggatcaggttaccag

SEQ ID NO: 835907 - DNA, 539 bp, Homo sapiens
gacaaaagcattgtgaacaagggcaagagtggcatgagatgaagatgcagtcaggccatataatattgtgacttagagtaagggatatacacctgttctcctcctgttcctggtacataactcctaaatcccttggaattttgtaagcgataagaacaataagggtgaaaggagcatcttttgttattcataacaagcccggttaaccgcacctgagttcatgttaatgaggggacgtctggaaagcccccagataactataggatggggggctggttgccctggtaaacaaactctgtgattaaagagttggaattttcagcccaacctctcacctcaggggaggagagaagggctggagattgatttcatcaccaatggccaatgattggatcaatcatgcctatgtaacaaagactccataaaaacccaaaggacagtgggaaatagggagtggagggkttgaagagcttccaggttagtgaacatatggaggtgctgggaagacgtgcgcctggagaggccgtggaagctgtgag

SEQ ID NO: 835908 - DNA, 583 bp, Homo sapiens
tcttgatttggcaattttaattttgcaagacactgcttaaaaaaaaaacaacacgcagctgggcacggtggctcacgcctgtaatcccatgtaatcccagcactttgggaggccgaggcaggcggatcatgaggtcaggagatcgagacaatcctggctaacatggtgaaaccctgtctctactaaaaaatacaaaaaagtagccgggcgtagtggtgggcacctgtagtcccagctactcaggaggctgaggcaggagaatggcgtgaacccgggaggcggagcttgcagtgagccgagatcacgccactgcactccagcctgggcgacagagcgagactcggtctcaaaaaaaaaaaaaaaaaaaaaaaaaaccacacacacacgcaccagaaccctgtgataaattgatagtggcttaactttcatcttaactcctttatttctgttccggcttgagtggtatttatcctttccakgtttcttatcccttgtaaaagagcaacggtgacgatttgggagggatcatgccctaagtgctccatggaaccatcagagcctgaacatgaaggcagaagagttt

SEQ ID NO: 835909 - DNA, 559 bp, Homo sapiens
ctcagactgacatggaggtgagatataccaagttcagttcttaaaaaacttttaaaaatccagaatgcatcatgtattttacccataaaatagtcctgtttttgagaacttacttcggtcttgattagttcctttcaaagtttattttacacgattcagaggcaacacttacatctcttttttttttttttttttttttttttaaaaaaaagagtctcactgtgttgacccaggctggcctcgaactcctggcctgggctcaagcagtcctcccacctcagcctcctgaatagctgggaccacgggcgtgtgccatcttgcctggctccatcttatgtctatacattcatttcaggggataagaataaaagtagaggtaacaaaatggcctaaatatacccatcaaataaacaggttgataaattttaaagagtttgttctggtaactgtgaattgaagctgagaatgcactggacagaggaatattaraagctggcaagagggaaggtaaggtaccaggcattaagcatgggatgatgataaagagtgctaaatcaga

SEQ ID NO: 835910 - DNA, 564 bp, Homo sapiens
aactatgtgtcttcccttgggatcccagaattttagaagacaaagacatctagaagaatctgagagcccaggggagccagagagattggtccccttggattccagatgcaagaaraagccattacccaacctttcagggaccgatactgagttcccggttcaggaagttctccctgtgtaattaaggatttgccaagcgcacagccggcattcatacacacgtgttaacgagctggtgccccagtgtccctgggctcccttataccctcccccgacacacacacacacacacacacacacacacacacacacacacacacacacacagttgctttcatgtacccagtggctgaacacaagcttccccatacccccaccccacggatgcatctctaacccagctacttgccttcccagccccctccacccaattctattgtcagggctgaacaaaaggcccaaggcatcctgggttaaaggatttttaactctgccaatcccaggaggctccaacatgaagcagcttcctgctggagaaaagtgactgagacatctccccaggcg

SEQ ID NO: 835911 - DNA, 667 bp, Homo sapiens
aactaccaatgattgcaagtttttctaatacgtgattggttggtgccagctcttggtagtaaaattgaatcagtagaatcagcaaatagttccaaaggtttttactgaaaaaaaaaagctctgactttttaaatcagggactttgaatatcaactgagtattagattatattaaggaactatttcaatcttgacggatgtgataaggacaccttatgtaagaagatcgccccattgttagatgcatactctgtacaataacatatgctgtctgaaacttcattgaagatacttcaggaaaaagaagtgactatagataaaacaaataggacagaatagtaatggttagtgatggctggtgaaactcggtgatgagtccaaaatgctcttatattccccagttttatttatactcaattttcataatacaaaatagaaaagagttctgtggtcaaataagctttgagaaaccctggttttaataaaattaatttaggcattttttttttttttttaccgtatgcctttttatgtatatgtaactgtgtgtgtaaatcttttaattttytctttgattaaaagaaaactttttttaaagactgatattctgccaaatatgctaactaactctaggaatgactgcattctacctaacaaccagtttggat

SEQ ID NO: 835912 - DNA, 542 bp, Homo sapiens
tcataagatgctaattggtggcttatggattttttggaaaaagtttatttcatcaaaactctaaatagatttttgatacagacaagcttatctttttccctgagtagtcagaattgattttattgtatgaaactatatgctttgatttagaggctagaagtagaacatttattcctgaataatatcatgttagtaatagaggtgaggcagagataaataagaaaaagatgaaagcagattaaaagtcagattaacatctgcaataaactttatcttcaaagattagtaaatattctgaaatattctccttagaaaaatgaagctacaagttagctcatccagtaggtatctgtgatttatttgagaattcccaagcgtacaattactgagacttattaaaactaatgaactgtcaaaaaaaaaaaaaaaaaaaaaccttgttctgacagttctgacaagatggtaaggaaractttattacagaaccatggcaataggtttaaaagctttcaaaatactggaaagaaatcaggctcaattct

SEQ ID NO: 835913 - DNA, 559 bp, Homo sapiens
gttttgctttattttaaaacaagaaattctttttggatccacagatttattttacccttgtattagtcagggatctccagagaaacagaaacaacaggagatctctctctctctctctctctctytctctctctctcacacacacacacacacacacgcacagaagagttgatgttgttgcatcttgaatccaaaggcagttgggaaacagaattctctcttcctcagaaaccttagtctgtttttctcaaagctttcaattgactggatgaggcccacccacattatagagggtaatgtgctttactcagagtttacttttaatgatttaaaatgttaagctaatccaaaaaatattttcactgtgacatctatactggtgtttgaccaaatatctgggtaccgtggcctagccaagttgacatataaaattaacctcatgattttttatgttaggaaaattttattcagggattaagtataacttctttttcatttattgtatttccagtaattttctgaagtttaaaatttaataggtgcagatttgtaaggttat

SEQ ID NO: 835914 - DNA, 559 bp, Homo sapiens
gttttgctttattttaaaacaagaaattctttttggatccacagatttattttacccttgtattagtcagggatctccagagaaacagaaacaacaggagatctctctctctctctctctctctttctytctctctcacacacacacacacacacacgcacagaagagttgatgttgttgcatcttgaatccaaaggcagttgggaaacagaattctctcttcctcagaaaccttagtctgtttttctcaaagctttcaattgactggatgaggcccacccacattatagagggtaatgtgctttactcagagtttacttttaatgatttaaaatgttaagctaatccaaaaaatattttcactgtgacatctatactggtgtttgaccaaatatctgggtaccgtggcctagccaagttgacatataaaattaacctcatgattttttatgttaggaaaattttattcagggattaagtataacttctttttcatttattgtatttccagtaattttctgaagtttaaaatttaataggtgcagatttgtaaggttat

SEQ ID NO: 835915 - DNA, 600 bp, Homo sapiens
gatagtgttttttgcagcacaaaagttttaaattttgataaagttaaatttatctattttttttagttgcttgtgtttttaatgccatatttaagaaactattacccagtccaaggtcataaagatttacacctatgttttctcctaagagtttcacagttttagctcccacatttaggtgtttttttttgtattttgtttgtttgtttgtttgtttttgagatgggattttgctcttgtccaggctggagtgcaatgacacgatcttggctcactgcaaactctgcctcccaggttcaagtgattctcctgcctcagcctcccatatagttgggattacaggcatgcaccaccatacccagccaattttgtatttttagtagagacggggtttcaccatgttggccagcctggtctcaaactcctgacctcaggtgatccacctgcctcaacctcccaaagtgctgggattacaggcatgagccactgcrcctggccttacttaggtctttgatccaggttgagttaatttttcagtattgtgtaagatagggatccaacttcattgttttgcatgtagatactcagtggtcccagcag

SEQ ID NO: 835916 - DNA, 603 bp, Homo sapiens
acatagcaagatcctgtctctaaaaaaatttaaaaaatatatatataaaaatataatgtaaagttrcatttatcaagaacgtctagtgttggcaaatgaacaaataccagtagaccaacggaacagaagacagagcccagaaatagacccacataaatacagtcaactgatctttgacaaaggagcaagagcaatacaatggagcacagataatcttttcaacaaaccgtgctggaacaactagaaatccacatgcaaaaaaatgactctagacacagattttacacatttcacaaaaattaatttgaaatgaatcgcaaacctaaatttaaaacacaaaactataaaacttctagaaaataacgtagtagaaaatctacgtggccttgagtttggcaatgagttttaaaatacaatgtcaaaggtacgatctctgaaagaaaaaattgataagctagactttattaaaattaagatttctgctctgcaatagacactgtcaagaaaatggagagacaaaccacagactggcagaaaatatttgccaaagacatatctggtaaaggattattattgaaaacatactaagaactcttaaaactc

SEQ ID NO: 835917 - DNA, 600 bp, Homo sapiens
aatggaatttggttgctacagaaagccaaggagtaaatacttaataattttactttttagaaaaygaagatccccaaatctgctgttatgatgaataatctaagagcacaattataatctgagatctgaaccaggtcagtttggatttcatagcctatactttcctcttccctatatcataactctctggagaaacaagtgagatgcctgatatgaaaacactctaagaatagtttatatctctttgtattctttgatactatggtaagaattgtcccctggctgcagaggattgtcaataaatattacttctaattgagccactagtgtagtagaaagagcgtagactggtattcaagccttgattgtggggctcactattcagcagctctggaaaagtcactttaggttcagtgaacccctatttttccctcagggataattaattgtctcttacgcatcactctgcacaagagccaggctctagcttaagcacttacagtattaccatatttaattctcacatcacatagataacaataatagatagttatattttccagttggaaataggcttagggaaattacataacttgctga

SEQ ID NO: 835918 - DNA, 463 bp, Homo sapiens
cagggggaatgctttcaacttttccctgttcagtataatgttggctgtggatttgtaatagatggcttttattaccytgagatatgtcccttctatgctggttttgctgagggttttaatcacaaagggatattggactttgtcaaatgctttttctgcatctattgagatgatcatatgattttttgtttttaattctgtttatatgatgcatcatatttattgacttgtgcatgttaaaccatttctgcattcctggtatgaaacccacttgattgtggtatattatctttttgatatgctgttggattcagttagctagtattttgttgaagatttttgcatctatgttcattgggggtattggtctgtagattcccttttttgttatgtcctttcctggttttggtattagggtgatactggctttatagaatgattaagggaggattccctctttctc

SEQ ID NO: 835919 - DNA, 426 bp, Homo sapiens
ttgggagcaattttcatcagttgttagctttgtttatttgtataactccagttaatataagaagtacatgtatgtggtagaaattrtgtattaagtccacatgcacagattaataggttcatggaccctttgaaatagtaaacaactgaaatagatttaaaaaatactcatatacttctactgaaacagattgtacacataatcaatttacttgtttattcaacatgtgttaattgagctcttattatgcttccaagaactctgataagtgctgggaatgcagtaggtagcaataccaggaataaatgattaatgcacatgaaagtacttgtattagtttcctaagatagccataacaaagcaccacaaactaattggctttaaaaaatagaaatatattctcttacagttctggaagctagaagt

SEQ ID NO: 835920 - DNA, 562 bp, Homo sapiens
gaggctcttcaacttataatggggccacatttgtwtaaactcatcgtaagttgaaaatatcataagttgataacgcactttatcaggttctctcttattcctaagaacacatcttttcaaggattaagttaggccctttgcaaggtgctactccccctcttccatccagcctctaccatggtcactttaatgctatcataagtatttttttaagattatctgatcatctttcactaaattggagtcctccaagaaagagaactatgtatttcatcattggtttatttgttcattcatttatttgtgtatcactataagattgatagtcaacattgaattcttcctatatggcaggaaaggtactaagattttcccatattatctaatttaattatcccaacacctctgtaatgtagctactatttctatctcatttttcacatgaggagactaaggcacatatatttactgtccagtcacatggccaggaaatgggagagtcgtgtttctatggtttgcccacatatgtgctaagtaatcactgagtggtataaaaaatata

SEQ ID NO: 835921 - DNA, 623 bp, Homo sapiens
tatagtcaaaattttacaattttgcaaatcaaatacattttatatatttacaaataggaaactatttttgagagagagaacacgactagactacggagattcaagtagctgtgttaggacataaaccacacttgaacataatttctagaatgctggttctgaaaagccaccaagttgtttcatttctacctttcccttcacaaagcctttcagccagtcattctacttaaaaatttttaagtcaaatcccaactccaggttttttgctggtgagatgttttgccaatttgatgaccacatgaaggaattataaactattccttcatttaaaaagaaactatagggtctaaaatttaattagcatatttagtgactgcggccactatatactgagttcttttgcaaaaaccctcaagttcctgggaaaactcaatcctaggtaaacacaatcatctgtcttttctctatgtttgtacctgggaagctaaactcttatcataaagctgattgatacacaaaaagcagaaagtagtttagtttctcattctgaagaagatatttcatacctscctcacccttctgcaacacctccatgcctccttcactcacctgtctttcaagga

SEQ ID NO: 835922 - DNA, 512 bp, Homo sapiens
aaaaaaaaaaaaaaaaaaaaaaaaactcttctgagaggtgtagccagggaggcatgttagtgccaaacagagattaaaaccttgaatcttctgacttctgatctagtacatgtgaccctatcgcctgaaggaacaaatgtccttgtagagttaacaagaggcagagaaaaagaagaaagattgtggtatgcaaaaggatacctatattatttccaaaaattaatttaaatagaagaccacgacaagaagcacttggttttcccctgtgggacatcttttgttgattaatttttactttagggcatcaaaatggggtcgattatgttacatcaaccaaaacaaggttgacacccctggagttgtgactctctgaccctgagcccctgactccatgacagcctgcacaagrgggctgttagctcagtaattcggaaagaccttgctcacaaggtgggtggcggatggcatcacaaaataagtcacacgaagatgtctgctccagagtatttttt

SEQ ID NO: 835923 - DNA, 280 bp, Homo sapiens
ttgcacgagcttattaacacaaagcaaccaatgtaaaccaagtaatttgttttaatgccagatgtgaataagttgttctgctttttttcctactttataacctccttcgcatcaaccttgatttctatagttayataaacctttgtatttaaacaaagagatctcctggataagttggaagaggagaaagaaaaaaacaacttgggctggggaatctgatgattgtggggtcagcgttaacttttggcctcagttttaaccttgggggactgttttcatt

SEQ ID NO: 835924 - DNA, 567 bp, Homo sapiens
gtgctgggattacaggcatgagccaccgtgcttggcctctacctttaaatagatccaggatggaaccacttctcaccagcaccactgcagtagcccctgcctggtgcctctgcttctaccagttccactttctccaggctattagccaagcagcatggtgaaccttttagttcacctaagtccaagacacatctctcctttgttcaaagccttttgataattttgcatttaaaaccaaaattattaccatggccttcaagactctataagatgtgacaccccagcacccctctcctctgccatctcttctctagcattctctccccatcactcagctccagtcccactgacttccttgccaatgtggcccctgcctcctggcctttgtacttgcggttccttctgtctggcacatccttcccccaggaagccttcacccttgagccctccttttcttctacctcattacctggctttatgtttcttcatagaacttgtacacacaggacatataytcacttgcttcctgtccattctttcttttttttttttttcttggaaacagac

SEQ ID NO: 835925 - DNA, 596 bp, Homo sapiens
attgccagtgaacttcaacccaaagaggagttcaccaagatacctcataatcaagttattaaaaatcraagacaaaaaaagagaatactgaaagcaagatgtacatgtacatatgtgtgtgtgtgagtgtgtgtgtgtctgtgtatctcaggccaaaagagagtgaaatgatgtattcaaagtgctgaaggaaaaaaactgccaaacaagaatacattatctggcaaagatgtgcctcagaaatgagggagaaataaaactttctcagacaaacgaaacctaaaggagtacatcaccagcagtcttgcttcatagaaattgttaaagagtatcatttaagctaaaataaggataaaggctgcaatttgttttttaaaaaaacagatgaaagtaaaaactcaattataagaaatacatagtcatactcagaattctctaattttgtaagagtggtatgtaaagcaattttatcaccattacaaaggttaaaagtcaaacttttaaaaaataaattacagctataataaatggttaaggaatacaaattacaaaaaaaagtaaatattgacatcaaaattataatacatggaggggag

SEQ ID NO: 835926 - DNA, 617 bp, Homo sapiens
acagatgttcatgacattgccacttataataataaaaaattgaagacagaataatgtccaacaattgggaagcagttaaataaattatgatatawctttatgatgggcaattatacccattagagtgatgttttccaagaattttaatggctgggaatatataagaatcttgtgaagagaaaagtgggattcagaactacataaactaattatataatacacgtgtgtataatatatacacccatgtagaataatatgatatgcatatgtatacatttataatatataatggaaaaatatgtgaaagaaaaaaccataaatattaacagtccctatctgtggattatttaattatagttttatttgtttccttatttaatcttttctatattttccatgttttcttgtcagaatttaaaaatatacttgataggggagaaatgtttgtttgaataaaagggacacaattaaactccatcaatcagtacccatcatgaagggtacaggtgactccatgaatttgcagaaagaattttgaaaagaacactaagagcccaggatatcaggcagacgtaaaatctagcttttagtgtctcccccatatcagttttggttgc

SEQ ID NO: 835927 - DNA, 579 bp, Homo sapiens
tctcgctttgttgatccaggctggtcttgaactctgggcctcaagcaaccctcctacctcagcctcctgagtagcaaggaytacaggcttctaaagaatagaggcaaggtgagtagccacaccttactgcaccagaatattctgtttcttttattgtctccccaccttttttgttgagacagagtctcactccgtcatccaggctggagtacagtggcaatcttggcttactgcaacctccgcctcctgggctcaagcgagtctcatgcctcagcctccctagtagctgagattacaggcgtgagccaccacacttagctactttttgtatttttaatagagatagggtttcaccatgttggccaggctggtctcgaacttatggcctcatgtaatctacctgcttaggcttcccaaagtgttggaattacaagcgtgaggcatcctggctttttttttttttttttttttaacatttcacttatatgtaaggttttcccctttaccttgttgtagctgctgtttgaactttatcaatgtatttttgttgttcatttcattagctattggtgcacagaa

SEQ ID NO: 835928 - DNA, 534 bp, Homo sapiens
aattcagggtgtttcacatttccacataaattttggcattgtttctttatacttcctaaaacactatttgtcatatactaaatgtatacaattagaaggtacaaggaagrttttcatacatgtatatgttgaataatgataaaatcaggttatttagcatctcttcatctcatatagttattatttttggtaacaacattcagaatctttccttccagctactttgaaatatatgatacatttgtgttaaggctagtcacgctgctgtggaatagaaggccagaattgatcactatcatctgagagtaactttgtacccatcactgattccttccgagactgcctccacttccccagcagcctctggtaagccctattgaactttctacttctagaagataaagcttttttcagtctacatgtgtgagatcacgtggcatgggactttctctaccaggcttattctttggaccttgttcttcagatttcttcatgtggctgcagatggcaggatttcccaaaggtttatggctg

SEQ ID NO: 835929 - DNA, 577 bp, Homo sapiens
tgtttccatgttttatacccacagaatttctggtttttcccgttggagcccaaggagcaagggcagaatgaggaacatgatgttccttacaaacagttactcatgaggctgcagcacagaaactgcaataaatgtcagttacaaagtgtccatgtgcattttaaattgatggttattaaaatccttctttatctataggggatctaaaaaattaaacaattcgtaatttaaacacagttgccaggtagcctgagtcaaaaatcaggagaggctccatggtctgaagtctcctagtgctcaccttggtgagggtctagttgcctaatgggttggtgtaatgaagtcattctaacacaagcaaaacacgactcccttagttattcaaaaaatcaggaaatagaaaaaaataaatgagaataaaatattgacaggagagaaaaatgaagagttaattggcgatttgaaggaggtgaartggacaaaaagtaaatttagcaattagaatttaaagtcagtagataattaagtcgaataatttattcttatgtccatgtattttggttttaaagttttgatt

SEQ ID NO: 835930 - DNA, 472 bp, Homo sapiens
ttctagaaacatttgtttctaaaacttgttttcatgttagagcactattttgtgttcaaattgaaaatactatatgttcagattttttaaaaaacagtattgcatkaatgttttaataaaaatattcctaaatgagcttgagcaagtacagggaagataagtaaagtaaggctttgtggcataggagacatttggtggacatctttcagctcaactaagatttgaaaaaaaaaaaagaatttttataaaaaatgtaaaggcaggatttaccctgatgagcttgtggagaaaatacaaagtctaacataattcaaaagagactaatcagtcaaagtagttttgaaggaaatatcttgaagagagagaacataaaatgaagatcaggtatgtaattattttaataatctatccatgagataaaaagcattgggtttttttttatttgtcaaaaacagacaatagtttcaaaaac

SEQ ID NO: 835931 - DNA, 618 bp, Homo sapiens
atgaaaagtattgatcctgggtatgtctgtgagggcgctgccaaaggagattaacattggagtcagtgggctggggaaggcagatccacccttaatctgagtgggcataatctaatcagctctcagggaatataaagcaggcagaaaaacgtgaaaaggagagactggattagcctccagcctacatccttctcctgtgctggatgcttcctgccttcaaacattggactccaagttcttcagttttgagactcaaactggctctccttgctccttaagcttgcagacagcctattgtgggaccttgtgattgtttaagttaatacttaataaactcccatcatatatatatatatatatcctattaattctgtccctctagggaaccctgactaatacatgctgtcatccaggctttgttgtttcatttctagaacacgtagaacagctttagcataattcttaagggccccagcattttcagaatgatacaagagcattggcttcaacttaaagtcacccactgcattagcttctgacaagaacagcctgtcctctgaagctgtgaaaccaggaaytgacttctcctctctaggctatgaaagtcctagatggcat

SEQ ID NO: 835932 - DNA, 571 bp, Homo sapiens
tccccaatatcctattcttcagaatatcagttctatgaaaaaagaagtcctttaataaataagtttgggagttcaggcatactgtayatatatcatctcctcttgcagatacaaaatatatgtatacactgtatcaaaggttctaggaatatacatatcataacaaaagttctaggatgccttattataaaccactcaactgttgtttataccagcatttgtccaatgtatttgatcaaaaactcttttgccccgtataacttctattcacactctgcaggacttttgggaagagccactttaaaacacaatgtccctggccgggcacggtggctcacgcctataatcccagcactttgggaggccgaggcaggtggatcacgaggtcaggagtccgagaccagcctgaccaacatggtgaaaccccgtctctactaaagatacaaaaattagctgggcgtggtggtgggcacctgtaatcccagctactggggaggctgaggcaggagaatcacttgaacccaggaggtggaggttccagtgagccgagatagcgccactgcactctagc

SEQ ID NO: 835933 - DNA, 616 bp, Homo sapiens
cttggctaagtgaaagaatccagtctcccagaaacccacacatcgaatgattctatttacatgaaatgttcagaataggcaaatgyattgccagggactgggggaaatgggagagtggggagtaactgctcatggagatggggtttctttttggggaaatgaagacgttctgaaattagtggtgatggccacaaaactttgtgaatatactaaaaaccactgagcactctaaaagggtgaattttattgcctgggaatgatatctcaatttaaaaacttttttgtaattaaaaaaaaagacaagtcttgcctttagaatcccctctcctcattccgggaaagtacgtgtcgtgggcaagtctaagcagaaagtgtattgaatctgccaggttgaccacctgtttcatgcagcttagggtcagaagaatctgtagctctgtcaagaagacgcagggctacagataggaaacaggagggaataatccagccagaaattatcttgcccaaccacagagggcatcatctacattctgctgggatccataccagaggaggacagaaacagaaaataggatcgggactggaaactagagctgtggttgtcttctggatggat

SEQ ID NO: 835934 - DNA, 518 bp, Homo sapiens
ccccacccccagtccagcccggcagtgatgcagggggaagggggcaggggtgtggggggtgaagagggcaaggaagccacccccatcctstgggcacagccaacaacccccagttttatacaggagaggcttcttggggaaaatgtcattccaggagccctcaaagtgatgggatccactgactggaaagagaaaaaggtccaagaaggaggaattcaagcccctgaggcccctttgggtagaacagggcagggaagagcctcagggtcgcacagcctggaagccggagggcaaagaggaggagatggagagccagactcccggagaaccccggagggccttggaggggccaggggtggggaagtgggaggataattttatgcatcaatttggctggaccacggtacccagatatttgatcagccattattctagatgtatctgggaaagtattttttgataagagtaacatctgaatcagtggatgagtgctgagtaaagcaaattacctcaccagg

SEQ ID NO: 835935 - DNA, 567 bp, Homo sapiens
tccttccttggtctgtgcacagagtcatcgctgcagtatgtgaagatcctttaagctaggttgctggccagttttttattttttatttttttctgcgttgctgagagctcgggttattcctcgcactgggtgggtcttgatttctcacccctgaggccaccacaagggggcagggcaagcctcctcacgagagagaaccagagaccatcccgggaggggaatgcaatcatgggcgagcccccaaattgttacatataaagtttcgatgctacaaaaggaataccactcaaatataaaatttttttttaattctcagcaaggcaagttacttctatagaagagtgtgcccttaaagatggtgcaatggtgaacacacacttggacaagggaggggaaggggttcttatccctgacgcacatggcccctgctgctrtgtcattcccctgttggcaagggttagacgcacaggctaaactaattctgattggctaatttaaagagaatgatggggtgagtgctttggcaggagtcagggcagagcaggtagcaggtaattggaatgagtt

SEQ ID NO: 835936 - DNA, 591 bp, Homo sapiens
ggcctgcacggctgagcttcccaaagtttagctgcacaagtccaagtgcgcaggaggcagagaactggatttgccccagggttgtggttttgccaaatgaatgggatgaagggagatgggcaagggagttggaagtttctttcaccaaattcattgttaatttcatcagaacaaaacgattcttttgcttgttcccacagagaaagcaacatccccaaatacatatgaaacaccgatcactaaaggcacaaaacagacaccacatgatcctctattccacttctcttaggcagctctgttcagctacggggactcacctagttccctggcagtagcccaagtctctttcagcaacagcagccttgggaatcttctgtacataataccttcctgaggttggtttatcagcacattaaaagcacctcctaccagacacacagaatggagccccattagaaaaaaacaactaaactctaatgtcatcctgcagcagactgcaatccacacaccagtgtccagggtrtaatcagattctccagaatatggtatacacagtccattcttgactgctggcagtggcaggcaggagaa

SEQ ID NO: 835937 - DNA, 553 bp, Homo sapiens
ctgttcggggtccctgacttcccacaacaattttataatgcttttatatttctaacactctgctcatcctctacaatttttgttttatagatttttaagattttgaattttataccaaaagattatatattaatgtaacatcaagattttccctttttaaactgttaatcaacatttttagctttctattttatcaccttaacactgatagtttttaatatatattctataatttttatatttaaaattcaattgaagcatctttttttataagcaaaaattggcttatatcatttttatttgttggaatttcatgtctgtttgccctctgttctttcatattacctcatgtaaaaaattttatttttaatcttgctttattttctatattttcttatgtctctggttaagtgtgtgtgagctgagctctgacgaattatttgaagggygataggaaagaagtgtagacaccattttaatagttttcaaagtatgccaggcaagtgaagattgtgggctggattcatgttacttgtggacaacgttagttgtg

SEQ ID NO: 835938 - DNA, 636 bp, Homo sapiens
aaacataggcaaccacctctctactctagtcaagcacagcaaataaaaaatggtggctccactccaactcatgccaacaaaggcccagtaggcagtctgacctccactctcatgaggcaccctagactggaaatatggtaatataagagaaggctaagtagggagttgggactttcacccctatgggagctgataacctctcctcaaggtgttagtgaagaccttctggggagcctggacttacatcatatccagcagtaatgaaacatttttcctattcttggctgtgttgcttccacatgtggcctagtggagattcgggactttcatcactgcccagaggttaaaaggctacattcccccatcccctgagtggtatcagtgtaggccacattgatagtgaaaaccctcacacatgcccagcaataatgaggagttcccttttttccacagggtgtcagtggaggtctgctgggaaactggtacctcttccactatctggcagtartaataaggcattttctcttaccctgccagagtagtatcagaggaaggcagttaaaacagatggtttaaataagacaagagtttcataacataataccccaaatatccaggatccaggtgttttattta

SEQ ID NO: 835939 - DNA, 649 bp, Homo sapiens
tgattttcacacaattagaataagattttcatctgcaaattctctaatatgttctctctctmtatatatatatacacagatatacacacacacagtcctcctaagcataagatatgtatttaagaagggcctttaggaaatcctatttatgttatctttttctgtgacatacattagttgaatatatataaagtaaaaacttggatttaaacaggaaggaagtggttggaatacaagcatgtaagggaggtgctttgaaactatgaaagacagtcttactctttaattttgcttttgtgatacatctatagaatattcttcttataatccatgattttagtgaagacaccagaccaaaatagcatacattaccaaatactgaggtactttcaatattttttacttaaaatttgctttctttgttcattcattctttctttctgcagggtatgaatgacattttaagataaatatccatctgttactaagtttatctgtttctgttttctaaagcaatcattctgctatgaagtgctccactatctgcagggctccaaagttaataaatcaattagcaccaattaatcatttatataactcatgacactagggggcaaaaaaaaaaaaagctcaagagtgcatattactt

SEQ ID NO: 835940 - DNA, 585 bp, Homo sapiens
ttgtaccaacctaatagaaattctaaaactgaagaacttactgaatgaaaaaaataggtattaaatatgtatttgaaagcttccccaatagatcaagcagaagaaaaaaatttcagaaygtgaagacagatcctttgaaataacccagtcagacaaatattaaaacaaaagaataaaaaggaatgaataaagactacatgacaaatggcactccacaaagtgaccaaatattcaaattttcagtgtccatgagggtaaaaagcaaacaaaagggatacaaaacttttaaacaaaataacagctaaaaatttcccaactctaacaagaggtttagatattcagacacaggaagctcagagatccccaaatggatacaattcagaaaggtctccatagcaccttatagtcagactgtcaaaggtcaaaggcaaaaacagaattctaaaaacagaaagagaaaagcatcttgtcacttataagggaaactccatcagactaacagcatatttctcagcagaaaccttacaggtcaggagataattggacaatatagtcactgtgctgaaagaaaaaatgttagtcaag

SEQ ID NO: 835941 - DNA, 561 bp, Homo sapiens
ttcttgcactacactaacacaaagactaactcaaaatggaccacagaccttagtgtcataactgaaactataaaactgtctgaagaaaacacaggtataagtcttcatgaccttggatcagaccatggtctcttagatatgaaccaaaagcactagtaatggaagaaaaaagtagataaattggctacattaaaattaaaacttttttgttgcaaatgataccactaataaagaagacaacatacagaatgggagaaaatatttgcaaatcatatatctaatctaacgagggactaatatccaaaataaataaataacttttacaactcaataataaaaaacccaactgcagattagtgaaggatttgaatagacatggttttaaagaagtcatgcaaatggccaatgagcgcacgcaaagatgttcaacttcattatccaccaagaaaatgcaaatygaaaccacaatgagacatcagctcaaacctgtgaggatggctagatgagaaagatagatgatgtaaagattggagaggatgtgaagatatcggaaccactgag

SEQ ID NO: 835942 - DNA, 546 bp, Homo sapiens
cctacgttgaaatgtacaaccagcacctctctaggcacacaccccagggaaactccctgagtgcagacacacaaagacagcagagaaagatgccagaaaacacaggagcaggcacctcccacctccagccaagacggaaaagtcttgaacagacacttagaagaagaaatacaaatggacaataagcacaatcaaaagctaaacatgaaagaggccgacagtgcgccacgtgctgcaggattcactctcaccacactcagcaccaggttccgtgacaggcgaaggtcgcagctcggcaggagggtttgcatgttgtgtgggagcgacactggtgccctcagctaactgccaagacccgccaaagtggaccctttcggccagcacagccttggtgatggacgcagaggggcagggcggaagccagaaggcaggagcgagagctggatgcyccgggaaccagatggaagcctgtctccgtccttgctgctgagggtagcagtggggtgtcctacccaggacaggtaccccgcacgcctggggttagct

SEQ ID NO: 835943 - DNA, 612 bp, Homo sapiens
gggcatcatggatcatgcctgtaatcccagctatttgggaggccaaggcaggaggatcgcttgagctcaggaggttgagaccagcttgggcaacatagtgagaacctgtttctatgtaaaaaaattaaatttaaaaatgtacttacagaatactcataatgaactttattattgtaagaataataacttttgactgtatagcagcatttttaacttttcaaagtgttttcctattttcctatatataaccccccagaggggggcaggggaggtctcattacctccattttagagatgtaataaagtccccgaagcttaatgacttgtgccaactacatcataacttagtggtcaggagtcaggactggcacacaggtcttctgacctcatttcactgtacatttggtgttctaagatccaagacacaagaggatgctttattaaagtgtcctttaaaaacggacttgagccgaaatcagcgccttccaagcttctccacatgctgttgagtgtgctgwgcatttgctcctgagagacgaaagcacagataaagatgccctgcacactgggagagaaatgggaatcttcaaaacaaaggaatctcattcctct

SEQ ID NO: 835944 - DNA, 515 bp, Homo sapiens
gatcagcttactgaaatttgttaggagtgcaaccctaggcagaatatttcacaaaaggaagcttatgtgtaaaaagtggagttcggttgggttttttttttttttttttctattctgaggaatattttcttttccttttcagaaaatccaggtcaggaactgtatctttgctcagccacctgcaaacagacttgagaacaatgtaaaccaccctctgcaggatattgattctgatggagtaaatgttgattaagcagaatggtgtttttttttttaactggaggaattccagatctttccttaggcctgtctctccagggaaatgagctctagccttaaaaatctacagaaaacctgagtaagaatgaagatttatgatgggasacgctgggcggaagacggctggctatctggtgggctatctagaagctcatctttgtgttattagagaaacactcccgctcttgacaggatatggtctgcttatcacataatcttctcaagtttcattccca

SEQ ID NO: 835945 - DNA, 637 bp, Homo sapiens
atcctaaccactctgtctcctctccatcccccaactgaattctatgcaaagtcataatctttttttttttttttttttttagacagggtctctgtcacccaggctggagtacagtggcacgrtcccggctcactgcaacttctgcctccggggttaaaacaattctcctgcctcatagctgggtttacaggcatctgccactatgcccagctaatttttttttatttttagtagagacggggtttcaccatgttggccaggctggtcttgaactcctgacctcaggtgatccaactgcctcaccctcccaaagtgctgggattacaggcgtgagccaccgtgcctggccttcataatcttctttctgtttgttatttttcaaaaaacgggcaatcacttgaacaataatacgaagattgcaaatattcaccaagcagaatttagcacaaggaatttagcacaatgaatgcctgttgagtgatgaatagatgaataaatgaatgaatgaatgaatgagcagacaaatgaataaaaattcaactcttgtgattgctgctgaaaaaattcagaaccagaatctgatctatttttttttaaacatctggtagttcagaagacttgcctcagtgtaaggtgg

SEQ ID NO: 835946 - DNA, 596 bp, Homo sapiens
  misc_feature 588: n = A,T,C or G
aggtctcaggtcaggctcagtggctcacacctgtaatcccaacactttgggaggccaaggcgggaggattgtttgagcctaggagaccagtctgggcaacatggcaaaacccsatctctacaaaaaatacacaaagattagcagggcatggtggcgcatgcctgtagttccagctactggggaggctgaggtgggaggatcacctgagcctggaaggttgaggctgcagtgggctgtgatcatgccactgcacaccagccttggtgacagagcaagatcctgtctcaaaaaacaaaccaaaccaagccaaaccaaaacaaaaacaaaaactcagaacgtctcagattttagcagcccaaggttctctcagcagcagccccagctgtctgcttcccttccaggtcccgttccaggggcaaggactgggtctggacctgggggtgggggtgggggaggggccatatggggagtctctcatcttgcgtacaaatagtccaggaaccggggggcctgagacacttattcatggtggtctgattctatggggtggggtaagtgtcagggcatggaccgtctttaggcattaangacattca

SEQ ID NO: 835947 - DNA, 635 bp, Homo sapiens
aatttcatgattctggcaacctatggttttgccaattattaagagattatgccacagaatcccctgcaaagctgcaaattgcgaaaacaagttgcacacagagtaagtgacagagccaggaatagctccaagtctctgaccatcaagaatcacctgaggcaggagaatggcgtgaaccagggaggcggagcttgcagtgagccggggatctcgccactgcactcccgcctgggtgacagagcgagactccgtctcaagaagaaaaaaaaagaatcacctcaggccaggcgcggtggctcacgcctgtaatcccagcactttgggaggccgaggagggcggatcatgaggtcaggagatcgagaccaccctggctaacacagtgaaaccctgtctctactaaaaatacaaaaaaattagccgggcgtggtggcgggcgcctgtggtcccagctactcgggaggctgaggcgggagaatggcttgaacccgagaggcggagcttgcagtgagccgagatcgcgccactgcactccagcctgggcgacagagtgagactctgtctcaaaaaattaaataaataawtaaataaataaataaataaataaatatatatatatatatgaaccacctctcca

SEQ ID NO: 835948 - DNA, 577 bp, Homo sapiens
gaccagtctgtttcttagttatgtcccaggaagtcatggtcaggctgctggggcttaayatgaagaaccctgctccagctggttaaaatgaccattatatacgctacttgaaagttactatttttacataaaagacccgaaagtagcagacatctataatgtgaaattattcttagcacatggaggtagctttatggcaaggttttgaaagaattacattcccttcatttcttcagcatcttttttatcctcttttaagatattctctgcctgatcttcctcacaaaggaaaagtcacccaatgtctctgggaaattagggtaaggtcatataggaccatctaaagatttgctttagacaaagctcttttcatagctgtctaaaaggccgtagaccattgaaaatggacagagaacaggaccactcaaatccatgttgcttaaagagaagtattttaggtgacctttaccccttccttatcaatgaaccctctgaaggtttggagatcactagtgcagatatgtcacctacgaatacaccttttcatacacaatttttgctcttatattttcagaac

SEQ ID NO: 835949 - DNA, 638 bp, Homo sapiens
ctaaattaaaatatttactctaatatattttcttgatatagtgttaaactrttttgactcagagcagcacaactctgttcaaactattcaatgcccttaggtgttagggataagccatgattctttcaaggaaaacatcttgagtgagtagaatagtatgcctgaatttttgccaagatgtgttagaatttctctagaatcatttcctctttttaaaggtcaagaggaagctatttggatgacatggaacatatgccaaatgctgattcttatccaaggttaacgtatcttgagttccattcagcaaattgatttcttcttgagatttcacttaaaaagaaaaattttattgcataatgaggtaaattaatgccctacaaatgtaatatgcctctgtgatatacagagtattttagtttttttagcaaagcatttatcctattatcacataatcactcctaacctaaataaagaatctagagcttaatgcacaatgaatcctatcttttagcagttttattgctatatcggctattaatttaaatttgtgtcatttttagttaacaagaaagatagcttaaagatttgtttgcctagattatattgaaaatcccgtatgttggagtagttaacattgc

SEQ ID NO: 835950 - DNA, 645 bp, Homo sapiens
cacagtctggagagagttgtaggagagggttggcccacaggagctgtggcctttagttgaggaacatagccactgtcaacctgaggcccagctgggggaataaatatcctgatgctaccctcagccttttccagtggcttgctgcataaaaaattataaatgcattctcctgtttccctataaaaacttcaggtaaagtcactatttttttttcttttttgagatggagtttctctctgttgcccaggctggagtgcagtggcacgatctctgctcactgcaacctctgcctcccagattcaagcgattttcctgcctcagcctcctgagtagctgggactacaggcacatgccaccacacctggctaatttttgtatttttagtagagacaggatttcaccatgttagccaggctggtctcaaactcctgacctcaggtgatccacccgtcttggccacccaaagtgctgggattacaggcatgagccaccctgcctggctggtaaagtcactattaatgtcacttaagtcactgcttcttgagcactgaccattggctgagcccaaccagaagccagatgacaaggragcctgttgaagcaatgaataaaggaagcgaattcatcaattcacttcttagtccc

SEQ ID NO: 835951 - DNA, 494 bp, Homo sapiens
cacacattactactaattctcaacaaccttgcaatgagagactgaaaaacagttactgtttttttgtttttgtttttgttttgtagcgatggggtctcactttgttgcccaggctggggcttaagcaatcctcccactttggcatcccaaagtgttgggattgcagggatgagccactgcatccagcaacccttgaagtcttaaactaacaaaatagcagtggtggaaaggatcatttgtaagtcacttatttggaaactaaattgcatttctttccccacaaaaacaatgttatatatgatggttacccaagaaaggctactgtattttggatcccatttcctcctgccttcacaggaactttrcattattctttatcaatttttctcttgtctgtattcaacctcttcctctcagtttggccctttccatcagcatttatgctcatataaaaataaagcaaatcctccctcaccccttcacatccctccacc

SEQ ID NO: 835952 - DNA, 670 bp, Homo sapiens
tgggttttagagagacaggggtagagggaggtgcacagtcrggtagtatgtagtgagtgactggcagattccaatacggtattgtcatgttgcatcaaggttcctcattgcagacagaaatctgcctccacacatgaacgcagcccttccttaatcatctgaggaccctgtttcagcagtcagccccactcctaatgacattctgttaaatggacaaattcctttgaagccttgtccttttttgaaatccaatttcgcaggaagccaaatctgattgggggtagccatggaaaccacatggaggagtcttagaggaggtgaagagaggcaaggcaaaacgtgatagtcacgagtcctttactgttctgtcagaaatatcaaagcaatctggagaggttggcagtagctgagtccctgcctgggtcctgttctgtgtggctgggtactatgtggctgtcatggaagaaagcagccagctgtctctgcacacaggcaggaggacagaacagaatacacaaatctcaggtctgtctgcctcccttttcttcccgtcccccccagacccaattccagcaagatcttagcatcctcttcttagctgcctgccccttaaagacaaacaacaaaagaatgacaaggttaaaatacaaggccctcacagataagaggt

SEQ ID NO: 835953 - DNA, 595 bp, Homo sapiens
ctctacaaaaaaaaaaaaaaaaagtttttaattaactggacatggtggtgcacgcctgtagctacttgggaggctgagacagtaggatccattgagcccaggagttcaaggttgcagagagcggtgattaacccactgcattccagctgggtgacagtgcaagactctgtctcaaaatactatattgaatattttttattacatttacactttgaaaatcatagttaaaatatatatacatatatatatatgtatcagtgtgtgtgtgtgtataaataacaacacctacacatatccttttgagctttcaaaatttcaaggaaagtgaaaacatctctcaagcacccagagagaaaaaataagacacctacagaacaacagcaacaagaacaacaaaatcaaaatggccttgctacaaaataagcatcagaagatgagacgtgtacaaagttttaaaggaaaaatggtgtgctctaagaattccaagcatagtcaagatgttggtttggccatayagaaggagaaaatcttctgaagtatatgttctgatccacaaagagaaagaggtggtgataaatgtcaaactgcaaaacaa

SEQ ID NO: 835954 - DNA, 623 bp, Homo sapiens
atcccttgaggataaagggggactattatgtatgacattcaakaaaaagcaaaattatggatacaggaaaaggtcagtggttgccagggttttggggaaagaagggagggatgaatattggaacataagggatttttagggcagtgaaattactctgtatgttattgtaacggtggatatgtcattagacatttttcaaaacccacagaatgtgcaacacaaaacaacaaaccttaatataaaccatggtctttagttaataactgtaccaatgttggctatcaattgtaataaatataccacaataatgcaggacattaataatagggaaaaagaggcaggttttctgtaaacctaaagctgttttaaaaaataaatctgttaacgaaaaagaaaggcaggggacacagactggaaataaaccttctcagatgaaatctgtcatatggttttgactttcaaaacatgtaaatgtgactattaaataacttcaaaaaccaattactttaagaagaaaataaaagaaaaaagcaatccctaaaaatctaaaccaaattgagacaagtgaacttagctctacagtaagttggtggcaagaccaaatagagaagagctctgtctaa

SEQ ID NO: 835955 - DNA, 613 bp, Homo sapiens
tttcactactgtatggtatactcttcaataaatagaccacaattaatttgttcattcttctattaatagaagacacaaccaacaatgttgtaagtacatacttgtatatgtctccttgtgcatatatgcaagagtttctctaggatatatacttacaggtacaatttctgggttacatgtgcatcttcaaattaactagatatccccaagcattctctaaaatggttaccattttagtttcaggaaataagtttgtaaaaaattctgctgtccatagttatcatgtataaaataatcagatactacaataaaagagaagaaagtgtaataaaagtgacaaaaaatagaagctaaaatagaatagcaaagtaatcaaaatctgccatttataaattctctcttttaagtgcatgcaacagaggtggaacagcatttctctactctcaactttcccttccttctaagcaatattcaactctcagaccttccctgaagagtgtggatgtgatagattactacaaatattaaaatctctgaattcaacctgaattatcttaaagtggatttccctcacaagtccacgttttayttgatcccctcctcttcaagcatt

SEQ ID NO: 835956 - DNA, 594 bp, Homo sapiens
ttcaattatccgtgaatttatctaaacattttttattttatattataatttcagactatagaaatkttagggataacaattctcaaaagtttatattttaatgaaaaaatatacttctgttcaaaaactgccttcttcatgtattactgattcctccaatgatctgggagtgtgtggggaaaaaagtattttcttgaatgtattttgcaataatttgtggagaagtttttaaatttatttttcatcttcatgtaatgctagaaatgtctcacattaatggttacctagtgcatggtagagacttcttctggacaatactctagtaaatggatgctaatggatcagcggtccattgaaaaacattaataagcttgatatgcattgtctacaacaggagtccccaatcccccagccagactggtaccagtctatggcccgttaggaacctggccacacagcaggaggtgagcagtgggtaagcattgctgcctgagccccacctcctgtcagatcattggtggcattagattctcataggggtgtgaaccctattgtgaaccatgcatgtgagggatctaggttgcccgtatgaga

SEQ ID NO: 835957 - DNA, 503 bp, Homo sapiens
tttctctcttgcttcctctctcaccatggagctctgtacacgccaggtttccttcaccttctaccatggatggaagcctaaggccctcacccgatgcagatgcctgtactgtacttcttgkacagtctgcagaatcgtgagctaagcaaacctcgtttcattataaatttctcagcctcagatattcctttatagcaacacacaacacactaagacaccaaatcattatgctaaaaatcgataaatgtaagttatcacttaccctgcttttcttatgtgggctggacttcaaggtacctagtggttgatgagggaaagttctttatagaacaattacagttaataaatgcagaaagaatgataaattagaaaatgactatttttgaaatattttacaaaatgatgaatctaagtaaaaatcatcagtgggtttctaaaaccattaggtgaaagatagataaggatccttaatactatatctattgatgaatcaggtcaaccac

SEQ ID NO: 835958 - DNA, 503 bp, Homo sapiens
tttctctcttgcttcctctctcaccatggagctctgtacacgccaggtttccttcaccttctaccatggatggaagcctaaggccctcacccgatgcagatgcctgtactgtacttcttgtacagtctgcagaaycgtgagctaagcaaacctcgtttcattataaatttctcagcctcagatattcctttatagcaacacacaacacactaagacaccaaatcattatgctaaaaatcgataaatgtaagttatcacttaccctgcttttcttatgtgggctggacttcaaggtacctagtggttgatgagggaaagttctttatagaacaattacagttaataaatgcagaaagaatgataaattagaaaatgactatttttgaaatattttacaaaatgatgaatctaagtaaaaatcatcagtgggtttctaaaaccattaggtgaaagatagataaggatccttaatactatatctattgatgaatcaggtcaaccac

SEQ ID NO: 835959 - DNA, 615 bp, Homo sapiens
ctgagggggattcagttgaatctcccaggtgcttatkccttgctgcaaggcctctggaaactcctgctttatgaatctagaatcaatgaataaatatcctgacaaatagctacttacatgtaaactctagatgttatctcatttctctacactgcatgagcactgtgttgtatctttcggctaataatatagacaaactaagttaatgattattcttgcaaagatgcaaagattttttttaatctagtatgaactaaaagccataattaatcaccgagaaggatagcctcaacttttttaaactgactgtaaactgattacctagtgccactcggctaatacactggaaccagcccttggtagacagatgtgcccttccaaacagatatgcacagtaggcctgggctcatcccaatttggagctactcccaactactcggatctttgccttggatcagcccaacaaatgagcatcttatggaagatgaggccgctcacaaacccacaatgaaatacatggcttgggccctctctaatgaattactcatgagtcaggcatgacacctgagtctgggaggctcctctcataaagtcggtagtaaccttaacatagaa

SEQ ID NO: 835960 - DNA, 666 bp, Homo sapiens
ctgctcttggtgatatagacatacagtgagatgcacacacaccctgccctttgttgctctacaatggccckacatgtaagtatgtccttaagaaaatgtgcacaaggacttacaccatcctctcctcactgaccctaaaaaggtctgacaccatgtgacccaagtcaaagccgcctcttcccgccactcactcgtcccaccacgcctccctgcagacgcgtgtgccacttggctccattttgctcgctaagggtttatataaatacaaatccacccaagaaaggaaaactatttccccttttcctgctctggataaagttccagcagacttggctaaggatgagacaagcttcacagatcaaagacagttggggagagggggagggggaggagcagagcacaaacctagctcagccctctcctctcacaaaacacaagtcaagattataaaaagcccacagtgctgcactgaagtgctttcaaaaggttactctttattttgatagcctgtcacctacttcttactggaaaatggttccagactcagagaggttactgcagacggcataaaagcattcagacgacaacgttctctccccaacattcattttccttgcaagagaaaataggacgaacccttatgacctgaaattataaaactagcgc

SEQ ID NO: 835961 - DNA, 541 bp, Homo sapiens
ccttaagagtagactcgatattagcagacagccaaaaagttatttggatccaacctggcaaataagattaatgaacaatataatattgttatgtgtttttcttaaatacaaataacattttttaaaggtgataacaatgctttatacaaagactttcctcttttcttatgtggtttataaactattttgcgtgtaagtcccataaaggagttccacatacttttatcgaatggtattatcattagattaagtgtctaagtgatcactctgctgtgggcaaaactcacttttatgcataagctcatgaatgtgtgcatacaaatcagatcaatctcattaaataaaaatcttaaaaaggagcaaacaatttgcactaagagaaatatgtgtttataaatatttttaaaatggtatttgacttctctagagattttcaaaatgyctaggaggcacttttctattttctttgtgtttgcaaaaatacctctgaggattaattgacacaagcatcaagcatttggggtggaagtatgcacgggag

SEQ ID NO: 835962 - DNA, 635 bp, Homo sapiens
catttattcttaatttgagagattttatttgttgccttataaccttcttctttgcctttttcttctcttcctttttattctttaaacatacatcttttgttkttttcttttaatcttctgtcttaagcttagactttctcacctgacacccattttctcagcatatgttagtgaaacgggagagttccctgatccctcacaggacttatgacagaggtgtcgctcatgtgctcagccactacaggctcgaactcctttcgggagggcgagcacacggatgggcgggggcaagagctggggcggggcgagtgcttttgggctccagccccagtagcgtttaggggtgtgttacaattaatgctcttttagtagttgccatttgtggacggctaagtgttaaaccagctcagtagagagtcagggtgacagccttttacaccctgccctcttggtacctggatccttgtccggtgtattagtctgttttcacactgctgataagacataccggagaccaggcaatttacaaaagaaagaggcttattggactcatagttccacgtagctgggcaggcttcacaatcatggcagaaggtgaaaagcgtatctcacatggcagcaggcaagaggagaga

SEQ ID NO: 835963 - DNA, 631 bp, Homo sapiens
tgctgatggattttaaagtccctgaaagcttaagatccaaattctaagttaccctacatattagtctcattgacatacaaagaaatttcaaggggagccctgcctcctgagttcattggcacctggtgtaggtcactggctggcctgtgacaggtaagcctctccaagtgacatgattgggttttctcacagatttccattattggatttaaatttaaacaaaatattctgggccaggcatgatggtgtgtgtctgtagtcctagctactttgaaggctaaggcaggaggatcactggaacccaggagttcaaggtcacagtgagctatgattgtaccattgcactccaacttgggtgacagagcaagactctgtctataaacaaacaaacaaataaataaataaacaaaaatgttctgacataaggttcaccaagtggggtggacagaaataaatcagaccatttgacttttgttcattcgttcagcacatacttgctgagtatgctggactctgtgctaagtgctccaagtgcagcataagcaaaccagtcaggttcctgccctcatagatctggaakaagttagtaaaataaccttagaagtaagtgaaaaagtagaagtgctacaag

SEQ ID NO: 835964 - DNA, 644 bp, Homo sapiens
aactctgtgatctccattttccacagtttccacccagctaatttcattcatttatgttgtgttttagtctctttagcatttgcatttgaggtcttggctctaaagattaagcgtgaaaattcttgataaagktagaaaaattaagccatatcacaagaacatcctccctcaaatacctcacaaaataaagaaaaggaattttgaaagaagcataaaaatttatcagttatacaaagaaagagtataatatcatgtcaaaaaattaaaagatagcaacaagaaaagaaagagaaaatcctacgacaactcagcatcatcttccttaatctcaccacttccctgaataatcaatgctggagaaagaatgcgagcaggtatatttctgagaattttcactatgatcctctaatttaaatagaagcaaaatgaggcagcaacaaggcagctcaaggaaagttatgtgaaataccaaggagagaaaagctcctgcctgcccgagaagaatctcaagatgttagcaaaggcaagtaaacacataagaagtcaccgttttaaagatcccacataacactgagagaatgaattctactatccagacctcatataatgataatatatgtatttaaaataaataaaagtcataa

SEQ ID NO: 835965 - DNA, 596 bp, Homo sapiens
gccagagcagccaagagagtgcttgcaccacctctctaccaagctcaggcaacacagctcacagttctgggagagacctcttccttctgcttgaagagaggagagggatgaataaagaggactttgtcctgcctctgggatgccagctcagccacagtaggatagggccctgggcagaggcctgaggccctgattccaggcactaactgtcaaatgacatttctagacacaccctgggcaagcaagaaacttgctgccttgaagagaaggacccagtcctggcaagattaatcatcttctgactaaagagccattggcccttgaataaccagcagtggtacccacgcagtactcgccatgggccttgggtgagactgagagatgtactggctttaggtgtgacccagcaaattcccaactgtggttgttatggagagggactccttctgcgtaagaaaaggaaagggaagagtgaatgrgactttgtcttgcaggttacataccaattcagccacagtggggtagagcaccaagcaaggttccctgattccaggcactggctctcagatgacatttcttgacactccctgggccag

SEQ ID NO: 835966 - DNA, 618 bp, Homo sapiens
gtttgtttcccaggggcagtatggaatgatggtataaagaacactggatttgcttgcaaamcctaatatgttgacattttgtgaaatagaaatattccttttttttaattttgtagctctaactttgttttttattttaattttttattattatactttaagttctggggtacatgtgcagaacgttcaggtttgttacataggtatacacgtgccatggtggtttgctgcacccatcaacccatcatctacattaggtatttcccctaatgctatccctcccctagccccccaccccacgacagaccacagtatgtgatgttcccctccctgtgtccatgtgttctcattgttcaactcccacttatatgtgagaatgtgtgttttttggttttctgttcttgtgttcgtttgctgagaatgatggtttccagcttcatccatgtccctgcaaagaacatgaactcatccatttttatagctgcatagtattccatggtgtatatgtgccacattttcttaacccagtctattattgatggacatttgggttggttccaagtctttgctattgtgaatagtgccgcaataaacataagtgtgcgtgtgtctttatag

SEQ ID NO: 835967 - DNA, 599 bp, Homo sapiens
ggagtttcgttagaatttcatagaaattccataattgtatattatttctaaattacacattttcttttcattttcacataaacagagaattttaatgctgtaagtggtgttaaagtgtactaagttcaaattctttgtttttatagacgagaaaacccagagtaaatgtctatgagtgttattcaatttaacatttgaatactcattcaattaatatttattcaactggtaaatgtaaagaaaacatgagaaggaacaactctgtaaagtaaaggtcagatagatagattggtaggcatagatatagatacagatatatgttaggtttaaagatgttggcagaatatccatgtagatgtttccaatagtcagctaaagatcttagaataaaatgaatctgggtctatcaatagatacatagatagagaaatagatagacagatagatagacagataatttcttttaatttccccaaagatgagagtgggaagatctaataaagattacagataattcaccaagaagaacacctwaagctgaagaacagaatgagaaagtctgagaaaatgtcagaaatgtagtagaagcaagagaatgt

SEQ ID NO: 835968 - DNA, 645 bp, Homo sapiens
ggcaatgaggaaaatccgtcagtattttccttgtgattaacttgttgatggattttcttttaragaagtcaagtaaagagaaactatcctaagggagcgggaacaaaggcgggactattctgactcactcacctctgtgttgatggtgccctttggcgtcagtttcaaagtaattcattcacatctgctcggcaagtacacattgcatgctcattaattccaggtgctgttagggttcccggggatgcagcagtaaagaaagcagagttcctgacctcatggagcaatacttgcatgtgggaggagacagatgtggcaaataagtaaatatatagcacatcagcggtgataagtaagtgaaaaaaacgaatggtgaggggggttgggcctgcctggagggcgagagggcgggggaagccatagttctgctttcagtagggtgcctgcaggattcttccataaggagacatttgtacccagaccgaaggggaagggagggagcaaaggttgtggtatctgggggaagagccctccagaagacaaagacactgagatgggagcatactgatggggcctgcagggacagcagccggggcagggagatcaatggaatggggagtgaaccaggctgtgtagggcagaata

SEQ ID NO: 835969 - DNA, 645 bp, Homo sapiens
ggcaatgaggaaaatccgtcagtattttccttgtgattaacttgttgatggattttcttttagagaagtcaagtaaagagaaactatcctaagggagcgggaacaaaggcgggactattctgactcactcacctctgtgttgatggtgccctttggcgtcagtttcaaagtaattcattcacatctgctcggcaagtacacattgcatgctcattaattccaggtgctgttagggttcccggggatgcagcagtaaagaaagcagagttcctgacctcatggagcaatacttgcatgtgggaggagacagatgtggcaaataagtaaatatatagcacatcagcggtgataagtaagtgaaaaaaacgaatggtgaggggggttgggcctgcctggagggcgagagggcgggggaagccatagttctgctttcagtagggtgcctgcaggattcttccataaggagacatttgtacccagaccgaaggggaagggagggagcaaaggttgtggtatctgggggaagagccctccagaagacaaagacmctgagatgggagcatactgatggggcctgcagggacagcagccggggcagggagatcaatggaatggggagtgaaccaggctgtgtagggcagaata

SEQ ID NO: 835970 - DNA, 488 bp, Homo sapiens
tgggcagaggaaatccatcaaatgttataaatcaagaaaaatacagcctgsagctgaaaagagaaagatgctttaaaataatatggtaacaaacagcagaaataccaaagacaattcactttgctttgcacttagtggactttttactagcctgctgcatttaacctgttggctggcttagcacttaggcaaagtcaatgatcaaaacatctgttcacacatgaatccagctcgcaaaccaagaaattaagtaaatctgcagggtaggagggatggagaaagacacaaagagagaggaagagggagggaaagagaagggagaagtgggagggagaggggagaggcaagggcgggtaatggtagcaaggaattcagaggattggggtttcatatacagctcaccctccgacaacagcagggctaggggtgccaaccctccgtgcagccaaaaatccccatataacttgtgactccccgcaaagcttaac

SEQ ID NO: 835971 - DNA, 640 bp, Homo sapiens
tgtgcatgtgtgtatacacacatacacacatagacacatatatatgaaaatttttaattcatacatatatactgtgatatacatattctaatgtaatagtacctggtcataaatatcaccccaagtgyttatgaattatacatatctgattagtatgaacttatacctaatcacaagtacttagaaatataatattatctactttttgaaagtcacagaccttactttagagctgttctatatacactgtaaactttaaaaatcagaaaaatagacattaacttgttgatatgattctagttgtgcttcaactctcttttctcatcaaaactatgtcctgaacttaggtatcacagcaactgaaattaaatgaatgggtagagcattgcaattctctggctagagtttctttaaaatgaaattgctttggagaaggattagctcattgatttattaggaccttgttaggaattatttatgtgtcagaggctttctattaaactagacaacttgaggctacaaagagacactgccaagggtctatggaaaaggatttggtgtgagacacacccttacccataccatgggcaggcccaggcatggtgatgctttgcttgttagaatgctggccctgagaggg

SEQ ID NO: 835972 - DNA, 590 bp, Homo sapiens
aggtgattggatcatgggggcagctaccccttgctgttctcatgatagtgagtgagttctcatgagacctggttgtttgcaagtgtgtagcacttccctcttttctccctcactctcctgctcccccacggtaagacatgcttgcttcccctttgctttacaccatgattgtaagttttttgacctccctgccatgtttcttgtacagcatgcagaactgtgggtcaattaaacctctcttcttcataaattacccagtcttgggtagttccttacagcagtgtgagaatggactgatacaggaatatatattttttgacttgttgtttattttggctagggcctacactctgtaaagtgtgttaacttgattttgtctggaagagcttcaaagaaaaagaagtccaaaggttaccaagttttatctaccgttgggtattaccatactgaaattttcttccaacttaacacacttattttagcatgctgtttctaaaagactatatttctgaaatgctctcccccrttttaactaaatttggctggttgcctcattaatgagttaaataaatctttgaaatgtgtttatt

SEQ ID NO: 835973 - DNA, 619 bp, Homo sapiens
ttgcactctctctctctctctcccgccgtsatgtgaagacatgcttgctttcccttcacccttccaccatgattgtaagtttcctgaggcctccctagccatgcctcctgtacagcatgtggaactgaatgaattaaacctcttttctttgtaaattactcaatgtcaggtagttctttataatagtgtaagaacagactaatacaatttataaaataatttcattaaaaaaagagtagagtgtcaatttttcaatcttcaagtgacaaataaggtttggagtatctaatctacccttaataagagcgaacacaagaatattctatactcattggataatcttgccagaaagcaggattttatatgtcagcaaaataactttctgtgctttgtaacgactttgttgtataacttgatttgttttaagaaacaaatagcaacagcttctcagttctgaactgttgtggtttcttccaatttatcttcttaatttatgtttattttaaaatatgataatatcactttaattaacatgcagttaaactcaaccagtattacctcaaccatttattactcttacacacatatgttccaaagtcaataaatgatgatctcttcc

SEQ ID NO: 835974 - DNA, 621 bp, Homo sapiens
gtatcatacagagtagtttcactgmcctaaaaatcctctgtgctctgcctattcatccttccctcccctttcacccttgggaaccactttttttccagaatgtcatataggtggaatcatgtagtatgtagatttttcaaaatggcttctttcacttagatttatgcctttacatttcttctgtgtctttgcatggcttgatagctcatttcattttaatgctgaataatatttcattgtctgcatgtacttcattttttatccattcacctactgaaggacatcttggttgcttccaagtcttggtaatttataaataaacgttctatataaacatctgtgtgcaggtttttctaaagccttaagttttcataaaatatcagagtgcaattgttggcttacatggtaagattatgtttaattttattagaaattgaaaaactgtcttccaaagggtatctgtatgagcactttatgattctattttctctcttctctttgcgtattattttattgtattttgccctacatcttgcagtatactattaactaatccaacttcacattcaaataccactataccacttcatgggttgtacagataacttaaaacatagtatt

SEQ ID NO: 835975 - DNA, 549 bp, Homo sapiens
ctatatgataggccacaaaacaagtctcaatacatttaagaaaactgaaattatatcaagtactctttcagaccacagtggaataaaactggaaatcaatgccaaaaggaaccttcaaaaccatgcaaatatatgtagattaaataacctgctcctgaatgatcattgggtcaacaatgaaatcaagatgtcaattaaaaaattctttgaactgaaagacaatagtgacacaacctatcaaaatatctgggacacagcaaaggcagtgctaagaggaaattttatagccctaaatgccgacatcagaaagtataaaaaagcacaaatagataatctaaggtcacacctcaaggaagtagagaaacaagaacaaaccaaacccaaacccagcaaaagaaaggaaataaccaagatcaggtcaggactaatgaaattgaaacaaaaaaatgcraaagataaatgaaacagaaagctggttctttgaaaagataaataaggattgaccattggcaagattaaccaagcacagaagagagaaaatccaaatca

SEQ ID NO: 835976 - DNA, 605 bp, Homo sapiens
cacattccttgtattcagaattattatctctgtgatggtgrggtcttgctgtgaggttgctggaaggccacaacattttggattgattgtacaggtgtttaaaaaatgaaacaaaacaaaacaaggcctttcttctctgtaagatgccctttgccaatattatggtgagaaagaaaaaggaaccttatagaaatatgcagaaaatgaattggtttgagaactagaatgctgctccaactgatggtttctctcttggagaggggtagagttggccttaacttcacagaagctactggagatggacttagcacttttttggtaaaagatatgctaaccttcccatcatactctgaggaaataatctgagcagagttctcaactttaggttttccaaattggataacttgatgaaataacaatgaaaattaatttccttgttcccacattgtccaaactgattgctgcagacatctcatctctcttgctagaatggttactgcaaaatatatttcccttgtaaatgttttggttcttcctcttcctaaatcaacattccttaaatatattttctgtaaactaagattcttttcagattctaaaagtta

SEQ ID NO: 835977 - DNA, 326 bp, Homo sapiens
tccccataccctgccctatgcatctctcttttagctgttcctgaattgtattctgtataatcaacaggtaaacctaggtaaatgtttccctgttttgtgagccattctarcaaatcactgaatctgaggagggggttataggaatcacttcatagcagtcggtaagaaatatcggagacctggacttgcaattggtttctaagcaatcttgtgaggccaagctctcaacctgtgaagcaagtaattccaggcagttagtatccaaattgagttaaattgcagaatacccggagtccacagagaactggagaattggttggtatgaa

SEQ ID NO: 835978 - DNA, 615 bp, Homo sapiens
gcatgatacccatgcctcaagagtttcaggggccaagtctggaagtggcacacttcgttgctctcaccccactggctagaatttggtcacgattccaagggggactggaaaatgcccaggaagaggaggaagagaaggagatgggtttcatgatcaactagcagtctctgccacagtatcttctgtaaactgctttttaattacaaaatagttactcctttcagaaatgtcctctgctaacctacaactccattttcaatccctaaggccattcgggatctaaaaccaatctaggaggtttccttctccaataaatattttcctaacatactcaaaatgagattttatcaaatgcatccttgaaaggatgtctggcttgttcttcccagtatctctggtaatacttaatacaatgtctggtacataacacaagctcaaattacttatagaattcataaattaataaccagcccctaagtttatggaaaggaaaaatggtcccgtctctcgtcctggtgatggtggtggaatttactaaaagccttctgtcgttttcaagcacatctcttcctrtaaggccaccgaattgccactcatcctcttggtcactttgat

SEQ ID NO: 835979 - DNA, 480 bp, Homo sapiens
ctcactgaaaatgcccacggaggccaagcaaggacccctatgtatctcagctgccattcttgacctcttctggtccactcaccacaaccaggagctttctaaggcaagactggcccctctctgtcccgataaagtcaaaccctttaaatgtccctcaacttggcaagacagactagctccttggagacagacaccccctcgccccgtgcctctgcagcccacctcagcacacctgtcctccactagctccatgctgcagccacactggcgacttgcagctccctagtcacatcccgcattctctccttgaagcacctgcacattctgttccctctgaccaggatgttcttccctgtaacccgcctcccscaagcccccacctccactctctctatccgtctccttttgccagggtatcttcagatctccacttagatagcacttgctacggtagaatttccggtagaatttcctgaccca

SEQ ID NO: 835980 - DNA, 542 bp, Homo sapiens
ggacttttcctttaactctgtgtctgccggcgaagctgtttttatttttatttttggctttttgtaataagccawtaaacagggctggatttatgtcggttttgtttatattatatttaaccatgagtcaatttaaaagaatttggtctgggtaccctggctgtcctctgacccctgtcaccaccttaaatatatggctaattgttttttagtttacagttcctttggttggctatttaatactaaaagagggttattttaatttacagagagtttttaacttttggggggttaacttaactttataattttctgtaaaacttttaagtttttaaatatatattttaagggactaggttttgatgagttttttcccattttctcccagttatgatgctgcacatttacttttgtacagttatttttcttctcattttggccgactatatgctgtctcctattacaggagttttcagacgctgcttggctttggagagttttttatttttgttataacttggagttgtagggcagctcctatt

SEQ ID NO: 835981 - DNA, 556 bp, Homo sapiens
atcctataagctggggacgatcctccttgttttgtagaagagaaaattgaagcttaaatctattaggwaacttgtcaatgaatcaaataataataaagaaacaaatactaaaagagcaggcagcatactgagataacgaaaaaggtcagtgagattattttaacttggtcttcattgttgcttcctcatttccttaggatgggcttttcaagttggcattataattaatattaaataaatattccaaagtttatttgtttctagacagcctggccagaaacctcaaataatttcacttaattgcaagttttacattcagatgggactgactgaaagtttctcctataacacaggtgagaaagtggggcatatgggaaactgcttggctcatgactgagaggaaccccaagaagcagaggaggtgttagcctagaaagcaagtaaaagtagatttactatgggactcgctgaaagtaaggaatgaaggtgtggaaattgatgtaggtgtgaaattttaaaaatgcctcctcaagcagataaaatgcaaaaagtcacc

SEQ ID NO: 835982 - DNA, 617 bp, Homo sapiens
acattgaaatttcattttttcttatggtgcatcactgcaataggaaaacactgggaaattaagttttattctcacagtgttaatttgtttacttccttgaaaaatcaggtgggtgaccataggcaattcatttaatttgactcagacataattatttcatctaccaaagacaactactaacttctcaaaattggtgcaagtgtggttaaatgggctaatagaggtaaaaagcctagcacagaaatattagctcctctcactacccaccttactctatttcttttcctgtctttccaacaggattaccaaataatcctcatttctgatagttcccattataacagagtgaactttccagtttcctaaataagcattagctgtctctgagttgtatgctagctctgctcttgaatccagccatctatttctcgctgcaaagcagaaaacatatacaaggtttcctacgtgagacagatatttgccacatttttattgcctggttttctagcatctagcagggactagttccttgatcttctgcattgctttattgcttgwcttaacctcagccctcatgtcctttgtactccttgttctgccttgctaaccttttcttc

SEQ ID NO: 835983 - DNA, 613 bp, Homo sapiens
ctaaatagggaaaaactgaaagcttttcctctaagatctggaacacaataaggatgtacactttctccactgttatccaatatagtacscaaaatcctagctagagccatcagacaagacaacaaaataaagggcatccaaatcagaaaggaagaagtcaaatcatcctttttagcagataatatgatcttatatttggaaaagcctaaagactctaccaaaaaactctttgaactgataaacaaatttagtagttacaggattaaaaaatcaacatacaaaattagtagcatttctatatgccaacagggaataatctgaaaaagaaatttaaaaattaaccccatttacaatagccacaaataaaaaattaaatatctgggaattaactaaaccaaagaagtaaaacatatctacaatgaaaactataaaacaatgatgcaagaaattgaagaggacatcaaaaaaagtaaatatattccatattcataggttggaaaaatcaatattgttaaaatgcccataccactcaaagcaatctacagtgcaatccctatcaaaataccaataacaagccaggcgcagtggctcatgcctataatcctagcacttt

SEQ ID NO: 835984 - DNA, 621 bp, Homo sapiens
ggggaaattcagtgaatattgggtgaaattcaccctcgatatttcacatasgttcttttctattttccctaagtgtcggccagtctgagaaataaagggaaagagtacaaaagagagaaattttaaagctgggtgtccaggggagatatcacatgtcggcaggttccgtgatgccccctgagccgcaaaaccagcaagtttttattagcgattttcaaaaggggagggagtgtacgaatagggtgtgggtcacagagatcacatgcttccaaggtaataatatatcacaaggcaaatggaggcagggtgagatcacaggaccacaggaccagggtgaaattaaaatgctaatgaagtttcaggcaggcattgtcattgataacatcttaacaggaaatagggtttgagagtagacaaccggtctgaccaaaatttattaggcgggaatttcctcgtcctaataagcctgggagtgctacgggagactggggcttatttcatccctacagctgcaaccataaaagacggctgcctctgaagcggccctttcagaggcgtaccctcagggactcattttctttctcagggatgtttcttgctgagaaaaagaactcagtgata

SEQ ID NO: 835985 - DNA, 542 bp, Homo sapiens
aaaggtttaatatctagaattcctaagaaacttaaacaaatgtacaagaaaaaaataaccccactaataagtgagcaaagaacatgaacagacacttaccaaaagaagacattcatgtggccaacaggaatattaaaaaatactcaatatcactaatcattacagaaatgcaaatcaatacgacaatgagataccatctcatgctagtcataatgatgactattaaaaagtcaaaaattaacagatgctggtgatattacagaggaaagggaatgcttatatactgctgatgggagtgtaaattagttcagccattgtggaaagcagtgtggtgattcctcaaagaacttaaaatgaaattatcatttgacccagcattctcattactgggtatatactcaaaggactayatattgttttatcataaaggaacatacatctgtatgttcattgcagcactattcacaatagcaaagacatgagctcaacctagattcccatcaacagtagactagataaagaaaatgtggtacacatacata

SEQ ID NO: 835986 - DNA, 614 bp, Homo sapiens
aagtatttttgccacatgcatatgtgtgtaatatctgtaagtctacgaagattttccataacaactttagtatattcgttgtttctctcctcctttcacgatcttttagttttttattacgtattatgggtaaatagcagtatttaggaagtagtaactaaatggtagaatgtaactattaatattaagacaatttgtaaccaaatggctgtttttaagtttgtcattatacccctccatatgctgctccctgaatctcacatgatctgtatttaactaatgagttctggtctgtttttgttgacaaatagctcccatggcagctcaatccatttaaaaagtgagaggaatgacaatggctcccattacttctctccctcagaaaaaaagtcacctggtcctcctctggcactagtttgatcctgaggcctgaaaaagtgagtgatgagagatgattcgtatcttgcagagctgggggaactcacagataaatttcttttctatattttaattmgattctaatgcagaaatttgggagtttctttcattctcctaaaagaaacttaaaagtaaacaactttttgttctaatatttaattggaatatccacatag

SEQ ID NO: 835987 - DNA, 576 bp, Homo sapiens
gggccatattgctgtatgtgaaagctgacgtttcaccagagccacagggacgttaaagtttaaaacagcaaatgtaaaatcatgccactggtcatttgataaacttgaaaagagaggacacaaatktcagtatctgtcaaagtaaacacaattcatttttttattcatagcagggaaagtcatatgtcaaaggaaaaaaagcgtaatttgctgtgagaagaatgccaaggaaaaggacaaaataacatcgattcggtagttagactgaatatacaagaagtaaggaaaaatgtgtattaacacatatatatcagagatgtaaaatttatatgaggtaccaaaacatcatgttatagattcccttctctacataaccaggctgatgctctgtgccaatgtaaataggcccaattattaccgtttctagtgcagcagaaagcaaagagattcacagaaaatactgccttaggctgtcaccatggtggtctcagcaggggctgagctaagcttgagtctacaggactgacccaaggcttgaagaaaccaatgagggtaagacttcacacagagggtcgt

SEQ ID NO: 835988 - DNA, 601 bp, Homo sapiens
ttccatttgttttactaatgtaaaaggtatctttctcagaaagacacacacagaacttggtgggactttcttgagaacaatattgartcacagtttatttccattttttcctcatgagaagaaaatgcacaagcaattaatgttgtggtgagaattatggagaatttggctaaatgtcctaaaataatcagtaagaaaaagaaggacatatttagcaacattaagaacaataaaaattaaacccacatatgtcaaagacaaaggccagcataaaaaggtaaaccaagccaggtgcagtggtacacatctttagtcccaggtactcaggagactgaggcaggaggatcccttgagtccagaagtttgagtccaacctgggcagcatagtgggaccctgtctcagaaaaaaaaaaaaaaaaaaaacaaatgataaatgtgtgtaaaattttgcggtaaatgaaaaagacaaaccctaggctctatatagtgcacattgattgtgttttggcccccaccatccatttgccttacttctggtaacatttgaggatctgtgctctttcttatttttctgtccatgtggttctgaacagagcccaaa

SEQ ID NO: 835989 - DNA, 332 bp, Homo sapiens
aatgctagcactttgggaagctgaggtagaaggattatttgaggccaggaattcaagaccagcctgggcaacaaagtgagacccccttctctacagaaaaatttcaaaattagccaggcacgaaggcgtgtgcctatggtcccagctacatgggaggctgaggctggaggagcatttaagcccaagaggtcgaggctgtatgaactatgttcatgccactgcattccagcctggccaacagagtgggaccckgtcttaaaaataaaaataaaaaaatatgctgaaaggtgaaaaactgaatgtttttaccctcagatcaggagcaaggcatg

SEQ ID NO: 835990 - DNA, 499 bp, Homo sapiens
tagtaagagcttgaacctatttatctaatttttactttaaaatgtttgtctacatttcacttstaattaaatagcaaaatactataataaaaattatgttcaagttttatttataactaaatgtacttgaaaatattctatactttctctctatatatatttttacaataagcccattatggattgaatcgtgtctccgcaaagaggtatgctgaaatcctaacctctagcacctgtgattgtgactatttggaaatggggttttgtggatgtaatcaggttatgatgaagatattaaagtgggccttaatgtaatctgactggtgtccttttaagaatagaagtcaaagagggtcagaggggagattgccatgcgaagacagggcagagattggagttaggctgccacaagcccagaaatgtccaaggttaccagaagctgggagagagaaagaatgattctcccccagaggtttctgagggagcctggccctccatt

SEQ ID NO: 835991 - DNA, 499 bp, Homo sapiens
tagtaagagcttgaacctatttatctaatttttactttaaaatgtttgtctacatttcacttctaattaaatagcaaaatactataataaaaattatgttcaagttttatttataactaaatgtacttgaaaatattctatactttctctctatatatatttttacaataagcccattatggattgaatcgtgtctccgcaaagaggtatgctgaaatcctaacctctagcacctgtgattgtgactatttggaaatggggttttgtggatgtaatcaggttatgatgaagatattaaagtgggccttaatgtaatctgactggtgtccttttaagaatagaagtcaaagagggtcagaggggagattgccatgcraagacagggcagagattggagttaggctgccacaagcccagaaatgtccaaggttaccagaagctgggagagagaaagaatgattctcccccagaggtttctgagggagcctggccctccatt

SEQ ID NO: 835992 - DNA, 625 bp, Homo sapiens
ggactctggattcaaattattggaatatttcatgttgacgtttaaaaataatttggctcacaaataaactttttaacctaaagacttttaaaaaatcagatgactgattgtgaaaattastatcaaaatgtatgatatgtaaaatagactatctgatttcagaattcacacagaaattcaatgggccaaaaattgcccagataatcttgaagaacaaaattggagtgtttatcctatcaagtgtcaattctggagcagaattgacagtccaaaatgatccacagagatatgtttacctaattcatcacaaataatatgtgagagcactaaagtgagaaagcgatggtctcagtaacaaattctatttgaactatcagatatccatgtgagggaaaatagatgttggcacctagatgacacagaaagcaattccatatggattataaatggtatatgtttagctttgtgaaagtaaaacaataaagcttttggaaaatagcataaaaggacatctcttaagtttgggatgagcagagattatcttaaacaggcaacaaaaacattaaatgcaaagaatacaaaggttaagtttagcataaacctgcctccctacgtattttaagtt

SEQ ID NO: 835993 - DNA, 447 bp, Homo sapiens
caagaaaaaaaggcaaactttttaaaattttctaaaacttgatcaagtcttaccttctacaatttktaaatgggaatttacttaaaaaccaaaacaagaatgaactattttagtctgaaatatattatttaataaataatttataagttgatatttgaagtgcttaaataaattttgaatttagaagcctatcagcatttataaagttatgattttcatcttttttatatctgctctgtaaagttgtattttaagacctgtgagttctactgtttacacagataaaggagcagtggaaagaaagatgtggacctacagggctgatttcataaattcattatattttctcagggcacttcccatacaatagtcatctattatttgatgtaataatcatcatttttaaatgtgaaatctttaaataaattaatttaccttgctagggat

SEQ ID NO: 835994 - DNA, 447 bp, Homo sapiens
caagaaaaaaaggcaaactttttaaaattttctaaaacttgatcaagtcttaccttctacaatttttaaatgggaatttacttawaaaccaaaacaagaatgaactattttagtctgaaatatattatttaataaataatttataagttgatatttgaagtgcttaaataaattttgaatttagaagcctatcagcatttataaagttatgattttcatcttttttatatctgctctgtaaagttgtattttaagacctgtgagttctactgtttacacagataaaggagcagtggaaagaaagatgtggacctacagggctgatttcataaattcattatattttctcagggcacttcccatacaatagtcatctattatttgatgtaataatcatcatttttaaatgtgaaatctttaaataaattaatttaccttgctagggat

SEQ ID NO: 835995 - DNA, 632 bp, Homo sapiens
catgctatgtgggagacagaattatcattactcaaattaatctccccaaaaattaggaggctagggtttttcgaggatagtttggagggccggggagtccacttctcggtaaaaccayccatccattagtcatcagaaatgcaaaagtctgcccaggcttgtcttgaaatcctgcctcggcctcctgagcagctagaatttcaggcactagccattgtgtgtggccggatgaaactttatgttactggctgataggagatggaattaacactcaaatcaatctctctgaaaatttggggatcagggattttaaggacagttttgtgggtaggggatcagaaagtagagtgtgctgattggtaaagtcgaagatgaaattatagtgttgaggctgtcctcttgcactgagtcagttcctgggttggggtcacaagaccagatgaggtagtttatcaatcttggtggtatcagctggtgcatcagaacgtagagtcagcaaaatatctcaagcacactgatctcaggttttacaactgtgactcctaaattgtaatttctaatcttatggctaatttgttagtcctgcaatggcagtacagttcccaaggaagaggaagttttcttttgggaaa

SEQ ID NO: 835996 - DNA, 623 bp, Homo sapiens
atgttctgcgttttaatttttgctagggggaagaagaacaaattttcatgggtgaaaatgtattgcaggaaggtgtaaccacctgatgggttcttcctgccccctgcacagatgaaaacaatttactgagaccacagcattgctgtaaagattaattgacatgaggccagtcatgctatgtgggagacagaattatcattactcaaattaatctccccaaaaattaggaggctagggtttttcgaggatagtttggagggccggggagtccacttctcggtaaaaccatccatccattagtcatcagaaatgcaaaagtctgcccaggcttgtcttgaaatcctgcctcggcctcctgagcagctagaatttcaggcactagccattgtgtgtggccggatgaaactttatgttactggctgataggagatggaattaacactcaaatcaatctctctgaaaatttggggatcagggattttaaggacasttttgtgggtaggggatcagaaagtagagtgtgctgattggtaaagtcgaagatgaaattatagtgttgaggctgtcctcttgcactgagtcagttcctgggttggggtcacaagaccagatgaggtagttta

SEQ ID NO: 835997 - DNA, 608 bp, Homo sapiens
agtttccctgcttggacaccaacctgttagcctgccacagtttcagggrtgctggaggagacacaagactcctggcttagagacacaggtggtttatcacgagctccaacagtggcagccagaatgccatcacctttgtgccagtgccttgagcaaaacactgccacagagcagtatgagcagacctcggtgacagctgcatatgcagtgggctcagttacgggaaggggaacctaagctttagggacctgaatctttcgtaaagggcagtgatctgccgacccttgctccagagggaggctctgctatattgggcagtcagcatgcttgccttagctgctaaggtagatactatctctgtcttccagagctgcagacaaacccaacctttgcacatcaggaagatgctattcctttcttccaaggctgctcatgacacaggcatctggaaaagatagtctgaaacagagggaggggtgtcccactaaaggatgtgcagaagtctgagacgcaaaacccataaaaatggtcttttagagtaatgcggtgttatctcttatataaatgtaggttactacattgctatgggttttagaatgtgtgtgtgt

SEQ ID NO: 835998 - DNA, 577 bp, Homo sapiens
gatctaggattttggctgcagggttagtgtcactggctaacgtattgagtagaaagttgagtttgggggcttgttaaaatgcagatctcagttcagtagttcggggatggcatgcaaggttctgcgtttccgccatctgcctcgtgctgcagctgcgggtccgtcccaggcacagctcttgtccctgctctgttgggtcatggacgtaggcactgagctggacttgccctgtcgggttttcagggttgtgctaagatgcagagaatgagtattttttctgtattctctgataacatattaaatatagaaatattgctgatatgtaaagatagaacttaattttgaagctttgtagaaagtgatgtcctttttatgggtagaattcttgtttccttttcaatgtttttcctgggtgctggttcactccagtgttttacttatttgaaaaaaaattaataatatacatttttctaayagtttattaatctacattttcaaatttatttgtattacttttaaacaaaattcgactacaatattctattctattagattatctgtgtctgccccaatattc

SEQ ID NO: 835999 - DNA, 418 bp, Homo sapiens
acttctttgcacagcagcatataatgtaggcaccaacatgcttattgaattctgcagatgttgtctatgtgattagtttatctgttatgctgatttagtgatgactcggtggccagaccttaaataattctgaaagcaatacctctcagagataaacaggagttgtggttttcaagcgttgtttatttctttagaagatttgcattgaaagcaggatagaaaacactaaggaccaccaactccagctgatccattctaaagctggaacataaattagtgacaatagtgaattctcacttgataaataaatacaaaggagatttggatgatttttcttctgccttagcaattgaacagtgcagggctstgtgtgatgccaacagtgacgcgtgtgttatgttagagccaaaacactcat

SEQ ID NO: 836000 - DNA, 516 bp, Homo sapiens
ggaagagagtttcatttgttcacaaaactctttttctcactttaatttcctttaaattcagtccgttttgactcctaaggaaactttcatttttaaaaaaggaccaaactcctttgtttttctcttagatggatgatgccctgccctgctctccagcagcccccacaaagttaggaggttttgtttcttaaattaggccagaactagtcattctgatgaactccaactccaatcaaggacattggccaatctgtcagaacctaaaataaaaataaatccactagcagtgtcttccactttgaatgtttatcctgctgggtgcccctctttctttctgcaatggaagaacccgcttccattttgcaagtctgtgtgtgccccctcgtttggagccatttgcaatctcttgcactcccgtttcaaggtggagccccagccaagatgagtttctctgaagagctgctaccctaattcctcccsttcacttcgaagcttgtcagggggacccaagcaata

SEQ ID NO: 836001 - DNA, 557 bp, Homo sapiens
attagtccttccccagaactggcgcagctattctgaagaatgtaaacttgctgttttctcagtatgcagatagcctgttgtcatagatcctcatagtaatgaacaacttctcaatatttaataagcctggcattcctgtccccaggcggaaagcacagacagttggtagccagctactaactgaccattaaaatacagaatctgtctttaaaatgtgcttcacaaacaggttccatcacctgcagtggagagcaagtgctgtcctctgcagtgaggtggcctattctgcctggaagagaagtggcaggagcaagccaagttagcctgctcagtattcaaacaggggccatcaagaacagaatcttgtttacaaaggggaggaaagcccatccacagcccttctcttcgcagtgttgttagctccaagaactgccaagcaagtagaaattaggaaagctcaccatggtagttttgtcaatgtacaacaacaaaaccattctgsaactctggttttgtttttttttttttttccattctttccatgcttgcttatacac

SEQ ID NO: 836002 - DNA, 612 bp, Homo sapiens
ggctggctcactaagagactccyggcactgtgttgagtctagcatggagccagcgccccctggactcatcaatgagatatggaggggtgtttctaattattcttcagcctcgtggctagccaacacagttcatcttcatcttctcaaaaaaaaaaaaaaatcatgttttgacttttcatgaactaatctgaattcttggcatatcttgtcttttgcagtggaagtagcttagccataccctttgctccaattcctcaactctgtcccttatttcatcttatttttttcttcttggctcatggaggatatggagcagagatgagaagctcatataataattggagaatcaggtctttggtgaccaaactctaaggcttctttctggatagtaggactttgctggcttcttgcagggcgtaaaggttaagcttgtgagcttttggggtcagatttgccttggttcaaatccccgctccacaacatagctattgtgtggagtttggtaagctacttagctcctcttaagcctcagtttacacagtgaaaaaaggggaaggcgtagccataatacctatatcatgagattcttatgaaacacatgtaaaacattcg

SEQ ID NO: 836003 - DNA, 612 bp, Homo sapiens
ggctggctcactaagagactcctggcactgtgttgagtctagcatggagccagcgccccctggactcatcaatgagatatggaggggtgtttctaattattcttcagcctcgtggctagccaacacagttcatcttcatcttctcaaaaaaaaaaaaaaatcatgttttgacttttcatgaactaatctgaattcttggcatatcttgtcttttgcagtggaagtagcttagccataccctttgctccaattcctcaactctgtcccttatttcatcttatttttttcttcttggctcatggaggatatggagcagagatgagaagctcatataataattggagaatcaggtctttggtgaccaaactctaaggcttctttctggatagtaggactttgctggcttcttgcagggcgtaaaggttaagcttgtgagcttttggggtcagatttgccttggttcaaatccccgctccacaacatagctattgtgtggagyttggtaagctacttagctcctcttaagcctcagtttacacagtgaaaaaaggggaaggcgtagccataatacctatatcatgagattcttatgaaacacatgtaaaacattcg

SEQ ID NO: 836004 - DNA, 632 bp, Homo sapiens
atatggaggggtgtttctaattattcttcagcctcgtggctagccaacacagttcatcttcatcttctcaaaaaaaaaaaaaaatcatgttttgacttttcatgaactaatctgaattcttggcatatcttgtcttttgcagtggaagtagcttagccataccctttgctccaattcctcaactctgtcccttatttcatcttatttttttcttcttggctcatggaggatatggagcagagatgagaagctcatataataattggagaatcaggtctttggtgaccaaactctaaggcttctttctggatagtaggactttgctggcttcttgcagggcgtaaaggttaagcttgtgagcttttggggtcagatttgccttggttcaaatccccgctccacaacatagctattgtgtggagtttggtaagctacttagctcctcttaagcctcagtttacacagtgaaaaaaggggaaggcgtagccataatacctatatcatgagattcttatgaaacacatgtaaaacattcggaaccatgcttggcccatcatcaatactcaaaaaagttattwatttaaaagacataccagcgttttaaactctgctacatagataggtctaagctg

SEQ ID NO: 836005 - DNA, 612 bp, Homo sapiens
cacaaaaagcaagcagaagtagctattcttatgtcagatgaaacaaacttcaaagcaacagcagttaaaaaaaaaaaagrgggagggatggatggctggtaagatggccgaataggaacagctccggtctgtagctcccagcgagatcaacgcaggaggggtgtgatttctgcatttccaactgaggtacccagctcatctcattgggactggttaaacagtgggtgcaacccacaaaggacaagctgaagcagggaaatgcaaggggtcagggaactctctcctcttgccaagggaagctgtgaggaactgtgccatgaggaatggtacactccggctccgatactatgcttttcccgtggtcttcacaacccacaaaacaggagattccctcaggtgcctacaccaccagggccctggcttttcaagcacaaaactgggcagctgtttggacactgagctagtggcaggagtgtttttttcatttttattttatctttatttttatttttttaataccccaatggcacctggaatgccaacaagacacaactgttcactcttctggaaatggggctgaagccaggaagccaagtggtctagctcagtgga

SEQ ID NO: 836006 - DNA, 596 bp, Homo sapiens
gatagtagacaagcaataaacatttattaacttgttatctaatctagatgagaaaggctaacaatgaccaacatatacatatattgactatgttgatgttgaagcatataaaaaagtaatagtatagtttatttcagtctttaatttatacatgctgcaactttcattgtttcctcctaaatcacaagagtgaatatgggtttttattgtgaaatgctgcccaagaaatatttactacatattactgattttgaagctcatgatttcacttacacagaaaatttcgcagtgagttttaggacttacagaagtaaatttcttttaatcacggttcaaggaatcccatgcctatctacacctgagtcctgaaaagaaataaatctaacagaaaccaagagtttttcttcaaaagattacctatatggaaattaaactactgcatgtaaaataaaccaaaagcttaaaatcatactctagaggctaatctcataaaagctatttcttattctaacatagatttttggaacctaaaggaattctcaaaagttgggcattactttaagaagtaagtgycttactacacagtacaaggcaca

SEQ ID NO: 836007 - DNA, 483 bp, Homo sapiens
tgttttttttttcttccccttctctaccccgtcagcagttaacctttaactttttttttccttttagaagacgtttttaytagaccaggcaacccaactatcactgtttgtactctctgtaaagttttggtcatgaaaaaggatttgtggggctagtctttggctatggcccatctggtgtgctttgcctgtctgcatggtttgtgctccaagcctccatcttgctttacatcctgggggcatagctggtaagtgcttggcaaggctttgtttagcaaccctgccttaggggatgagctctctctggttcaatatctgcaggttttcctagccctgtctcttaaaggacaccacaaccactgggttttcttctgcctgtctgtgtgtgtactgtgatgtctgtacaaggagctctgattcatgtggcctaaagaaagggtcttggatcaagtattttttaaaaagggaagataaaagctgtgg

SEQ ID NO: 836008 - DNA, 539 bp, Homo sapiens
cacaaagaccctggccactaaagccgccagcaaaagggcgcggcctacaggagggatcaagaagcctcaccgctacaggcctgacaatgcgcgaaatcagaaagtaccagaagtccatgcagctgttactcctcaagctgcccttccagcgcctggtgcgcaagatctcccaggccatcatcctcgtcctgcgcttccaagcgctaccattggcgacctgcaggagcccagtgaggcttacctgttgcacctctttgaagacacctagctctgtgccatccataaaagccctggcctcttctcccctatatatgtatattagtgctctgctttgtaccttcttccataggaaacaaaaatccatcagttgatcatttaagcctttctagtttgggtacaaattttagtgtagttgtacttgtaagctttgtactttatacttctaaagattagaccctagataatatgtgcttggaatagtggagctagcytacttaaactttatttaggcattttgtgggggcaaaggtaggcagtga

SEQ ID NO: 836009 - DNA, 558 bp, Homo sapiens
gtaagtggaactagatggtagtgaaagccattgctttttcacatagtttgacaacgacasgggaggcaagtaaactggtctctagagcccctgttctgtccactctaccacaccagctctccctattttcagattatcatgcaaatgatgaagtaacaggtcatgaatacgagatgggaaacagaaagcaggaatcaaaggaagcaaaataagacatttatgttaatgtttcaaagacccagactagcttaggaagtcattatctgtcttagaatagtggtgaacaaaaagcacaaaattctttcaggtcagaaaatgcaaattatgtcagcccttattgcagagagtttaaaacacggaatagattatcactatttgttttgatgtaattcatacagtttacatctgcccaaacaaattttagtccattaataataatctcttgcctacaaatgtgtcatcttcaagaaatatttattgagtacttgccaagactaggcattgaagatacaaagataaataacatgtatttggttaatagtaggatagtaggagtgt

SEQ ID NO: 836010 - DNA, 647 bp, Homo sapiens
aattaatctgcagtcagcccagggagagagggagaaggaatagaccattgctggtggccatcaaaataatcagcagcaagggcaggagactgagtgggaggaacttgacagatgagggaggcttgggagcaatttaaaaagtttgttctcagaaacaagcaaaaaattgggaagtcatcagcctgtctggtgtgtcgtgtctttgctgctgtgtgatgtgctcagggattcctggctccacacccacatgtgcttcgtgctctcactggggtgtcagtttccctggggtgagtgcagcgattcccgattccactcctgcgtgtgctttgtgctctggggtgttagttgccctggggtgagcccagtgattcccagctccacacccatgtgcactttgtgctctcactggggtgtcagtttccctgggatgagtccagcaatccccgattccacacctgcgtgtgttttgtgctctggctgggatgtcagtttccccggccttccaaagaatggggcarggcattttcgaaggctgattcagtgaagatggagagtcgtgggctaaatgattcctagagcccacagtgtttcaggggagcttgcagggtaactttttattctttttttctgaaccattgcaggcttct

SEQ ID NO: 836011 - DNA, 581 bp, Homo sapiens
gttatattccaggaggaaattctaggaggaaaaaactgtttcccaggaagtttgagagacagcaatgcttgcctggcaagtactgcctcaagtagccttaagagatgtaggccgggcacggtggctcatgcttgcagtcccaacactgtgggagaccaaggtaggagttcatttgagcccaggagttcaggaccagcctggtcgacatagtgagacctcatctcaaaaaaaaaaaaaaaaaaaaaaaaaaaaaaaaaaagagagatctcagccacaagccccccttgcaggagcccaaatcactgcatagcaaccacctgtgagaaacagaggacgatggatgccgacccgatccactgtatcaccctagcctcacccttccctaccctcccaggtcccatacaccgtgcatctccagcctcttggacgaggcacctgtgtttttatcaacatcaaaatgactgatatcacaagtgcagccaaagcagtactctggtagtgggaatcttttaaaaatccatcatagaaagaygagctgtcagaccttccgccttccccacacagctatgacatcatgttca

SEQ ID NO: 836012 - DNA, 496 bp, Homo sapiens
acagctgtttctagccctcggcactctcccgagccccaaaaaacaaaacaaacacaaggtcggcctcgcgrggtgaggggagaaaggaaagcagagctgggacgagccctgacgcgcgcggggtccaggctgcaagttgggagggacggcgaggcgagcgaccggcctcggcattgcctgactagggccgtggccgctgcggcgggcacgggaacccgccttctcgcgcgcggccctcccgcggggggcttccgggcgcgcggcctcggagccccacggggagacaaaggggtaggcgactgccacggggtggagggaggctgcccagccccatcggccctgccagcgtgcggtctgagctcggggaatgtgtgcgccttagccggtggaaccgcagccgctggcctttgcccccagttcgagcttgagttttcggatgccaagaaaaagcaaagacgtgctcttccctcttgcgaccgctgtagtatgagtccgt

SEQ ID NO: 836013 - DNA, 537 bp, Homo sapiens
tttgttggggttctggggagagggggcattcaggctgcagggagggatggtctctctctgggtctctctctgagggtctcagcctcctgcccccacaaagaccccccaggtttggagggcccaagcagagccgaccacatacacagccctcctggtcctgggagaggtgcattctggaaggcaggaaggagtctgtttctaaatccctttctcagtgccatcctccatcaaggtggtctccagatctgacacgtgttctgccttcccataaaatcaggctcaggagatggtgcttcttggttctggatatacccctccctgccatctacctgcctggtagcctctgtgcctcccgcctccaagcctgccctgacttactggcaaaagagggtgtcctcgtccaagagggcctcatgggcacacgggctgttctcatcctcrtctccagtgaccaccatcatgagacccagtaacagtgctgctgtgaccagcctcattgtccaacccatgggcacctggaacagaaagaactttaga

SEQ ID NO: 836014 - DNA, 595 bp, Homo sapiens; identical to SEQ ID NO: 813556

SEQ ID NO: 836015 - DNA, 598 bp, Homo sapiens
cttagtatattctaactatagtgtttttatttgcacatctgtcattacgttgtgggtttctcgagggcaagagctatgtcttttaggamattttttaaaaagcccaaagcataatgatacaacttgatgaattttcacaaatgaaacatacctaaatcaccagcacctggatcgagaaacaagcattccagaggccctcctcatgcctctctcaatcactgccgttcccggtgttgtcttttactttcttattataatttacataaggcacttgagtacaccgttctgaagtttatagcttagtgaacttatacctgcagtcctgtaatcagcattgggatagagacaatttccaacattccgtgtttgttcatgccccttcccaggtgcccccaccctcaccattctcatgtccattattagtggtcactttggtcaagctgtgtctcaggctttgtattcctagcccaacaagcacttttaagacagcaaaaaatagaagtgtgttgtgtttattgttttgtagcctgctcttcttttgtgatttgtcactacttttccatgttagtatttttagtggttgtgtaatggttgtatt

SEQ ID NO: 836016 - DNA, 542 bp, Homo sapiens
gatgatgtcttttgtgaagacactctagccacctttcagctgtctgtggcactatmatgcctttttttccagtataggcttgcaagggaggatgcctgtttactcaacaaatatattttttattttgatttttaatcgacaataatcccatctatttatggagtacaaatgtgatattctgatatgtgtagacatcgtgaaactatttcactcaacaaataggcaccttccatgcaccagcccctggtgattctgtgttggacgaggcagacccagcctgcccactggagctggtcggggagcagccacccagggctaagggagcgcagcctcagagctgtgcaggctccggttcagaccccagctcgccactcactgtgcagggcctctgctcacccatcttgctggagtcacagcaagcctgactcagcatggttccaggaacgatggaaagagaaaccttttgaaaaatgaaatttaaaaaacagtaaaactaaacatcataccttttcaaatacgtacatatgaaaaactatatagtt

SEQ ID NO: 836017 - DNA, 595 bp, Homo sapiens
ttgttgtgttatgtatattttgcaactttttatttaactagagtyaccagtttattgaaattccttcatttttcaaattagctcacatttatctatcaactctgttttcttctatattgagtttggcttcatcttctttaattttattaggattgcttttccctccttttctaatttattgagttgaatgtttaaatcatacacgttttagctttctttttggtaaacaatgcatttaatactatgactgtcttgaggaatggctttattcttataagaaatagtgtttttattttcattactttccaaatattctgtagattgtattttgttcctctgtgtttcagcagttaagaagatttttttaaaaaaattacagttacttatcgtttaattttgttttaatcagaaaatgtgatctgtgcaacgtacgttttttgggacacaataggatgttcatgaccagtgtatcctcggttctggtcagtgtcccatggatgcttgaaaataaggtgaaaatgaggtgcattctttacttgtgtgcgcaaaagaagacacgttattgattataccgttaaaatctccattaccttat

SEQ ID NO: 836018 - DNA, 603 bp, Homo sapiens
actaggccttgcaatatataaattcaacagtctgtagatgcgagaaattcaccaggggtggcactgagagactgtacccggccagctatcacccagctgcctctagtcacctccagaggcctgatcttggccctggtcagggaccttccgagttctcaccttgggccagtggcacgatctgtgaattcagtcccagaactctagccaggcaccagaagctgctgtggaaggcagggagctgcacctacatggtggggacccgagacagccactgttccagaggagacgccctggaagctctagcgcagacttccctgggtatttatagccctgccccaccatgagaggctctgattggctcagattgtttggctccagtaacgagcattcctattggacagagccaagcccacctatggtgctctttggctccaccctaagccctgggccaatcagcaagtgggccacaggggtgtggctgtgggcgaggagcttggtgccactttgtcctcggccagggcacgtggtgcctgctccgaggcctggctccasccagcgttattagcaagagcccatagcaggagaactcagtcccttggctgc

SEQ ID NO: 836019 - DNA, 567 bp, Homo sapiens
ccccttgggagcccagctgcctttctctctttttcttaccttatctctctctcctgtttcctgaattactgctggaagtatggaactacgtacataaaacaataaataaggcctcaaaccttaagagaaaaaaaaaacacccatttatgtgaccagtattgtctgtcttttttttaatccaataaaactttcaactacaatcggtgctgatgtcaccatgttagcggcacacactcttgactctggtttgcacagttcacatggcaggtgggtccaccgcctccctggaaggccagtgggacaggaagggctcaccccctttctcagctgaggaaactgggactccaccaggggagatggcctcaagctacaggggtgggcaccctgggatggcaaaaagtcacctgtcctgactcgagataattggggtctggactcagctctgccagtaactagttatgtaagttcagacaagtcactgagcaggtgagaagggaagagttggcagcaaggtccttccaggaggctagkaagccagacccttcctctggatcccaccggcaggat

SEQ ID NO: 836020 - DNA, 601 bp, Homo sapiens
aatcaattagtggtcacccctgtataccttttaaataaacccctctaatagttgacagtagtggcttctggctcactgggtatcacagaaaactttagcttaacttagtttaaacattargaacacaaaattaggtgactatgagaattttccagttgaccaaaattttttcaactgacttgaaaaatccagccacctgctaaaggttggaaagacatgactggaatacttagctggactcctaactcaggttgcatacaggaaagcagactacagtggcccagggatgagcagcaattttctaggactaagtaatttctggagcttgtacatttagaacacatttacaacaatttgtcatgggactcaatctaaaggggctaaattgctacttttatttatcctctgggagggaatgtgagaaataatggatcaagtcacatgataccaattcaacagatatgccaaatccttaatgttctagaatgggtttctgaaatcctatgatttcattggttttagaaagctttgattcgaagaatcttttggtgtacaagttaattcagctgtaagttagttttgaacatgtaaatttcttcca

SEQ ID NO: 836021 - DNA, 530 bp, Homo sapiens
ttccaccactgtcccatttttattctctatggaatgtcttggatttccttatttcattggctctgccttcctcttctaccatatgtctaattgctggctcctcagcagcagttctaggtctgctgcttttttctgcagcagaaaatgaaatgtggccgggcactgtggctcacgcctgtaatcccagcactttgggaggccaaggcgggcggatcacctgaggtcaggagtttgagaccagcctgcccaacatagtgaaaccccgtctctactaaaaatacaaaaaaaaaaaaactagccaggtgtggtggcacgcacctgtagtcccagctactcaggcaggctgaggcaggagaagtgcttgaacctgggagggaaaggttgcagtgagccaagatcctaacattgcactccagcctgggcaacagagggagactytgtctcaaaaaaaaaaaaaaagaaaaagaaagaaaagaaaattaaatgttctccctattaaaattaatgtatttacctagaccaagcttgtc

SEQ ID NO: 836022 - DNA, 552 bp, Homo sapiens
aactgatagaactgaagtaacagacaaatccatgattataactagcagstacaacacacctctcccaaaatttgataggacaactagacaaaaagtgagcaagaatatattttaaaaaaatcaacaacataggccaggtgcagtggctcacacctataatccaagcactttgggaggcagaagcaggcagatctcttgatgccaggagctcaagaccagcctggccaacatggtgaaaccccgtctctactagaagtataaaaattagctaggtatggtgccgcacacctgtaatcccagctactcaggttgctgagggatgagaattgcttgaacctgggaggtggaggttgcagtgagccaagattgtgccactgcactccagcctgggtgacacgtgagactctgtctctaaaagaaaaaaggaaagttgcaaaatcaacatcaaccaacaagatctaaacattatagagcacattatagcagaatacgaatacttttcaagtgctcacagaacatataccataagatagcccttatcctgggccataa

SEQ ID NO: 836023 - DNA, 686 bp, Homo sapiens
acagccatttcaagtcttcaacagcaaggctgtacctcctcacgtgacttcagtgtagactttaagaacctaaactaacgcttctcgcgagaggaaagattgaccgctcgcaagcgtacatcagctggtgccccgccttccctgggccccacccactgcctgtcctcattcccaccttgaaccagccttttgcgcgtgtgacgtcatggcgccgtgcgtggcctcggcggtggcgcagggggcgggcccgcggcgcggcgccggaggaggaagtggtgaggttgttgctccttcagcgcctatcgctggctcttggggcgcagagaggggccgcagtctccgcggctgcgtcgagctcccttgcagtcccctccatgttccccggcgccactactccccttcctaaggccgccgcttaccccggggtctatggaagtaatggaaggacccctcaacctggtgagtgtcccacagaatatagcgttcgtcttgggtgcctttgcctcaggagcccggccccgtccccggcgcgtcggctaaccctttaggctgggaggttggtttggcaggagtggtcgcagaggctgtgaggggctgctaggcaggccctggcccaactgcggctccaggcyagccacttcagactttgccctcctgggggatccccgggaagtcctggcgccccc

SEQ ID NO: 836024 - DNA, 596 bp, Homo sapiens
tcctcctgccttggcctcccaarttgctgggattacaggtgtaagccaccacgcccggcattcttcttcttttctaagagtagaagtgtttttgtagctgtaagggtagaatacctaaaaatcaaggagaaaattcaatgtttgattacattaagcatatttctagaagtatgggacatgtctttaacttgtttcaacttttaatatccattatgagtaaattaggggataaaagacacgtaagactaataaaaataaattcagatcagaatgagagaagacctggaagacagtgtgagaaggtctagtatatatttaacacaagtcttggaagaagaaaagataaagagtgagaccctgttcacaaccatcaataataaacaaaagaataaaacaccagttaatcagcccaccccaacagacaaagtaatttgactgtggatacccttggtgagctcacactcccttcttttgtctaggtaccaattcttcactaagtttacattgcaattcatctcccctatctaattaatgagattatattcaatttctgttcagaaattgtcttatgtaagagtcagtgtttggtgacacaa

SEQ ID NO: 836025 - DNA, 657 bp, Homo sapiens
cgaactcctggtctcaaaggatcctcccacctcggccttccaaagtgatacagaagctaaaaagaaattaattaggcagttrgcgagggttagggagtccttggtaaagttttccttttaataaaaagcagccccaaatcatttctaacaaaaaacagcctgaaaaatcaagctgcaagcgtagataagcaagctggaagcttgcataggtaaatgccggcagctgtgccactagaaaagggatttctggaagccaggtatattcaacatagaggtttcctcttccctttactttgtcgccacgtgtacaagcaacatggcactggccaggttaaatctctatttgtataataaaagattagggtgggatggccagcctcttagcatgctttgttaaaggcacacctggtccaaccaaccctctctctgtgccctatgtaaatcagacactggctcctcaagctcatctataaaaccaacctcatcttgccccaaatgggggagatccgttcggaacccccctccctctgcatgggagagcttttctcttttgcctattagactttcctctcttaaacacactccttgtgtgttagcgtctttgatttccttgtcatgagacagtgaaccttgggtattaccgcagacaaacgacgc

SEQ ID NO: 836026 - DNA, 629 bp, Homo sapiens
gtttaaaaagacatgacaaaacatcaaggcaattcaagatgaagtttcagtactcatttgttatggcattggactccctggaaaataaacatcattaactgccagctgaaaaacactcatcattctggcatttttaatttgataaaaaatgaaaagttcctacacttggaaaaacttaaggcaattaaattcaattcatggactattaataactaaaaccattatggtgaatattcaaaggattaaaaactgaggaatgctttggcagctgctatatgaacttggaaaactctaatgagaaaggaatggctgtggacattagaagctctatttaactcatctctaaattgaagtcttgtgaactacatggtttttcaatagactgattttgctgggaacttcacatgctcagagtttgagagctgtttgtttttaatttaacaatttaaatgaaactcatgggaataaatagcaaatgaaatctgcaagatgacagcatttaaaactttcatctttagacaatcagcagcttttgactatttcttatttacttttaagaaattccacagcataaaataacmatcatgggagaaattaaaggtatttaagactattttatcaaaagggaa

SEQ ID NO: 836027 - DNA, 637 bp, Homo sapiens
tgtctgattggaaaatttgggaagaatatactgggcatggttagctcaattcattccttttacctgttctctgmaggtgggtaataaacccataaatttctctgtaatcctctgaccttgtgccaagatgggaagaggtctgccctggtgcagtgctgcactgtgggtgggtgaatgtgctaattctggggtttggtattaggaaactcatttgcccacacatgtaaagtatattcattaatatatcagcttaataaaggtgacaatttggcttcttctatcttatttctttgtctcctttctcagttgttcagaactctagcagggaagattttggttaatttaatttcctcaaagtcctcaaattcatatctcccttctctcttctctatattgttaatataaacatgagcagtattttatgaattattctgcactttattgttttcgcttaattatatatcctagaattctttctctatcatcacagacaaatttacttatttcttttaatagatacatggtatttcaatatgtagtagtaccccaaaaatgtatcatttattgagacagtgttgctattgatgaacattttggttttctgtcatttgataatacaaagtgctacaactgaaat

SEQ ID NO: 836028 - DNA, 609 bp, Homo sapiens
tccctagagcactctctctattgagaaactttgcaaaaaaacagaatatttggcttgatttattgctcctgcccattttttccctcytattaatttttgtcactaggcaattgctgtcatggcaacacaccactctagtttgatatcaacactctggctgtgggatgaacccacatacccttttcccttcaaggtgggttttgtgaagatttccccctccacctatcctgataccaagaactggatttggcattggttttaagttgctcaggttggttcctggttttgtggttttcatggactataccataagttatttgagacatgggtaaggagaactcatccttgtccaaggcatcagcatcactctcgagtttacatctcgagtttcaaactctcatcaaaactctgtcccatggtagcctgtgtcagttggacacctgtgctcggtgtcaggatgcttagtcagtctgtgatctaaaactccatctctggaggcatctttaactcctgtctcccctatcaacctatttatcaccatgcaatctgcttctccttgggaattaattctttgttctcaactctgtgtagccattcatgtcctacact

SEQ ID NO: 836029 - DNA, 610 bp, Homo sapiens
ggaaaaagaaggaatcacatgaatctaagagccattccagtgactgctttgagcttctgtggggacagtgggagaggatttccacccccagaagttcaactgaatgataggcatgagccctgaccagatgagtgcatgaatcacagggctaacccccacaaagggtcaactcagtgttcctcaagcaaggaggtgaagtgctctgcagttcactccttgcctcaatgtcccctggcatatagaaggtgggaccactgctctctccgcacctttatgagttcatggttggcacacatggtttggcttctgatgagacacctgctgtcagtcctagaatctttcccaggacaagaaaactgacaacacccataggacaactgacaagtcattccagggcaggaggaaatcaagacagccaactagtttgagaatagaggatgctatgggatgtggctcgctgtcataggtgaaaatgacatcagaaaccattggcacagcctcacaggcacagtcacaactycagtgatctgaagcccacccacacaagcagagctcagctcattcgtgctgggagaccatctctgagttagggtcacctctgcatggcaag

SEQ ID NO: 836030 - DNA, 552 bp, Homo sapiens
caggccaggctgtttccagcagaagggagagactgaggttcagataatgtaaatgtgtagccagaagccaggatccaggagcctggccctgggtagagcactgagtcacaaccttcaytcccaagtcctctggaaaatgctacctcggaacccaatgggctcatgcacatacccagaggaaaggacagtgccctggccttttgacaagcttgcgcctgggaggcagcaggggtacagaggtagacacatcattcacatcccatctctacccttctcacttctgagagggatttcatcagggataaggatgccttcttcaactactgaagagggctaacaagattgctcagcacaggaaaggagccctaaggtgtcacttgtctctcccatattcctcattgcctagcccaggacctttggatagagtagccccttggccaccaacaaccaagtgtgtctctgggccaggcacatctttaattcactttatatgccttcccttgttgaatcctcagtgcaacgctgtgggttggcataaatgaagaagaaaaa

SEQ ID NO: 836031 - DNA, 552 bp, Homo sapiens
caggccaggctgtttccagcagaagggagagactgaggttcagataatgtaaatgtgtagccagaagccaggatccaggagcctggccctgggtagagcactgagtcacaaccttcattcccaagtcctctggaaaatgctacctcggaacccaatgggctcatgcacatacccagaggaaaggacagtgccctggccttttgacaagcttgcgcctgggaggcagcaggggtacagaggtagacacatcattcacatcccatctctacccttctcacttctgagagggatttcatcagggataaggatgccttcttcaactactgaagagggctaacaagattgctcagcacaggaaaggagccctaaggtgtcacttgtctctcccatattcctcattgcctagcccaggacctttggatagagtagccccttggccaccaacaaccaagygtgtctctgggccaggcacatctttaattcactttatatgccttcccttgttgaatcctcagtgcaacgctgtgggttggcataaatgaagaagaaaaa

SEQ ID NO: 836032 - DNA, 666 bp, Homo sapiens
gcatttattgctgtgaatttcagtctaatcacttccttaactgtacacaacatctttgatctatttgtgcttttattttctttaagttctattttttttctaatttatcttggaactttctctttgactcacagattattttaaagtggggtaggtaatatgcagatgtttgctgatttttcagtcatctttctattattgatgtctagtttaattccatgaaagtctgagaacattgtagagtttaattattttaaacttcataaagttttttaaatgattcaggttatggagtatcctggtaaatgtaccatgtggacttaaaaagaatgggtattctgctgtcattgagtgtagtgttctgtaaacatcaattatatgcaattggttgatagttttattcaattcttcaatgtccttgctgactatctgccttctagttctctatattactaagtgatatattgaaatctcctaatataatcacaaatgtttgtatttgtcctttaatttctgtcagttttgcatatttaagctctgttgttaaatacacatgcrtgtaggattgttattgttatttcatatgcaaggactccctgtaattttctctgctctgaactatccttttctcatattagtatagccaatcaggcttttgtgggttaa

SEQ ID NO: 836033 - DNA, 612 bp, Homo sapiens
ttatgccagtagcatacgctttggttactgttgctttgtagtttattttttaaaatcaggccwtgtgttgtcttctactttggtatttctcaagattcattggctatttatgctctttaaggatgccatattaattgtaaaacttttttaaatgtctataaaacagtcactgggattctgatagcaattgcattaaatctgtagattgctttagtgaatatgaatatttttacaatattaagtcttttagttcataaaactttattcctaggcatttaattcttttgaagctattgtaataggactttttcttaatttccttttcagatagttcattgttagtgtataaagacacacaaaaagttgtttgttgattttgtattccgcaactttatcgaattcttcataagctctgacattttttgtggaatatatatatatatatagtatatatatattatatatatacacacatatatatatatatatactatatatacatataaaattatctgcaagtatggacaatttcacttcttccttttcaattagaatgtctcttaaattttttcttgtctaattgccctggcaaagacttccagtactatgttg

SEQ ID NO: 836034 - DNA, 612 bp, Homo sapiens
ttatgccagtagcatacgctttggttactgttgctttgtagtttattttttaaaatcaggccatgtgttgtcttctactttggtatttctcaagattcattggctatttatgctctttaaggatgccatattaattgtaaaacttttttaaatgtctataaaacagtcactgggattctgatagcaattgcattaaatctgtagattgctttagtgaatatgaatatttttacaatattaagtcttttagttcataaaactttattcctaggcatttaattcttttgaagctattgtaataggactttttcttaatttccttttcagatagttcattgttagtgtataaagacacacaaaaagttgtttgttgattttgtattccgcaactttatcgaattcttcataagctctgacattttttgtggaatatatatatatatatagtatatatatattatatatatacacacatatatatatatatatactatatatayatataaaattatctgcaagtatggacaatttcacttcttccttttcaattagaatgtctcttaaattttttcttgtctaattgccctggcaaagacttccagtactatgttg

SEQ ID NO: 836035 - DNA, 612 bp, Homo sapiens
ttatgccagtagcatacgctttggttactgttgctttgtagtttattttttaaaatcaggccatgtgttgtcttctactttggtatttctcaagattcattggctatttatgctctttaaggatgccatattaattgtaaaacttttttaaatgtctataaaacagtcactgggattctgatagcaattgcattaaatctgtagattgctttagtgaatatgaatatttttacaatattaagtcttttagttcataaaactttattcctaggcatttaattcttttgaagctattgtaataggactttttcttaatttccttttcagatagttcattgttagtgtataaagacacacaaaaagttgtttgttgattttgtattccgcaactttatcgaattcttcataagctctgacattttttgtggaatatatatatatatatagtatatatatattatatatatacacacatatatatatatatatactatatatacwtataaaattatctgcaagtatggacaatttcacttcttccttttcaattagaatgtctcttaaattttttcttgtctaattgccctggcaaagacttccagtactatgttg

SEQ ID NO: 836036 - DNA, 641 bp, Homo sapiens
ttagggaggactccctcctcactttctggaatagtttcagtaagaatggtaccagctctttgtacatctggtagatattacttcttttcttttactaattttgggttyggtttgctattactttttttagttctttgtgatgcatcattagattatttactcttttttgacgtaggtacttatagctataaatatccctcttagtactgatttggatgtaccacacaggatttggtatgttgtgtttccactgtaatttgtttcaggaaacttttctttttaatttcttcattcccactggtaattcggagacatattgtttaatttccatgtatgtatagtttccaaaattccctttgttactgatttctagttttattccactgtgatcaaagaagatgcttgatattatttcaattttttgaatatttaaagacttattttgtgatgtaacatatggtctatccttaagaatgatccatatactgaggaaaaaactgtgtattctgtagttgttcgatgaaatgttctgtaaatatctattagatccatttggtctgtagtcaaatgaagtttgatgtttctgtgttgattttatctctagaagattctgtacaatgctgaaagtggggtgtcaaagt

SEQ ID NO: 836037 - DNA, 442 bp, Homo sapiens
ttgctgtggacacaataaaagaggcagcatttctgttcctaatgtaacatttttgtatctaaaatattcttttatgccattagttgtttttaataaaactgtttattcttattatcctcacccttygtaccaagaaactgcacataaataaccctcttctatgccaataactttaatcattgtcttttttttttttttttttttgtctctcagtggtggtatttagtcagaggagattacttatgagagaagtgaacctattccagataaatcaggtgagctaatagtcacctcctacaaaagaggaagggacaattgtctgtaatgtctgatcatccctcccctgccagtatttattgtctttattgtctcacctctgaacttgacattgagcactgagctcaaaagataatagaaattctgtctgcaggaaaaacaaaaa

SEQ ID NO: 836038 - DNA, 473 bp, Homo sapiens
agagatgtgcaaggggacatttctttgtactccatgcatcaggacacaggttaatgtcgatgctagtatggaagtctttctcttccctttccaaactcccaatcccacctcaccttccccctcygacgcatccagtggtagccatgggacagggatgaaaaaataggagtaagaatcagaattcagggttggcctggggacataggctattttagtgtaaggtcaaagttatgttaggggtaaaataagaatttcacttgtggatctggcatggactattagctgtagattaatctttgaagtataggatacagtgggcagtggagttgatctcccattactttctgggtgatggagtagcaaggatatctacttgtgatcactcggtccaagaaactgtaatgggttttgctccccaagggcagctacagacacatcctttgggtcaaaataagaagcccattcctggggcc

SEQ ID NO: 836039 - DNA, 613 bp, Homo sapiens
ggaagaaatcacacacatacatacacacacaccacaaacacccacagccgctgcttcatttacagtggttaaaaaagaatattcataaattatcttaaaagcctccacaatggagtaatggttgggacacaattagggaacatttgcatatatgctgctgccggtccctgcccagagacatcctcccccaggtcagccctggagagagaaactgggggagcaggaggaaggaatatgagttcacaactataggcttccctcttgatctggtaagatctcagctcaggcaagctttgcttctgctttcaatggcagatttccctctgttaaaaaaacataccacacttctgtctacctacacaattcaagataaattcgttttgtttcaggaaaatatgtattcagacaaacaacattagtaatcagttttgtggataatggattatttaactgaccagtaaatagtgttttgttgttgtttactcttcaatctactttgtgtgtagatattagccagatctkgtagatctagccttctgattccctaaacactaatactaaggctgagcaggacagaattttaacagcctgttaactgtgtcaggaaagtgtg

SEQ ID NO: 836040 - DNA, 646 bp, Homo sapiens
tatcccagcaccacttgttgaaaaggatgtcctttcttcactttatgttttcatttgctttgtcagagatcagttggctgtaagtatttgggtttatttctgggttctctattctgttccaytgatctatgtgcctatttttataccagtatcatgctgttttggtgactatggccttgtagaatagtttgaagtcaggtaatgtgatgtctccagatttgttctttttgcttagtcttgctttggctatgcaggctcttttttggttccatatgagttttaaaattagtttttctagttctgtgaagaataatgctggtatttttatggaaattgcattgaatttgtggatgcttttggcaatatggtcattttcacaatattgattctagttatccatgagcatgggatgtgtttccatttgtttatgtcatctgtgatttctttcagtggtgttttgtagttttccttgtagaggtcttccatctccttggttaggtatattcctatgtttttttggttgttgtttgttttgcagctattgtaaaaggggttgagtttttaatttgattctcagcttgattgctattggtgtaaagcagagctactgatttgtgtacattaattttgtatcctgaaaccttgt

SEQ ID NO: 836041 - DNA, 646 bp, Homo sapiens
tatcccagcaccacttgttgaaaaggatgtcctttcttcactttatgttttcatttgctttgtcagagatcagttggctgtaagtatttgggtttatttctgggttctctattctgttccattgatctatgtgcctatttttataccagtatcatgctgttttggtgactatggccttgtagaatagtttgaagtcaggtaatgtgatgtctccagatttgttctttttgcttagtcttgctttggctatgcaggctcttttttggttccatatgagttttaaaattagtttttctagttctgtgaagaataatgctggtatttttatggaaattgcattgaatttgtggatgcttttggcaatatggtcattttcacaatattgattctagttatccatgagcatgggatgtgtttccatttgtttatgtcatctgtgatttctttcagtggtgttttgtagttttccttgtagaggtcttccatctccttggttaggtatattcctatgtttttttggttgttgtttgttttgcagctattgtaaaaggggttgagtttttaatttgattmtcagcttgattgctattggtgtaaagcagagctactgatttgtgtacattaattttgtatcctgaaaccttgt

SEQ ID NO: 836042 - DNA, 556 bp, Homo sapiens
tttattggaaggatattgtgagctcacaaaataagaagcatggaggagtagatccagaaaatggcagaagctaaaggagcctaagtagcaagagacacaacctagacaataatagaggaagagtctggttaggacgctagggggcggagaggggtcacacacaggactggactgtagacttgctgtcttgagcattacaagtaattcctaaattctttctgcatctgtgtcaatccctgagttggagtttccagatcctggagcctagataatgtgcccttacccttgctgcaacaagccagggaaaagaaacatccccgctctttggtttcagtagtggaaggcagaccctgcatcccacaagagttaaacacaacagagaattgcccctaaataggaaggaaggtggatgggggaggaatatatacatttctytggttctcgtcttaatgttcatgacaaaaaaattactgtgtgatcatgacctaatccttgacttttaatcttctcctttaaataatgagaacaatacttgctcctactagcttcattgata

SEQ ID NO: 836043 - DNA, 586 bp, Homo sapiens
ttactcaaagatactggacactgcagatattttgctctaacttcattatattatatgtaagctgcagtcttaaaactgcattaatttttagttaacttttaaactttttaatgtaaaatacagttccaaggcttggaattggagaggggaagaaagatgcatagattgttcagttggttggatctgttacattaatttcacaatctgtgaaggagtggattgccccttgaatggtaatggaaaattagtttctttatttcttcattaagactgtgggaggaaaattaatactgtcttcagcttttccaaattaatagaatatatctttattaaaatgataaatgtacatgactacttgctttttggttgagagactctctaactcattggaataactgaacttaaagctaagctttagaaatcatctttttaggaaactgaggttcaattaggctaaattatttacccaaagtcacacgattaattaaaacagagcaaaacyagtaaattgggttcctgactcttaaaccagtgctctttctaattcagcacgccctttaaagagggaaaaaggaaattactttat

SEQ ID NO: 836044 - DNA, 421 bp, Homo sapiens
ctaccacccttctacatcacctggaatttgaattccaggttttctttttaattttctagaatctaaattcactttgtttagcaatatcttttaccaaatacatgaccacctttgcttccattatctcacatcttcccttatgatctttttaaaattattgctggaatagaattctgaaaagtcacccacacttaaatgatagtttaattgaattcaaaattattttccctagattttaaaaaataatgcttcgtgtcttcttatatccagtggagcccaaatgagttggatgtaaatttgacttccatttcttcataagcattttccctgaatrtgtttagaaatttctctttgttcccaaattttgtcactgtgaatctaggtgagggtccttctcatcatgtatgctcagaatttaata

SEQ ID NO: 836045 - DNA, 421 bp, Homo sapiens
ctaccacccttctacatcacctggaatttgaattccaggttttctttttaattttctagaatctaaattcactttgtttagcaatatcttttaccaaatacatgaccacctttgcttccattatctcacatcttcccttatgatctttttaaaattattgctggaatagaattctgaaaagtcacccacacttaaatgatagtttaattgaattcaaaattattttccctagattttaaaaaataatgcttcgtgtcttcttatatccagtggagcccaaatgagttggatgtaaatttgacttccatttcttcataagcattttccctgaatgtgtttagaaatttctcyttgttcccaaattttgtcactgtgaatctaggtgagggtccttctcatcatgtatgctcagaatttaata

SEQ ID NO: 836046 - DNA, 548 bp, Homo sapiens
caatcccaagctgtattagctctttaccaactttgggaaagtggaccagtatccaggcttggataaaccaaggaaaaatactaaggaactgcttaaagctctagtggttcttctactttgctgtttctggctttggccatctaaagcaaagttccttggattggttgacagtgagatagtctctagattcttgtgtctctttttagtaggaccacctaagatgtatcatccattgtataatgagttcttgaccaaagaaaagaaatcttaaggtcttcggactctgtcatctttcttgtttgccactctttggactgtaatttgaagagaaaaaaccttgttttcttgtgaaaattttggatgctgagtagttgacaacaacagtaacttcagctagaaaatgctggaaacaatttaataagcagaaatgattaaatccaaaatcatcaacatgactccaccaaccccatttttaaatttctatttaaacatttcccaaattatttgcacawtcttcttttggctgtaagtcttgtttttctctatgc

SEQ ID NO: 836047 - DNA, 620 bp, Homo sapiens
gaagtatgtattgttcagaacagtaaatatcatagtggttatgtagaagcaactgatacttaaaagttgtagtagttaatataaaacttttaatcatatccttattttactaaaaaaatcattacaaactataaaaactcaaacctgagaaaagcaggcccgaaacgcttaaaacttactttgatggtgtcattatgaactatcttcctactgaagtcaaagtaaagtaaaagtgatttcaaggggacttcctgaacactaaacacaaagtagaaatctgtgagcttaattaatatcttcaagagtctctcatgggcagaagcatcctcctctcgagagatctaaaatgtacaaaagtgtaactgatgtgaacaaatgttatccctctctgtggtagttttgtaataatgccttacagacagcaggcactactcagtgtttaaagttcttctacatacactttatcatttaatccctactctgtgaaatagatsttactcttctcactttacagataagaaaactgagtctcagagaaattatggcttgtcctgggtaagtaacaaagcctgtgtaatattctaaagcaaaagaatgaaactgtaatgatgaaactttct

SEQ ID NO: 836048 - DNA, 612 bp, Homo sapiens
agattctttcccattctactactcacttctagatccaagtcctggctcttttcactttagagacatcctgtttcctacatggcagtcttcagtgctgtctctgcagtttcaggaactatgacctttgatgctgctggggctcagaaaacaataccccaaaatatggcactttgacatgctgaactaaagaagcagcctcaaggtatctctctctgacctctcctcacccttacctacacctcacccccatcctcttactttcctgaagcactagcagggactctctatggaatttcctcagctgactaagaaagattccaaaagaattgctgggcacggtggctaatgcctgtaatcctagcactttgggaggctgaggcaggaggatcacttgaggccaggagttcaagaccagcctggccaacatgacgaaacctcatctctattagaaatacaaaaaattagctgagtgtggtggcatgcayctgtagtcccagctactcaggaggctgaggcaggagaattgcttaaacacgggaggcagaggttgcagtgagttgagattgtgccactgcactccagcctgggtgatagagcaagactccatctcaa

SEQ ID NO: 836049 - DNA, 612 bp, Homo sapiens
agattctttcccattctactactcacttctagatccaagtcctggctcttttcactttagagacatcctgtttcctacatggcagtcttcagtgctgtctctgcagtttcaggaactatgacctttgatgctgctggggctcagaaaacaataccccaaaatatggcactttgacatgctgaactaaagaagcagcctcaaggtatctctctctgacctctcctcacccttacctacacctcacccccatcctcttactttcctgaagcactagcagggactctctatggaatttcctcagctgactaagaaagattccaaaagaattgctgggcacggtggctaatgcctgtaatcctagcactttgggaggctgaggcaggaggatcacttgaggccaggagttcaagaccagcctggccaacatgacgaaacctcatctctattagaaatacaaaaaattagctgagtgtggtggcatgcatctgtagtcccagctactcaggargctgaggcaggagaattgcttaaacacgggaggcagaggttgcagtgagttgagattgtgccactgcactccagcctgggtgatagagcaagactccatctcaa

SEQ ID NO: 836050 - DNA, 568 bp, Homo sapiens
ctcagagacagtatagctcagaggataaggaaaacagctccgcttggcttgcccaagtctaaaaccctgcttcattgctcccaacagaaaaacctacatcagtaatttaatcctcaggagccccagattcccaacacccagatgaggatttaataacaatgaacagaggtctctgcagcaggaggacactcttaaaggctggcttttgtaggtttccacttgcctatttttcaaataaatctaaatatgtatttttcccttgtgctatccacaaaagcctcaccagttgctcagagccctcccctttactccacttgatctttttctttttcttcttgtaatctccaagtagacaccacaaaggcagtgatcactttgcagcctccatgggtcagcgtgttccaagaggaaaccgtaaccttgcactgtgaggtgctccatctgcctgggagcagctcyacacagtggtttctcaatggcacagccactcagacctcgacccccagctacagaatcacctctgccagtgtcaatgacagtggtgaatacaggtgccagagaggtctct

SEQ ID NO: 836051 - DNA, 606 bp, Homo sapiens
tgcattcagactggcatgagttactctaccaaatgcagaagatctataatccagyttgtatactgtagtaaagcaaaatcgggtgttgtcactaccagctctccaaacaagattttttggagtttcaattttctcattaaccttcttgcatacaaaactttcaagttcagtgccatcattcacatgagattacagctagaggtgtgcagctttgtgaaccagggtgaaatgattctctgatagtttggatttgcttgtgtcagaaatcatctgacagccatcaaggcaaagttcgaaggccagcagagcccaaccataaagcgttggtctagaaaaatctccagcagtagtactgccaagtaatactgccaagacttacttattcacatgtagaggaagccttcaattttccgcatttagaacaaatatcatttcaaaagtcacttgcagttggcatttcagtcaattgtttttccaaagctatttctgtcccatgaacattatctttgtttcatttttggataaaggtaactttattctgtcaatgacaggttagctatttggcagcttttagctggatcatacttggtgagaagaagcccatat

SEQ ID NO: 836052 - DNA, 542 bp, Homo sapiens
tttaatacagaattccaaatctgcattttcacaaagtccattcttggtaaaaggtgccctaagtgtatttactattatgacttttattgtgagagtttcaaacagcagtgcagttggggataggaagggaagaaacttatctgaggccaggtagaactgcttcactcctcacaaatcacactgcaacacttgtactctagcttaccccaactgatgatcaccactttctagcagaatcgcatatatgtagttatattcttacacatgctctgtcccatcaatcccaacttagtcccttcaataaaaggcactacagtagttgttttgctaaacatctgctatataaatatatatttattaaactttcaaattggcaagaaatttaaaaaccattaaatctaaccacttacctttttgaattaaataaacataacccactcagaaaawtaaaataaatctctcaagtaaacaggggcagaattggcacttcaaatggatcccctgatttttagtgccaatctcattatagcccatggatatat

SEQ ID NO: 836053 - DNA, 652 bp, Homo sapiens
gtggagcctgtgctcctgggtgcaaatgcagcccagccaccacggcagctgccaagccatggctccagatccgggcatccctgtgctctcaggggcccgagaagccccctacccccacaggctcagaagtgcctgctcccactccttggcctctccccactccacagcaaagcaaagctgtggtcacgtcccaatagctgagcctgggtgctggcatgacccggctgggtgtgtgcatgcttggggtggtgctgacacaccaacccccagctgcctcagtctgctctggaaactgcttctgagactgaaactttggttactgacgagcacgggagggaggccagggggctgagggtggctcggctcaggcctgtgggtgccccttggcatggacagcctgaatgccatggacagcgtgttgatggcagcaggaggcagacaggttctaggcaggaaagggtgggtccctgttgaaaccccaccttcaagccagggacagcctgaagcctggggaactttaccaagttccaggtgaagtctgacacccagagtgaccacttctttgatgccttttagccaatcaagtgatgctttttccatgtcctcccatgaaccaattrgcacatacctcctcctgcccgtggaccaatca

SEQ ID NO: 836054 - DNA, 551 bp, Homo sapiens
gtaatttatacaggagaaagggtttaatgcgcttacagttgcttgcagctggggaggcctcacaatcatggtgaaggcaaggaggaggaagtcacatcatatatggatgacagcaggcaaagagagaacttgggcaaggaaactccattttaaaatcatcagatcttgtgagacttagtcactatcctgagaacagcatgggaaagacctgcccctatgactcaattacctctcagtgggtccctcccacaacatgtgggaattcaaggtgagatttgggtggggacacagccaaaccatatcattctgcccctggcccctcccaaatcacatgtcctcacatttcaaaatcaatcatgcattcccaagagttccccaaagtcttaactcatttcagcattaattcaaaagtccatagtccaaagtctcatccgagataaggcaagtcccttccaactatgagcctgtaaaatcaaaagcaagttagttacttgctacatacaatgrgggtacaggcaatgggtaaatacagccatttcaaatgggagaaa

SEQ ID NO: 836055 - DNA, 584 bp, Homo sapiens
aatacactttttctgtcctatgattagttcaggatactatgtgtacttagttaagactttttaaaaaaacttttttttaggtttaaggatacatgtgtagstttgttatataggtaaacttcatgtcatgaggtttgacatacagattatttcatcacccaggtagtaagcatagtactcgatagatagtttttggatcctcactctctttccacaatcattccccaagtaggtcttggaatctgttgtttccttctttatacacacatgtacgggatattcagctcccacttataagtaagaaaatgtgatatatggttttctcttcctgtgttaattcacttaggataatggcctacagctccaaccatattgctgcaaaggacgtgatctcaatctcttttatggttgcatagtattccatggtgtatgtgtagaatattttctgtatccagtctatcattgatgggcatttagattgattccatgtctttgctattgcgaatggtgctgtgatgaatggtgcatgtatctttatggtagaacgatttatatccctttgggtatatatccaataatgggga

SEQ ID NO: 836056 - DNA, 584 bp, Homo sapiens
aatacactttttctgtcctatgattagttcaggatactatgtgtacttagttaagactttttaaaaaaacttttttttaggtttaaggatacatgtgtaggtttgttatataggtaaacttcatgtcatgaggtttgacatacagattatttcatcacccaggtagtaagcatagtactcgatagatagtttttggatcctcactctctttccacaatcattccccaagtaggtcttggaatctgttgtttccttctttatacacacatgtacgggatattcagctcccacttataagtaagaaaatgtgatatatggttttctcttcctgtgttaattcacttaggataatggcctacagctccaaccatattgctgcaaaggacgtgatctcaatctcttttatggttgcatagtattccatggtgtatgtgtagaatattttctgtatccagtctatcattgatgggcatttagattgattccatgtctttgctattgcraatggtgctgtgatgaatggtgcatgtatctttatggtagaacgatttatatccctttgggtatatatccaataatgggga

SEQ ID NO: 836057 - DNA, 622 bp, Homo sapiens
aaagccagatttagatctgggtccccaccaaatctcatgtcaaattgtaatccccagtgttggaggcggggcctggtggraagtggttgaatcatgggggtggatttctcatgaatggtttagcaccattcgcccttggtactgtccttgcaaaagtgagtgagttctcaccagatctagttgtttaaaagtgaatggcacctcccgcctcactctctcttgctccttctctggccatgtaacatttctgctccccctttgccttccaccatgattgggaatgctctgaggcctctccagaaaccaagtagatgctgccatgtttcctggacagcctgcagaactgtgagccaattacacctcttctttataaattatccagtctcagttgtttctttgtagccatgagagaataaaataatacagaaaatcattctctaatttattttgtcttgattataaaaccaatatttgatttttgtctgcacagtaggatttcctaaactgtagttccttctcttcagttcagacaacttattgaataaagcctaggaaaaaatacccattgtatttgaatgaatatttttaaggaacatcttggttattagttataatgtgtact

SEQ ID NO: 836058 - DNA, 647 bp, Homo sapiens
aactagactcatttttactaacttattttcagaatctaagattctttcgggactgagtacataatcatgatgcctgagaagtgataactttttctccctctaatcattttaactttcctatttgtttaatttcttacttactgctagaaacttttaaaataaatagggaatcatagtgttaggtgacataattctcatacaagttttaaagatactttctctagtgtgtcattcttaaatatagtttccccaccaaaagtttatgaatggatttcagaaactctttgaatgcataaaattatttgcaatatttcacataatgtatgcatttatttgggaagaaaattcttagctttaatagaattttaaaggggtttatacacaaaaaagagattaagaacctacattaagaatattttactaaatataaagaatttttttaatgtatatatttaccctgtacaacatgatgtcttggctatcaagctaattgccatatgcatcgactcacatactgtttttggtaagaagatttaaaatttaccgtctttgcgattttcaagaatacactacattattaactgtagtcaccattttgtatagtagaacttttcaacttattycttctaactgaaattttgtgtcct

SEQ ID NO: 836059 - DNA, 503 bp, Homo sapiens
ggagatgctggacaaacgaagggtgattcacatcccgggccagacaggctgggatggcatgaaacttcatcacactaatcagaatggtgtgcaatttaaaatttgtgaattgtttatttctggaattttccatttaatattttcagaacacagttgcccataggtaactgaaactatggaaagcaaaatcgtgaataagggggtactactgtacttctcttcctagtaatatgttcatgctgccaggatgcacatagccatgtgcgaagaaatataattttttagataaacctccctttaagcagaaggtctcaatcctatttcatggagaaaagacccacgtttatactaggactctctcaaccttctacatctaatctttagattcttctgcatgcctgccyatcattttaatcttctctcctctcataagtctgtctcatatctaaggtgaatccttccatatagtctctggatcccatcacctcctttgccctctgaga

SEQ ID NO: 836060 - DNA, 633 bp, Homo sapiens
taatgctctcccttcccttgcccccgacccccggacaggtcccattgtgtgttgttctcctccctgtgtccatgtgttctcattgttcaactcccacttatgagtgagaacatatggtgtttggttttctgttcccgtgttactttgctgagaatgatggtttccagcttcatgcatgtccctgtaaaggacatgaactcatccttttttatggctgcaaagtattccatggtgtgtatgtgccacattttctttatccagtctaacattgatgtgcatttgggttggttccaagtctttgctattatgaacagtgctgcaataagcatacatgcgcatgtgtctttatagtagaatgatttataatcctttgggtaaatacccagtaatgggatcattgggtcaaatggtatttctgattctacttccttgaggaatcaccacactgtcttccacaatggttgaactaatttacactcccaccaacagtgtaaaagcattcctatttctccacagcctcrtgagaaatgagagaatcacttgagctcaggaattcgagaccagcctggtcaacatagtgagaccccatctctatttttaaaaaaaaaaaaacgggcagtctggatcgggacg

SEQ ID NO: 836061 - DNA, 598 bp, Homo sapiens
tctggaatggacaatgacgtagatggatgatggttctcctgacataagaaataaaggtggaggaggaggagctactttgggggagatgatgaaataaactttggacaatgataaccatcaaacaggatttctagacatacaaagctgtcatgataaccacattgtggtgaggacctgcttggaaggtcactgatttttccctagatgatgttttaatgtagttttttttaaaacccagtctcacgctgtctcactctgtcgcccaggctggaatgcagtggtgtgatctcagttcactgcagcctctgcctctcaggttcaagtgatttttctgcctcagcctctgaagtagctggggttacaggcgaccaccaccactcccggctaatttttttttttttgtatttttagtagagatggggtttcaccatattggccaggctggtctcaaactcctgacctcaggtgatccacccgtctcagcctcccaaagtgctggaattacaggcatgarccactgtgcctggccttaatgaagttttgtaagaccaagaattatgctgggcacttacaaatacattgcacatatggtcctaat

SEQ ID NO: 836062 - DNA, 588 bp, Homo sapiens
tagcttcttggcttagctttctagcttcaataagcttttaaaagtctaatctaattcttaaatccttattgaaaacattcagtaaagcaaatttagaaaggtcttaatggtaagttattattatgactacacctaaataaataatcaagtcaaatctaattagaccagttttattttgtaatcaagaataatcttattattttcagaggccgaggcaggtggattgcttgagcccaggagttcgagactggcctggcaacatggtgaaacctgtctctataaaaaatgtaaaaattagctgggcaaggtggtgcatgcctgtagtctcagctactcaggaagctgagatgggaggctcacttgatcccaagaggcagaggctgcagtgagccaagatcgtgccttggtactctagcctgggtataaaagcctgtctcaaaaaaaaaaataaaaataaaaawaaaaaaataatctataatcttagcaggcacagtggtggtgcatgtctgtagtcctaactactcaggaggctgagctgggaagatcacttaagtccaagaatttgaggccagcctgggcaatacagtg

SEQ ID NO: 836063 - DNA, 524 bp, Homo sapiens
gtggcattttagtggaggccccatctgaaagaatgaagtacctcccaatatccctctaatcctaccagagaggtgacctccagttccattccctgttggacaggctctgggggccaaagagagaaggtggatgcaaacatcttctgtatcaagtgtttctgacttcagttctggagatcaggacaaatggatttttgtctagaattgaccacgctcatctctcccatttcccatgccaagtcctgaaccaaggaactgagtggagaaatgacttcccaaactttacacactttcctccagcatttgaattcatggctacctgtgccctgatcctgcaagggccacgagcctctttcaagtgtctcattgctcctgggccagactcaggtcgtctgtccctcaccargtaactctgcccactccctgaggctcccgcctacctctcggaggcctgttccaagtattatggtgatgtcagtggcttctggctccctgcctgaagcccacgctttcctctacaacaa

SEQ ID NO: 836064 - DNA, 489 bp, Homo sapiens
ctgggtggaaataagccgcatccatcacacctaccttatggaatttttagaaatttatttgtgcactgccactgtgagacactccatgatgatgacacatttcatttatgttattgtttcataaaattactagtgtaccttccactctagaagagaagatgctgtctggattttcataattcctcctgctctcttatctccacattcttctttgacaccatatctgcagcttaagaatgacatacgctactgacatttgtatttggtcccttaaagtgatatgaacctaaggaactggtggccgcatatcagtgatgcatctggctcaggtaataggaacctttcgtgctgaatcttgtcaaactggatacagyctcggctgtgtcctgttgagttaggcatagaatagacagcttcattgccaaagaaaaaaagtagggggtaaaatgggtggtatgtctccagcaaatacaatgcataggaaaacaa

SEQ ID NO: 836065 - DNA, 638 bp, Homo sapiens
tctgtgtaggacaaatttcataagatgaataacatatatttgtcttcaaagatctaacacatgttcatggaagacaacagaaccatataagtacagcatcagttataaatatctaagctaattgtttacatagaagcaagacttaattcataggagaggagagggtggggaaagacaaaatgaaagatgtgatttctgaactaagtctcaacagactggtaacatgagtcaggtgaaaggtgagaggaagtacgctctaaaaggaggaaataaaaaaggacttgggagaagaagagagaagaatctctcttaggaaactacatgatatttaatttggatgaaatatttgcagaaggagtaaaaattctaagctagaagtttaagaagggtcagcttacggaggaccttgcctggttatgctgatgggcttaaactgtggcaggagttaaatgaaaatactctggaacagtttaaaatggaggggtgatacactcacaattttatttccaaactgttgttyagaatgaattaaagtggataggattgaagacaaagaggatggttaggagcttattgtgatcatcattaacagtggtattgcacatgtagtaaaatgggcagatttgaaagattatgaa

SEQ ID NO: 836066 - DNA, 643 bp, Homo sapiens
gaaagaggagatcacatgctgttaccattctcctcaatgcccagtcccattattccacattacttctgggttcctgatgaaacttaaaaatcatcatagcccagacagtgagatatcaaatctgatctggtaggctgggcatagtggtttatgcctgtaatcccagtgctttcagaggctgaggtgggtggatcatgaggtcaggagttcgagaccctcctggtcaacatggtgaaatcctgtttctactaaaaatacaaaaaattagccaggtatggtggcagtcacctgtaatcccacctactcaggaggctgaggcaggagaactgcttgaacccgggtggcagaggttgcagtgagccaagatcatgccactgcactccagcctcggcaatagagtgagactctgtctcaaaaaaaaaaaaaatctgatctggtaatatttacaggaccttatcaatttctactggcaagtgtctggggaacaagttcaggaatggattcttagacatgagaccaaagagaaaaatataytaagtttcatatggccaagttgattgacatgggcatattcaccatggatttgagatttaatgtgatcgattgagttcctggaataatggcaataattttctaagctgtt

SEQ ID NO: 836067 - DNA, 592 bp, Homo sapiens
agatgagcaaatggcatatgtgcttctaggtaattatttatttgtgttcatccactttttttattttctgaaattaaraaatatggaaatataaagagaataatacaacagaggctggtgtgtccaccacccagaagtgacagttattaatattgtgtcaaatctccagcattgtgttgagtaagagaaatggagttgtttgagtggaatttacttcccctttttttctctccccacttcctgtcttgccaatccctcctgtgtcccatgaccaggctaccatcatcatggatttggtgtatatacttttaatatacttttacaatgaactgtgtgcctatgaacaaatactagcagtgtttgtgtgtatgtttaaatgaatgtaaatggtgtcatattgaacgtattgctctgcaagtttgtttttgtttatttattttgtattgaattgtgtgttggtggaatagtgttctttttacctgcaatgtggcattctgtcacatgaaaactgcacattttttttctacaataatactgttgcagtaaacatcttctacatgactccttgcacacatgtatgagagtttaagag

SEQ ID NO: 836068 - DNA, 474 bp, Homo sapiens
gggagcacaaagctgaaaggtactgaatagccactcttgtggcactcacatttgtaatccaatctggttatcatcgaaatcaaattctaccctaggtgtttgataagtaaatgtctatggctggttgaagagtgagagattactcccagccaggatggatcaaggaaaggtttcttggaacaagagacttcctaacttggccttaaaggatagtcaggctagtgaggactaaggtctaatatttttatcttgcccaaattcctatctaaggggtctggggagtcatgccctacaaactacaaattctcatcagatgggttttatttgaccctgtatgttgtgacttactttccaatctgactggcataacattataagacaagaaaaacaaatcaaagtatttaacccccaaatatatttccttgccacrccttgaagttgccctgcaaagtctcttgtgggaaaaatccacat

SEQ ID NO: 836069 - DNA, 646 bp, Homo sapiens
aaaatgtatatgtcataatgataaaggggtaaacccatcaaagacataacaacccttctaactaagaatgtagctratagcagagctccaaactacatagaacaaaagccaatagatgtggaagatcaattagacaagcccacacttaacgtaagggatttcaattatttctttttttaataattgattgaacaagtaaatattgaacaagtaaagaggaatcagcatggatagagaagaacttaaagctgtcaatcaattcaacctaactgaaattaataaagtatatccagcagtggcagaattctttttttcttcaaattcataagaaacattcaccaaatcagaccaagacattataagaatttggagttgcagatgataaagaaaaatgtataactttaattactaattttagaaaagaagaatgttttcaaatcaattccaatcagtacagtaaggccagatgaaatgaaagtatctagatttaaacagaagtaaaactgtcttattttgcagattacataattatgtgtgtagaaaatctgaaagcacctacaagaccactactagaattaataaagcaaacttaataagggcacatgataaaagattaatatacaaaaattatttcagtattactagt

SEQ ID NO: 836070 - DNA, 612 bp, Homo sapiens
gtcagatgaatagtttgcaaatatttttctcctatacttcgggttgtctcttcactttgttgattatttcatttgctactgtagaagctttttaacttgatgtgatcctatttgttcatttttgctttggttgcttatgcttgtggggtattactcaagaaatctttgtccagaccaatcctggagagtttccccaatgttttcttgtagtagtttcatagtttgaggtcttagatttaagtatttaatggattttgatttgatttttgtatgtggatagagatagggatctagtttcattcttctgcatatgaatatccaattttcctagcactatttattggagagactctttccccaatgtatattcttggcaccgttgtcaaaaatgagttcattgtaaaggtatggatttcctgctaggatctctattttgttccattgatatatgtgtctgtttttataccagtaccatgctattttggttatcataactctgtrgtataatttgaagtcaggtaatgtgatttctccagtgatgttctttttgctcaggttggctttggctattctgggtcttctggggttccatataaattttaagatagtttt

SEQ ID NO: 836071 - DNA, 572 bp, Homo sapiens
catctattgtatgagtaatccataaaaatacagcaattttaaagatcattctagttgcagtgtggaaagtcaattggagggaattgagagtaaatatggaaagaccaataagaagaatatttaatattccaggtgaaagcagatagtggtgtagactggacttgtgccatggtgataggccagttctagagatggaatcaacaatacaaaattggttgtatatggaggggagagttatttccattagtttgctatctgcaacagtttccccttttgctatcttggaacttatacctaccacccaaccagctcttggcactgtcttttccaacatttttgaagggtatattagtccgttttcacactgctataaagaactacctgagactaggttgtttataaagaaaagaggtttaattgactcacagtgtgtaggcttaacagaaagcatgactgggaggccttaggaaacttaaaatcatagcagaaggygaaggggaagtaagcacatcttactgtggcagagcagggtagagagagagagagagagagagagggagaacgaataggga

SEQ ID NO: 836072 - DNA, 619 bp, Homo sapiens
tagcattcctgtcatataaccattcacactgtcttagttcatttttggctgctataatagaatattagaytggtgatttataaggaacagacatttatttatctatttatttatttatttatttttatttatttttgagacagagtctcactctgtcacccaggctggagtgcagtggtgtgatctcggctcactgcagcctctgcctcccaggttcaagcgattctcctgcctcagcctcctgagtaggtgggactacaggtgtgcgccaccacacctggctaatttttgtatttttagtagagatgggatttcaccatgttggccaggatggtctcaatcttctgacctcttgatttgcccgccttagcctctcaaagtgctggcattacagacgtgagccaccgtgcctggccaaggaacagaaatttattgactcacagttatggaagctgggaagcccaagattgaggggccagtgtctggcaaaggccttcttgctgcttcaactcatggtagaaggtggaagggcaaagagagggcaagacagagaaagtgaaccaaactcacccttctatagtgaccccacttctgtgatcattaatccacttccatgata

SEQ ID NO: 836073 - DNA, 596 bp, Homo sapiens
cgaaatttttacacaatttatacctccagtgttggaaattatgcgaagatggaatgctcagcataacaaagtggcactatgagtgaaggggcagaagttgtacaccactgaaaaatttggcaggggagatttcttgtattttttacttgcattttcacttctatgatcttcaaaactctctccacttatatttggagggtggttgtgttctacaactttttgaagtgtatgctgtctgtttgaaagtctggttatggctttaccattacaattaagtgattttctgtattcacagcaccaattatattttaaaatttatcttttaccattaagtagcctcatacacttaatttatctcagcgtttttgcaagagaacaatttcactgatctgttccattgtgttaaaaggaaaatggtaagaaggaatgatacttggcttccccaataccaaatctgtattagagtttttcaaagagacagaaccaataagatatgtatatagatatatgagaagggatttattaygggaatcagttcatgtatgagaagtcccatgacagactgtctgcaagctggaacgctgggatatctacag

SEQ ID NO: 836074 - DNA, 554 bp, Homo sapiens
taaaaactttctgattctctgtccatgccttgagttgagatctcaaggcactaagcttattgttttcgtttcagaatctcttcagcacagtcaaaagaagccatctcaccccacaaacttggaatcaccgtgatgccatagcagtcaagtgccacagccacttgctttcccaatgcctttccctcctgttaccttctgttccagtgatatttgagtaaccatgatgccaccacatgctacagattagcagggtcccacttctctctagtaagaaagccattcgtgtactcgccagcccaacttcagaatctcacttggatgagctgcttcgttgggccacttctcataacacatactgtattcatcagggctggaaaacaaaatgcacatttggctgagactttgaagagaaattaatgaagaaggacaattggctgaagtttgggcagggtggagagcacycagaaggatactgaggcacgcagggactcacagcagtaggaagcccttaccatgcttaatccttgggcctgaagggcaaagggagctctctc

SEQ ID NO: 836075 - DNA, 640 bp, Homo sapiens
gtcactactctaatttctaatccttcttatgtgtttttcccaacctggtctctgtggttatgcatttccagaagtatttacccacttacaaatttctctgttgattacacccatttttgctttatctggatgatttcaccattgttgctttatgaaatctcgaactaagataatttctaaagtcttttttccatctctggcactaagaaaatgagtactatcaaaaagtgatagcatctatagatcctggcagggctgaaaggttgaattgggttttaaagggaatgaataagaagacaggaagtgatggttggaggaaaaagattttggaggcatcgtaataattccaatgtaattaaaattttggtaattacaaacatgagagtatggctatagaagttatgattcagggagggtagaagacatgatgattggaagaaaattggcaccgaatggccaggtgttggaaaaatcatctttgtggttattaaaatcccaaaatcttgtgccccaagaaatgttggggaggatgacagcaaaccaaaaacagaaatctttaaggaatgacggggtgtagttcagagatcaggagtacytatactaaggaatggtagaggagcaaagatgacatgaaattaaa

SEQ ID NO: 836076 - DNA, 612 bp, Homo sapiens
gatgaagggagtactgacaacacaggcrtgcagtgtaagagcagctaggggtctgccggcacttagggccaaagaagagagcagctgcgaacagctgaagctgcttgcttttattcagtacagacataatgccgaaagcctggagcaaacacaatctgcgggtaattaacattattgttccccttttcagggagcagtcatgtgcacagattatcaaaggtcggtttctggacaacctaagtaaacaagcctgtttacgataaattcccctacacctccttgtacctactccttgccctctgcctcaggatcagagaacagctgccttcagcttattctcccctgaagctatgcagagccttctgaactttcagaaggtttgcatcctttccctatagtttctcccaccactctgaccaatctcctacaaagattaaatcaaggtgaatagaatgtgttttccatgtgatttataaaacatattttccatacacatacttagtctagatctttaattattagcgtaacagcaaagatggttatagttactatatttcataaaccctaaaaaggcaaattataggtggatttttaaattttcaaattaatata

SEQ ID NO: 836077 - DNA, 612 bp, Homo sapiens
gatgaagggagtactgacaacacaggcgtgcagtgtaagagcagctaggggtctgccggcacttagggccaaagaagagagcagctgcgaacagctgaagctgcttgcttttattcagtacagacataatgccgaaagcctggagcaaacacaatctgcgggtaattaacattattgttccccttttcagggagcagtcatgtgcacagattatcaaaggtcggtttctggacaacctaagtaaacaagcctgtttacgataaattcccctacacctccttgtacctactccttgccctctgcctcaggatcagagaacagctgccttcagcttattctcccctgaagctatgcagagccttctgaactttcagaaggtttgcatcctttccctatagtttctcccaccactctgaccaatctcctacaaagattaaatcaaggtgaatagaatgtgttttccatgtgatttataaaacatattttccatacacatacttagtctagatctttaattattagcrtaacagcaaagatggttatagttactatatttcataaaccctaaaaaggcaaattataggtggatttttaaattttcaaattaatata

SEQ ID NO: 836078 - DNA, 499 bp, Homo sapiens
tatagtagaatgatttgtattcctttgggtatataacaagtaatgggattgctggatcaaatggtatttctgattytagatccttgaggaatcaccatactgtcttccacaatggttgaactaatttacatgggccctttctttcttaatgtaaatatgcacaaagaccatattacttccattttacttaaactctggcaagtacaggtgccataaaacctatggagtgcttgaaagggaatcattctctttgctttctcctcattcttagattatttgtttcccagttttcttcttaaaaagaggaactgagctgaggcttagaggttttctgtggtggatcaatatgtgccatttgtgggcaggactccacagtgggtcaccactgaaaacaacagttcagttcctcatgcaaatgcacacagacaagctgaattgagcttaatttggggagaaaaagcaacagagaagatcctttagaatgcatttgtgaactaga

SEQ ID NO: 836079 - DNA, 228 bp, Homo sapiens
atcattctctttgctttctcctcattcttagattatttgtttcccagttttcttcttaaaaagaggaactgagctgaggcttagaggttttctgtggtggatcaatatgtgccatttgtgggcaggactccacagtgggtcaccactgaaaacaacagttcagttcctcatgcaaatgcacacagacaagcygaattgagcttaatttggggagaaaaagcaacagag

SEQ ID NO: 836080 - DNA, 228 bp, Homo sapiens
atcattctctttgctttctcctcattcttagattatttgtttcccagttttcttcttaaaaagaggaactgagctgaggcttagaggttttctgtggtggatcaatatgtgccatttgtgggcaggactccacagtgggtcaccactgaaaacaacagttcagttcctcatgcaaatgcacacagacaagctgaatygagcttaatttggggagaaaaagcaacagag

SEQ ID NO: 836081 - DNA, 499 bp, Homo sapiens
tatagtagaatgatttgtattcctttgggtatataacaagtaatgggattgctggatcaaatggtatttctgattctagatccttgaggaatcaccatactgtcttccacaatggttgaactaatttacatgggccctttctttcttaatgtaaatatgcacaaagaccatattacttccattttacttaaactctggcaagtacaggtgccataaaacctatggagtgcttgaaagggaatcattctctttgctttctcctcattcttagattatttgtttcccagttttcttcttaaaaagaggaactgagctgaggcttagaggttttctgtggtggatcaatatgtgccatttgtgggcaggactccacagtgggtcaccactgaaaacaacagttcagttcctcatgcaaatgcacacagacaagctgaattgagcttaatttgkggagaaaaagcaacagagaagatcctttagaatgcatttgtgaactaga

SEQ ID NO: 836082 - DNA, 565 bp, Homo sapiens
acttaacagagagggggagtggggtttggactccatgggaaagtagggaagtttctattgggccttgtgatgatargggacagctaaatcctcactcgctgatcctaggatgagtcttctcacaatcgggaaactccctcagagggggtcatagaagctgtaattcaggaggctctgcctaagtttagataatgtttctttctgtggctgctgattgtgaagatgttttgagtttaaagtaattttcacaccattttggtgggctgttaattccttcctttcccccatttaatacttccccagatgtttcacaaacaaggaagtgggtttattgaagacactggtcaggccttgtgaggtaaggatctgcaaagggaaggaacatacatcagaacaaatatcaatcagcaccaaagacctaacgtaggcacactacaccgtattttgtcgaaccaatctcctagtcttgggcatgaggggtatttttatggaaacataaagaaaaacaaagattaacggtgagagcagaagatagacccaatttctgagcccacagttcagccag

SEQ ID NO: 836083 - DNA, 546 bp, Homo sapiens
taaaggtttatataccaacttaacagagagggggagtggggtttggactccatgggaaagtagggaagtttctattgggccttgtgatgataagggacagctaaatcctcactcgctgatcctaggatgagtcttctcacaatcgggaaactccctcagagggggtcatagaagctgtaattcaggaggctctgcctaagtttagataatgtttctttctgtggctgctgattgtgaagatgttttgagtttaaagtaattttcacaccattttggtgggctgttaattccttcctttcccccatttaatacttccccagatgtttcacaaacaaggaagtgggtttattgaagacactggtcaggccttgtgaggtaaggatctgcaaagggaaggaacatacatcagaacaaatatcaatcagcaccaaagacctaacgtargcacactacaccgtattttgtcgaaccaatctcctagtcttgggcatgaggggtatttttatggaaacataaagaaaaacaaagattaacggtgagagcaga

SEQ ID NO: 836084 - DNA, 655 bp, Homo sapiens
ggcagagaagaaatgaaagaaagcctatgcattaattttaaaaaacaaggatttaaattagcttgtattgagaatatttaattataggataataacttaaataaagcacaattgaattctaaaaaacaatatgaccatagcatgaatgttctaataataaataaaatttattgagtattatgttctacatgcatataaattattctattctttacatgataagatagatgaaagctaaataattttattttttgaaagagagaattgaggatcaagatcaaataattaattcctttcaagaaacatatactttcaggtgcgccactgaaaataactacaagcaaaatatttaagataatgtcatcatatttactatcctgcagtcatttttaagcaagccccttctatagatagaatgtatataggtaattgaatttgtgtaaggatagagcaatgagccactgtcttgcagtattgacagatggctagacatttacgaatggagaacaaataaaaaactcactgataacaacctttcacccagatttttctataaagatgttaaataggagagaatagattatacattttcacaagtatcaattgttcaaawaaaggtttatatatttagaatagctgaatgtgtcatgtgaaa

SEQ ID NO: 836085 - DNA, 589 bp, Homo sapiens
ctcccctccatgtattataattttgatgtcaatatttacttttttttgtaatttgtattccttaaccatttattatagctgtaatttattttttaaaagtttgacttttaacctttgtaatggtgataaaattgctttacataccactcttacaaaattagagaattctgagtatgactatgtatttcttataattgagtttttactttcatctgtttttttaaaaaacaaattgcagcctttatccttattttagcttaaatgatactctttaacaatttctatgaagcaagactgctggtgatgtactcctttaggtttcgtttgtctgagaaagttttatttctccctcatttctgaggcacatctttgccagataatgtattcttgtttggcagtttttttccttcagcactttgaatacatcatttcactctcttttggcctgagatacacagacacacacacactcacacacacacatatgtacatgtacatcttgctttcagtattctctttttttgtcttygatttttaataacttgattatgaggtatcttggtgaactcctctttgggttgaagttcac

SEQ ID NO: 836086 - DNA, 631 bp, Homo sapiens
gataaccaattataatgaatatgttaaaaatctaaataraaagtactactatattcacaatacaataatgaatgtgaaacaattactatggtataactgctacaagattactcaatttaagatacattactcctaatttcagctcttaagaactaattgtttttcaaatctcttaaagataaaaagcaggattattaaatcagcattatgagcaaggttcaaatcatcatgctttatttcacttacaacatataggggggcttagcaattttacttttgtcaaatttgtcatatattatgacttttggtcagttcttcaacatggttttgatgatacaaaagctactggatagttcaaataagaatgagtatcttcataagaaatgacataaatgaaagtacataaaaatcatcttaatagaataaataaaaacaagtgtctctgtctagcctatcatattgtaataaacagtaagattggaaaaggataagacactgaaataccttgttaactggacctctttcaactttgctcttaaaaattaaaaaaaaatgtcgtttttgaggaagcaaaagaaccatttcattcattattcaaaaattgaaaattgtcatggccaaaatggtatct

SEQ ID NO: 836087 - DNA, 639 bp, Homo sapiens
agcccatttctgctggcaccacagggatccattgggagggtggccagaggagcagggggtaaaactccacagagagaaggaattttctagctgaactttgtgacaawttgaacagggtgagaaggaaagtacatgcatatgaaagtattttgaagccgtaattcgtgcctcgggggaggacacgaatcaggtgtgcagactacaaaggcgggggaagaactaaagcccttttctctcgcagctgagaggaggatagcctcgggcaagttttcaagcctgtctcgccctctgcctggaaatactctgggctgttgagaagagggcacggtggaagtaaggcccttcggtgtgtgtgggagcagggtgaggcctgtgactgccagcttaaccccacttccctgacaacctgcatgactcagcagagacagccgtaatcctcctaggtacacacctccagtgacctgggaatcttacccccatcccccacagcagccacagcaagacccacccaaggagagtctgagctcagacatgcctagccccgcccccacctgatggtccttacctatccacctggtagcagaatacaagaggcatttaatcttgggagttctagggccccacccactgctggtccct

SEQ ID NO: 836088 - DNA, 607 bp, Homo sapiens
agtgcacaccagcccactgagcacccccgggacatctcactctacacacatttctggcatcatctgggagaagcaacaagttgccagtctctgcttcctcatggcagtaggagacttgctggaaattgatattatttgggcttgtctccctgcgagacacaaagcataacatccaagatttgtacatgcctgtcccaccgtgaccagcgggtggggtaggggaagctctgcctgcttggaacacccagctctttaacgggatagagcagagttgcgaggcaggggagctgggggaatgttctaaaaccacacctctgcctttcggcattttaagtaaactgaaaagcattctgtggggacgggcttttggaagacttctatgctcttgatgaaagcacaagttctaacaggaggtctcttgcagagctggacttcaggaagcgaactgcagaaggacaatcttcaagaaaagcaaatgccaggagacgggagtgcacttggaacagatgagaacagatgataaaagcttcattagaatctctctcagccagagagagacattgacattataractttttagtagagttggaaagtaaaatgcacaga

SEQ ID NO: 836089 - DNA, 524 bp, Homo sapiens
aaaaagctcctgaaggaagcactgaatatggaaagacaaaactgggaccagccactgcaaaacacacgaaaatgtgaacaccaatgacactatgaagaaacggcatcaactactatgcaaagtaaccagctagcatcattatgacaggatcaaattcacacataacaatattaaccttaaatgtaaatgggctaaattccccagttaaaagacacagactggcaaattgaataaagagtcaagacacatcagtgtgctgtattcaagtgacctatcttccgtgcaaagacacacataggttcaaaataaagggatggaggaaaatttgccaagcaaatggaaagcagaagaaagcaggggttgcaatcctagtctctgataaaacagacyttaaactaacaaagatcaaaaaagacaaagaaggatattacataatggcaggtaaagggatcagtgcaacaagaagagcaaactaccctaaatatatatgcacctaatacaagagcacccagattcacaaaaca

SEQ ID NO: 836090 - DNA, 587 bp, Homo sapiens
caactttctcctaatatttctcaacatcttagctccctgagattgtggaggaactttcaggtttacacaaatgcttgctacataaacaagacttctttttcccaataaattctcatttcttcagggatccaagaatgcctctcttcattgcacccacatgggttaactaatatagggatattccatccaattgacatacacagaagtgaaaatgtaacttcactagaatatagcaaaagagtacacacattgtaactgcacctaccaactccaactgaagaataaactgcccttgcaaagagatttgctttccctaaagccatgaaaatcctgcaaagatatgtaaaagaacagattctaaaactaaaacagactttagatgttgccaaatctaatttcccccacagttcacgagtcctatctgaaccaaagctgttttagtctaaacacttatgtcytcccaaaattaatgcattgaaaccacatcaccaatgtgacagtattaagaggtgcagcctttgacaggtgattaggttattagggctctaccttgatgaatggaattacagcatatccttgaataatgt

SEQ ID NO: 836091 - DNA, 609 bp, Homo sapiens
ttctgtaaagggtcacttaggtagtaaatattttaggctttggggtccaacaccaaaatcaaggatattacaaaggcagttaaataacaggaacggaatgtccactttttttggctgataaattaaaaatatattaataattattatttttgctatacacatctactaatgaaaataatgaaatttcttctttgggagacagggtttcacttaattggggttcaaaattagtgctgctcatcatcaaatcaattataaatgttcatgtataaaaataattcttagcttataggctgtactgtaagcagacaagggagctgatttgttccatggaacacagtagactgactcctgccttaaaagagtaccttaattggtaacacgaatactttttcaaattaataatcacaatactaatcatcatcttcatataatgtagtatatcctttttagatgtccaaatgcagtagataagtggttaataacatgygctttggaatcaaaccaatctgggtacaatgcttggcctccctcactcccttctgacagtgtgacttcgggaaggtcacgttaatttccctcaggcttgattttctcatctgaaacata

SEQ ID NO: 836092 - DNA, 509 bp, Homo sapiens
gaaatatatttatacaacattaaatttgccattttaaccacttgaaatgtacaattgaaggccattaatkacattcacaatgttgtgcaacgattactaccatctattctttcccaatccctagtaacttctaatctactttctgtctctaccaatttacctcttctagatatttaatgtaagtggaataataaaatatttgtatttttgtgtctgactactttcatttagtataatattttcaaggttcatctgtgttgcagtatgtaccagaatttcattcctttttaatgctcagtaatactctattcaggtggacattttgcaccttttggctaaactggatactgcagtgaacattggcatacaattattggtttaagtccctatttgcaattcatctgggtatgttccttggaatggaattgctgggttgtttttgtaattcgctgtggttagcttcttcaggaactgccatattgtttttcacagaacctgcaatattttac

SEQ ID NO: 836093 - DNA, 597 bp, Homo sapiens
tttcattccacaaaccaccaactccagtaatgagtgaggaatttagatccttggaccagattgacgctgttaattaatttcatctgcctgagatacgtgtttctaaagagagaaactaatcatgtagcatttgaatatattttcaaaatattgtagtaattagaaattacaagaaatatagcattactacatattttatcatttatataaatgagttagtttaatggatagaatattctctcacctagcaaattaatcttcaggtaagtttgtatgaccagaatttattcagtccatttaacatctatctatctagctagctagctagctagctaactatccatccctatttttttttttaataccaaagtatcattggacttcagagtggtaatgggacaggattcatgtacaaaccaagcaaacctaatcttggtattatgttggtaattcattctctgagcgctccagttgagacatgtttggaacattgaatgcttagacaaatctacaactgtcttgttctgaaagmcaaagaagaactttatagaggagaggtcattaacctgagtgtggtgattttatctcactctttgg

SEQ ID NO: 836094 - DNA, 584 bp, Homo sapiens
atggtctattttgaatagatgggctaataagaatatattctctagacttrgtgcaccattatgaaccacaaaagacatcttgggtttctgaaaactaattcctgctgtaaatagttcttttaattgtggtttataatatgagtaatgaaaaaaactatttcacgtgaaccataaccactacgtaagatttcagaatgggtcaagcttaggtaactaactttgcaaagtgatgaattccatcctcctaggttttcttgtctggaatgccctccatcatcctactcttcatccttccatagctcagggtcttctgaaagtttctgtgaggtttttctcgatgctaatgtttgcccacctattctggaactttcatagcaatttatcacatacaagaagcctggaacgtagctagggttctgtaaatacttttcttaagtaaacataaataaatgtgcttttgggatacagggagaaagtcatattttgcagagtgctttatgtggtcttgcttaataactattgatgcctatcatgtgcttcataaacggttcaccgaaaagaacccaatatcacttttgtggttt

SEQ ID NO: 836095 - DNA, 646 bp, Homo sapiens
tgcctacctaaacaagttaaaaagatctcaaattaatgatctagattacacccagaggaagtagagaaagaagaacagagtatccccaaagctagcagaaaaaaaataaagaaagaaaatgagagcataactcaatgaagttgagttcaaaaatccacacaatgaatcaataaaaccaaaagttgtctctttgaaagaatatacaagattaataaaccattaactaaattaacaagaaaaaaatgacggaatatttaaacaagcataatcagaaatagcaaagttgacattaccaccgaccccacagaatacaaaagatcctcagagactactaagaatgcctctatgcataccaaatagaaaatctagaggaaatggataaattcttggaaacacacaacctccaattattgaatcagaaagaaatagaagccctgaatagacaaatactaagttccaaaattgaattaataataaaaaccctactaaccaataaaagccctggacaagaggaattcaccacaaaattctgccagaagtacaaagaagagatggtaaccatcctactgaaactattmaaaaaaattgtagaggaggactcctcctaactcattctacaaagccagtaccaccctgataccaaaac

SEQ ID NO: 836096 - DNA, 634 bp, Homo sapiens
tcactctatgggcatatttattattttaattactgtatgctagacttctatatctctttgtcattattgatttttttttcatttggcttttatttggtaccaactaaatggaatattttctragaagcgaaatacttctagatcattgcagtctttaacaatacaagcaatattcaaccagggatttataatcagagattcctttgaatttcttaattctgtggtataaatgggtccttgcctatattttaaaaaatctctttctacttcttttgctcagacttagtcttactcaaatgtttttattattttttatttatttattttttgagatggagtctcactctgttgcccaggctggagtgcagtggcgggttcacgccattctcctgcctcagcctcccaaacagctgggactacaggcgcctgccaccacatgcggctaattttttgtattttcagtagagatggggtttcacgtgttagccaggatggtgtcatcttacattgtaggcctgaaaactcatcttttgctttattcctgaggacagccttttgattgtatcccatgttaaataggtgattcctaggtgtctgtcttgagaacgtttttttgtaagtttgtttaattttg

SEQ ID NO: 836097 - DNA, 634 bp, Homo sapiens
tcactctatgggcatatttattattttaattactgtatgctagacttctatatctctttgtcattattgatttttttttcatttggcttttatttggtaccaactaaatggaatattttctgagaagcgaaatacttctagatcattgcagtctttaacaatacaagcaatattcaaccagggatttataatcagagattcctttgaatttcttaattctgtggtataaatgggtccttgcctatattttaaaaaatctctttctacttcttttgctcagacttagtcttactcaaatgtttttattattttttatttatttattttttgagatggagtctcactctgttgcccaggctggagtgcagtggcgggttcacgccattctcctgcctcagcctcccaaacagctgggactacaggcgcctgccaccacatgcggctaattttttgtattttcagtagagatggggtttcacgtgttagccaggatggtgtcatcttacattgtaggyctgaaaactcatcttttgctttattcctgaggacagccttttgattgtatcccatgttaaataggtgattcctaggtgtctgtcttgagaacgtttttttgtaagtttgtttaattttg

SEQ ID NO: 836098 - DNA, 634 bp, Homo sapiens
tcactctatgggcatatttattattttaattactgtatgctagacttctatatctctttgtcattattgatttttttttcatttggcttttatttggtaccaactaaatggaatattttctgagaagcgaaatacttctagatcattgcagtctttaacaatacaagcaatattcaaccagggatttataatcagagattcctttgaatttcttaattctgtggtataaatgggtccttgcctatattttaaaaaatctctttctacttcttttgctcagacttagtcttactcaaatgtttttattattttttatttatttattttttgagatggagtctcactctgttgcccaggctggagtgcagtggcgggttcacgccattctcctgcctcagcctcccaaacagctgggactacaggcgcctgccaccacatgcggctaattttttgtattttcagtagagatggggtttcacgtgttagccaggatggtgtcatcttacattgtaggcctgaaaactcatcttttgctttattcctgaggacagccttttgattgtatcccatgttawataggtgattcctaggtgtctgtcttgagaacgtttttttgtaagtttgtttaattttg

SEQ ID NO: 836099 - DNA, 637 bp, Homo sapiens
gggtggaaagggaggatccctttcatccccatcataaaggtcacagccgacacccrtataacaatgacaggttaacaagagaaaagcataataaatgtacttgattatagttttatgtgacattggagccttcaaaatgaagacataaagatgcaaggtaaactatttttatgcttaggtccagtgaagaatgggcagccccatagaaatatgaaagaaaaaaaagggtatgatctaatggtgtgactaagtggagaaactcagcaagacctgtctattcagaattttctcagcctctctgtacagcattcctccttccaggtacagtataggacccctctagaaggagagtcttaatttctttatgcccagatgttacacagaaaggttgggagaagggacagttaaagtaatatgtttaagcattatggatgactttgagaaaaatgggttctggtttctatgacttgccttggttgggaaagaggaattctagtttctatagtttgtctcagggaaaaatgaaggacaaaaaacaggagagcaagagaacgtcagggagagactttgcttctgaggccgcttcttaggcctttattttggggtatcattgtctgagcctcaatattccccagtc

SEQ ID NO: 836100 - DNA, 516 bp, Homo sapiens
cattaacttggactgattatttgcataaagtacaagaggaatagtgatttatcatataggctcttttaaagttaactttgctagaacttttcagaaagaatattagattagacttttaaaagcctctggagtcttatgaagccaggcaaagatttgactcaccctcaaattgtgtcggtaatacctggacaaattgcttaatctactctatttatgaggtccccaaaatatcttgagtttccttggcctgtcagaaagtgacattctttacttaccacaattctttttttttttttttttttttttttgagatggcgtctcactctgtcacaccggctggagggcagtgatgcaatctcagctcactgcaaactccgcctcccaggttcaagtgatttccctgccttagcctcctgagtagctgggattacaggaatctgcctccacatccagctatttttttgtattttcagtagagacggggtttcaccrtattagccaggatggtctcaatct

SEQ ID NO: 836101 - DNA, 553 bp, Homo sapiens
gcctgggcgacagaatgagactccgtctcaaaaaaaaaaaaaaaaaattgctgaacattattgttaggagtcctctgataacccaaagggatcttcattaacctgaatgatcagacagacaaaaaaaagtagtagacaatgtaatttagctctttgccacgtttttctcgtcattgctgaaggcaccacattctgacatagtgtaaaagaaaaaaaaatggaatgtgaatttcaagtgaagaaaactaaaacactatggtattaaatattcacttatggtgtttacatcaacaaaactaagtgctctgggttagtttgaaaggaaattcatattggggtgtggtatttgattttaggctcataactgcacattggaacaatgaaagacattttcttcccatgaaaaattgtacctgaaagactgatactgaagtactacagagaatttaggaaattggcttgagttatttttgttatattccttcaaaattttgatattatagcttatgctgtatttaaaatagtgtaatwcctatttttaaaacaaaatgac

SEQ ID NO: 836102 - DNA, 618 bp, Homo sapiens
tgtactatgttgaataggagtggtgagagtgggcatctttgtgttgttccagctcttgagggaaatgcttccagtattttttgcccattcagtatgatgttggctgtgggttttacatagatggctcttatttttggaggtatgctccttagatgcctagtttcttgagggtttttagcaagaagcaatgttgggttttattgaaagctttttctgtgtttattgagatgatcatatggtttttgtttttaattctgtttctgtggtcaatcacatttcttgaatcgtgtatgttgaaccaaccttgcatcctaggaatgaagcctacttgattgtggtgaactaactttttgatgtgctgttggatttggtttgctagtattttgttgaggatttttgcatctatgttcatcaggtatattggcctggagttttttttttttttctgttgtgtctttggtaggttttggtatcagggtgatgctggctttgtagaattagttagggaggagtccttcctccttgattwaaaaaaaaatagtttcagtagaattggtataagcactttgtacatcttgtagaatttgactgaatcaatctggtctagggattttttgg

SEQ ID NO: 836103 - DNA, 607 bp, Homo sapiens
gctggtctggaattcctgggctcaagcaatccacccacctaagcctcccaaagtgctacaattacaatgctttcataaggttctaatttaaggcttaattctattgtcctcatcaattctagtatcctatgatttacttaagaaatccttacttgtctcagctctctatatagattttttggggatgattttttacagatatcagatatgtagcaattaccctttgtctttctagacaagagtcctaatccttttattctgtcttcaagagattacctacccccactcccaagcctcccctaatctttttagctcttctctgtatggttctcatggatttggcaaatttagtgtatcctttcatgagtagtcagtgaaatcctgatgcttattcccaaggccgctaatgtggcttgtgtctccatactgaaggagatgtgaacattctgacttgtggctataaaagatggatacagaaaatgtgctcagacaatgttttgttgaaaagtttctctacaaktgtatgtttcatgtcttttcaattggaaaagaagcctcaaggttttgacttaatggggctcacacaaatttaggaatgtagtacatt

SEQ ID NO: 836104 - DNA, 607 bp, Homo sapiens
gctggtctggaattcctgggctcaagcaatccacccacctaagcctcccaaagtgctacaattacaatgctttcataaggttctaatttaaggcttaattctattgtcctcatcaattctagtatcctatgatttacttaagaaatccttacttgtctcagctctctatatagattttttggggatgattttttacagatatcagatatgtagcaattaccctttgtctttctagacaagagtcctaatccttttattctgtcttcaagagattacctacccccactcccaagcctcccctaatctttttagctcttctctgtatggttctcatggatttggcaaatttagtgtatcctttcatgagtagtcagtgaaatcctgatgcttattcccaaggccgctaatgtggcttgtgtctccatactgaaggagatgtgaacattctgacttgtggctataaaagatggatacagaaaatgtgctcagacaatgttttgttgaaaagtttctctacaattgtatgtttcatgtcttttcaattggaaaagaagcctcaaggttttgacttaatggggctcamacaaatttaggaatgtagtacatt

SEQ ID NO: 836105 - DNA, 614 bp, Homo sapiens
agtcctcacctcccttctcctgaaagcccctttcaaaacaaaaacaaaaaccacatccacccaagtccctgtctccacctctgcctccaggaaagccggcggaaggccgccagtctcagctgtgacagatacagatatttctgcatttccaggactgaggtcaatccctggggacccagtgaggcggtatctgaggggccatggagctggcttgatggggtctacaggtaggcagggacctggtggggatgtgactcaaggatttttatcaaatatctttatctcctgacagatgcaaaaaaaaaaaaaaatgagatcagactccagggtttcctccatgccacactgtggccccattgtttgttgtgctatcagcagaagttgactttgcaaggaatgtacacgtgtatgtgatgtttgaatgcacctgtgcgtgcgtgcatttgtgtgtgcatgcgtgcattcgtgtgtgtgtgtgtgtgtgtgtgtgtgtgwgtgtgtgtgcgcgctgaggatgtgagccccacttccggcccagtgcccctgcccaggctggctctgccctcctgctgctctgggcccctcaggcagtgactacctggtacatagggaag

SEQ ID NO: 836106 - DNA, 520 bp, Homo sapiens
gcatcatgttctattaaccaggtttgtgactctgtatgagttagtcatcctttmtggatgctaacaactgtcttgctactcattatactaattaattggggccttttctgcttagggatcctgtcctatcttatctcttggtatcactggacccagttctgcagtggggaactatcctagcctacagaggagaaataatgcttgtgatgcttgtgacccttttgctttggtaagtcaaacaggtttcaagcccctgtaagagccttttatttttactcaaaatggaaatcttgctgattaatattcaattatgtctctggaacatctgcacacatacatgcacatatacacatacaagtaccacccctcctcccttgcacatactttttcgaaatattccattgatttattttaagcccagtagaaagtggtcactataaattttaataactgtcatttaaatatatgacattaaatatatgtcatttaaatatatgtcatttaaatctataatatagtc

SEQ ID NO: 836107 - DNA, 600 bp, Homo sapiens
gtcatatactccggtaatacaaaggtcacaccctcaggtaattatatcytcctgccccacttcccccacaccctccatcctgaccccatgcctgctgtacctcatctgagggttcaatgctatgctcacttgcatggagacatgcttacttagtacagctggcccttgacaatgtgagtttgaactttatgagtccactggtacatagattttcttctgcctctgccacttctgcgacagcaagacaagcccctcctcctcctcctcctcttcagctactcaaggtgaagacaatgaggataaagttatttctgataatccacttccacttcatgcacagtaaatatattttctcttccttatagttttcttaatagcaatttcttttctctagcttattttaattctaagaatagagcatataatgtctataatatacaaaatatgtgataatcaactatttacattatcagtacacagaaggctattagttaagttttttgggggagtcaaagttgtaagtaaattttccactgtgtggagaatggggcttcggacccctaatccttgtattgttcaagggtcaactgtacttgtatt

SEQ ID NO: 836108 - DNA, 727 bp, Homo sapiens
acagtctttccttaaacaactggyggctgaaatgaaggatcccccaccaaccaccagcactgggagacgatgccaccagtccccattgcagagaaggaaactcaggtctgtttctatgtccaaaacatttatttcaggaaatatttgtgcctgcacaacaggggaactttgtggggtgtctgtggcttgctacagtgacatctggcaggactaactgggtcatcagagccacagaataaggactgggaaggtggccacaactgcaaggactggggccatgtggggggaggactctgagactgaccacttggctggtaacttggctgtccagtgtatgggaatctcagtgagttcctggcctgaagtcagactctgtctctgacgcagacgtgagaggtcggagtggcaggaactgctcagctgctcatccgggaacttgtcctccaaggggctttgccatttgttttcttcctgtacctagaggtggcagtcggtgctcagcttccacagctctccttgatacacttgctcagacccctcggctactctcttgcccagcccagagtaccttttccacttgtctgaagacccgcagcaggtttccacgaaggacaccctgaagctcttcctcactccagccacgactcagcaactcctctatcaggaccgggtatgtggacacgtcttccagcccctgagggaatctgtgtggccaccagctagtggg

SEQ ID NO: 836109 - DNA, 642 bp, Homo sapiens
atgtttgaagagacttattctgagccaaatatgagtgaccgtggcctgtgacacagccccaggagatcctgagaaygcgtgcccaagtggtcgggctatagcttggttgtatacattgtagggaaacacaagaggtcaatcaatacatgtaagatgtacattgctttggtcctgaaaggcaggacaactcagaggattgctgagggggttcctggtcacaggtggattcaaacactttctgattggcaattggttgagtttatctaaagacctggaatcaatagaagggagtgtctgggttaagataaggggttatggaaaccaaggttcttattatgcagatgaagcctccaggtagcaggctttggagagaatagatggtaaatgtttcttatcagacttcaaaaagtgccagattcttagttaattctctactggatcaggaaaaagacctgggaagggaaggagattctccacagaatgtagattttccccacaagagacagctttgcagggacatttcaaaatacatcaaagaaatatattttgaggcaaaatacttttatttcttttggggccggctatctgtcaagttggtatctcattgctacaaagagtccgctttgtcagtctgaagtctct

SEQ ID NO: 836110 - DNA, 614 bp, Homo sapiens
cgtgtaagcgtgcattcatctgaagacataagtgattaacttctcatctgtaactaagakctaagtcctgaagaacttcctctggagtctcattaaatttacttaatctaaatgggtccaggtgctggggagattacccttatcttgtcttctgctaaatcatgaaggtttggggagtcccttcagaaccccaataaacttgtttgtcgaagcctggggagtttcttcagacctcccaataaacttgtttaatcccaaatgggtcctgttaagaattccttcgttatcttgtcatgtttcaaggcccaggaaaggcctaggcaaaactcttggggggcttttgttacattccagcctttgtataagggcactggccctctcagctcttaatatttaacttcaccactcagtcagtgctgaaacagttgttatggaggcctaccagttcagctgttagggagacctggcttgccacaatactatgtgacttcaaatccctgctccatcactcacctgctggtgactctggacagtaaccttaacccttcctccattgttccatctataaaatagatgtaagaattagatttccctcaaaggattgggatgaggat

SEQ ID NO: 836111 - DNA, 539 bp, Homo sapiens
catgcccttgggaactagggggtgtctcggtaagaaggagttagaaaagacgtactggactgggtcttgtgttaggtgatttggtggagggtttgaggaggcagggctttgctatgggttsgatgctgccaaaaagcaggaatggttgagcatctccacccatcttttttttttttttttttttttttttgagacagggtctccctctgtcacacaagctggaatgcagtggtgcaatcacagctcactgcagcctcgaccttccaggctcaagcggtcctcccacctcagcctctctagtagctgggactacaggtttgtgccaccacacttggctaatttttgtatttttggtagagacggggtttcattcaccatgttgcccaggctgggttcaagtaagcctcccaccttggccatcgtgccaggcctcagtaaatcttatctagacaaaaagaagactaaagcaagactaaagctgacactggtaaagaaacagcagtcactcgtatcagttggaacagagacagaggtttgac

SEQ ID NO: 836112 - DNA, 539 bp, Homo sapiens
catgcccttgggaactagggggtgtctcggtaagaaggagttagaaaagacgtactggactgggtcttgtgttaggtgatttggtggagggtttgaggaggcagggctttgctatgggttcgatgctgccaaaaagcaggaatggttgagcatctccacccatcttttttttttttttttttttttttttgagacagggtctccctctgtcacacaagctggaatgcagtggtgcaatcacagctcactgcagcctcgaccttccaggctcaagcggtcctcccacctcagcctctctagtagctgggactacaggtttgtgccaccacacttggctaatttttgtatttttggtagagacggggtttcattcaccatgttgcccaggctgggttcaagtaagcctcccaccttggccatygtgccaggcctcagtaaatcttatctagacaaaaagaagactaaagcaagactaaagctgacactggtaaagaaacagcagtcactcgtatcagttggaacagagacagaggtttgac

SEQ ID NO: 836113 - DNA, 272 bp, Homo sapiens
ctttgcttcgagttgtcccaccttccagactaaaccagtgttcatcttccatacgctgattgatgtctcatgtctccctagaatgtataaaacccaactgtgctctgaccaccttggacacatgtcatcaggacctcctgaggctgtgtcatgggcacgcatcctcaaccttggcaaaataaactttctaaattaactgagacctgtctcagattttcagggtttacatttattaaragttcagctgggcaaggtggttcacacctgtaatc

SEQ ID NO: 836114 - DNA, 643 bp, Homo sapiens
aatgcctttcctacattgtattacytttgctcaacgatcaatttaccaaatgtatgtgggtctgtttctgggctgtctattctgtcccattgatctatttgtctgttctttcaccacattgcttaatcactgtagctttatagtaagtctttaagttgggtaacgtcagtcatctgatgtttttcttctctttaatgttgtgttgactattctgggtctttgcctttccatataaaaactcacattacaatcagtttcttcctaactacaaaataacttgctgagattttgattggaattgcattgaattcatagatccagttgggaagaactgctatcttaaaaatgctgtcttcctatgtatgaacactaaatattctgccatatttccattgtatacttttatggttttgtatttcgcatttaaatgtttgacacttttgaaatgtttccaaatggctatgcagttattccaacatcatttactgaactgtcctataatttgggttatcttctttatcatattccgaattaccatagtagttggacctatttctggattttctattttgtttcatgggcagcgctattcattcaccacaactaccttgctttagttattgaggctttatagtatgtttta

SEQ ID NO: 836115 - DNA, 625 bp, Homo sapiens
gatggtctcgatctcctgacctcgggatccgcccgcctcggcctcccaaagtgctgggattacaggcgtgagccacygcgcccggcctctacattgcttttctttccctattcctctcttaatctctgtccaaatctaactgccttgattttctagggccacagctcctcccacctgttttattgttcctgctggactttccacctggaacgcttacctctgcatctccgtaagtcaaaaatcctacttaccctgtaaactagggattataaatacaaatgtttcagcaggtgaggtaaatgaatgacatgacctaatatattatcacatggtaaggatatggcatactgggacatgcatgttcccatcacactcaaatccagtgctgtgtgaagaactttctgttcttcatgatggaaatgttctgtagcggaactgtctaatacagtagtcactagtcatatgtggccagtatgactgagggattaaaatttttatttacttaatgtaattaattttaaatgtttatagcccatatgtggctagtggactaccatattggacaatgcagctctagccatttacttccattctggaatgtgggcccaatattgccaaatattcc

SEQ ID NO: 836116 - DNA, 562 bp, Homo sapiens
tcaccaaagaggtgaaagatctctataaggagaattgcaaaatactgatgaaagaaattgaccaggatacaaaaaaaaaaatggaaaaacagaccatgctcatggattagaataattaatattattaaaatgaccacactacccaagtaatctacagattcagtgcaatccctatcaaaatgccagtgacattctttacagagataaacaaaaatctaaaatatttatggaacaacaaaatcttccaaatagcaaatagccaaaaccaaagcaattctcagaaaaaaaagatggatgcattacactagcattacactattttagacttcaaaatatactacaagtttgtagtaaccaaaacagcatggtactaacataaaaacggaagcatagaccaatagaacagaatagataactcagaagttaatccacacatctatagccaactaattttgacaaaggcaccaagaacacatgttggggwaagtgcagtcttttccataaatggtgctggaaaaattggatatccatatgcagaagaataaaactagactttcacttc

SEQ ID NO: 836117 - DNA, 613 bp, Homo sapiens
ctcataaacagattaatccatttgtggtgaagggttgaaggatgcaccatctgccagtatgccaaattggtacattaattatttcgggttaaaaatattggaggctgggtgcggtggctcatgcttgtaatcccagcattatggtaggctgaggcaggtggattacgaggtcaggagatcgagagcatcctggctaacacagtgaaaccccgtttctactaaaaacagaaaaatatagccgagcatggtgacatgtgcctgtaatccaggctactcaggaggctgaggcaagataatcgcttgaacctggaaggcacaggttgcagtgagtcgagattgtgccactgcaatccagcctgggtgacagactccatctcaaaaaaaaaaaaaattttttttggagaaattgtagtttcagtaagagctagctgacttgactctttctgcaggcatcaagccataaaaattcctctgggagrggccacctccccataccagggtgagaaaatagtcctcatcactggaagcgggacttctggctgcaatggacctgaataaatccacttattgaactagccttagcttctgctagttttatacccaccccatatat

SEQ ID NO: 836118 - DNA, 550 bp, Homo sapiens
aagtacaaaaaaattagccgggcatagttgggggcgcttgtaatcccagctactcgggaggttgaggcaggagaatcgtttgaacytgagaagtggaggttgcagcaagccaagattgtgccactgccctccagcctgggtgacagagcagtattccatctcaacaacaataacaaaaaaaaaaaaaaaaaaaaaaagaaggagggtaggatgtggagaggcagacacggacccagctgctcctttgcgtcctccctggcattgaccctgcagaggccccggttgctagattcagttcaggccacgcttctctgccttgggacatcctcctagaagccagcagtgccagagtcaggggagggtgggactgacatttgaggatgccttcttcagggcaggcagtaggccaggcctttcctgctgtcacatggtacaatgcacgtgaccgtgcaaggctggcggtgacaggtccatatttatttcagcttgtccacatgcatgaattttcaaaattgagataaaaggtgtataccgtaatgattcacttctt

SEQ ID NO: 836119 - DNA, 647 bp, Homo sapiens
cttcattgattattttctgtctagttgcatgggctggtatatctagcacagtgttgaacagcaggggagagagtggctayccttacgttgttcctaatcttaatggaaatgcctcttgtatttctccgttaagtaagatgctggatttatccctaaggtgtgtatatctatatatatatgtatatattttttattgtgttagattatctgtctagtgctgtttttctgagcgttttcatgaggactgtggattgaattttgtatgttttttcagcatctagaaaggtaatcatatgaatactttagacctattaatatatatggtttatgatattaatgagtttcccaatattgaaccaatctgtaataaatgccactggtcttgctattttgttttcttaatatgatgttgaattctgtttgctaataatggtttcctagttaaatcatgttgaattagtagtcgaattaaactgattacagagcacaattaccagcaaagtttacaaacacatttcaagtagaacagatacctttgctgatgcatacaattgtagtcacatggccgatccattcaggatttttaaaactaggtagtacctatttccttttctttttctttttttggtgaacttcagacttgtgaa

SEQ ID NO: 836120 - DNA, 647 bp, Homo sapiens
cttcattgattattttctgtctagttgcatgggctggtatatctagcacagtgttgaacagcaggggagagagtggctatccttacgttgttcctaatcttaatggaaatgcctcttgtatttctccgttaagtaagatgctggatttatccctaaggtgtgtatatctatatatatatgtatatattttttattgtgttagattatctgtctagtgctgtttttctgagcgttttcatgaggactgtggattgaattttgtatgttttttcagcatctagaaaggtaatcatatgaatactttagacctattaatatatatggtttatgatattaatgagtttcccaatattgaaccaatctgtaataaatgccactggtcttgctattttgttttcttaatatgatgttgaattctgtttgctaataatggtttcctagttaaatcatgttgaattagtagtcgaattaaactgattacagagcacaattaccagcaaagtttacaaacacatttcaagtagaacaratacctttgctgatgcatacaattgtagtcacatggccgatccattcaggatttttaaaactaggtagtacctatttccttttctttttctttttttggtgaacttcagacttgtgaa

SEQ ID NO: 836121 - DNA, 619 bp, Homo sapiens
agcaaacttctgaaaagtaaagacaagtaaaaaatcttgaaagaagctaaagagaaataacattttacctgttggagaacatcaattcaattgcctgtggattttttatctgaaaccagagaggacagaaaagagtagcacaatatttttcaagtgattgagagaaaagaagtgtcaaccacaaattttatatccagtaaaaatatccttccaaattgaaggggaaatagattctcaggtgaagaaaaactgagagaatccatctctcaacaggctcactcttaaaaaatgactttgggaagttgtctaaggaacttaagaagggaaagaagaatggataaacgtaggagtaaatataacagatattacttctcttcttgactttcttaaatcttatttgatagttaaagcaaaaatcatagcactatctgaggtggtattcaatgtatatacaggaagtagctaagacaattttatcttaaaagtggggagcataaggggacccaaatggaagtaagttttctaaacttcactcaaagcggtaaaacctcaatactaatagactttaataagttagttgatatagtatctraagcagccactaataaaaataaaaaag

SEQ ID NO: 836122 - DNA, 541 bp, Homo sapiens
aaaagtctgaccagactttaacatggcctgaagtttttaatgtattcctgagtctggaaatccatcctcagaaagtggaagccttgctggttgaaagtatttgaacacaacctccgaccaatgttttgactagtcactttgcagacatagaggctaaccctaggaagagaagtttaaaaaatagaagtgactgggcgccgtgactcacgcctgtaatcttagcactttgggaggccgaggcaggcggatcactttgaggtcaggagttggaaaccaccctgaccaacatggtgaaacctcgtctctactaaaaacacaaaaaaattagctgggcatggtggcggacgcctgtaatcccagctactcggaaggatgaaggcggagaatcacttgaacctgggaggcagaggttgcagtgagccaacatcgtgccactgcaytccagcctgagcaatagagcgagactccatctcaaaaaattaagaaaaaagaaataagaacagaagccaactaaacccaacgcaagcagataaaagaaata

SEQ ID NO: 836123 - DNA, 521 bp, Homo sapiens
ggcatcatgttctattaaccaggtttgtgactctgtatgagttagtcatcctttmtggatgctaacaactgtcttgctactcattatactaattaagtggggccttttctgcttagggatcctgtcctatcttatctcttggtatcactggacccagttctgcaatggggaactatcctagcctacagaggagaaataatgcttgtgatgcttgtgacccttttgctttggtaagtcaaacaggtttcaagcccctgtaagagccttttatttttactcaaaatggaaatcttgctgattaatattcaattatgtctctggaacatctgcacacatacatgcacatatacacatacaagtaccacccctcctcccttgcacatactttttcgaaatattccattgatttattttaagcccagtagaaagtggtcactataaattttaataactgtcatttaaatatatgacattaaatatatgtcatttaaatatatgtcatttaaatctataatatagtc

SEQ ID NO: 836124 - DNA, 634 bp, Homo sapiens
ctacaggttcagataatggcttaatgggagttgttgtttcaataggttcctgctaagaatggcctcttttaggaattgattttcaacctccacttatataggacttgagtggtcaaattaagtgagaaagttcattcttggcatttgtgggaaggttagttatgactgttggtaggaattctttctatagggagtgtgactatgagaagaataacgggaggccaatgagattccctgtagagaatgacacatggaggaatctgccttgatatttcttagcaggaaaaaaggaatgagattaagtggtattgctgcatctttactatgccctgcatactgtgcttgacacattacaagcacatatcattttatttttcaaaccacccatggtgtaattaaacaatattatacacattattaataaacagtttgtaggcactgttgtccaggcactattatcagaaataatgcattcaatactgacaatatctctatgtgatcatctaatttagagacaaagaaaagacgacacagcgttaagaagctttaccaaagagatagaggttataagtgtggaaccagagtttgagcccaagaaakttgcttacagaatatgtgctcatcactacaagct

SEQ ID NO: 836125 - DNA, 612 bp, Homo sapiens
tacatatttatggggtacatatgaaattttgatacaagcatacaatgtgtgatgatgaaatgaaggtaactgggatatccactacctcaggcmtttatcatatatttgtgttaggaatatttcaaattcactcttcaagttattttgaaatatacgataaattattgatgagtatagtcaccttattatgctaccaaacactgtatcttattttttctatataactgtatttttataaccattaactaaccactcttaatcacccactcttacttacctttctcagattctggtaaccatcattctactccttacctctatgagatcagtttttttttagctctcacatataagtgagaacacgcaatatttgtctttgtgtgcctggtatttcacttaaactaatgacctccagttccattcatgtttttgcaaatgatatgattctattcttcgtatggctaaataacattccattgtatgtaggtaccacattttcttattcattcatctgttgatgtacactggggttaattccacatattggctattgtaaatagtgctgctgtaaacatgggagtgaagacacctctctgatatgctgatttatgt

SEQ ID NO: 836126 - DNA, 531 bp, Homo sapiens; identical to SEQ ID NO: 834569

SEQ ID NO: 836127 - DNA, 604 bp, Homo sapiens
agacaacagtcttaatgcactagtgccactttaggctgcagtcaggatatctacagccatatagttttgtaaggccacttgcctaatctggaagtttcttcagtaagaagagtgatggcatggtgggtgttattaaaggcagcagccatatgcttagccagggcctctacttgtaattctacatctatggtcactgcctgggggaaaaagatggctagtgggtaaaaccaccaggatgcccatttttgacagtggtgtctggcgtttgtgctttcccagttggcaggcagagtctagatggaacaggattcatcctggtaggtaagggtgctcccagatgcatctgccagtccaatcaaaggataggaagggccaactgtgagtgccacaggcccataagcagccccgggggaagggttgactccatgtgagaaggagctgttttgctaccccagccatatagttgctagtcagttgaagagtttgattacattsctggggaggtaaccatcccatgttacaggtgttagcttgaggtgtgctgcggttgtggtgttcagtgcacagtggtgcttgacctattacctgtatttgtacctctgtc

SEQ ID NO: 836128 - DNA, 663 bp, Homo sapiens
tgtgtgaatttcctctcctcttgaggatccaagataaacctggggcttctgtgcctgtcagaaaatggcattctttactaagcacaggtcagaaaccctgtacagggactgtgtacacaaaataygaggccagtttcccaagggctttattggctccataagtcaagtttgcttccttaaagaaaagcacatcattccagtcaaagccttggtaaaataaccaattcctccaattgtgtcctattgcaaaagaaaacagattcttactgcacttatgcaaataactatattgctataaattaagaatagtcacaaatagtttccaaattctagagaaatcaggtagagggaaacaaataggttccaaattttgttcacaggggtatactttactcaattattaaaagctgtaaatagcttaaaagaattgttttcttaactctgaaaaacaaaacaaagtatcagcaacattttaagcaaaaagtcaaaaagattacttccgttttctattggttcagttaattcagttaactcctattctgcttgatagtcatgaacatttcagctctccatgagagttctgaaagttcctttattccaatgtcacaatttccaaagttatcagaaaacctgcatttaagtgcatctgttagagtccgatag

SEQ ID NO: 836129 - DNA, 428 bp, Homo sapiens
ggatgcaaggctggttcaacatatgcaaatcaataaacataattcatcacataaatagaactaaagacaaaaaccacatgaccatctcattagatgaaaaaaggcctttgataaaattcaacatcccttcatattaaaaagtctcaataaactaggtagtgagtggaacacacataaaaataatgagagccatttatgaaaacccattgccaatatcatactgaatgggcaaaagctggtagtattccccttgaaaactggcacaagacaaggatgccccgtcttaccactcctattcaagatwgtattggaagctctggccagggcaatcaggcaagagaaagaaagtaaaggatattagaataggaagaaaggaagtcaaactgtctctgtttgcagattttatatctagaaaaccccattgtctc

SEQ ID NO: 836130 - DNA, 622 bp, Homo sapiens
cgcctataaacactactcccatgaggcctccaaaaacatgagtggagaccatcatacattagtataatgtctcggatagcccttctgaatgcagacattccaatacattgacattttaaggttctgacaaatcctgtagcaaagaaatctttttgcctaagctgagattgggtctacatgtatttccttgggagcccctcttgctgtgcagtattggaaatactgctcatgagtgtggcagtgataactgtaaagccagaagcaggctctgggagaaaagccaggggtcagactcctgctcacttacaggcagtgagaagagtttgtctttggcctccttccctctgtccaatgctcctcccccaccactctttcttcacttatttgctttcctctgccaacctgaaacctacagaaagcaaagttgggctgggcctgtttatgcatcttcccaggttttcctggctctgcatgcccctggcctcggcaacttgctatgtgggtgctcgggcagttgccaccaaagtctrtgtcctgacctgtcagctgtctatcttccccagaggtaagagctgggcctgggcatggctgccttgatgccatgcgcatgagtcacagcagc

SEQ ID NO: 836131 - DNA, 531 bp, Homo sapiens
actggctcccctggcttagaaacacctgagtctttcctggtctctaaggtgtgagttgcccctccctgaatgctcctgtctcccgccttcctcacccttagtgtgagattccagtttctctgctgaactaagtcaattattgtctatatttattgatttggactgatatccacattctgagtaaaaattaaaatcagattataaaactgggcatatgattccattggtgtaaaacaccccgaatttatgtatatacaatcatcctcaggagatgaccataatctggtgattcattctaggaccctccttggataccaaaatccacagatgtttaagtccctgatataaaatgatatagtatttgagccaggcgtggtggctcactttgggaggccgaggtgggcagatcacacagggtcaggagtttgagatcagcctagcyaacatgggaaaaccccgtctctactaaaaatacaagaattagctggtcctggtggtgtgcgcctgtaatcccagctattcaggaggctg

SEQ ID NO: 836132 - DNA, 578 bp, Homo sapiens
aatcttgccaaatctggtagctccgacctctaccctgggcctttccctagttttcattactaagctccagtttataccagctccagagagtggaccctggccacgtccttagtattggaatcttggtgccctgcctaaagcacgcttccctcagccctaggggcttgccatttgcctgaatttccaggcccaagctgcctctctgagtcaactttctcagtatctgttgtcagcatctatgatcatcaccagctacttacatatctcagacaacaggacaagcactttgaatgccttatttacctaagtctccccactaaaaccaggaaatctcaggactgggctagtccagagctcaaaaaccctcaaattcagccatttgcttgcatccacaaaactaggaagtctacgttcttagccacctatttgccttagcaatacactacactaaaccagtttggatctaaaatttgataattttttcacaaaactytgcaacaataaattgttattatctaatgatctctggagttgataaatagacaattttatttggttttataatgtattcaacttgg

SEQ ID NO: 836133 - DNA, 580 bp, Homo sapiens
caggttggattataggaagtacaattcaagaaccgtttgttgagcatgagcagccactacattggaacattgttccaggcaatgacctcctagagagccaaagcacactggctttttgtccaggtggtagtttccagtcatgcctttgagccaccacgttcccacagctggtgcccagctgtcctttctgtgcataccttgcggtggtgacacaaggaatagccgttcccagcacacctggggagctcctcacgtgagctgaccttggtttctagagtggagcaagctttgaggaccaggatctttggaaggggacatctattctgtgtgttaccactaaggcaaatgtcactcattgtcttcttcatcccccattgtactacttccttcaataaaccatccagaaggagccacattcatcaatgctaattggttcgtccattttaaaatgaactgttttaggactgctstggttgtatgaagaaattttcctttcctccctactaactagtgggaaatgccaaacattctatattaaatattttctttcttttatgttttaagggcagaggagttaacc

SEQ ID NO: 836134 - DNA, 589 bp, Homo sapiens
cacaacgtgcaggtttgttacatatgtatacatatgccatgttggtgtgctgcacccgttaacttgtcatttacattaggtatatctcctaatgctagccttccccccmatctcaccccaggacaggccccggtgtgtgatattccccatcctgtgtccaagtgttctcattgttcaattccctcctatgagtgagaacatgtggtgtttggttttctgtccttgcaatagtttgctcagaatgatggtttatagcttcatccatgtccctacaaaggacatgaactcatcattttttatggctgcatagtattccatggtgtatatgtgccacattttcttttcttttcttttttttttttttgagacagagtctctctctgtcatctaggctggagtgcagtggcgcgatcctggctcactgcaagctctgcctcccgggttcatgccattctcctgcctcagcctcccaagcagctgggactacaagcgcctgccaccatgcccagctaattttttgtatttttagcagagacggggtttcaccatgtaagccaggatagtctcgatctcctgacctcgtgatccg

SEQ ID NO: 836135 - DNA, 467 bp, Homo sapiens
cgtgctctcaaaagaaaagattcacaacacttctcatcattacaattaacaccttttcagccctactatgctgtaggcctacaccaggtactttaaatatctcatcaaatgcttaaaaccacccaattcaggaaaattgttattatccccattttacggatgaggtaactgaggccgagaggctacataacttaaccagagctccaaggcacagataagcatacagacatgcacaaaaagattttatccgccccaccagatttcaaactccatgagacccccaggccctgcctcagagcctgcttgcagagaacctagctcccagtttggtgycagcatggatggggcactccgtgggtatctctccagccacttaccactctccacaccctgcccgaccccgccccacctgcaagagggaacatgctgtgcctgggagtcttgtcttttcagttcttcacaactga

SEQ ID NO: 836136 - DNA, 467 bp, Homo sapiens
cgtgctctcaaaagaaaagattcacaacacttctcatcattacaattaacaccttttcagccctactatgctgtaggcctacaccaggtactttaaatatctcatcaaatgcttaaaaccacccaattcaggaaaattgttattatccccattttacggatgaggtaactgaggccgagaggctacataacttaaccagagctccaaggcacagataagcatacagacatgcacaaaaagattttatccgccccaccagatttcaaactccatgagacccccaggccctgcctcagagcctgcttgcagagaacctagctcccagtttggtgtcagcatggatggggcactccgtgggtatctctccagccacttaccactctccacaccctgcccraccccgccccacctgcaagagggaacatgctgtgcctgggagtcttgtcttttcagttcttcacaactga

SEQ ID NO: 836137 - DNA, 657 bp, Homo sapiens
tcctgatccttagactatgctgcctttagaaattgcctagtcactgtatrcttgctatgtacagacctctagactctaagaacctcagcaaaatatctagagctgcaaatgaggcctgccgttgacagctatgggtagagtgctcaggatgtttaagagaatctttcctgagttcctggagtgagctgttattctaaggaaggtcaagggtctcatagccttgttagaagagatgagtgccctgcccccatccctgccaggccacggtgggtggctttgctgacaacttgttcatcaagcatttattgagtgcctgccatatattaggattgtcccaatggctggaaatgccaggacaaataagaggagctcagagtctagtgaaggaccgtcatgtgaacatggaaatacgacacacagtgatgcccaccagaaaaaggcagaatttctgaagaagttcacaggacatactgtctggagcagctaggcttatccctctgactttgtttgggctactataacaaaaatgtaatagactgagtggctcaaataacaaacttttatttctaacagttcagaaggccaggcggtccaagaacaaggcaggggcagatttggtcttagatggtcatcttcttaccgggtcctcacatggcg

SEQ ID NO: 836138 - DNA, 465 bp, Homo sapiens
agcatgcttctctctcagcttaatttctttctacatgaataactcctattaggggtgtgtgtgtgtgtgtgtgtgtgtgtgtgtgtgtgtgtgtstgtctgtgtggtggagggtgtctgctggtgttccagttctcccagtttttgtttgtcggaaaatgcgttttattcaccttcatatttgggagatttttttcccctgggaaaaaaatctttattcaccttcatatttgggagatttgggcttgttttattttctttcagtcctttggaaatgtcattccattgtcttctggcttccttcatttctgttaaaaagtcatctgtcagttttattgtggttcttctgaaagtaacatatctgttttttctctttggctttgtttttttttttagcaattttactatgatgtacataggtgtggttctcttcatatggatcccctgtggagtttggagtgcatct

SEQ ID NO: 836139 - DNA, 530 bp, Homo sapiens
atttcaacatgaaattttgtggagataaagagattatrtccaaacaatagcctggatgaaatttcctagagtgggaacacagaataagaaaagaggagcgctaggagaagttttgaggaatgccaatatctaatggccatccgaagtgggatgagcctgtaaaggaggcaggtaaatgtgaggaaggctaagagaatatgcttatcaaaaaagtcaaggaaagataatgcaataagaataaaggagtgatgagccatgttaaatggtgctgtgaagtcaaataaaatgaacagtgaaaaagccccatagatttagcaaaatgaaggtcactggttacttagcaggagttgattcaatgacaatatgggagactagagttggttcgattaggtaaattttaaaggagataccaagtgtagataaaaattcgaataagtttggctgtgagtgggagaagagagaggaatagctgtagggagatatggggtaatgtatcttttattttttaagatagaagatgtttagcatta

SEQ ID NO: 836140 - DNA, 492 bp, Homo sapiens
acaaaatttcatcatgtaaataatagaatttctaggctttctaaagctctgagcttactgtataaaaacactaatctagtcataccttaattgaaaatattttataatagtaatatatataaaaagatatatatgtactcgtacttaacacattaacttttacatatagttactaaagagttgatgatacaaatttaataagaattttccatactttggctttaatataattttgctttaaaaatatgtatttggacttttaaaggatgtgtaattccttgttatattggacgaaaaataacagctttttcatcattgtgaaatgtgaaaatatccaatacaacaaatggaagacgcctaataaatgttaatatccttctttgtctttacaaaactacaaacatgacatactcttgaacatgcccrtcttatcttctcagattaagctctgccacctgtgctgttcttcctgttctgaaccattaaaacaca

SEQ ID NO: 836141 - DNA, 505 bp, Homo sapiens
gccattcatgcatgagtgatctgccctggggacccaaacacctcccactcagtcccacctccaacactgaggatcacattttaacttgagatttggagggaacaaatattcaagccatatcaattacctaccctcttaggataagaatgagaattgaatgaaataaaaaaaatatgaaacacatagtaagtgcttgatatttgtagtcattataatgattacacatagtaaagtaggaaggtaggataaagagatttacggagtgaggaatgtttgtatccccctgaaaattcatatattgaagccctaaccccaatatgatgttatttgcaggtgaggcctttgaaggttaatcagattcaaatgaggtcatgagggtagagtcctcatagatgagcgcccttaaaagaagagaccagagagctttctctctctctcccaccmccatgtgaggacacagagagaaggtagccacctgcaacccaggaagagagccctcaccaga

SEQ ID NO: 836142 - DNA, 343 bp, Homo sapiens
gtagatcctaacacattttcacgccttcctcttgagcctttccgtgggttgtttgcatgctcagagtgtgtgtgggctgtggaccagcaaatasccattgatcacatattgtgccagaaactgtgatagaattttttgcctgtgagctcatttaatccctgtagttctgctgcagaaaaatgggatgccattttacagatgaggtaacagactcagggaggttaagtaactagctcaaggttataggcctagcaaggagcagagccaagattcaaacctagatctgattgcaaaattttgttccaactataccagtggttcccccaaaccatcccatgagctc

SEQ ID NO: 836143 - DNA, 343 bp, Homo sapiens
gtagatcctaacacattttcacgccttcctcttgagcctttccgtgggttgtttgcatgctcagagtgtgtgtgggctgtggaccagcaaatagccattgatcacatattgtgccagaaactgtgatagaattttttgcctgtgagctcatttaatccctgtagttctgctgcagaaaaatgggatgccattttacagatgaggtaacagactcagggaggttaagtaactagctcaaggttataggcctagcaaggagcagagccaagwttcaaacctagatctgattgcaaaattttgttccaactataccagtggttcccccaaaccatcccatgagctc

SEQ ID NO: 836144 - DNA, 621 bp, Homo sapiens
atgtgtatattaagtgagctgccacgaggtggcactcttgcttatttgttgtagtaggccactgccttctacacaagggatgtgatggagccagaaatgttagtcttaacgcgactaaactgcccctcaaattaaaacattgtcgttagttgaagtaagatacacacattgcttcaaataagaattaaagcaaacgcgaaaatgaaagagaaaatcagagcctaatgtcgttgtctataatgctttcaccatctgagtcacttgtcaattggcactagaatcttgttctccaaggtgtccccaggggctcttcttcccagttactctgtccctgcttcgtgtgtaaggtgggatgattcagaagtttattgtcttatcttacttctgaagtctatgggggactcaattttcttcttttttgtttgtttttgagacagtacctccctctgtcatccaggctggagtgcagtggtgtgatcacggctcactgcagcctcgacctccatccagggctccagcgattctcccacctcagcctcctgagtagctgggaccacagacatgcaccaccgtgcctgrctaattatcttattttttttttttttatagagacagggttcc

SEQ ID NO: 836145 - DNA, 602 bp, Homo sapiens
caatagaggcacacttgctgtagcatgactgaaatccttccctttaagatccacaaatttccttccaaccaaatgaaagctttccataggacttacacttttttttgaaatcacagaagtaatccatgctcattgtataaaacccccgaaataaatataaacaaagagaagaaagaaaaacataattaatctcagcctcaataaccaatagcattttagggaatgtcctttattaccaatttatttatacatgtgattgacttggtatactcttagtacatactctgttccaggcaccatgccagattttgagtttgcaaagaagaacaagattttctctacaagacaaatatagccccctctctctgattatataaacacatgcatatataagttttataaaaaggtcatattttacaaacagtgggccctctgtgtctgccattctgcattcatgagttcaaccaaccacagatcaaaaatgtttggaaaaaatttttacagtacaatagaaagtaatacaaataaaaaccaatgtagtataacaactacttacatagcrattgcaatgtattaggtattatgagtaatttagagaagat

SEQ ID NO: 836146 - DNA, 587 bp, Homo sapiens
ggatcctgggaccaatctccatgggtgtggagccttgcgtttccccattaatgatatactaagatcatttttccatgtccctaaatacttttcaaaggcattattttaawttcataatattttattttctagatataccatagtttattcattaaattttcctattcttgaaaatatacgtgtatctactcttttactacaaaaaataatgattcatgactatgaacatatagtcagaatgaataagatctagtatttaatagcacaacagggtgactacagtcaaaaataacctattgtacatttcaaattaactaagagtataactggattgtttataacagaaagaaaggattcatgcttgagatgatggacacttccatttatcctgatttagttatgcatcatatgcctgtatcaaaatatcttatatactccataaatacatacacctactatatacccacaaaataagaaaaagagattcagtgaacaatattgtagccaattttttgcctgcaaccacaattacattcctagtctaaattgccaaagttggggttgatggattaaatgacttttaaaat

SEQ ID NO: 836147 - DNA, 557 bp, Homo sapiens
tgacctcatgatccacccgccttggcctcccaaagtgctgggattacaggcgtgagccactgcgcccggtcgacagagctcttaaaactcaacaaaaaaaaaacaaacaacctgtctcacaaatgggcaaagaacttgaagcggcatttttccaaagaatataagcaagtggtcaatagagtgaaaaaatgcccaacctcactaatcattacagaaatgcaaatcgaaaacagatgagataccatctcatatacattaggatggctactataaaaaaatcacaatgaaacaaaagtaacaagtgttgacaagaatgcagaaaaattagaactcccatgcactgttagtgggaatgtaaaagagcatagctactgtggaaaacagtatagcagttcctcaaaaaattaaaaatagaattagcatatgatccagcaattccactttttaatataaaatcaaaagaattgaaagcaaggtctcaaaaagatacttgtacacccatgttcatagcagcattattcacaactgcyaaaacatgtaagcaatccaagtgtcca

SEQ ID NO: 836148 - DNA, 496 bp, Homo sapiens
tttttgtataaggtgagagatgaggatccagtttcatactcctgcatgtggttagccaattatcctagcataatttgttgaaaagggtgtccttttcccaatttgygtttttatttgctttgtcaaagatcagttggctgtaagaatttgggtttatttctgggttctctattctgttccattggtctatgtgcccatttttataccagtaccatgctgttttggtgactatggctttacaatatagtttgaaatcaggtagtgtgatgcctccagatttgttctttttgcttagtcttgctttggctatgcaggtttttttgttgttgttctacatgaattttagaattgttttttctaattctgtgaagaatgatggtgtttctttctcacagctcttaagattctttccttcatcttaactttggataacctgatgacagtgtgcctgggcaaagatctttttgtgattaattttccaggtgttctttgtact

SEQ ID NO: 836149 - DNA, 575 bp, Homo sapiens
agttccctctttcctttacctttttttttaaaaaaaaaagatttttaagkctttaaaaaatctttccttgggctcctgcttggaaccaaagcagtcaaaatcagttttctgaaccagagagaaatgcctctacctgatgccatccagataatgcacattctgtgtctgaactgccctcccggtggcattgacctatccttctgcagcagctgctggtggaagatgatgagcttcacctgtgtttgccatgcaggaacatgagcaatacagaagctgtccatgcaactctgctggcctctcaccatacggtcaaggtcaccacgatgcaggtggatggcaacctgcagtcagtgctccaggcctctaaggaactcaagcaaaagtatgcctggacagtcctcatgaaatggtatctctgatttctatttcaagatggcagactgagcactcggtaactgccttttccttccacatcgaatctggaatacacatatgtgagtgcaattacagaagtttggagtggcatcaggggatccgctgtggaggtagaagattctaggaactagaagagaaca

SEQ ID NO: 836150 - DNA, 629 bp, Homo sapiens
tgagcttcatttcaatttaataaatactactagaagtcttggaaaaatgggtaaatccccacaactcttgttcccaaaatgaaataaaagtttgccaaagctgaacattttaaataaataatagccaagcattgttctaagcattattcatgtcatgtcttatttgcatcccaagattctgaggcaagataatattatccccactttacaaatgacaaagaaaaaaaacacaaatataagtaacctgcccaaggttatatagcaggtaaatggcagtcagtattcaaaaacaaacttctgatctagttgctctacataaacgttggctaatggacagcaaatgcataatcaacaaatgactttatctagtgcacaaagctttcaatcaccaaatatttatttaacagctactaagtgccaggcacttaagttaatgatgacaagatagacaaggtccctgctgatccagctcttcgagtgtgggtgaaaaaaagagaaaaggggaaaaaaaaaaattcagtcactgttgcartggggaaaataaacacgaggaggaggatgtgagctaagatctaaatgacttcaaatatccgaaggcataaccttccccgcaaagggaaaacaaaaga

SEQ ID NO: 836151 - DNA, 302 bp, Homo sapiens
tacggtatcattgctatgaaaaacaggtttctcagaattaaccatacaatccatcaattccattcctaggggcagacgcaaaataaatgaaaaaggacttaaaaagatatctgtacaccaattttcatagcagcattattcgcaatagccaaaagataaaagaacccaaatgtctatcaacggataaatagaacaaaacgtggtgtatacatacaatagataktattcagccataaaaaggaaggaagttctaatacacgttacaatatggatgaacctataaaacattatgctacgtaaaa

SEQ ID NO: 836152 - DNA, 576 bp, Homo sapiens
ttgatatgtggttggttgaattggaggatgcagaacccacagatagggagggctgactgtatactactgggcacatgcccaagagaaatgaaaacgtatttgcacaaaaatgtgtacatgaatgttcatagcaacgccaaaaggtaaaaactttttgataaataaaatgtggcatatacatacaatgcaatattattcagccaaaaaaggaatgaagtactgacacatactacaaaatggatgaacgtgttacaggtggcaggtatccaagttaccagggcaaatctgtatgggtctgcagcaacttcagttcttgcctcctcagaagaaagaatttgaccgaggggcaataaggcacaaaaagagactgaggcaagtttcagagcaggagtggaagcttatttaaaaggcctttaggaaagaaaggaaagcacgctcggaagagtcccaagctgtcactgaggtcaactgtgatattgacctcgatcctaggactttayaggctggctcctttcccatgattcttcccttagggtgggctgcctccatgcgcagtgccctccttacccttgggaa

SEQ ID NO: 836153 - DNA, 628 bp, Homo sapiens
catccttataccaattcagtcttcctgcctttcactggatctccctctgcaccccttccttttggcacagatttgacctaggtattctagtcatagcataaacttttagagaataggtgcttcactcctttctaccccctcaccaatttatctcatctctctaagtaggatcccattgactaacctcagtaaagcaagacaactcttgggttaaaatcatgggtttcagaattaggcctgggttcaaatcttagctctgaaaatgttttacttgagtgatgttgtccagaacgtttcagtgtttttagcttcaatttctatatctgaaaagtgggagaaaataaggtcttctgtgggattaagtgagatattaaatataaagcatctaattcagtgctaagtcaatattgttcttcaaaaactcctccttccttttgcatcttgggtaagaaaataacagctttagctgcgtgtctttctttgctaggttttggagagttttaattaatgtttagaaaatctagacatgctgtctatgttggtctatctattgtccaaatraatgacttactgcttaacttctctcggttaaggttcctaaaacctcattccctcccctcaggccttt

SEQ ID NO: 836154 - DNA, 531 bp, Homo sapiens
aaaaccttaaaatttacatggaatcacaaaagacccagactagccaaagctatcctaagcgaaaagaacaaaactgaaggaatcacattactcaacttcaaattataccacagccctatagtaaccataacagcatggtactgacataaaaagagacacatagaccaatggaatagaatagagaacccataaacaaatccacatacctacagtgaactcatttttcacaaaggtgccaagaacatataaaggacagtctcttaaatacatggtgctgagaaaaccggagacccatatgcagaagaataaaatttgactcctaactctcaccatatacgaaagtaaaatcaaaatagtaaagacttaaatctaagaaactactacaaaaaaaaacactggggaaaatcttcaggatattggtcyaggcaaaaatttcttgagcaataccccacaaacaaagccaccaaagtgaaaaagaacaaatgggatcacattaagtgaaaaaggttctgcacatcaaaggaaactatc

SEQ ID NO: 836155 - DNA, 531 bp, Homo sapiens
aaaaccttaaaatttacatggaatcacaaaagacccagactagccaaagctatcctaagcgaaaagaacaaaactgaaggaatcacattactcaacttcaaattataccacagccctatagtaaccataacagcatggtactgacataaaaagagacacatagaccaatggaatagaatagagaacccataaacaaatccacatacctacagtgaactcatttttcacaaaggtgccaagaacatataaaggacagtctcttaaatacatggtgctgagaaaaccggagacccatatgcagaagaataaaatttgactcctaactctcaccatatacgaaagtaaaatcaaaatagtaaagacttaaatctaagaaactactacaaaaaaaaacactggggaaaatcttcaggatattggtccaggcaaaaatttcttgagcaataccccacaaacaaagcmaccaaagtgaaaaagaacaaatgggatcacattaagtgaaaaaggttctgcacatcaaaggaaactatc

SEQ ID NO: 836156 - DNA, 523 bp, Homo sapiens
accccacaaacaaagccaccaaagtgaaaaagaacaaatgggatcacattaagtgaaaaaggttctgcacatcaaaggaaactatccacaaagtgaacagacaacccacagaatgggagaaaatatttgcaaactactcctctgacaatggatcaatagccaaaatatagaaggagcttaaacaactctctagaaaaaaatctaataatacaatccaaaaatggccaaaatatttgaaaagctatttctcaaaagaagacatatgaatggcaaacagtcacatgaaaaggtgcttaacatcattgaggatcagagaaatgcaaataaaaactacaatgatatatcgtgtcaccccagttgaaatggcttgtatccaaaagacagacgataacgaattctgtcaatkatgtagaaaacgtacaattatgtacaatgtacccttgtacactgttggtgggaatgtaaatcagtgcaaccactatggacaatagtttggagattcatcaaaaaactaaaaattgag

SEQ ID NO: 836157 - DNA, 616 bp, Homo sapiens
aactcttatatttgttttaaagttaacaaaggcatttagcttwtgaggtgagaagcaagatgaagtcagttaggttagacttctctcactgttacaatttttgcaaaggtggtttcagtctctcataattcatgtctttctcccatgcacaatacattcattccatactaatagccccaaaagtcttaacttgttccagcatcaactttaaggtttaagtccaaaatctcatcaaaatcaaatatgagtgaaactcaagatatgagtcactgtaaggcacacacatctccagttgtgaacctctaaaaccaaagaagttatgtgtttccaaagtataatagtggtacaggcctagagtggacatttccatcccaaatgggagaaacaggaaagaaaaaatgagtgacaagtcccaggtaagttcaaaacctaaggagaccaacattagaccttacagctaaaaaatcatccctttggctccatgctctgccttctagatccagggagatactgcctcctaacactacccagcagaggttacgtccccagagctttggatagcctgcccccacagctttgtgcaaagtccagctgccctattgaatggaaggccatg

SEQ ID NO: 836158 - DNA, 603 bp, Homo sapiens
atagtatccacattaaaagattattatgagattaaaatgaatgaatacacgtgaaacactgaaaatagtacctggtagacaataagcactaagcaagtgtttagtattagamgaaattgtgaaaagacaattagaatctaagggtaaaaaagagacaggaaggaaggaagaaaataagaaaggaaaagagaaagaaggaaataaacaaataaattatcatttttgggggtgttccagtgattaattttacatatcataataataagaatgcactaaaccaacataaaaatacaattaaaataggagtatagaagagagataatagttgtttctcatttttcataatataaacaaatacttaacaaatagttaaattagtaaacaataaatatttggaggtaatactaaaagcaacagctaaaataatttaaaatatgatgagtggaacttaatgctaagaaggtatttattacttgatattttatcaggtgcatgtcacttttataaactttttttatgtatatgcatacacatacacacatatacatgtgtctatacatatatatatagacacatgtatatgtacttgaaaaacacaatgta

SEQ ID NO: 836159 - DNA, 603 bp, Homo sapiens
atagtatccacattaaaagattattatgagattaaaatgaatgaatacacgtgaaacactgaaaatagtacctggtagacaataagcactaagcaagtgtttagtattagaagaaattgtgaaaagacaattagaatctaagggtaaaaaagagacaggaaggaaggaagaaaataagaaaggaaaagagaaagaaggaaataaacaaataaattatcatttttgggggtgttccagtgattaattttacatatcataataataagaatgcactaaaccaacataaaaatacaattaaaataggagtatagaagagagataatagttgtttctcatttttcataatataaacaaatacttaacaaatagttaaattagtaaacaataaatatttggaggtaatactaaaagcaacagctaaaataatttaaaatatgatgagtggaacttaatgctaagaaggtatttattacttgatattttatcaggtgcatgtcacttttataaactttttttatgtatatgcrtacacatacacacatatacatgtgtctatacatatatatatagacacatgtatatgtacttgaaaaacacaatgta

SEQ ID NO: 836160 - DNA, 482 bp, Homo sapiens
gggcaaattttctttatatgcttcaagcaagacaacatatcataaaagtttggatacagaagmacagagtgaaactaaaactttcttctattaagctagacatttaagagatttaaaaatcataaaataagccactcttcttgctaattttttttgttttggaaaatatagttatttttgtttaaaatatgccatttacattaacatgtgaggtttattgttaaataaattttaaaatatttttaatttttcacttttaatttctaatgcagtaaatatcaacagatatcaatagatgaacaaagttatttagaatcctctacaattttttcttttttttcttttttttttgtgggggggacagggtcttactctgtcaacccaggctggagtgcagtaatgcaattacagatcactacagccggacctcccaggctcaagcaatcctcccacctcaaccccccgagttgctggaactatgg

SEQ ID NO: 836161 - DNA, 512 bp, Homo sapiens
tgtcatgcaaatatctttcggacttttccttggtgtcaatgcctatccatttctaaatttcatctcaatccaagtcaaaatgatttcaagatgatctatggtttctcaaagctaagtcatttaggtgcttccttagaaaatgcagcttccttttttttttttttttttttttttttttgcttatggaaaatggtctcttttttggatttcacccaggatctgtagatctaaaaaacaagacagatgaagtaacctattatctaatggcagaggatatagaataaagaacaggctagtatggaggttgtttgtactactcagattttccagattattgtttctgttatcagttaatctgcagaaaacatacatctaaaatatytataaaattagcccaaaaccctaaatctagcattataagggatcccattgttctttccaactaggaagtaaatgccgtaattatctggctaatgcacaccgatctggaaaagttagatgtgttaaatgta

SEQ ID NO: 836162 - DNA, 626 bp, Homo sapiens
tattagtttaaggttggatatctgctaagactacttcctctatcaagtctttttcttcaggaggaatgtgctatttttgttcctttrttcgtcctcataaactttagatcagtttttaagtatctccaagtctctttctcttgcgttctctctcggcattctctctttctcacgcacacgcgtgcgcacacacaaacacatacacatacacacacccacaaacacaccctgttggcgttttgactgggattaaattgaatccatagatcaatttggagagaatcgacatcttcacaatattgagtgttgtgatctcagaacatgatatctctcttcatcttaccttctttcaataaagtttatatttttctccatagggggcttacaaaggctttgtatatttattcttaagtaatttacattgttatgctactgtaagtactgttttgtcaatttcattttttttttaattctttgcaacttatgtacagaaatgaaatttatttggtatttaggaaatgtactatagacaaatttaaatgctaataaatcctacattactttgagacttatatgctaacaatcattatctgtgaatgctggcattcaatcaggctggtgggaaa

SEQ ID NO: 836163 - DNA, 639 bp, Homo sapiens
ttgcatggagccagcacttgtgccgrcccttggagctgcctgacccagcgcagcagccggcatgcctggctgtgcacagtggctggaccttgtgcttgcttgctcacacaccccttgctgttctgagcctggatcatgcttggcaggcatgggatctgggcagatagtgcaagctgagcacatcctgccaggttgggtggatgtaatgagcccagcaagcccaaacaaaactcaggcaaaggcctcaccagccacaaagggttccagctggaaaagccacaccctaagggtcctgagacaatagtatcattcagttctagatgtttttaacttccactgtgatatctttttaacctgtgaagtattgagaaatatgcttcttaatttccaaatgtttggtgtggatttgattggattttgtttcattagtaacattttcttatgtgtttcaattttcttgtgtatagtcaaataaatatgttaagcctttctttatgtctgtatttgtcatcagtttgtaaatgttttacatatgcttggaaggaatatttactcactactggagtgacgaaaaattctttatatatgtattaaatcaaattggtttggtttgttcaaatcttctatatttatatctga

SEQ ID NO: 836164 - DNA, 671 bp, Homo sapiens
tatgttttctccaacatcaaaatcataaagcttctttaacaatgatttattcagcgtatactatatgtcaggcattgtgttaggaggtttagaaaacattatttcatttgattgctacggttttgtgaaatgaacacaattatcacctcttccatagatgagaaaagtaaatttaaatttaaatacaaagtaatgtaaacattttgtttgaaatctcaagttttatacaatcaggattcaaagccagagtttcctacttccaaaacatattctttttaaaaaacattttaaacaatacacagtcatggtattagatggtttcagatgaaaaattacaaagagtatagaaattttgtacatcattttcccagcttctcctaaagttattatttcacataaacatagaacaattattgaaacaaaagtaaccttcatgcaaaactgtttattaatctacaggccttatttaaattttgcccattttcacactaatatcccttttctagatcattaattcaggtttttacattgcatttagtgtcacatttccttaatctcctctcgtatgtgacacttcctcaaycttcttgtctttcaataccttgattttttttaaggagtactgatgatttgttttgtaacttgtccttaaaacttcacccattttctaa

SEQ ID NO: 836165 - DNA, 621 bp, Homo sapiens
aaccaccatgaacatgcttacacaagggggaagtcaaatcatgagtggattatatgaagattgatttagtttggttatcaaatatcctttgccatggagtgattgatggaacgttatgagccagagggtgatatcaacttagcgaccactgggtagggatctgagtttctatctctcatcgacttatatgtatttcatgaagctcaatctagaagttatgcaaagagcagtgtcctcaattaaagacttcgtgtactgtgcagcattctccttttacttctgtgttctcttgtcctttttttgtgttcattttttcctctcacccccatgtttctaccttctgtgccccacagtgtcatgagattctgctcctgaaaattgcaacatcccaagtgcctcccaacgttgtctctaaggtttctgaatgctgttgctttcttctcacacctctgagctcatcacctgctttgcgctattgaaaatttcccctaggccgagcgcggtggctcatgcctgtaatgccagcaytttggaaggccgaggcaggtggaccatgaggtcaggagttcgagaccagcctggccaatatggtgaaaccctgtctctactaataatacaaaa

SEQ ID NO: 836166 - DNA, 615 bp, Homo sapiens
aacaatgacaattagttctaaaattgtattagagtctgaagaaatgtgatgtatttgactatcctatctttttgtgcaaattttattttggtagttgtccccaactgtmatgcagcaaattagtgcttattttctctaattctacagacagaagaagggcctagaaaaaataatagtgtatcacatatgaccacaatccatttatccacttattcattcatttacttaagaaatatctacagagacactagttttgatgctggtttgtattgttatatattttaatattacaaaatcatagtatttccaatctattacctagtattcaaactcagagtaatgaatatatatcaagtccatatataccagctttttaaatcattttcctattgttggcaattgatgctatttctagagtttttcacagccgtacatctgtaataaacatcggcatgtaaataaatttgcatgttgaaattattttcttagaatgctcaaggattggttccattagaattccagagtcaaggagaattaacattgttaaggcccgtgatatattgccaaattgctttaccaactacccatatcaaaatacattattaacagaaagat

SEQ ID NO: 836167 - DNA, 615 bp, Homo sapiens
aacaatgacaattagttctaaaattgtattagagtctgaagaaatgtgatgtatttgactatcctatctttttgtgcaaattttattttggtagttgtccccaactgtaatgcagcaaattagtgcttattttctctaattctacagacagaagaagggcctagaaaaaataatagtgtatcacatatgaccacaatccatttatccacttattcattcatttacttaagaaatatctacagagacactagttttgatgctggtttgtattgttatatattttaatattacaaaatcatagtatttccaatctattacctagtattcaaactcagagtaatgaatatatatcaagtccatatataccagctttttaaatcattttcctattgttggcaattgatgctatttctagagtttttcacagccgtacatctgtaataaacatcggcatgtaaataaatttgcatgttgaaattattttcttagaatgctcaaggattrgttccattagaattccagagtcaaggagaattaacattgttaaggcccgtgatatattgccaaattgctttaccaactacccatatcaaaatacattattaacagaaagat

SEQ ID NO: 836168 - DNA, 572 bp, Homo sapiens
cctagctcaggagtcttaaacccctgggctgcaaaccagtaaggtctgtggcctgttaggaactgggccacacagcagaaggtgagcggcaggccagcaagcattattgcctgagctctgcctcctgtcaggtcagctggggcatcagattctcatagacctgtgacccctattgtgaactgcacatgggagggatctgggttgcatgctccttatgagaatctaactaatgcctgatgatctgagatggaacagtttcatcccaaaactctatgcccaccccctgctcccaaggaaaaattatcttccatgaaactggtacctggtgccaaaaaggttggggaccgttgtcctcgctgattgtgatcaagaccaagctgtagaatgctatgtgtcttcttaaggaacttttagctaggcaagtgtcaggagagataagtycaagttccagtgttcaatgctttgttaatttagaccccacttgaccaagtccattttattttttttatttccacattaattcaagtgtcatcatcctacaagattcagctcaaatcctacctcttcctcac

SEQ ID NO: 836169 - DNA, 614 bp, Homo sapiens
gtgacaggattaaccatatttctcctgaaaaaaatggaacaacagttatttgaaactattttccaaattattttataattttaactaccctctttctctgatctgctgctttacatggcttttaatgttcatatttttcaaactgcagccagaatctcaactgccttttcaaatgtacacatttttgctcaaaattctgtgggaaccccacaatacatttgggaaggggaatcttgtccaggaatttctcatttaacatgtgcagtggtttcaagcaagtaaatcttgactttcatctttagattattttttgtttaaacacaaacctatacaaatgtgtattcacatactttaagttattgaaaagaaagtgaaagatagcaaacaaagaaacaaataatatagtatgtattggtgaaaaaatgagggcaaggaaaaatgcattttgaatcgggatgaagtcacagtgatttttctgacatgatatttaaaaatacagccaatttttwtaaaaaaatattgctaacacataactattaaatctggtacaattagtatctttcattgtgaacattcagatactacaaaaaattcctttaaagtcctaattattt

SEQ ID NO: 836170 - DNA, 614 bp, Homo sapiens
gtgacaggattaaccatatttctcctgaaaaaaatggaacaacagttatttgaaactattttccaaattattttataattttaactaccctctttctctgatctgctgctttacatggcttttaatgttcatatttttcaaactgcagccagaatctcaactgccttttcaaatgtacacatttttgctcaaaattctgtgggaaccccacaatacatttgggaaggggaatcttgtccaggaatttctcatttaacatgtgcagtggtttcaagcaagtaaatcttgactttcatctttagattattttttgtttaaacacaaacctatacaaatgtgtattcacatactttaagttattgaaaagaaagtgaaagatagcaaacaaagaaacaaataatatagtatgtattggtgaaaaaatgagggcaaggaaaaatgcattttgaatcgggatgaagtcacagtgatttttctgacatgatatttaaaaatacagccaattttttwaaaaaaatattgctaacacataactattaaatctggtacaattagtatctttcattgtgaacattcagatactacaaaaaattcctttaaagtcctaattattt

SEQ ID NO: 836171 - DNA, 631 bp, Homo sapiens
aagaggtttgagagccctggactggcaggtccctgagagcccggaagagttgtgggataatcagggagctcaracggctgcatgttcttggaaaaacaactccccctctcccagcctctgttttctccctgtccagagagaatccagatccctctctcccagggtttttgtgggcattcaaagtggcaaagctattcaaatgatcagtgagttgagtcaggttttggattctttctgacccaagggtaatcgttttgcctcacttcccctgtggagaactcagatgagggagaggagatgcagaccaggatgtctgtgaagcccatagctctgccacaggcattagtctcacctggccaccctgacctttctccactgcagcattgtcagtctcttacccgggtttggagggcactgccctgctcagtctggggggatgtggtgaccctcaggacagcctccccagcgcccaggccctgtccaggcccaggatgaaggctgcctcatcctcaggcctggtgagtctcacccctcactcccctgcttaggtaaaagatttggccaaagaatggggatggtctgtaagttagcccatgtgatcttcatgtatgaagaaatagaggggcagagg

SEQ ID NO: 836172 - DNA, 495 bp, Homo sapiens
ctgccagcacagcagtctgaagtcaacctgggacactggagcttggtgggaggaggggcatccaccattactgaggcttgacggttttcccctcacagtgtaaacagagcccccagaaakttccaactgggcggagcccaccacagcaccacaaagcagctgtcaccacactacctctctagattcctcctctctgcgaagggcatccctgaaagttaggcagcagccccagtcaggggcttataggtaaaactctcatctccctgagatagagcaactgcaggaaggggtggctgtgggcgcagcttcagcaaacttaaacattcctgcctgctggctctaaagagagcagcggatctcccagcacagtgctcaagctctgctaagggacagactgcctcctcaagtgggtccctgacccccatgcctcctgactgggagacacctcccagcagggatcaacagacaccttatacaggagagctctggctggta

SEQ ID NO: 836173 - DNA, 489 bp, Homo sapiens
ctgtacctgactgacgagtttccaaccagagaagggaacagctatatgcccaaatgtatactttataatcttaaaggaatccaattcagagattyctatttttatgatctccagatctctacttttttctacagcatcggcttctctcatctattgcttttccccatgggttatgtggtatttataccatctcaatttgaacctccaggaaattcacaacacaaatgtacagatttacctttacccttggagcctgcactccctaatcagacttagctgcctccactgtagtgatccatctggattcagacccaactttgccagtatttcctccaggttttcagcaggttcctcttcctccctcacctgagtcaggtggtccttccaccttcctatttgttgctggggcttaggggagtggagtaagagggtggcagagtgcatacatgacagtacaaaaaaagttgcacataaaaaatggtataaagt

SEQ ID NO: 836174 - DNA, 600 bp, Homo sapiens
gtggactataaagccatataaaagcatggtgatgatgcataattaatagaagcaagcagtttatgtctatggtcatgttatttgatactctggatagttttctcctaattgatgtatttatttgcgacttttcaggcactctaaaagggcatgggttacttttcaaattaaaaataaaatatgaataactgtctgtgcgttgggggtgtcttgcatatgtgtgtgcttgtgtgtgtaaatactattacgtgaattctagtaattcagtgtttcctgattaaagagactatgcaatgttatgacgtaagacgttttccttaaaaatttttttaccaacaattacatattattttctgtgtctctattacagagacactgttatattgctgtaagtcacttttgataactcaatagagacttggcaaggagaaaaggagaaatttccatatcctaattagtaaagcctttrttatatattttatatttttttctgtagtaaaatacttcgtctaatactttttgaattatagaaatggctttacttatttctatactgtttcctaatttgttatcacctcaaaattgtattaacatcaataa

SEQ ID NO: 836175 - DNA, 646 bp, Homo sapiens
aaaaaattataccctgttacatgatttagtttcctgagatcgggacccttgtcctgtctttgttttgcactcctcagaaaakcatgcaatagttgactacattgctaagtattcaaaaacaatatgatgaaattatttagttatgcttgacccgctgatcttgttttcaaactaagattccatagcgacatatctcacactgttactatgtgaaaaaaatagcaaactgccctaaaagtaattcaacatccttaacaattcatcccaactaaagctcaacaatcatattttttgttccccgagaaattatctattgtgactgtttatataaaatatactactctcatttgttactctattttaacatgaaaaaacacttatcaaaaatgctactgtaatgtacggatgccacttcctgtataagcaaggtacaaatagacttatagaagaggcttcttcttatagaagaagaagaatgaaaaatcacttgcatttcaccaccaacttcaattgatcgtcagtaactgcctggagagttctttctttgagagaaattgtgaggcctagtgtaagctcaccaggaaagtatgccaagatcaattattgatgtctgccatgggcatataggagaatggggtgacaatct

SEQ ID NO: 836176 - DNA, 646 bp, Homo sapiens
aaaaaattataccctgttacatgatttagtttcctgagatcgggacccttgtcctgtctttgttttgcactcctcagaaaagcatgcaatagttgactacattgctaagtattcaaaaacaatatgatgaaattatttagttatgcttgacccgctgatcttgttttcaaactaagattccatagcgacatatctcacactgttactatgtgaaaaaaatagcaaactgccctaaaagtaattcaacatccttaacaattcatcccaactaaagctcaacaatcatattttttgttccccgagaaattatctattgtgactgtttatataaaatatactactctcatttgttactctattttaacatgaaaaaacacttatcaaaaatgctactgtaatgtacggatgccacttcctgtataagcaaggtacaaatagacttatagaagaggcttcttcttatagaagaagaagaatgaaaaatcacttgcatttcaccaccaacttcaattgatcgtcagtaactgcctggagagttctttctttgagagaaattgtgaggcctagtgtaagctcascaggaaagtatgccaagatcaattattgatgtctgccatgggcatataggagaatggggtgacaatct

SEQ ID NO: 836177 - DNA, 439 bp, Homo sapiens
gttgagaaatttttataaaaattatttggttttccatctttttgttttaatttcaaaattactgtaatttcaaactgcattaatgtcctgttaaatcttatgtttccattttttaccattgaggcatgttatgcttcatacaataaaaataattggataagctattaaaatatcataattttaaatgaattggaaacgctgataacggtagataattcatagcaagttctctcagaatgtaaaaaatcctatttattatcattattatttaagttaacatgtactatttccttaaaactgaccataaagctttatttcttaattaaactctgatttggcgtagatgtgaaacccattatgttatgwaacataagtgttataacagatgataagttgccaaggaattgactttgcctgaggaatttggtagaaatttcaa

SEQ ID NO: 836178 - DNA, 482 bp, Homo sapiens
agctttaagtttttcttaataaaagtcttctattacaatgataacatatactttaagygcttttcccctatatttactactttacattaagggaggtttaaatttaaggcaagatattaagaaacagaaaattgggaagaatagtaaaagcaattaaaattgctttatcttccttctggattcatttttcttcttcctgtaaagtgtccttcagaagttccttttctaaaatctgttgctatcgtatctttgcctttgttcttacaaagtttgggtacataattctacattatcagtcaatcacttttagcactttgaagatatcgttatcctgtcttctagttcccattcccattattgctactgtgaagtctactctcagtctaaagattattgttttgtaagcaatcggtccttttctgctgcatttgctctttgaagcctggaattaagattttcctcttcttttttcatcagtttca

SEQ ID NO: 836179 - DNA, 520 bp, Homo sapiens
atatttcaatcttctttttaattagtacatggggtgttctgtgagttgttcatgctttcagtaactactcagaaaacactccttctctatttcccttgatatcgttgtccaaaattaagttcacttttcatttaatacagaagtaggtgttagtaatagtgatttttaaaaaatgttcattaaatttgccttcacattgttatcaatttgtgtgccccttgcttctcattatttttattctcattcttcttgcttctgattattttttgtagattccaccccatttaaaatcgttttatgaaaaagacaaaaaataacagatgctaccgaggatgcagagaaagggaatcacttgtacactgttggtgggaatgtaaattagtatagtcataaggaaaacrgttcctcaaaaaactaggattataacaaccatatgatccagcaatttcactccttggtatatatccaaagaaagaaaataaatatatcaaagagatagctgcattcccatgtttattgc

SEQ ID NO: 836180 - DNA, 487 bp, Homo sapiens
agtggcacttccctggtgcgtctggtcggccatcttgaaaaggatcccgtgatcttatttttgacttaatatytgtgcatttcttttgaacctgcctagcaaaatggacataaacaatagaaacaaacaatggaataaaaatgaggagcttgaaattagaatctgcgtgacttgaatttgaattctggccctgcattctattgaattggtaatttagattttttcggagattaaattctagttttttctttgtttactgttgttgaaatggaacgcattttatttccgactttacacacataaatccctgtgtacatacttatataaatatacataaaaacacatgcacatgtatgcatatacatacacaggacattttgcttgcccctccctctgcctagaaggttttccctcatatgtttccttgattctcctcatcatttccttctgatattttcttgaatgttatcatctcagtagtcttccc

SEQ ID NO: 836181 - DNA, 599 bp, Homo sapiens
tttattttattttattttcccataagttttgaggtgcaggtggtatttggytacatgagtaagttcttcagtggtgatttgtaagatcctggtgcacccatcacctgagcagtacacactacaccatatttgttgttttttattcctcacccccctcccactttcccgctcaagtccccagagtccattgtgtcattcttatgcctttgtgtcctcatagcttagctcccacatatcagtgagaatatacgatgtttggttttccattcctgagttacttcacctagaatcacagtctctaatcacattcaggtcattgcaaatgctattaattagttctttttttatggctgagtaaagaactaaaagtagtacaatctgatccagcaatcccactaccgggtatctacccagaaaagagaagtcattatacaaaaaagatacttgcacatgcatgtttatagcagcacaattcacaattgcaaaattgtggaaccaaaccaaatccacatcaatcaacaagtggataaagaaactctggtatatagatatatatattatataccagacatatagctatatatctatataacagtata

SEQ ID NO: 836182 - DNA, 603 bp, Homo sapiens
agatagaaaataatgacacagtgaaattcartgatagattaaatcccgtggagaattccccatgtattttattctggggatccgaaaggacaggttttctttgcctgttgtttcataatcttttcctctagcaaatattgcctcttgaattctctcctacaggttttgcatgcctgaagaagaggctgagcccacagttacaggctgttgaatagccacagggttagatgttggcaagggtttcgtctcttttaggcttctcaaaaaatttaaaaaacaaacaaacaaacaaaaacacaattcttaaaaaccaccatagggagcataaagaaaatggaaaagagcagagataaagaaacagaggcattgttttctgcagactaagcctgctgagctacgtgcactgcacaatatttacttccctgctttcattgaaaacgccaaatgtgcctatattattctaaaaagtacagctgatccttctgtttgggccaacaggtctataggccagaacacattccaaagcttttcccttgaggctgtctgcccaaagccagataacatcttctatccatagggcttggtctgccttggtggatgtca

SEQ ID NO: 836183 - DNA, 620 bp, Homo sapiens
cagagagacaaattctgcatgattccacttataactgttgaactcatagaagtagatggtagaatagaagttaccgggatctagggrttggggaaaggtattggaacgatattggtctaggtatacaaaatttcaggtacataaaaggaataagttcaagagctctattgtacaacatggttactatactaaataacaatatattgtatgtattcttgaaaattgctgacagattttaagtgttcttaccaaaaaaaaagcaactacacgaagtaatgaatatgataattagctcaatttagtcatttcaatatatatacgtatttcaaaatatgttgtgcacaaaatagatgtacaattttatgtgtcaattaagataaataaataaatgcctttaaaaaggaaggaaaaatatagaagaaaaatttccagaaattataaaagtcacatttcttcttattgacaaagcataaaaaacttaaagtaattaaaatgaaaacaatccacaagagatttattgcagtacaatttcaaaacccaaaaacaaagagaatatttcagatacaatgagaaaaatcttattataaataaatcaaaacaattataccagtgcagattca

SEQ ID NO: 836184 - DNA, 643 bp, Homo sapiens
cacctctatcttcattttctgctgatgatcgtgttcactctctcactagaaaataaacacaattacgtgaaaatggctgtgtattcccacggtctaattgtttactatatttgcgcctgcattctaattctgtgctgtccttctttttaccatagaggaactatcatttctggcctcttaaagaatatgctttcagcaattctccactctatcctacattatcaacatctcctgataatttcataaagtatatcatttctctagtaatataaatatgctttatatttccaatatggaaaataataaaacaaatacaataaaagccttattgaacttcacatatctctccaactactgcctttcttctttcctcctttttaaagcaaacctcattaaaacagcttgttacatttgctttttctatttttctcgtctcttttacaaccacttcaatcagactgtatctctaccactccaatgaaacatcgcttgtcaagatcgccaatggtctctacttggctaaatgcartggctcatttttaattgtattacttgcccatcagcagtatttgacacagttgattattctctccttgaacttgtgtgtgtgtgtgtgtgtgtgtgtgtgtgtgtgtgtgtgtgt

SEQ ID NO: 836185 - DNA, 270 bp, Homo sapiens
ttatgctctcaatggcccatctgctaattatctttcttctgttccattatctcaactctcttccccgaacaagaacctcaaaaaaygcataaacacattttcaggttatgattctgtagaagggggaagcattctaaatcttgatccaaattttcttgagataattgcgacagtgagttaactgactacttgaggagccactccaggataccccacctgtgtggtccatagatgtaacagctgggccaggtcagcctactgacaatccac

SEQ ID NO: 836186 - DNA, 524 bp, Homo sapiens
ccctcaattgagatgcagttcctgccaaattgactatgattaagtgtttgccaccccttgtgaaatcaragcttgaaatagaaattaggttgagtaatgggaaaataaaactgtgtttcttgccaacctgaatttctttagattgagatttatgcctgttatataaccttaaataataactcttaataaaataatttaaaacctatgtttattctcttaaaaggtggccttttttttttactctatcattataggacccaagttctttggttgacataaaagcttagaaaagctgcattagaaaaccatctttcaattaggaacagtattctttggtgaaattgtttctgttgcagttacccatgaacgaatatttgaagttagtcataatgaagctttgcacattgaacctaagattgcactaattctaggacctcagttgtatactaaaaatacaattttgtccagctccacagcatctagaaaagaccaacatgggcttggttgctagaggcagaggagca

SEQ ID NO: 836187 - DNA, 625 bp, Homo sapiens
gttatgagagccttatgtggctttgtaagtggtatttgttcacagtcttactcaatcttgtataacaattttttttatttaattaatttatttatttgagatggagtcttgctctgtcgcccaggctggagtgcagtggcatgatctcggctcactgcaacctccacctcctgggttcaagcaattctccctgtctcagcctcccaagtagctgggattccaggtgcccaccaccacacccagctaatttttgtatttttagtagagacagggtttcaccatcttggccaggtccatcttgaactcctgacctcatgatccacctccctcggcctctcaaagtgcagggattacaagcgtgagccaccgtgcccagccacaacaattatttttttcacttcaaaacccctatttttaaagacacatatactccatcatccccagttgggctttttctgctacccccaaggaggcacccagaggctttgtctgmtaagtgctatgctgcaggtgactgttaactagactgctttcacagcctcccagattattgaaagatggcccagtccttctactcttcagcaggtctgcctgaaacttcaactattatagacaataccaaatg

SEQ ID NO: 836188 - DNA, 625 bp, Homo sapiens
gttatgagagccttatgtggctttgtaagtggtatttgttcacagtcttactcaatcttgtataacaattttttttatttaattaatttatttatttgagatggagtcttgctctgtcgcccaggctggagtgcagtggcatgatctcggctcactgcaacctccacctcctgggttcaagcaattctccctgtctcagcctcccaagtagctgggattccaggtgcccaccaccacacccagctaatttttgtatttttagtagagacagggtttcaccatcttggccaggtccatcttgaactcctgacctcatgatccacctccctcggcctctcaaagtgcagggattacaagcgtgagccaccgtgcccagccacaacaattatttttttcacttcaaaacccctatttttaaagacacatatactccatcatccccagttgggctttttctgctacccccaaggaggcacccagaggctttgtctgctaagtgctatgctgcaggtgactgttaactagactgctttcacagyctcccagattattgaaagatggcccagtccttctactcttcagcaggtctgcctgaaacttcaactattatagacaataccaaatg

SEQ ID NO: 836189 - DNA, 642 bp, Homo sapiens
gtgcctttcttaggaattcccttctccctcccaatttatctggataacacaggaacagacatttttttaaacatgagcttgctccccatgctcaacatttgctttgagagtgaatgcctgatttgaacygggctaattgcagatcttcttctggatttttagatgtggaacatagcaaatcaagtcattctcatttaggtgatcaaaactctaagatgtaaaacttaggagctgtcattggccgtattttctaccatgaaaagaaagccaacttgcctccaaaaaggaaaatgaggctaatacatagagaaaaacttgagaccaaggctgcagtgaggtgtgatagtgccactgcactccagcatgggcaacaaaataagaccctgtcaaaacacacacacacacacacgaaaaaaaaccctaaaaacttcagactggtgagagcgatcatagctggttctaattaactctgagtcccagcaatatgcctgccttcctcacagctcggatgatacggcaatgtccttccagtaaactccccttttgtttaagttagtttaaattaggtttctgtccatttcatcctaaagtccttaactattcaaaaatgctacaataatttatttctgatgccataaatgt

SEQ ID NO: 836190 - DNA, 626 bp, Homo sapiens
tacgttgtattccctgttgcttggatcctatgtctttatgttttcatagtctatttcattactttggtggagcacattttctagcagctgcctgagaaaggctgcatggtggataaataagmtcttgcaagtctaaaaagaaatctttcttttattttcccacttcatttataatttgcccaggtatttaattctgtgatagaaataattttttcctcaattaaaagtactgctcaaagtctgggcgtggtgggtcatgcctgtaatctcaacactttgggaggctgaggcaggaggatcacttgagcaggagttgaataccagctgggaaacacagtgagaccttgtctctacaaaaactaaaaaaaagtgaaaattagccaagcgtggtagtgcacacctgcagttccagttacttgggagtctgaagtgggaggattgcatgagtcccagaggtcaaggctgcagtgagccctgatggcgtcactgtactctagcctgggtgacagagtgagaccctgtctccgtgaatgaatgaatgaatgagtgaatgaataataaaagcactgctctgttgtctttgtaattactttttattttatttttttttttttgagacggagtct

SEQ ID NO: 836191 - DNA, 626 bp, Homo sapiens
tacgttgtattccctgttgcttggatcctatgtctttatgttttcatagtctatttcattactttggtggagcacattttctagcagctgcctgagaaaggctgcatggtggataaataagctcttgcaagtctaaaaagaaatctttcttttattttcccacttcatttataatttgcccaggtatttaattctgtgatagaaataattttttcctcaattaaaagtactgctcaaagtctgggcgtggtgggtcatgcctgtaatctcaacactttgggaggctgaggcaggaggatcacttgagcaggagttgaataccagctgggaaacacagtgagaccttgtctctacaaaaactaaaaaaaagtgaaaattagccaagcgtggtagtgcacacctgcagttccagttacttgggagtctgaagtgggaggattgcatgagtcccagaggtcaaggctgcagtgagccctgatggcgtcactgtactctagcctgggtgacagagtgagaccctgtctcmgtgaatgaatgaatgaatgagtgaatgaataataaaagcactgctctgttgtctttgtaattactttttattttatttttttttttttgagacggagtct

SEQ ID NO: 836192 - DNA, 525 bp, Homo sapiens
ccctagggcaagcttgtaatctccctatactactgcagctgatgtgctcttgaaagtgccacctcctggctggaggccaaccagcacactaaacaaaaatacaaccaaggaccctaatagagtccacttcactyccctgctacctccattggtgcaggtgctggtattcacggctgagagacctgaagatggaatacatcacaggactctttgcagacactctccagtaccagcctggagcctggtagctccactgggtggctagatccaaaagagaaataacaattactgcagtttggctctcaggaagccccttgtccaggaagccctatgtctcaggaagcccctaggggaaggagaaaagcaccaaatcaagggagcaccctgaggaacaaaagaatctgaacagcagcccttgagtcccagagcttccctctgatatagtctacccaaatgagaaggaatcagaaaaacaattctggtaatatgacaaaacaacgttcttttacatctccagaagatcac

SEQ ID NO: 836193 - DNA, 609 bp, Homo sapiens
gtagcctcacttcaaactcaagactttcacattatgcaaatgtgataaccaacacttagaaattcctcaaattttcayattttcaactcacatctgagttacattttatgagctatttatcacagtgctagctatattacattatattacattgctagttataatcatcagtctttttcttgtaaagtttaactgcaagtattaatattctaatgaagacagagtacttaaaatcatttttatttatttctgacatatgtttatagtcattatttttcaatgtgatatgtccaacattcctggaattcaaaatatgttaaaataaaatagaaccacattgaaaatactcatctcagaaaatactggaaatctatgcaggtctccccagtaacccatcctacgtaatctcttctagatcttctccaaccagttcaatatttacctctaaactactgtgcatagcacttactgccttcactattcttgtcttcactatttaactgacattaatcatttgccttgtatttgtatttttcatatgtatagctcctataccaactatagcctaaatttataaagaactgggactggtaacttatcattcttaaa

SEQ ID NO: 836194 - DNA, 520 bp, Homo sapiens
accttatacctacatattttgtttctaaacaaaatttttttatctgaaatatctgaatgtaaatagccaacaaaatgtcccctcaccattaactatattattgtgttttttytccaatgagaacattctcttacataataacaatacaatcataaaaattcagaaattattacattgatataatgtaaaaatgtcatctaattctcaaacccattcacattctgctatttgtcctggtaataccatttttagcaaaatgatacatattttgtgaatgctataaagaaggcaccaagattaactttttaataaatgaatattcaattgaaataacatcatttatttaaaaggccatcctttccttgctccattgcagtggtacctttgttgtaaaggcgatgggcatattatgtgtagatctctttctggactctgtattctactctattggtttttgtgtcaataccacactgtcttaattacagtaactttgttatgataacatgataagcactatgtt

SEQ ID NO: 836195 - DNA, 647 bp, Homo sapiens
atctacacatgtaattttaagggaatatggtcagtgtctgaccttgmaatttaagattttagaggtggaatagacaattctaggtaatgataaggattaagggtagccattggtgtggatgactttggaaaggaaataaaggccttttgaagttaagaggtcaaagtgctctgaggccaggctcatccttattatcattggatgatattgggatgagaggtagaaggaggattatgatcaaagtgccaaaatcctcagagaatgtgaaggagtgatcagacagtaatcaatactgttgtcaggagagtggcatagttgaataacaggcctgagcctcatgggagagggataaggtttgattgaaggtggaactaaaatggcctgatagcagcagcagaaagacaggaaaatgctattctgcttcctggtcttacagtatgtggagcatgggaggatgagcagactctactcaaggtggttgtgcaaagaaactgtttttgaaggaaatcaagtgctaaggcaagaaagcagagctgatacaggttttctgggtgtcagcaaagctcagattgccatctgtagttgcatcccagtgatgttagaggaatagaaagtgaggcaggacataagacttaaactgtgattac

SEQ ID NO: 836196 - DNA, 612 bp, Homo sapiens
ataaaaaaaaaagaggtgagaaaatatattcggcaatttttggttttcccccatttgagcagatggcgattygtagttcaaaatttgtaactcaaattatttcacatttttattaatcagtacaatatgtttttaaaacaacaaactgcacttagaaatatcagtgtaagttccccaattctcctagttccatcagagagcagtctgagaattagagattttgttagcaatattgggaaacagggcattctagttcagtgtttcaatagtaattatttttattccagtgttcaaagtgtctcatatgggggaggggcagttgaaaatagtacagaaaattgccatggggagctgtaaaaagctgggagaatctgtttcaagatgtttgcttttttggtagaacaaaaagtgcattttgttagagacaaatatttttgtgataaaaaaacattttatgtgaagtgtagattggacttttaatataaaaaagaaatgttaagccattctattttcggaaggtttggcgtcttagaatgaaagctgttagaactgcatatattggaatgttctcacaactgttgtcatcctatgttcctctccaaacctgttaaa

SEQ ID NO: 836197 - DNA, 645 bp, Homo sapiens
aaagccctccgaaaagtctcagtcaaagcaaatggcaatgactccccacaaaaataccacgtgtcagcccccgctacagcctcgcgggccgaaccagagtggcacatatgcaaaagtgtctcgcttgtgggacaaaaggtattgtaactcatcctggaaacacactacccttaagaaacccctcagaagcacaggggcagtcatttggggtctctggggtttcatgaaatacagcatcacattttgcagctcaaagcctcctatttattggggactcagtgaagaaagccagaagtgtgatgttgcctgggtaggagagcccggcctgcagccttctgctagcagcagcaggaaactgcagccctgaatcagggcctttgttctcctgaagcctgcagggagtaggcccttctgctcacactgcccttgggcagcaagcgtgtgtccctgggagcccatggtggcagccccctaggtgcagcaggagttgggcctggaggcctggctgggggcagctggggacagcactcattgtttctgcccctgctcctytcgcagcagtgaggactgggctcccatccagcaaaaagggctggaagctttctgcaagaagcacccaggcttggttggttggttggtttgaaa

SEQ ID NO: 836198 - DNA, 557 bp, Homo sapiens
catatgcaaaagtgtctcgcttgtgggacaaaaggtattgtaactcatcctggaaacacactacccttaagaaacccctcagaagcacaggggcagtcatttggggtctctggggtttcatgaaatacagcatcacattttgcagctcaaagcctcctatttattggggactcagtgaagaaagccagaagtgtgatgttgcctgggtaggagagcccggcctgcagccttctgctagcagcagcaggaaactgcagccctgaatcagggcctttgttctcctgaagcctgcagggagtaggcccttctgctcacactgcccttgggcagcaagcgtgtgtccctgggagcccatggtggcagccccctaggtgcagcaggagttgggcctggaggcctggctgggggcagctggggacagcactcattgtttctgcccctgctcctttcgcrgcagtgaggactgggctcccatccagcaaaaagggctggaagctttctgcaagaagcacccaggcttggttggttggttggtttgaaatgtatccattatttaa

SEQ ID NO: 836199 - DNA, 579 bp, Homo sapiens
tagcttcccgctgctcaatttttcactcatcatcttgcgacacgggaaagcgttgggtcttgttttgatgcaactcactacggaatagatgcagaggcagaggcaaaagtatcagtgttttatyaattgcttgaaaggctacaaatagattcacagaatgtgtagtgctggaggagacaaacatacaacacaagaaagatattcagcctgcaaatatacttaatgcctggccagtctcagggagaatggcaggaccagctcctctcaatatgggaaggagtactgaggaacaagaccctggtgtgtccgaattggtgggttcttagtctcactgacttcaagaatgaagccacagatcctcgtggtgagtgttacagtttacttaaagatggtgtgttgggagtttgttccttctgctgttcggacatgttcaaagtttcttccttctggtgggttcgtggtctcactgcttcaggactgaagctatataccttcacagtgagtgttacaactcttaagaccgtgcgcctgtagttattcattcctcccatccgcagtcgttcattcctcccagtgggt

SEQ ID NO: 836200 - DNA, 579 bp, Homo sapiens
tagcttcccgctgctcaatttttcactcatcatcttgcgacacgggaaagcgttgggtcttgttttgatgcaactcactacggaatagatgcagaggcagaggcaaaagtatcagtgttttatcaattgcttgaaaggctacaaatagattcacagaatgtgtagtgctggaggagacaaacatacaacacaagaaagatattcagcctgcaaatatacttaatgcctggccagtctcagggagaatggcaggaccagctcctctcaatatgggaaggagtactgaggaacaagaccctggtgtgtccgaattggtgggttcttagtctcactgacttcaagaatgaagccacagatcctcgtggtgagtgttacagtttacttaaagatggtgtgttgggagtttgttccttctgctgttcggacatgttcaaagtttcttccttctggtgggttcgtggtctcrctgcttcaggactgaagctatataccttcacagtgagtgttacaactcttaagaccgtgcgcctgtagttattcattcctcccatccgcagtcgttcattcctcccagtgggt

SEQ ID NO: 836201 - DNA, 492 bp, Homo sapiens
agaggtgagagcaggggtctgtgcagcaggaatgagcctgggatccctgtaaaggctgacagctggtcccacccagtgatgactcacagcaataaagagaagaccctggttcccaccatgaagtagccaatatgatgcccaaatgtgagatgaggagtctgaagaactgtttctagctattccacttagtgcctgtgcattcctatttagtcagttggaagatagctgccttttatataaggaatgtgttcttagaagccttgttcaatttaaaacacgcacaaataaagactattatcctaataggaataaatataaactgtgtattcataaacctagtgttaaatcaagtttagcctaaagctgcctccttacatattttaaattcagcttaaaagtttctctgtatacagggagccataacytaaatggaggtgtaaacagattgtaacctatctttaaaagaaaaaccttagccaaattaaatttaaa

SEQ ID NO: 836202 - DNA, 592 bp, Homo sapiens
ttattaattggcctatttcaatattgtatctcagggactatggaggcttaaggagagggagacaagggaacagctggttggtggaacagtcaaaatacacacaacatttattatttaagtttgctgttttatatagatgtagttcttgattcctccaaacaattacactgatctgtgattacacatcaacataacagacataataataatgaaaagttttgaaatgtgaaaattatcaaaatgttacagagagacacaaagtgagcatgagctgttggagatattgtagtggtagacttgctcaacacagggttaccaaaaaccttccatttgtacaacagacaatatctgtctgtaaagggaaactcattaaaataaagcatgcctttatatgatctagcattacactcctaggtattgacccaaatgcgttgaaaatatgtccgtacaaaatcctgcatatgaatttttatagcagcattatttgtaattgccaaaaattggaaggaacaccracattcttcagtaaataaatggataaacaaaatgaggtacattcgtacaatggaataatattttgcaaaaatatttg

SEQ ID NO: 836203 - DNA, 608 bp, Homo sapiens
ttctgaaatcactctttcttcaaaatataccaatgattttaaaagggggtacactaattggtaaataccctgttcttcatamattatttcattttcctttctgcccaatttaccatgaattgtcatatcaagatcttccaaagtatttaatgtaactgataatatggttgaggttcaaaaacatttttgaaaaggtcaaaggtatttataaaacaaggtatatgtcaaatcagagaaagttggaaaactcagtacttacattgtaagaaaagagactgatgttattttttaaaaattgtacaatttctacaactttgtggaaagaatctttaagttcattacgtattttatatagagtacagagctaccaattaaacagtcaatgtaacagcatagaattttactctgtaaatactagataacatcattaaaaaaattttttcaccctgtcagctcatgcctagataaaaattttacctgtaataaatcttgggaacatgattaagagatagaccttaaattcacattattttaaaaataacaatattcctctcagtactgtacagggaacagaaactaattttataccaaagatatattattacaaa

SEQ ID NO: 836204 - DNA, 494 bp, Homo sapiens
aacagtatgggggaaacttcccccatgatttaattatctcctaccaggtccctcccataacatgtgggaattatgggagcyacaatttaagatgagatttggatggagaaacagccaaaccatatcagaatgtttatccaattcttatatcattattgtatcttggaagtaaatatcttattttttattttacaggctcataaatggaagaaacttactttgcacctcaaataagactttggactttaagttaatgctggaatgatttaagacatttggagactgttgggaaggcatgattgcattttgctttgtaagaaagatgtgagatttcgagggccaaggatggaatgatgtagtttggatgtttgtcccctataaatctcatgttgaaatgtaatctccagttttgtatgttgggcctggtaggaagtgtttggatcattggggcagatccctcatgaatggcttggtgccctccttgttaaagtgag

SEQ ID NO: 836205 - DNA, 472 bp, Homo sapiens
gatttgttatatattttgggtacttattakctattggatgtataatttacaaatattttatacagttctttgtgtgttttgctttgtgcttttgatgatgtccatggaactacaaatatttttattttcaattgaattcaatttatctactttttaaatttaattacttgtgattttggtgtcacatctaagaaaccattgccaaatccaaggtcacaatttacacttatgttttcttctaagatttttacttttatatcttacatataggactttgaagcattttcatttaattttgtgtattgtagtgagacagaggtcaaacttcttctttttttcatttgtatatctagttatcctagtaacatttgttgaaaaggctattctatcacacataaattattttgacacccttgacaaaaaataaatgacaaaataataagggttgttttttggactgtaaattcttttc

SEQ ID NO: 836206 - DNA, 552 bp, Homo sapiens
ccccattctattttaatttttttgagtaacccccatgctggtttccataatgactgtactaatttacattcccaccaacagaggacaagggtttccttttctccacaccatcgccaacacttgttattgcttcttttcttgataacagccattctaacaagtgtgagccaagatatgaaaagaaaccaaagtgtcaacagaccaatggtgaacacatctattgtgtgtgcgtttgtgtatgtatacatcagtaaatatacatatatatatatatgcacacatatatgcacactggaacattattcagtttaaagaagtgatcctgtcatttgcattgacatgaatgagtcagaaagacattatgctaaatgaaataagccagactcagaaagaaaaatactgcatgatctcaggtatatktggaattttaaaattaaaaagttgcatacataaaaatagagattagagtggtgattactggggcagggtattggggggcgcatggggacatatgggtcagaatgaataaactagagatctaatatacagcat

SEQ ID NO: 836207 - DNA, 552 bp, Homo sapiens
ccccattctattttaatttttttgagtaacccccatgctggtttccataatgactgtactaatttacattcccaccaacagaggacaagggtttccttttctccacaccatcgccaacacttgttattgcttcttttcttgataacagccattctaacaagtgtgagccaagatatgaaaagaaaccaaagtgtcaacagaccaatggtgaacacatctattgtgtgtgcgtttgtgtatgtatacatcagtaaatatacatatatatatatatgcacacatatatgcacactggaacattattcagtttaaagaagtgatcctgtcatttgcattgacatgaatgagtcagaaagacattatgctaaatgaaataagccagactcagaaagaaaaatactgcatgatctcaggtatatgtggaattttaaaattaaaaagttgcatacataaaaatagagattagagtggygattactggggcagggtattggggggcgcatggggacatatgggtcagaatgaataaactagagatctaatatacagcat

SEQ ID NO: 836208 - DNA, 516 bp, Homo sapiens
acttttagtcattcttgtaaaaattatcaatgtttaattatatattaaaatgggagtttaatctgaagctccttccaatgtgaaatactaaattaatgtgcagttcttttctgtgttctaagaaccaattagatgacttccaaaactctcaaccattttgaaggcttgagaaggcaagtggtggggataagaagaatgagaagaatttcttcagagtgagctattctgcttttcttctaaacaaagggaggagactgccccttctttatttaaaatcaagatgatgctataaggaaacttctagaaatctttgcgtacacggtgaactggtttctaattcatgatagacagctggcagagccaggctaaagtggtgtaagatagtaaaataaaggtatcttttggactctatttkttgaagtaaaaaatacaagatatttttctttgtacctgatataggccatactttcaagaaagtctgcatagggttttcttaaaccctatacatgatagaca

SEQ ID NO: 836209 - DNA, 521 bp, Homo sapiens
caggcaaggcagacaccagaaccacggaggggaaaactcaaagaggacaagaggccttttgaaggaggaggattaaggatggctaccccgcctgggaagccactttccgccttcaaaagtamacagacagcctcagaaaacacccagactgagggcaccaagccatctgcagtcttcagggtgtaaatctatgcacatgctttctgctcgttaggatcctctccaagccatgactgttgccaaaagaaataaaaccacctgcatatctgaactttacacagaaaaggccctgtaacttcttcccccactacagccttctcaacttaaggattgctcagtgaacctgcagcagggcacgtcacgcaggcacagggaaaaactgaaggaagggcaaagtgaaggcggcgtgggcatcctgtgctgagcatggcagagtgggtcactggaaggtcggaagaggctggagaggaggaatccggtgctgctcctgccctgcacaccctcagaacacccagaagaag

SEQ ID NO: 836210 - DNA, 696 bp, Homo sapiens
tgcctgtccagacatctgactkcttcctgccctggggaggaagggcgagagattaggattatcatagcgggggatatttttaaaagatagaatattcatctcctacttgaaatacgggaattttgtatctgcagaaagaaagcaagattttgttgagacagaaaagaaacttcccaaattaatttcctccttcagaactcaggaggcaagtccatggagtttcaaaacagctgtgcctaagggagactatatcccacctggagacgcaagagaactaccctgtcctctgaggagaagtgcaggtaagagaaggaagagaaaagcaaaggaaacgggtgggcatcgggtgggctgaaactccagcatgaagacgggtgtgttggcaaggggaataccaaagatgggggcttctgcctgccttcccgcttggaagcccctgaagaaagtgccctcgcatgctaactggcatcagtggccacatcctctgtaagcccagcagcgtctatgcaaagaggccttcctcagagtgactgtgccaccaaagacactagggtcccccaggcctgtggaggccagcagaggagtactcgattgcaagccagtgactcaccatttgggggagctctgggggctgcatggccctgcagcaaaggtcatgggatgcgcttaagggacagatgcggagggcctccaagg

SEQ ID NO: 836211 - DNA, 579 bp, Homo sapiens
gcatctgcacatctgatttatgccctcccctgagttctggccaggagacttcacatttggttggaattgttacaaagttcagctggaggtttccttctccctgtggtctkttcctctggcagcctccccaaggacacctgtgagaaaagtacgaaatggcttccctggggaccccagagagcccacagggcttttcccactgcttcctctacccctgtatttcacttggctctctaagttgactcagctccaagtaaggttaaatccttctcccctgatctagaccttcagcttccccagtgagggtgtgtgttcagggacagataatcccacttttccactgtcacagcttagacactcacaatacgtgggctgtctcccagatcccgcaggagcaatccgattccttcagagggtctgtgggctctcttggctttcctggtatattcctgcagtagtcgttttggagcaaaagttgatgatccaagtctccacaccctgctctgtccatcggagctggaactgcaagctagttctgcctcctatcctgtgttcttttaatttctattagattaatag

SEQ ID NO: 836212 - DNA, 604 bp, Homo sapiens
tagtgctcacttgaaaggggatgagggtaggcagccattatgtgagaagtccaactaccttgaggccacaattctatgatgaacccaagctagccatgtcaagaagccacttggagagagagagagagagagagagagagagagagagagagcgagctgtccagaccctagctattccacccatatcatcccgggtgctaggatcactagaccggcagtaaaagaagtcaccttggtaatttctgtcacatcaaagctcttgcttcatctaaacatccatccagagctacaggactgggagacttgtcgggaaagaactgcattgttggaggttcaggaaggactgatgtaaaccagtaaattgtttccccagaatcctgcaggatttcatggaattaaataccctcacagactcagaaggttcaaatggaaacataaacagttcatcatacatacttgatgggataatggttagcttcttttaaaaatgcaccaaatctacataagttactgagaatccccagaggatgccatgtcaagaagaatcaaggcccacacatgtgacacgasttgagctgtccctgctatctcctatttcagcaga

SEQ ID NO: 836213 - DNA, 577 bp, Homo sapiens
taatggatagttaatagagaagatgggggggcttctgcttagagaagaatgctgagtgctgactgatgattatggaggaattactgaagttggaatattatttttcagcatgtttagtaaagattgatttaaacagaaaccattaatcaagctcattctagggagaaatttatatgagaagcaggacgtatgcatgctcttaaacatggacatcattgcttccagatgtgatacccttagaaggacacaacatcagtcatgtagtattcaggttggtaatataaaacctgaacaacccctgtagagcttgagtataccattgcatcagtattattacttattttgaagtgacttttagaatttaggttgagttttctggagtatcttcaaatacttagttcttctctatctgagcctaaataacccaaactgcttcagttttattccagagcccactcctatggaaccaataagctgtattacctttcatagagaaatgaatgtggtatgttacattttgytagctgattgggatattttttttaatttcctttctaccacattgcaaggagttttc

SEQ ID NO: 836214 - DNA, 549 bp, Homo sapiens
ctgctggaaaaaaaaaaaaaaaaaaagctagctgtgcttcctccttccttccatgagcctgagaaattatgctagagtacttgaaatgtggggaattgcaggacctggratggtttgagaaaaatatcgacaactttcttcttgtggcaattctctctcttccccttaatacattttttctaataaatatttcttgagcacttatcaatagccaatattcatcagatgttcacttatgtaaaagtctctgtacgcctcactttctatgcagaatgggtattaaaattatctccatgttacagatgaggaaaggaagatagacgaaggtaaagttacttatgcaaaatcaactcacttccccaaaatcaactaactagtcaatggtagaaccaggattcaatcccagttggtctgcacagagctcaggctgggaaccacaagaagacgctggtcttatctctgtagagaagcaaagcaactctggctaggacgcggccccttgctttcaagtgccagggtgtaggaatgagggagcacaggtcaaaaaat

SEQ ID NO: 836215 - DNA, 367 bp, Homo sapiens
cattcaggcagcaaaaataggttacctacagaagttcagaaattaggacggcctcggggaatcattaaataccagaatctgatgaaggaacatttgctgttttgaaggaaaatagttgcaagcccaaaatayatgcccagttgagttatttttcatgtgaaggctacagaaagatatttttgaatatgcaaggttcaagaaataggcacgaatgtgctattctggtaaaaattgttttagatgacctagagccaactaagcaattaaccactgttaacaaatggataatttttatataaaaggactaatagtgaataatgaaatctactaaatatatcataaaacctattctgttataaatttagtt

SEQ ID NO: 836216 - DNA, 628 bp, Homo sapiens
aaactacttacttggcatcgccacttggatatctgttggacaattcaaatttacacacatcctaaacccgtctttccccttcaaaagacaagcaacarcaaacaaaacaaaacaaagcaaaaataaaccttgttgcacttgaacgccttttcatctcatttgatggcaatgtcatcaaagcccccgttgctcaatccaaacatctctttctcaatccatcaggaagtgcgagtgactctaaaaactctctccaggactcacttcccactgccaaggtgcagctctgagacggtgtcacttctcacctggatcactggcttctgtccccccatttctatcattggccctcaagattgtttttcttacagcatccagggtgatccttttaaaatgttaagtcagaccataacagttctctgctaaaaatattctgagatgccttcccatttcacccagagtaaaagctggagtctttacaatggtccttaaggaccaccccaggcgccccacccacccctcacgtctcctgccctgtcctccttctgcccttgcacttgtcaccactctgacttcatctcctgtgctctccactggcctcctgaccattcctgctgctttagagcattgt

SEQ ID NO: 836217 - DNA, 628 bp, Homo sapiens
aaactacttacttggcatcgccacttggatatctgttggacaattcaaatttacacacatcctaaacccgtctttccccttcaaaagacaagcaacagcaaacaaaacaaaacaaagcaaaaataaaccttgttgcacttgaacgccttttcatctcatttgatggcaatgtcatcaaagcccccgttgctcaatccaaacatctctttctcaatccatcaggaagtgcgagtgactctaaaaactctctccaggactcacttcccactgccaaggtgcagctctgagacggtgtcacttctcacctggatcactggcttctgtccccccatttctatcattggccctcaagattgtttttcttacagcatccagggtgatccttttaaaatgttaagtcagaccataacagttctctgctaaaaatattctgagatgccttcccatttcacccagagtaaaagctggagtctttacaatggtccttaaggaccaccccaggcgccccacccacccctcacgyctcctgccctgtcctccttctgcccttgcacttgtcaccactctgacttcatctcctgtgctctccactggcctcctgaccattcctgctgctttagagcattgt

SEQ ID NO: 836218 - DNA, 628 bp, Homo sapiens
aaactacttacttggcatcgccacttggatatctgttggacaattcaaatttacacacatcctaaacccgtctttccccttcaaaagacaagcaacagcaaacaaaacaaaacaaagcaaaaataaaccttgttgcacttgaacgccttttcatctcatttgatggcaatgtcatcaaagcccccgttgctcaatccaaacatctctttctcaatccatcaggaagtgcgagtgactctaaaaactctctccaggactcacttcccactgccaaggtgcagctctgagacggtgtcacttctcacctggatcactggcttctgtccccccatttctatcattggccctcaagattgtttttcttacagcatccagggtgatccttttaaaatgttaagtcagaccataacagttctctgctaaaaatattctgagatgccttcccatttcacccagagtaaaagctggagtctttacaatggtccttaaggaccaccccaggcgccccacccacccctcacgtctcctgccctgycctccttctgcccttgcacttgtcaccactctgacttcatctcctgtgctctccactggcctcctgaccattcctgctgctttagagcattgt

SEQ ID NO: 836219 - DNA, 512 bp, Homo sapiens
ggggagcagttccagaaaagcacacgcaggaaagcattcacagtgattccggagtggtgtgaccgtgggggctgctccagacaggaatccagggcagttgkgccctggaggccctggcggagagtgcagaatgggctgccgtggcctggagctgtgcagagacccccacaaggctccagaggagaaggcgcctagaagcccggcaggcaaagagaggctcaggcccgtggtggcaggggttttgggggtgggggtgtctcagaagaggcagggactcccccagcccctagcctcggctcagcaagccgagctgtgtgggttctcagatggccacgtggcctgcagccccagcaaccgagaggccatgtcagggacagcacctggggggcagcaccctccaaggaccccctgaggtaggggtcccccatccacacctcagaacggcgttcttgaacccagttagctcaactttgctctagccaagtccccaaaatgcccatagacaccccaat

SEQ ID NO: 836220 - DNA, 636 bp, Homo sapiens
cagaacagtcaaaagtccatgtttttctttttattttgagtttatagtaaatgttgtctctgccatcccagtggcaggctcatttttgttcctcccacctctccttgactataggttctccccatgggggcggtcctcagtccttgtccctcgaatcccacgactttacctgccatggacatgctgatgacacatgcgtctacatctgctccccccacaccccatctctcggcttacttccaaatccacctgcctaaatgcctatcagtcatctccgtctagatgacctgcaggcgcctaaaactcaacacatccaaagtcagttcagtatcccccttaaatctatccctcttactttctttttcttggctgaaggcataacgcccaccaggttccccaagccggaaatcctggaaccgttcattcttgcctcttttatccctcggaacacagctgcttcatctgtaaggcacagtgctgggactacgcagagtgcaatgggtttacacagataattcaggaatcaagagtccttcaaacagaaatgataaaataaaaggtaacacttacatagtatggyttatgtggcaggcactgccctaatagtgatttaactaccattcaaatgtattggtt

SEQ ID NO: 836221 - DNA, 602 bp, Homo sapiens
tccccatgatgctgatgctgcggataggcagagcacatcttgaccagcacatagcttgcttgcttgttctccatcttgtttgcaaactgaaatcagtggaggaatttaaaaaatactgattctggtttccaccccgatagattatgattcaattggtatggggtacagcttggacatctagatatttctaatgatctccaggtaattctaatgtgaagcaaagtttcagaaacacagctagactgacctgctcctgcatgtagaaaatccaggttctggtcattggtggctgagcaggctgggggagccacattcagagtgtggtcactctggcctggcaagaagcctggcctggcaagtgtttttcctcgtatcctgacacccacatagcagggatccagccacggtgcccagaatacaggacaggaccgtttctctggagagttagtacaagcaaggctgcctcttagttctaaaggactgagatacaaggcagagacttaggcacaggagcatcrcaccgggatccaggcagaaggcctggatgtaaagctaggggcttggttacaaggatagaggcaagaggtcagttactagaattg

SEQ ID NO: 836222 - DNA, 487 bp, Homo sapiens
catctcttttaatttgtttatgtcttgattgctcatcctggtttaccatgttctcatatgcttatataagccattttttaaattacctgttgatattatttgctcatttttctattacattatctttttyttgattacagtagtttgctaatgtacttgtttttggttttcaaaaaaaagcatgtgcatattgcttaagaagttagctaatgttaaactgcttgtaacaaaaagtaccacctccacctcccttcaaatattttagctctttcttctggtattttccaccatgtgtttaacagtagatctatgttgctttctttctttctctgttagctgtagacattatgtatctgttacggtaagtgagaattttaacccacttacactttgttttctcattccttatctttccaatatagctacagaataggtttcaataatcagcttcagtatttttttttaatcattgtaaatccataaataa

SEQ ID NO: 836223 - DNA, 652 bp, Homo sapiens
tactaattactcaactgaagatagaatttcaggcattctgtgcaaagataaatagaatgcacattaaggaggtgacagaaggtacttacgtgtgcccaagctcatgggctatagtaaaagcagaaatgagtcctttttcttcattaataaagcagctttgtaaaggatcacatatggtacctaaatatgataaacctgaaaaatttcacatttgtatttcatcaaaatggaaaacactaccaaaatcataaagaacttaattttgaagcatttaaccattgatgttattacttagaaaagaatgcagaattggctgttaatattgaataaacgttttaaaaggtgaaaaagagaatggaatgatttatttgcagttgaaatcatctttgcaaattttgggaatctactgaagtaaataatccaaaatgtagagtgagcaaacaactttttaaatatttttaaaaaatttttaaaaagaaaagaatatttgcaggaagtatgaagtgttttaacacattagcrtgggtagcaggaaagagattaaatgtgttgattggtaatagaaaagctaataagagaaaaaaatggcacagaactctacaaatctatgaagtttctttacttttttaaggtttaaagcagtatacaaata

SEQ ID NO: 836224 - DNA, 598 bp, Homo sapiens
tgttagtacatctggtctatacttgaaagctgcaaaaggtgattgcgtatctcttgaaataagaggaattgtgaaatagttttctcaacctgctgcatggattttgactattcaggtcgtgatctccacaagttatttaaactagaatttctcaaccagtgtattgtgttagggtgcgttacagatgtgttgagatactggtcccctcacacctctggccattcatgcagaatatagtttggatacagcatccaaactaatgacctcagatccagagcagtcttgatcatttaccccattgtgccatacaaatattattttctgtcttgactgtaaaaaagactgggagcagtggctcacacctgtaatcccagcactttgggaggccgaggcgggcagatcacaagatcaggagttcaagaccatcctggccaacatggtgaaaccctgtctctactaaaatmcaaaaaaaaaaaaaaaaaaaattagccgggcatggtggcgcttgcctgtagtccagatactcaggaggctgaggcgggggaatcgcttgaacccaggaggcggaggttgcagtaagccgagagcgtgccactgc

SEQ ID NO: 836225 - DNA, 598 bp, Homo sapiens
tgttagtacatctggtctatacttgaaagctgcaaaaggtgattgcgtatctcttgaaataagaggaattgtgaaatagttttctcaacctgctgcatggattttgactattcaggtcgtgatctccacaagttatttaaactagaatttctcaaccagtgtattgtgttagggtgcgttacagatgtgttgagatactggtcccctcacacctctggccattcatgcagaatatagtttggatacagcatccaaactaatgacctcagatccagagcagtcttgatcatttaccccattgtgccatacaaatattattttctgtcttgactgtaaaaaagactgggagcagtggctcacacctgtaatcccagcactttgggaggccgaggcgggcagatcacaagatcaggagttcaagaccatcctggccaacatggtgaaaccctgtctctactaaaatccaaaaaaaaaaaaaaaaaaaattarccgggcatggtggcgcttgcctgtagtccagatactcaggaggctgaggcgggggaatcgcttgaacccaggaggcggaggttgcagtaagccgagagcgtgccactgc

SEQ ID NO: 836226 - DNA, 623 bp, Homo sapiens
ttcttcatggctggtttttatacaaagctatttttctcattgttgttgctgctgctgttgctgctgttgtcttacctgtaaactctagctacttgcagggagtgtgaggcactgctaccctttagttctctctgaatccaagttaaattttgtcatcttgacattgttctaatttttctcaaaattccctctgttaaaatagtatatttacagcactattcacaatagcaaaggtatgaaataaacctaagcatccatcaacaagtaattaaagaaaatgtgatatacacacacacacacacacacacacacacactctcaaaggaatactattcagccattaaaaagaatgaaatcatatgtttcgcagcaacatggatggaactggaggccattatcttaagtgaaacaactcaaaaacagaaagtcaaataccacatgttctcacataagtgagagctaaataatgtgtaaacatggtcacaaagtgtggaataataaacactggagactgagamgcatggggagctgggcagggagtgagggatgagaaattacttaatgggtacagtgtaccttattaaggtgatggataccctaaatgtcctcacttcaccactaca

SEQ ID NO: 836227 - DNA, 623 bp, Homo sapiens
ttcttcatggctggtttttatacaaagctatttttctcattgttgttgctgctgctgttgctgctgttgtcttacctgtaaactctagctacttgcagggagtgtgaggcactgctaccctttagttctctctgaatccaagttaaattttgtcatcttgacattgttctaatttttctcaaaattccctctgttaaaatagtatatttacagcactattcacaatagcaaaggtatgaaataaacctaagcatccatcaacaagtaattaaagaaaatgtgatatacacacacacacacacacacacacacacactctcaaaggaatactattcagccattaaaaagaatgaaatcatatgtttcgcagcaacatggatggaactggaggccattatcttaagtgaaacaactcaaaaacagaaagtcaaataccacatgttctcacataagtgagagctaaataatgtgtaaacatggtcacaaagtgtggaataataaacactggagactgagacgcatggggagctgggcagggagtgagggatgagaaattacttaatgggtacagtgtacmttattaaggtgatggataccctaaatgtcctcacttcaccactaca

SEQ ID NO: 836228 - DNA, 558 bp, Homo sapiens
aaagggatacaatacatggtccgtgactgcaaaaccatattaaagttcctgttcattgacgtcatggttcacatatggtgcatatgtataattggaaatctcagaattgcattttcatgaaagaagatgaagataccaaatgccttactaagagtatttatttgtttgtcagttatttgcatggaaatgtggtaaagagagagcaatgcctgggactgggtgttagcattagtaagtcagagaaaaaccttctttgtaagaagttatatacgaagttgtcaactttaatttagcataaattaataactgaagactgaaacaaaacacagatggcatagagtcaatctggagtcttctagaatcctttattaaaagaaaaaacccatgagagaaaagtaaagattggaggtctcaaatcacagtaattgtattactcaaatcacaaattcctccttaactcgacacttaactcgatggaattttcatgatgtcaaagcatgtagatagttggataattagaaaygagaataaagaacagcttaatgaataacagaatct

SEQ ID NO: 836229 - DNA, 647 bp, Homo sapiens
aactttggaactggttaacaggcagaggttggaacagattgaagacaggaaaatgtgggaaagtttggaactttctatagactagttgaatggctttgaccaaaagcttgatagtgatayggacactaaggtccaggctgaggtggtctcagatggagatgaggaacttgttggaaattggagaaaggtgactcttgttatgttttagcaaagagactggtggcattttgcccctgccctagggatttgtggaactttgaacttgagagagatgatttagggtatctggtgcaagaaatttctaagcagtaaaactcaagcgatgacttgggtgctgttaaaggcattcagttttataagggaagcagagcatgaaaaattcagaaaatttgcagcctgacaatgtgataaaaaagaaaaacccattttctgaggagaaattcaagccagctgcagaaatttgcataagtaacaacgaggggaatgttaatccccaagacaatggggaaaatgtctccagggcatgtcagaggtcttcacggcagcccctcccatcacaggctaggaggcttaggagaaaatggtttcatgtgcctggcccaggatccccatgttgtatgcagcctaaggactttttgccctgcatc

SEQ ID NO: 836230 - DNA, 523 bp, Homo sapiens
cattttcacagaaatagaaaaarcaatcataaaattcctatggaactaaaaaaggccctgaatagccaaagcaatcctgagcaaaaagaacagagctggagtcacactacctgacttcaaaatttattacaaagacatagtaaccaaattattgtggtaaaaatagactcataaaccaatggaacagaatagaagacccagatataaatccgtgcatttgcatccaactcatctttggctaaggtgctaagaacataatggggaaaggatattctacatatgttctcactcatgtggaagctatatttaataaatggtactgggaaaactatataattatgtagaagaataaaactggatccccatcttttaccacacacaaaaataaaaatggactaaagacttaaatctcagacctgaaactatgaaactgctagaagaaagcattgggtaagcaccccaggacattggtctggacaaagattttgtgtttcatactgtaaaagcacaggcaactaaagca

SEQ ID NO: 836231 - DNA, 546 bp, Homo sapiens
tgttttagggctttagaagtgaatgaaacaaggtccccaccttaatggattttatgtgctattgtcatagattaaatttaataacttttctgcttaaaaatctttgaaaacaattcatcctcagagagsataaggtccccagttgcagtggtgtgcaaagcccttaacagtctagcttctaacacatttccagtcccattatcaaagccaacctcatcttctcaccctgattttctagataggctattctagctgccactacctgaacgtgattttacttccacgttccctcctgcacctctttatttccttgtaaaatttctattcaaacttaaagactgaggttgagattttcactttctgtggtgttttcctcaagatactagccaggctgaattgatttttccctctgtggttatgtttgttcacgcttccatcaccacccatattcacagagtattatgattctttgcttatctatctctcctaccaggctgttagtttcttaaaatgatgcagtcatccttgtatcctgagccactagca

SEQ ID NO: 836232 - DNA, 586 bp, Homo sapiens
ttccagtaaagtatttccttttgattccactctaacccaatctaccatcatgactcagattygtttgccttcagagtcaatgacaattagccataggtagtacagaaagaaaagaatataaaaataaaatataaaataaataagtatatatttcaatatacagagtatgttatgtataatttgcatgactatataaacagaagctatcaaatatttatgaataaatacaataaataaatgagacaataatgataaacaagaaacacatttaacaagaaatctgctgtaaagtttcattgatgatctatttattacattgactattcccaaacacactgtttttaaggtaacttgcttagcactttactgttttgcttttaatgaagtgaagcattttataaactatggtattgagaaactttgaacactagatggcgagattgcaaagttagacaatgggatggtgtaaaaattgtgaaggatgaagggccgcagaatcattcttcctctaccagcaattttcttagcaccaaagctgcagtaatgttccaagaatagaaatatttgagccatgaatcaaggtaag

SEQ ID NO: 836233 - DNA, 627 bp, Homo sapiens
cattttagaaaattagagatatttatcaaatatgtaaataaaggctaatctttccccttaactaggagaacttaattgcatagaagtaaatgtgtttgaacagactggcatgtgctctgaggtcagtacctaaattctctaaacctttttaaacctctttgcatgttgaggtaagctagttatctaaagaacaaacacagacactattaaaggcttttcttggctgtatacactgattatgattcatcaaataggtgacttactttctagtgtttcaacatagaagctgaccatgggttcacatggatgccacatctgaacatacaagactgtagtcctcacagagggatgaatactcttgtgttgataaaacagttacacaaggccttcctgtacatcttttcagtcatggtgatagtcatgttaaactcttttcaagaagcagccaaattttacatcatgaaaagccaatatagtacaggttcccatatagaaatgccaatcatcaattctttgtacacctcaagttccacatctgtgaaatgaaactttttcttaactcrcatagaaagcattacagtgttagagtcaggtgtttctgctcagcataccacagtgctcttacat

SEQ ID NO: 836234 - DNA, 599 bp, Homo sapiens
cagctggcttcacccagtggatcccgcaccggggctgcaggtggagctgccttccagtcctgcgccctgcaccggcactcctcagcccttgggcagtggatgggactgggcgctgtggaacagggggcggcactcgtcagggaggctcgggccgcacaggagcccaccgcggtggagaggctcagacatggcaggctgcaggtccccagccctgccccacaggaggcagctaaggccaacgagaagtcgagcacagcagctgctggcccaggtgctaagcccctcactgcccagggccggcagggccggctggacactccgagtgcagggcccactgagcccacgcccacccggaactcacactggcccgcaagcaccgcgtgcagccctggttcccgccggcgcctctccctccacacctctccacaagctgagggaggcggctctggccttggccagcccagaaaggggctcccacagtgcagcggcrggctgaagggctcctcaagcgcggccagagtgagcgccaaggccgaggaggcgccgagagcaagcgagggctgtgagggctgctagcacgctgtcacctctcaccacca

SEQ ID NO: 836235 - DNA, 599 bp, Homo sapiens
cagctggcttcacccagtggatcccgcaccggggctgcaggtggagctgccttccagtcctgcgccctgcaccggcactcctcagcccttgggcagtggatgggactgggcgctgtggaacagggggcggcactcgtcagggaggctcgggccgcacaggagcccaccgcggtggagaggctcagacatggcaggctgcaggtccccagccctgccccacaggaggcagctaaggccaacgagaagtcgagcacagcagctgctggcccaggtgctaagcccctcactgcccagggccggcagggccggctggacactccgagtgcagggcccactgagcccacgcccacccggaactcacactggcccgcaagcaccgcgtgcagccctggttcccgccggcgcctctccctccacacctctccacaagctgagggaggcggctctggccttggccagcccagaaaggggctcccacagtgcagcggcaggctgaagggctcctcaagcgcggccagagtgagcgccaaggccgaggaggcgccgagagcragcgagggctgtgagggctgctagcacgctgtcacctctcaccacca

SEQ ID NO: 836236 - DNA, 704 bp, Homo sapiens
catatacacacatacacactcatacacacactcggccatgacatccctcagagcccacgggcacgataagcaaggaaactgcattccgcagcgcttgtttcacagccggaagagagacctgccgggcctctgtcaccaggacagcttttcccaagggcctgaagagccctacacatccctaaggaaaggacaagcagcccaagataaaaatgggcaaagaccatgacaacacagctcacagaaaagaaaccagaactgcttccaagcacgtgcactgtttgtgacgtcagtgtggcatccttgcaggctcacaacgggcgagagtcgagactgaggaatgtgtgctgcctgggagcatggaggcgcggcccccgccaagcccgactgacggttctcacatctcaaagcaggccttgggtacacatctcagaggaactgacccacacatactccaggaaacaggtgcgacaccactgatggtgaaacaggtggacaaatggtgcccacacactacatacagcacaggcagtggttgaagtgaatgaacccaacggatgtggagcaacacagatacgtcttgaaaacaccatgagtaaaacagcacgtgcaaactcagacatacggtgtgacaattcccattctcccatttttgtgtttaaactcacgaccactaggtaccgygtcaggtgcatccatttgtagta

SEQ ID NO: 836237 - DNA, 679 bp, Homo sapiens
cctttgcctggagtttgcagtattcacgtgcactttcctgcctctccctgcagccggggtcccctggctcaaataccagtctggacccttttctcccttgtcaaagtcctcctagcctcctactaccccaggacagacgccagcccactggccctctccactgctcccctcggtgtgtacagagcacctgcatgcgctgggcactgcttcagggactgggcagagcaacgagcatgaaacagacacttctcggcagtatccaagcgttgctgtggtggcctctgcacacacagtgctattcctgcagcctcgcctctggcagtgctgttcccgctgctgagcctgtcttgccctctgtgcctttgtacccccagaaaatgcctcttcccctttcatggttgattttctgtgttctcctcttacctgaatcccctgctgggtcaggggtcctgcttctccatttccagggcaatctctgcttccctctctccactgaacactcattttctgcactgtgagctttttgtggcaggaaggtctgtagttttattttattcttctgwgttcttagccattatcataggaccaagcatatagcaggtgctcaataaacatctcaaaagaaatggggaaaccacggctcaggaggttaagggacttccgaggtcacagggctagt

SEQ ID NO: 836238 - DNA, 590 bp, Homo sapiens
cgttctactctctacttctacaagttcatattttttagattccacatgtaattgagatcatgcagtatttatccttctgtgcctggcttatttcacttaacataatactcctaagttcatccacaacattgtagaaattttatctgttcttccgggtgcccacactttcaaaggaaaaaatatacatattgcattagtctgttttcaggctgctgataaagacataccctagactgggtaatttataaagaaaaaggtttaatggactcacagttccacgtggctggggaagcctcacaatcatggcagaaggtgaaaggcacgtcttacgtggcagcagacagagagagaatgagaaccaagtgaaaggggtttccccttgtaaaaccatcagcttttgtgagacttactcactaccatgagaacagtctgggggaaaccgcccccaagattgtattatctcccaccaggtccctcccacaacacacgggaatwatggaaggtacaatttaagacgagatttgggtggggacacagccaaaccatatcaaatacattaaggaaaacagttatcggaaccaaaggaatgc

SEQ ID NO: 836239 - DNA, 465 bp, Homo sapiens
ggaaaactggctagccatatgtagaaagctgaaactggatcccttccttacactttatacaaaaattaattcaagatggattaaggacttaaacattagacctaaaaccataaaaaccctagaagaaaacctaggcactaccattcaggacatagacatgggcaaggacttcatgtctaaaacaccaaaagcaatggcaacaaaagccaaaattgacaaatgggatctaattaaactacagaacttctgcacagcaaaagaaactaccatcagagtgaacaggcaacctacaaaatgggagaaaattttcgcaacctactcatctggaaattttttaaaagcaaaatgtttaaaattcaaggatttagtagagagcattttgagaaatggcttaattgcatawtctggaaatagaaaacttattggatagggcagagagtatattcagggaactagtggatgatt

SEQ ID NO: 836240 - DNA, 609 bp, Homo sapiens
aattgaagtgaggcccaaagatgtggctgaattggtgcaatctcwtgataaaattttagtggataagaagttgcttcttatggatgagcaaagaaagtggtttcttgagatggaatctattcctcatgaagacgtgtgaacaatgttgaaatgacaacaaaggatttagaatattcatacacttaattgataaagcagtgatagggtttgaaaagattgcctccaattttgaaaaaagttctactgttggtcaaatgctatcaaacagcattgcatgctacagagaaatctttcatgaaagaaagagtcaatgaaagaggtaaacttcattgttgttttattttaagaaattgctgcagctaccacagccttcagcaaccaccagccttatcagtcagcagccatcaacaatgaggcaaggttctccaccagcaaaaaagatgacagcttgctaaagacacagatgattgttagcatttttagcagtaaagtgtttttcaaattaaggtatgctcattttttagacataatgctattgcacacttaatggactgcagtataactttcataggcactgggaaaccaaaaagtttgtgtgacttactttat

SEQ ID NO: 836241 - DNA, 624 bp, Homo sapiens
atggaaaaaagcttatagaataagggtgtgaaaaaagaaaatatttttgtacagttgtacaatgcgtttgtatttttttaatttaaaaatacattttatttttttaaatttttaaattawttttttttatttcagtatcttttgaggtagaagtggtttttggttacatggatgaattgtatagtggtgaagtctgagatcttagtgtaccagtcacccaagtagtgtgcactgtgcccaatatgtagctttttatccctcatctcgactttcccgcctctgaattccagagtccattttaccactctgtgtacccatagcttaactcccacttataagtgagaacatatgatattgggttttccattcccacgttacttcacttaagataatggcctccaactctatccaagttgctgcaaaagacattatttcattcttttttgtggctgaatggtattccctggtgtatatattaccacattttctttatccactcattagtcaataggcatttaggttggttctatatttttgcgattgtaaattgtgctgtgataaacatacatgtgcaggtgtctttttgatataatgagttcttttcctgtgggtagatatccagca

SEQ ID NO: 836242 - DNA, 662 bp, Homo sapiens
aagatgctttttatgatatctgtctttgaaaatctactgaaacataatctatgtttcagtatatatatatatactgaaatatatatagataacatrtagtctatcctggaaaatgtcccatgtgcacttgagaagatgtgtatgctgttattgctgggtacggtgttcaatgtgtgtctattagatctagttggtttattctgttgtttaagtactctactttcttatttatcttttgtctggttgttttagccattattgagaatggggtactgaaatctccaactattattgtagaacagtctatttctcccattggttctgtcagtttttgttgcacatgtatatattttaatggtttgtcattaggtgcataaatgtttataattatatattcttgctgtactgaactttttattaatgcataatgcccttcttcattttttgtaaattttgaaaaatggaagactattttgtctgatattagtatcactaactctgatcttttctggttactatttccatagaatatctgtttccatcctttcactttaaatctatttgtgtctttggatctaaagtaaatctcttgtagacaacatacagttagattatattcttaaatttatcctgcaaatctctgtcttttgactggagagttt

SEQ ID NO: 836243 - DNA, 556 bp, Homo sapiens
ggcttacgcctgtaattccagcactttgggagacaaagacaagaggattgcttgagcccagaagtttgagaccaggctgggcaacaaagcaagaccctgtctctacaaaaaataaaaaaagttsttggatactgtggctagagcccaggagttcaaggttgcagtaatctatgattgcaacgctgtattctggcatgggtaactgagaccctgtcactaaaaaaaacacatacacacacaaaaaaacccccagcactttgggatgctcaggtgggcagatcacaaggtcaggagatggagaccatcctggctaacatggtgaaaccccgtctctactaaaaatacaaaaaattagctgggcctggtggcggacacctgtagtccgttactcgggaggctgaggcaggagaatggcatgaacccaggaggcggagcttgcagtgagccgagatggcgccactgcactccagcctgggcgacagtgagactccgtctcaaaaaaaaaaaaaaaaaaaaaaaaaaagaagcaggtgccccgcagcctcaaagctttctt

SEQ ID NO: 836244 - DNA, 459 bp, Homo sapiens
cctgctagctctgtcttctcttgatggcccttcccagcacagcctcccctttccatctaggacaacgtcctgtgaaaattcagcaagattaagaactggaacagccttgctcaaaaaraggctttggtcactttaatattttcactgtgtgctggagatgaaacagtcttatattcaccctattgagtactagcagcgttctgaccaagcccttagaagggaaagtggaaagcatgaagatgcaaagcatctacaacttttgtcctcaataacccagaacttatttctagagaaattactggtgtttcaagtagggacacaatttacttaagcaaaacaaaaggctcctgaagatccaggtatatttcagcctgaatctttcccatctttccttttaaagtaaatggcatggaaatcataaacttacgttctacaatcagaatgatgacagaaacatca

SEQ ID NO: 836245 - DNA, 478 bp, Homo sapiens
ccaaagacaagacccctctgtaatcatcctgaacacggaacacagaactktcctgaccacagcataagcaaacttcccgctatgccggctccattcttcctgtgttctagataagaatgagttaagaaacccatcgcagaatgaccctgcatcctgacgccacccaatacagggtgacgcctcacctccgcgaacacctgcgcatcaccgaacaccagccggagtcctgcaaggtctttttgcttttcttttacccatggtgtgtgttccccttgctgaaatgaggcaataaacccaacttggtttgaccacaggcgtgttcctggtggcctctaggtcacaaatgaaagctgggggaagggctgaagcgtcaccccagtgcttctggtgtaactggattcccagctcctaaagctaggaagggagctggtgacagtgctttcccaacagccgccatgtgccgggttctgtgcctggt

SEQ ID NO: 836246 - DNA, 571 bp, Homo sapiens
ttctctatcttctctttcacacaacacacctatataaacacaaatgtaggtatgcaaaatcttatatatttkgtaactacttttatattttacttaaaaatatgagtgttgttatagccttaagtgttcagagtaagctctttgaagaacaagaagtgtgtgtgcgtgtatgtgtgtgtgtagatatgtgcgtgagagaatgtgtaaacaaatacataaaaacatccagctgagtgaatagtatataatagactctaaataattattcattgaactaatttattaacaacaatgaaagagacatgggagaaagaaagaacatgagataagctggaacacatgcaaggtaaagagatgaagagaagacagcccaccatttggaaagcatttatgacttttaaagtttttatgtactctgtagttgatgctcacaatagccttctattttcttttattttatttttaatagagacagggtattactatgttgccgaggctggtcttgagcttctgggtttaagtaattctcctgccttagcatcccaaactgctgggattacaggcataagcc

SEQ ID NO: 836247 - DNA, 565 bp, Homo sapiens
cagtgactatgtctactgcacaaacctgatgtgttgcagctggcttgtccttgctaagaagtgcttattattaaattttcaggaatttttccatctgtttgttaaacatagctattattttaaaaaacaaattatattctcaaaacataataaatgctctaattcatttcctgtttattgtcatagtgtttactacgatttattctcttgaagttattttccccgattcaatccttatggtggaaatactatctattgagggactaccgcacatcttttcaacttcctgttcagtgccattattcggttggtgcaaaagtaattgcagtttttgccattacaatacattatgttggtagcttgaaattgacaatagtggatgtattgataccaaataaatcagcaacactagttgacatcttttttttttttccaggtggagtctggctctgtctcccaggctggagtgcagtggcrcgatctgggctcactgcaaactccgcgtccctggttcacgccattctcctgcctcagcctcccgagtagctgggactacaggcgcccg

SEQ ID NO: 836248 - DNA, 486 bp, Homo sapiens
tgcaggggtgaaagaagaaaaaataactgagaggttcaagaaccctcaggaatgaaccaagatatataagaatacctatgagaatatctatatctatgagaatatctatgagactattggagcttcaattcagacttaattctgagcaggaagggaagaagaatgaaaccacatagagtagaagggtatgcaggcggagccattgtgacattagaagtctggtgcagtcacaaaagttcatttataaactctcgtgcagaatgagggtcaagccatctcagatgttaagtaggaattcagaaactggaaggccaggcaaggcacaattgaatgggctggaccaaactgaccagaggaggaagyctgcctttaagcaaactctcacatgcccctgtttaccacacagtcactaaacaagccaagtggtccattacttgtcttgtctaggaggtagcctcacaccatagatgtgtgcaaagcttcctc

SEQ ID NO: 836249 - DNA, 616 bp, Homo sapiens
gtactgatatgcacttggctataagctattggtgtatccacaagctcattggaacagaaacccaactattacaacagaccctgaaattttgtgagctctcaaaaatttctgctcaaaaaatagattctcactttctgcttaatttttccgtaaatctaaaatttctcttaaaatgaagtctattaattgaaaaaatatatactctggaaatgggcaatgttgtctttaagaaaaacttgtagtcggtgtgtttgttgttaagcagttacaaaatttaagttatagcatttctgatttcgattcttagaaacaaaactagatttgttttgctttagaaagaatgtaaggaaagctaatttgtgaagtaagtacttcctaaaatgaagatgaattcctgtttagataaaccaggagaggaagttaaactgagtgagtgtgggaagaaaaaaaaaaagattcctttgagagatgcgccttttgagcataattgaaagtgactgagatgtacaataacgagggaaccaggcaataattcattaatggagcagcrgcattactctaaacaaatatttgcttttacataattaaccaaactaaaatgatctgaatggaaaag

SEQ ID NO: 836250 - DNA, 595 bp, Homo sapiens
tcgttcccaccattatatcttggaagtagataacttgctccataacttggaagtagataactagctcacagatgagactttgatgctgcaatgagtgaagactttgggattatgggagtggaatgaatgtatttgtatgtgagaagcacatgagttttgggggcccagggacagaatgctatggtttgcatgtctcctctaaaaattcatatggaaacttttagttctcaacatgacggtattgagagctggggcttttaagagatgattgggggctgggcatggtggctcatacctgtaatcccagcactttgggaggccaaagtgggcggatcacgaggtcaagagattgagaccatcctggctaacacggtgaaaccccgtgtctctactaaaaatacaaaattagccaggtgtggtggcgggtgcctgtagtcccagctacttgggaggctgaggtaggagaatggtgtgaacccgggaggcggagcttgcagtgagctgagattscaccactgcgctccagcctgggagacagagcgagattctgtctcagaaaaaaaaaaagatgattggattggatcccgagggttct

SEQ ID NO: 836251 - DNA, 595 bp, Homo sapiens
tcgttcccaccattatatcttggaagtagataacttgctccataacttggaagtagataactagctcacagatgagactttgatgctgcaatgagtgaagactttgggattatgggagtggaatgaatgtatttgtatgtgagaagcacatgagttttgggggcccagggacagaatgctatggtttgcatgtctcctctaaaaattcatatggaaacttttagttctcaacatgacggtattgagagctggggcttttaagagatgattgggggctgggcatggtggctcatacctgtaatcccagcactttgggaggccaaagtgggcggatcacgaggtcaagagattgagaccatcctggctaacacggtgaaaccccgtgtctctactaaaaatacaaaattagccaggtgtggtggcgggtgcctgtagtcccagctacttgggaggctgaggtaggagaatggtgtgaacccgggaggcggagcttgcagtgagctgagattgcaccactgcgctccagcctgggagacagagcgagattctgtctcaraaaaaaaaaaagatgattggattggatcccgagggttct

SEQ ID NO: 836252 - DNA, 633 bp, Homo sapiens
aaatatatgcagaagagagttgtgcccttaaataatcattatgcattatttttatggtgttatgatttcaatttcttcaaatgagaacattcctttttattataaaagcatgctctttatttatgtraatccaaaagatactgacatatttaaggaagtgaatacaagtgccctggaattccatccttcaaagacaatcagcactaacacttttttgctgtttctatgtagtactatattcatacatatttttgaatgcctatacacacatattcttaaaatgaggtcattctctttatactataaagctgactttcttaatataatatattgtgggcatgtttccatgtaggtacacaaataattaccttattttagacagtttcaaagaattttatcatatagatgtaacaatttgtttaatctctataaacaggtgtttaggtgattttcattttttgttagcaaaaacattgctacaaataaacaccttttgcataaatccttgcacgcttgaacagtaatttctttaggatttgtttctagaaatagaattgctgagtaaaaagtgatgtaaattttaaatgtcaggtcttgcaaaattgttctctaaaaactgtgcaatgtgtattt

SEQ ID NO: 836253 - DNA, 633 bp, Homo sapiens
aaatatatgcagaagagagttgtgcccttaaataatcattatgcattatttttatggtgttatgatttcaatttcttcaaatgagaacattcctttttattataaaagcatgctctttatttatgtgaatccaaaagatactgacatatttaaggaagtgaatacaagtgccctggaattccatccttcaaagacaatcagcactaacacttttttgctgtttctatgtagtactatattcatacatatttttgaatgcctatacacacatattcttaaaatgaggtcattctctttatactataaagctgactttcttaatataatatattgtgggcatgtttccatgtaggtacacaaataattaccttattttagacagtttcaaagaattttatcatatagatgtaacaatttgtttaatctctataaacaggtgtttaggtgattttcattttttgttagcaaaaacattgctacaaataaacaccttttgcataaatycttgcacgcttgaacagtaatttctttaggatttgtttctagaaatagaattgctgagtaaaaagtgatgtaaattttaaatgtcaggtcttgcaaaattgttctctaaaaactgtgcaatgtgtattt

SEQ ID NO: 836254 - DNA, 620 bp, Homo sapiens
atctagcacagggtggaacacgtgggaattactcaccatctactgaacacrtgtagaaatccatttatccaaagacaatcgctccctttggatttaactatacgtttttctaacggtagtctattctcctttcccagctaacctgcaatttcttagaccaatctctttaagctcttcagcctttttctctaaaccaatacactgagcacaccatataaaaagcaacagagaattaacttgagattatcagactaatgatacagctatcatagtgtggaatgctttgtgaaaagaatattactgccagagaataaatgtgaatacattttctaagatttcaccaggcatctacatctgtgtgcatgtgacaggtttttgtttggtgtttgcctgagctgcttaaggcttttgtccagtggagggacagtactgcctaattgctgcactccatttgtcctacaacgaagaatccgcagcttccttctttattagcttctcccagcaaaacagaaccatgacacagaacttgaactcaatccaattagggaacttttaagttgaaataatagaaagaggctccttgcatacctcctaatacctgttttccagaaatagatctg

SEQ ID NO: 836255 - DNA, 573 bp, Homo sapiens
actttcttttttaagcaactaagaggcatcctctaactgatccacgtgttcttaatggagtgaagaacacagttccttataaacgatccaattgtgggctcttaaagaaggttaacttccctgtgttaggacctaaaatttatgtcctaggcaaatgaaacaggagactttaaaaagatttgaaatgaataaagttagatgcaaaaaggaacaattaaggtgaaatcatttggccagcctagtttctggattagaaaacatggagtaatttatgtgttttggtgggaatagaatttatcttcatcaacaacatacaaaagcatttattagttgtattttggaaagtacgaggatgtggtacccattaagctaacagattgtgaacttcatgacaccagggactgttcattgtacatatgtggtgttcaataaatgtgtgttgcacttgatcgtattgartgttaaaacagacattatgtatgtgactcctctggtgggcatatacaaactagaatatttatgtttaagttattaacattatgtgtaagccccacaacagacacataatgcata

SEQ ID NO: 836256 - DNA, 546 bp, Homo sapiens
agtacctgtctcatttgccatttttataccaaacagggctgagactagagtgaggcatgtaaggtgctcatcttgggttcaraatttaggtggtgtgaagaaaaatctcagcgatcaagataaataacactttaatgcaatatttcaaaaactcgaaagatagcttcagtaccttgtatgctctccatcagactacccttcattagcacccaaccccacatccacaacccacttcttcataaacaccaatactggtgaggttatagaaaaatgagcccattcatttactgcggatgtccctgtaaactggtaaatgtgaaaaacaatatggaaacatctgttagcggccataaagatgtcatggaacattcaagaaatttaatttagtatcttgatgctctggatgtttgggaatgctgtttccactcttatagaacttatcttctagagtagcgaggacagcaaacaaaaaatagacagtataatctcaaagagagctaagtacatgaagacaataaaacagagcaatgtgatgaaaaagagcac

SEQ ID NO: 836257 - DNA, 615 bp, Homo sapiens
ctggatggccaagtgacactccaaggatcccataacrctatgtggtatgtattataatcactttacatacattctccagttcatcgaattctcacaacatatttatgaaatgtgttttattatccatgcctattttaaagataagtaaactgagatgttaagagataaataacttgcccagggtcacatatccagatggtagaattggacttgaatggagatgtctgactccagagcccaaatccttaaccatcaccctacactttctccctattctcattggagaaaatgataaaccaaaatcttacttgattcattttaatgagactataatttaataatgaaagtataatttataataatgaaactataatgaaagcactctgcaaggataatgagtaaacaccttcagatggaaataggcccaagagaagattctgtagcagatgctgctcacctgattatgaccttagtattttggctgaaatagtcagtgaagacacaccctgtccagaatcctggctctaacaatatttggaacagttgaaaaatattaattttaaaaactggaaaaaagagatctatggagcatgtagaacatataaaaaatagaat

SEQ ID NO: 836258 - DNA, 620 bp, Homo sapiens
attcatttctatactattcctaatggcaaagacatggaatcaacctaagttcccatcaatgtttaactggataaagaaaatgtagtacatataaactatggaagagtattcagccataaaaaagaatgaagtcatgtcctttgcagcaacatggatgcagctgaaggccattatcctaagcaaattaatgcagaagcagaaaaccaaatatcacatattctcacctataggtgggagctaaatcttgggtacacacagacataaagatgagaacaacagatactgggaaatccaaaaatagggagaaaggaagggaacaagggctgaaatacttcccattgggtactatgttaactatctgggtgataggatcgacagaagcccaaaactcagcatcacacaatatacccttggaaaaatcttgtacgttaatcccctgaaaccaaaataaaaatggaaatttcaaaataaaggaagaaaaaacacacagtgtgttgcttttacactaacaattttacacttaaktttcaaaaatatttcttccagcaatactttgtccttgagaatattaaggtacgcccacccagctcttttttaagaaatacatgatacaaacaaaa

SEQ ID NO: 836259 - DNA, 640 bp, Homo sapiens
ctggctcagtgacatgtgctttgtcatactagaaagattgattttatctttttacttcacaaattaggaaaatagggtttttttttcccattaaagaaacagatatataaaggaatagatatgaaaatctatttacgtgtttgaaatagactcagagtgtttatgagatttttccaaatggaatagggctgaatagagtacaaggaatattggcttaacctctctttctgttaaaggatcttcactggaaatatttgagaggcacttgtttaagagactgagatactagtgttttacatttttaaatgtatatatttaaaattaattagtgatagggtttggctctgtgtccctacccaaatctcatatcaaattgtaattcccaatgttagaagagggaccgcgtgggaggtgattggatcatgggattggatttcccctcttgctgttcccatgatagtgagtgagctctcacaagttctggttgtttaaaggtgtgtagcacttcccctttccctcactctcctgctgycatgtgaagataagctggcttcctcttccccttctgccatgattgtaaatttcctgaggcctcccagccatacttactgtacaggctgtagaatcatgagcctattaa

SEQ ID NO: 836260 - DNA, 351 bp, Homo sapiens
gatagtgttgttcgactattcagtaatcttgctgatattctatttgttctttaaattactgagagagatgtgaaaatctccaattctaactgtggatgtatttctcctttcttttctgkcaatattttcttcatgtatcttgaagctctgttactggaggagtacatatttatgaagtttggtgtttgatattcttcttgatcaattaacttctttacattttgaagagtacctttctgtctagggtaacactacagattttgaagtctaatttgttttatattagtatggccactccagtttccctatgtataatcttttcatgacatagcttttccatccttttatact

SEQ ID NO: 836261 - DNA, 545 bp, Homo sapiens
caagtcaatgactttgataacagtatgcttctcactcctcctgcaggaaggcactatagatccrttgcaagcaactgaaatgtaatcctctcccagggaatggggtattagataattgggaatgagaattcataataacagatattctgataccgatttctcctttgacacactctgaaaaacctcactaactttccatagttttctggcccccaaatgtattctacagtttggggaattagctttgagtttgtccttgctgtcttcatttccacccacttgcatgtccttgcaaatttctatatataggttcaactccacctaattgttttagcctggtaatgtatcaggaatcaaatttgcagtttatatttatagtgtaagtcagttccagtcttctcagtgaaaattgagcctcctcttcaacccctggaagtttagtcaaggttctaattttctgcctagcacctattgtcagcgttcttccatgaggttggatcctattcttctccttcatgggtctcttagttttctgcatcagcaag

SEQ ID NO: 836262 - DNA, 560 bp, Homo sapiens
tattgtgatctctttttgtacttatgtacattttatggaaaagatctgaacatgctgttttctgtatgggattarggaagctggttttaaccatgctcaaaataaattcaagatatcattaaatggtggatggggaatattattgacctagcataaggctacttctgtgtctaacacgttttttgaaaaaatattacttctcttacagatatctcctgtgatggaagcagaagaattaactaatgatatattagcgataaaaaatattattcctacaaaaggtgatatttgggccacatttgaagtcattgaaaatgaagagctaggtaagtgatttttatgctagggattcttaaattacttatactgtaaaaagtactctttaagacaagactttataaacattttatgtcttaacatcttgttatgattttttttaccttagtgcatgtattaatatatgtttgaggttgcctttttatgattttactcatcaaaataattatattaccttattgactataaaaatacagtgcaagactttaggtaccgcttttgct

SEQ ID NO: 836263 - DNA, 608 bp, Homo sapiens
aatgtctctccctagaagaatctactaaaargggtgaggaattagttgagtgatgatgtggtttcaacatttttaccatgcctaaatgacacttgaaataacagagtagaaaggaagagaccatgagcatggaaagaaaagagagaattatggatacagggtgtttgggcacgtgagattttacattacaggaaagaaagtagcgtatatggatttagatcaagataggttagtatatttgctgatgggagcaagtggaatttaaggaaactatgacagatcatagcaggaaatgacctcatatgaaggagagttaacatacattagagaataataacctacccagagatttaatataatacaattattttaaggcaataattggtggacaacaccaattctgataacaggtaattataggaaaaacatatatatgacagaatccacactgaatcatcaaagacagagactcttaatgagtgaaagagacagcagttacatcaaaaacattaaataaataagttagaacatatttctcatcaagaacagtaggaactcaacctgttgaataaaattaagtagcaactggctgagcacggtggctcacg

SEQ ID NO: 836264 - DNA, 318 bp, Homo sapiens
gtgttttggaaaatcatcctcataagaaccatcgcatctctggtaatttgatttagcatgtcaaatgtttgatttctaacttgttctaaaatagttgttatatgtctaatttcctgattcaactcrgcagtctcatagtgtgggaagtgactgatttaaccatttagtttcaggtacttatttttatttttatttttatttatttatttttttgagatggagtctcactctgtcgcccaggctggagtgcaatggcgtgatcttggctcaccacaacctctgcctcctgggttcaactgattctcctacctcaacctc

SEQ ID NO: 836265 - DNA, 606 bp, Homo sapiens
ctactctctcctactaagtttgtcatgggacttaaggagaaactataacctgttcctatatcttataacacccagtgacaccttttccctccctctttataacctatttctcaccactcctrccttcacactctataattcagttcttcatatactatctcatctcataccttttgtattggccctttgatctacctttgactgtcttctttcttcttttcacctaacacctacacgtcattcttgttgtgcaggacccaggaagcctttccctgggtccacccttatgtatatacatatacatacacacaaagacacatctacagtataagatgaggagaattgtatccgatattgttccaggtcaatcttccatcatcgcgagtatcacaattcctaaaattgtttgtaagttttctattgtctttgttaaaccaaaagctctgtgagatttgaactatgcctgctttgtttgccatgtaactttgagctcctagtacattgaaaaaactgagccttaatacattaaaagggtttatttcaacggaataataatgtgtgatatccaaccattaacagtatatgatacatcagcaaaatgccgct

SEQ ID NO: 836266 - DNA, 624 bp, Homo sapiens
ggatgttaactgccatgctctttgtattaatctgccttgwcctattcactgcatgaatcaatttattggtgctgtctctgtttcactgtcattttcaggagactttatttaactggtcttagggattttaacatactcttcccctccgtgcctcccaatatccgttcgtttgcttgtgaaacattgggaacaagaaagcattgaagcctccatctctaaaattcctgattgagactgggtatttaatagctatgagcagtaagattagacagatgtggttatgttttaatgccgctatgcctactaggtgtgatctagaagcactaggatggaaatcaggggacttttctccttgctgttttgtttcattttgcacactaaaaaaacacttctttgctttcttggatttggccaaaccagctttgcttgtccaatccacactgccactattgcccagaacctgcttgctctggtcattcccatcgaaatcctctttatttcctttgccttgttcaacatttctttcgtcagagtccatgttgtggtttatctaagattcatggctcagctcacttatattatctggatagttaaataagagaattcaatttttggcagggatcc

SEQ ID NO: 836267 - DNA, 468 bp, Homo sapiens
agatgacatgtctctgctatgccacatattctaacctgggagccaagcagagcaagaacccccctttcacagatctaccctgcaaacatttgggggcagtgttcatgccttttggaacgttgcctgttttgccactcccagcttctctcctttccctgacctattgaaccagcaagacccaaacttgtcatggcctctgagggccccacaggactggccctgcccacctcgtcaactgcaggtcactcacctctccttcagactccccttgcttcagcctcctttctgttgggtgaggctgcccagctctctccagcctccagaccttggcctytgctgttccctgctgtcccccgagcgcaatgtctggagggcttcaggatgccccggcagatctctgaacctcacagagggctctctggaaaataagggccctggctctacctaggagcccccagatttcatgaa

SEQ ID NO: 836268 - DNA, 607 bp, Homo sapiens
gcacattaactctggcttgaagaagcaagaagaacaatttgcaaaggaaggactatttcctagatcctgttagtgtaggaatcaagggaaataaattctaataaggtggagacctcatagaaaagtatcttagcctttaatactgcacatacgcaagttcgagtacccttgcttgaaaacctggagagtcagaagccatccatgagaacactgagcacctaaaattaaatttaaaaagagaaaagagaaaacaataaaagcactgaagtatagatgagagaaaagaggatagacttaggaaatataagtcttttatttaagttcttcattcgtgagttttacagttttgggtaagtaaatttctgaattttcatgtctgaagagtgggtattataatactactccctaaattctaataatgtaatagagattatgttactctctgtaaatttgaattatttggaaactgtagcaccatacaaatatcccttattattaagctataacagatactgtagttacaaataatgtatatttcaaaaytgctgaaagagtagatttttagatgttatcatcaaaaaacaaatgataattatgtgaggtgatg

SEQ ID NO: 836269 - DNA, 611 bp, Homo sapiens
aacattccttctgcaaagcagatacttggtgctccacacatacttccccaataatccaagggtagaccacaaagagtgagatggctaagttcctagactggtatacactttctacatgactttaggaaagttgtctaactttatgagcttcttttatctatttaataataaattattgagcagttaggctataccaggcactgtaccttcatccataaaatgaaaatatgcatatttcttttttttttttttttgagacagagtttctctcttgtcgcccaggctggagtgcaatggcgccatctcggctcaccacaacttccttctcccaggttcaagagattctcctgcctcagcctctcgagtagctgggattacaggcatgcaccaccacgtttcggctaattttgtatttttagtagagacgggcttctccatgttcgtcaggctggtctcaaactcccgacctcaggtgatccgcccgcctcagcctcccaagcatacatcwtttaaaagtttctctaaaaattatatgaagtcctctttgtaaaaaaaaaaaaaaaaaaacaaaaaacaaaacaaaaactacttttataacaatgtttgattat

SEQ ID NO: 836270 - DNA, 593 bp, Homo sapiens
ccagattcctgtagtataataattttctccagcactgggatcctgcagagcattatggttatttcagtaccagaaaaaaagcttctcctgacctcactcttagggaattctatttgtgaatatgtttccccaacatcctaaagggtggattccagtctggcccacaatcagagcacctaagtgacttctctgccattcagtgcaccacagacatgcactcaaaaacaagatattatttgccatattcaagttattgatttgcaataatttttagaatacgtttaattaggaaactccacttttgtgaacagaaaacaatattattaaatattttaaaatatagctgtcatgggcatattttatctatcttttcatgtacttttaaacattacacatttgtatcaaatggactaaacacttttattattcttaacaatgactcccatacaatcagccatgctatgcgtattgagcaacacakgaaaagttgaaatttatgatacagccatagctctaaagagtctgttatttttcatcgttaactattttggtcaccaacttggtgactgattatctagctaacctaaccaaat

SEQ ID NO: 836271 - DNA, 616 bp, Homo sapiens
aatgagggaacttacatcctggaggagtggctgtttagtatcttccaagctgctgagttccctgatggctgggaccattcctcttcgtctttgcactgtcagcctgtctttgtactagtgaagcccagcgaacggtcttcatccgcacctttgtgaactctgctcacaaactctgcctggaaacgtattcaggccatgagcacccttagatattttagcatctgttgtgaacctcttcttcaatgtggttcttttgactctcctgaagaagaaatagttggcctccatcttccacgtggtactttcatatcccaaagaggataattaaataatgtctttatcttcttttctgaaatgaaaattatctataattctgtgggaattgtgtctgttttaggaaccgttgtagcagctttgttctgtgagagcctttggggcaggagagacactttgtctaaaataaggcttgaagtcactcacctgtacaaacggggagatgggaaagcaggtggatgcaggagtactcagtraggacccattcccctctggggcaaggctgggcattcacaccagacttccttatagctgacgggtctgcagttccaaactccttccc

SEQ ID NO: 836272 - DNA, 522 bp, Homo sapiens
ttgtaatattcacttagtatagtataggtaggtaatattaacaaaataatttttaaaaatttaaaactctcaaggacttagctatcttctattcaaactctaattttttatctgtgaaaatggagaacttrgaaaattgtgacttctgtggtattaaaattaatttctggtataatactaaaaagttgaagtcttatcactcaattttgtgttttcttaggtaactcataaaagtttttttttagctgtaagaaaaatatcaactatgtatataatatatatattttttgggatagattcttgctttgttgctcaggctggagtgcaagggcaggaacatggctcactgcagccttgatctccttagctcaagcgaccctcccgcctgagcctcccaagtagctgggaccacaggtgcacaccatcacacccgactaattttttgacttttttagagagacagggggtcaccatgttgtccaggctggtcttgcactcctgggctcaagcgacactacctcc

SEQ ID NO: 836273 - DNA, 586 bp, Homo sapiens
ttcacaatggcaaagtcatggaatcaatttaggtgctcatcaacagtggactggataaagaaaaatggtacatatacaccatggaatactatgcagccacaaaaaggatgaaattatctcctttgcagcatcatggatgtagctggaggccattatcccaagtgaattaaccagcaacaaacagaaagtaaaataattcatgttcttgcttataagtgggagctaaacaatgcgtcctcatggatataaagatggcaacaatagaaactggggactactagttgggggaaggaagaaataaagcaagggttgaaagtgaactactggacactatgctcaatactgggtgatgggatcatttgtactccaaacttcagcatcatgcaggaaacctgcacgtgtaccccacaaatctgaaactgaatctaaaataaaacttaaaattatagaattttttttaattcatgaataaatgtagccatcacacaatgtcaaaggaaaaaagctctatgatgagcagataaacatttcaagttctttttcatctgggtaaatagygtttttcaatatctctctactgttgtca

SEQ ID NO: 836274 - DNA, 612 bp, Homo sapiens
gccaaggatcctctggctcccccaacaacggtggttgctaccttctagacatcctccatgattctaygtcttcatcagtgggcatgtctggcattgtacccttcctgcacactcagctacccacctagggcccagtttgcagtccaagagtccacccaaggtagcagacacacaagatgcaagcatatatttgcacaaggcattcacatgttcatccacacatgtctgcacgtacctgcacacacgtgtgcacccatacacctatgcacctgcatggtgcatgcatatgtatctgtgcgtgattgcaggggtacaggtgcctacacatgctctcaggaacaaacacatttacagttgtgatctcaaacaacttgctgtccctctctgggcctcagttttcttacttgtaaaacagggataacactaattcttgctttagccacttaaccggggccttgagtagatcagattagctattgcctgtggaagtgtgggctaacctggaaagttttgtgtaaactttatcattagtcctatcaactccacctccaaaataactcctaaatccatcccccatcctccattttgctgctgccactctagccccagcca

SEQ ID NO: 836275 - DNA, 618 bp, Homo sapiens
acacgttcagaatggggggggtccatgaaattaaaactttctttttgcaataatgctaagccgttattggcctgtttacattctcattctctcgttagtggagttttccagaggctttgcaaagtgcgatatggccaccgatggaatgcaggggcagctataaagacccagctgcctatagtgaagtcagacattaaagagacttccaaatatgcaaaacaaagccacgcttccaagtgtttttgtttgagaaaatagttctgttccttgaaaatatgtatttttacaaacatgtattggatttatcatagttattttaaattaattaccaactactttttgaatgtttcaatttgaatttctgatatggcaagttgtgatagatgtcacccacatagaagctctttggtggttctcagtaacttttaagcaagtaaaggggttctgagacaaacatttgagctgctttacctgttatttcattaaatcattgtggcagtgatatgaaatgctgttgtcccctgtttctgatataggaaaygaggtttgcagaagatgagtttctcatccatggccatataatctcactccaaaaacaaaatcttttttttaaaatta

SEQ ID NO: 836276 - DNA, 600 bp, Homo sapiens
caaggaatactgatatgtaagaaacagatgggctgggcacggtggctcacgcctgtaatcccagcactttrggaggccgaggcgggtggatcacgaggtcaggagatggagaccatcctggctaatatggtgaaaccccatctctgctaaaaatacaaaaattagccgggcgtggtggcgggcacctggagtcccagctactcgggaggctgagacaggagaatggcgtgaatccgggaggcggagcttgcagtgagcggagatcgagccactgcactctagcctgggcgacagagcgagactgcgtctccaaaaaaaaaaaaaaaagaaacagatgaagtatatccagaatgtgatcacagagaagagagctttccttgaaataaggagcagtaccagtttttaaagctcctagaggtcaaacaaaatgagccttgataaactgatgaatttcttaactagataataatcactgaggaagcagttacagtaaaagaataaaggttgagataagattgcaatatttaggtgcttgattacaaactggttaaggtgactcttgttatagtccccaaaacacatgtaaaatagaaatgtggg

SEQ ID NO: 836277 - DNA, 582 bp, Homo sapiens
aagcaaccattatgaatgctgttgaaaagaaattagaaaaaaacaaagattatttcagcaaagtaatagaagatataaaagaaccaaatgcaaattatataactgaaaaatacaataacaaataaaaactgactagatgggctcaacaaaagaataaagataagaaagaaaaaaaataatcaatgaacctgaagaaaaagcaatagaaattactcaataagaacaacacagaaaagggccgggtgcggtggctcacacctgtaatcccagcactttgggaggctgaggtgggcagattacgaggtcaggagatcaagatcatcctggctaatatggtgaaaccttgtctctactaaaaaaatataaaaaattagccgggcatggtggcacgtgcctgtagtcccagctacccgggaggctgaggcaggagaaccgcttgaacctgggaggcagagatggcaccactgcactccagcctgggcaacagagmgagactccatctcaaaaaaaaaagaacaacagaaaaaacagactgaaaaaataaaaagatgacaacaaccagactgtcagcaacctgtggga

SEQ ID NO: 836278 - DNA, 538 bp, Homo sapiens
tacatatactataataagtagcatcgctggcaggctatgggacaagtgctccataatcaatatatctgaatagttaacagcaaactatagatattctccctaagtaagactaataaagagtgcaaatagtcttaggtcagttcaggtcagattttgctgtcaaatgagcacaggttggggcaagtttacagaaataaaaaacatgagggccttaaatctgcattaaatattttcttgtatatttatacagtagagccatttaaaagaatgaaattttatttactcatcaaacatcatcttgaagatgaagtaaaaaagacaagcagaacaacattatatatatagtatactaccatttttaagcaacagttttacagaaaagtgggaagttgcatatatgtttatatgytgtatatagaatatccctgagaaggctatatgacaaacagaaaaagattaccttcctggctgcaaactagaagctgaaatgggagaagagactttctttattcactctttgttattctttgaattgtca

SEQ ID NO: 836279 - DNA, 634 bp, Homo sapiens
gaatggctcctgtccccatgcatatcacatctgattttaacatctcattcttcactgccgatgacttcgacaaggcctagtgtggaagaccataatggtgcattgtggggtatagtgggcttggtagctaagagcatgggttctagaattaggtatatctgtattcaaatctgcattctgccattattatctgtgacctttgaacaattccctctacctctctaagcaactcttcccatcacaaagtgctgataaagcataaagaagaaaacactctcattatagagttgcaatatttaacacaatgactgttcctagctcttagtagtagctattattttgattatgaggataataacataaaacacttttgcctggcacatagtaagcactggatgaattatacgtattactgtaatatataatataaatatgaatatatatatatatatatattttttttctgagtttggtgagtttgattgcagattccatgaagcagggaccagacttgcctgatttgtcttttggtccttattgcctagttcagtctgacatataatgggtactcagtaattatttrttatgagtcagtaaacgtgtgtatttttccatgtaaccatcaaaactgtga

SEQ ID NO: 836280 - DNA, 618 bp, Homo sapiens
catactacccaacttcaaactatactgtaaggctccagtaaccaaaactgcctggtactagtggaaaaacaaacaaacaaacaaaaaaacaggcacagaggacaatggaacaggctagagaacccagaaatraagttgcatacctacaaccatctgatcttcaatgaagctgacaaaaacaagccatggagaaaggactccctattcaatacatggtgctggaataactggctagccattatcctgcagaagatttagacaggaccccttcccttcaacacatacaaaaattaactcaagatggattaaagacttaaatgtaagacctaaaactgtaaaaactctaggagaaggcttaggaaatgaaattctggacattggccttggcaataaaagtaataaatggaatttatgactaagtctccagaagcaattatgatgaaaacaaaaattgaaaagtggggcctaattaaactatagtgcttctgcacagcaaaagaaactatcaacagattaaacagacaacctacagaattggagaaaatattcacaaactatacattcatcaaagcactgttctttgatactgtgttttcctgttgagaataatctggagaa

SEQ ID NO: 836281 - DNA, 574 bp, Homo sapiens
tgagatcccatcttttaaaaaaagaaacaaataaaaaaagtagattttttagtgaaaaagcaaagaatttcaagctctctttaaaaaaaaagaaactttttcatttctacaggttttgggggaacaggaagtatttggctacatgagtaagttctttagtggtgatttgtgagattttggtgtacgcatcacccgagcagtatacactgaaaccaatttgtagtcttttatccctcatccccctcccaccctttcccccgagtccccaaagtccattgtatcattcctatgcctttgcgtcttcatagtttagctcccactcatgagtgagaacatatgatgtttggttttccattcctgagttacttcacttagaataatagcctccagttccacccaggttgctgcaaatgccattaatttatttatttttctggctaagtagtattccatcccacaatttatttatccacttgttgattggtgggcatttgaggtggttccttgtttttgcaattgtgaattatgctgytataaatatgagtacaccagccctaattgtggggtaaaagtt

SEQ ID NO: 836282 - DNA, 581 bp, Homo sapiens
ttgcttaaaatacatgttcaactcaaatacataaatagggcaataaatatawgcattgaccttaaaattgtgaaggtagtttaaacgaggtatgaggaaaagcagacaaagtaaaaaatgaggcacttggttagagaaacgaaagttggaggatgtcatcaacagaagctgctggtgaggaagcaattgcaggatttttacaaagtataatgaagttagaaatggttctgtgtttaccttattaacaaaaggagaggtataacataaacagttctaacacatattacaggaccacacttaaacaagaagaaggaattatttataccatatatgtatgtgtgtgtgtgtgtgtatatgtatatatgtttgtacatgtatatacgtatgtgtatatgtatatggtatatatataccatatatgtgtgtgtgtatgtgtatatgtgtctgtaaatatatacatatataatgtatacatattatactctacatattttatataatactatatatacatatatagtatttataaccctccaagatcttctgggttcagctttgtactttactttgtgctcatttgt

SEQ ID NO: 836283 - DNA, 588 bp, Homo sapiens
ttaacaaataaataaaatattttttttttttaaagaagcttcatgccatgcagaagcagaaagttactaaataaagtatcaggcttatgtttcagggctggtgccaacaaaaacggtggtatcaraaaatcaacttcaccttttccacaccatctctttgtgaacattttactgaataaagtttttttttagagaccctttccctcagccttcctttttttttttttttttttttttgagacagagtctcgctctgtcgccaggctggagtgcaatggcaccatctcggctcactgcaacctccgcctcccgggttcaagtgattctcttgcctcagcctcttgagtagttgggattacaggtgcgtgccaccacacccagctagtttttgtatttttagtagagacaaggtttcaccatgttggccagggtgatcttgatctcttgaccttgtgatcggcctgccttaggctcccaaagtcctgggattacaggtgtgagccaccaagcccatcttcagttgtactttgtcaagtacttttccaaagtaattattgcagtaaagtcactagtattagtcactcatat

SEQ ID NO: 836284 - DNA, 538 bp, Homo sapiens
tcagatcaactttatcatcctccatcatttctataacatctacagtacttgcagaatacctatcaaagttaaacacaaagtcatgaaatacttaatcaagttttctgttaacttgctacaaaagcttaaaattaactcaatctgcaaatggaggaacataatctacagatcggagagaattactggggtaattactgcttaaaagtcaaatcagcacaatatttagctcgaataagagactcacaatgctctcctttaagtacgtacagattcaagaagatgcccccagcctctggctttttgttttatttagccactgatttctcaccttcagacaaaataaacttaccttcttcgcagttcccttacataatctggccaacgttctttatatattgcttctttttcttctttttcttgtctatttacatgcccttgcatgaaacccctcttaaactggsatctgtgttctttttgttctggaacatacctaaaataaaaacattcttgaatatcttcacttttttgaaactctagt

SEQ ID NO: 836285 - DNA, 520 bp, Homo sapiens
cttgtaagtatttaaaacacatataaagaatttcttttctatttaattctttttgtgatgtgaatatgaagacttaaagaatatgaggcatggaaaacattaatcccttgattcatttcagggaaaacacagacaagacttagaatttttatcatctaaaatgcatggcacctgtcttcactgaaataatattaaaccaaacaattgttgatggaataatcatgccattataatttacaatgaggcagttaagactttgtaacttatacttcaagtctattgtatgtatcagatttcatgaggatactctcaacttaaactttatcaaaatgttaatattctgaacataataagaactatgtaaatgtcagtgtttcagcttatttttaatgtcattatacagtagtctacacttatcttttgttttgctttctgcagtttcagttctgcrcagtcaatcacagtttcagactgcacagtcgatcacagtctgaaaatattacaaacaataagatatttt

SEQ ID NO: 836286 - DNA, 633 bp, Homo sapiens
ggagcaatttcattttcaaaacaagccgtacagcggaactgaaagtatcacatcccttgaggactccggacatgttggggaaggggaactttctagaaggtggcatctgcagatgtcaacatcrgcggcggtgccaagaggggctttgcagggccacagggcagcagctccatgcagctggccccatcccaggcctggtgagctctcctggctgtgtactcagccctgagcctgatgaccaacaccagatgcacagcctgctgtttaccaagccctcccacccacaccagggtgcctcctgacagcctcacggggacaaagtgcaggcatcattcgtccacatttgacagagatggaaggggggctcagagaagctgattacttacccgaagacacacagcctgcaaagggaggtggcacttccacatcccacgctctggctgaccctctgcctgtcctcctgtgcagtatgtggggtctcgtcaccaagcgctgggataaactcgaggggccaggctcaaggccacgcgtccagaggcaaatgctgcaagaagagaggtgcaggaaacccaggtaaccgaaaggcacctgcctcgagtgagctccctccagccctgacacctgttccttctt

SEQ ID NO: 836287 - DNA, 595 bp, Homo sapiens
caacattgccttgatttggtccccacaggagactgctcacttcttgacaaaaggtaattattgagattcctggttttcttctcaccttgtaaattctcttgtttttgttttttggcaaataggaatgaggtgtgtttactactggagcatcgggctgtcagaacccgtagctttggtttgccttggtcgcagcctgccaggttgcatacttttgatttggaagaggtgccggtgggtgtgttcgctagcaggaatcacccacagtaaaaatcatgggtaggagaaatggccgttcaccttttcccatcttccttccttccattgtctacactcctggtcccaccttttccttggggactgggatgcttatgctggaacctaatcagtgtccaaagcttaaaattctcctctcctcctcacttttttcctctttgttttctcttgactttcattgccttggtctatttccagaccctccaagkcctgtgttttctctttaaaagatcctgttccatccagaggagactcaagagtcccactttaatttgggattttaggcagaggccttcctgcatctctcaagtcacacttgcaa

SEQ ID NO: 836288 - DNA, 628 bp, Homo sapiens
acatggcattttgctatgttgccaaggctggtctaaaatgcctagacttgagctattcacccctctgcagcctcccaaagcactggggttataggcatgagcccccgtgcccggctccagccctgctctttctgtgctctgtggtgctgagcgcatcacttcacctttctgaatttcagaggggataacaaggcactccttccttggcttaactcacaagatgaccaagtgaagttttgtaaaccataacatgtcacgtacatgttggttattacagctgagataaaaattgacaaactgtaaaagcattaaagcaaacaaatgagaaaaaaaaaactctgtgttagctggacacagtggctcacacctgcaatcccagcactttgggaggccaaggcaggtggattgtttgaggccaggagttcaagaccagcctgggcaacatggcaaaaccccatctctactaaaaaatacaaaagaagattagacaggtgatatggtttgtctgtgtccccacccaaatcgcatcttgaattgtagctcccacrattcccatgtgttgtggaagggaccaggtgggagataattgaatcatgtgctgttctcgtgatagtggataagtctcacg

SEQ ID NO: 836289 - DNA, 585 bp, Homo sapiens
tttgcctctttaaagaggttattaataaccacaccaacctcccccccaacccctccccmatccttttttagtatgttttgttttgttttgtttaagtgaaagcaagtttattaagaaagtaaaggaatagcctgggcgcagtggctcacgtctgtaatcccagcactgtaggaggccgaggcgggcagatagatcacctgatgtcaggggttcaagaccagcctggccaacatagtgaaaccccgtctctactaaaaatacaaaaattagccgggcatagtggcaggcacctgtagtcctagctacttgggaggctgaggcaggagaatcgcttgaatgcaggaggcggaggttgcagtgagccactgcactccagcctgggtgacagagtgagactctgtctccaaaaaaaaaaaaaaaaaggaagaaagtaaaagaataaaagaatggctattccataggcagagcagcaaagatggaattttttttttccagcagaattctctagaggcccatccaagttgctgcgtgtgccagcaggtttgttccttttcactgctgactagcattctatagcatgcatgt

SEQ ID NO: 836290 - DNA, 564 bp, Homo sapiens
aggcgccctcaccccctgggtcccccagcctctgtgaggagctctcactcttcccatctgtattaktttgttttcacactgctaataaggacagacccgagactgggtaatttacaaaggaaagaggtttaatggactcatagctccacgtggctgggaaggcagaaggtgaaaggcacatcttacatggagatagaccagagagagaatgagaaccaagcaaaaggggaaaccccttataaaaccatcagatctcatgagacttattcactaccacgagaacactatgggggaaaccgccccatgattcaattatctgccacagggtccctcccacaacatgtgggaaagatgggagctacaatttaagatgagatttgggtggggacacagccaaactatatcaccgtcagatgctctcaaatgcccaccagacatagtatgctcctgggcaccagggttgaccctcataataaatacagcatgactcaatttcctagctcctgctacttatctgatacaaatgaatataagcagagacttgagggcttccccacgccccag

SEQ ID NO: 836291 - DNA, 623 bp, Homo sapiens; identical to SEQ ID NO: 831101

SEQ ID NO: 836292 - DNA, 417 bp, Homo sapiens
cctcacctcaccagggcacgtgggaacctgcatcctcattgatcatggagaatgagcagcacctcctcagggccagtgtctagacattctctttgctgatgccgcactattgctttcggccatatattggaagttgaaccaaatgcaatgtgcagcttctcctagaggcttggagtctcctctggctctgtatgagcaagcagctcgtaagcctaatgctctctagttttctcaaaattatttacatacttttacctcaaggtcatgggcacgtcctgtcctacctccttcttcctcctcttaragagccaggtgggttttatcttactccccttcctgtctagcaagaacttctaggtcaagccctcttcttcttctcctattccctaaggctctaaagcagaatggctcacaggc

SEQ ID NO: 836293 - DNA, 624 bp, Homo sapiens
ttgactgcatgcaacagaaatattactggaggaccttaactaaatttttgtttcttcatataacaggaagtctagaaatgggaagacctggctgccatagcagctcagtggtgctyccagaggctcgggctccctgtgtctttctgttccatcatctgcagtacatggcacccattaacacggttgcttcctcgttacaagatgcatgtttcaccccaagttttctatttgagttctaggaaaaggaagaagaaagcaatagtaaaaacgatgtaaaagcttttctaaaaatccctggcaagctctacttacatgtaatcttagatttaagatcaaccaccaccctcactgagagggaaggcttatgtcctctccctttgaatgcgggtagggtctttgactgctctaccattagaatatagcagaagtgatgctatgctagtttctaggtccaggctttgagaaaatggcagcttccagttcttcttagaacccttgctcttgaaacctagccaccatactgtcaggcagtccaagttacccagtggagaaccccatgtagagaggtaccgaaacccccaactacagtttctaccctacagccagccacgggagtgaaccacc

SEQ ID NO: 836294 - DNA, 637 bp, Homo sapiens
caattttataagtgcaaactatatatgatgcatttttaattaaaatttcctaatatgctctatttaaaatttatgcttgtctaaataatcttcatatttatgatacattccattgatccaaagggcaaagtaaatcttttttgaaaatattacttcaaaatagctgaaatagaactgataactttaatttattaaggtaaaattaagttgtcaaatttaactttggaatacactttataaacatactacagaatcctttgttgactttataatgtttcccttctgtctcccatattgacaacatgaattccctaaattagaacaggagacattttattgagcatctcagtcagctcaagctgccataacaaagtatctagagtcggggactaaaacaacagaaattaattttctcaaagttctggaggctgaaagtccaaaataaaatctggtaaatttggttcctcatgggggctcccttcctggattgcaaacagccaccttcttgttgtgtcctcaaagggcagacagagttctggtgtctcatcttcttgaaaggacaccagactatcarattacggccccaccctataacctcatttaacctttagccccctcctcccgggccctatcatca

SEQ ID NO: 836295 - DNA, 558 bp, Homo sapiens
ccaatgaacgacttatgacctaattaaatatgggaacacttagccaatttccctatgtctacataattttccaagctgtccctattcctaagggattcatttgtctcgggttatccactggctcccccagccccaccacccatttgattttttaacttccgccaaattgccttcatttaaactcaattaacttttaacagaaaaggtatcactgtaatcccatttgcagaactaaattcttttaatgtccccattataaattcctgtttccagtgtttcaaacatgaggatcatctgacatttggtttaaaggtctcaatcaggagtgttaatgaaactcgttaaacaacacttctttgactcacaccgaatttcagtaatcattttcttcttaaatatcatcagaaatagtttaaaaggacatttcattttgcaatkgagtgtattatcctaacagaacaggagcattcaggatatgaaaaccagagcttgtctctagaaagtcatccagaatgagtcctattaggttacaataccctaaccacagcccaaagccac

SEQ ID NO: 836296 - DNA, 498 bp, Homo sapiens
aaccctcaagtgttacccagtctcagtgaggcaacttcctttcgcaaaaagagcctcagtaggtacgtgggggaactctctcttctcagagacacacrtaaaatccagggaaagtggaaatggttgaaacaataagtgaatcgttaggccacacaaagtctgcatttcgaaacggatgaaaaagcagaagccagcaagagtccacaagccccactcgtccactagccccacaggcataatctggagagaccagggagcttcggtgtgggcgatgacgagaagatgacgttgctgtaatcggcaccgacagtgggcgcgtatggggcagtcagcacgcaggaggggctcttacgccttggcaagggtcactagggaatccttggatatctaatatataatgcaagaaattgaaatgtggataaattttggggaacgtatacctaggtagaggttcaaggaaaagtccagctgaccgactatatcctacatcctagccag

SEQ ID NO: 836297 - DNA, 638 bp, Homo sapiens
gttgcatttaaataatgcccactcagagggggtatgtgtaaagtctcaatttaggatgtttactgttgatggctgctgtcaaaaattagatacacaattcagtccaactttaaacaacgtcacgtgtatgactcttcttcaatttaaggtttaaaagcatagaattcacagtagcagcaggtggcatacggctattagaagcatagtaactgacagttgttttccaattgtgtcttctggaaatcttgttcctaatagaattttaattggtgttgagctggggaaaaaaaaaaaagctccacggtctattaattttgaaaaacactggatcaataaagctcagcaggttcttctctgctcaacttctcagagcctttactggtcccaggctttgggaatctccaggaggaagataaggaatgcactattctccaaacttatttaatgctaacttgtttgtttttgttcgtgaaacccttaatatcccaaagaacataatcgaagacaggatgtscaattttcccaggatttaggaatataaatacttaaaccaagttttagactattttggaagaaaacatcaacattcaacaggcttgtgtgtacagtatttgcatactactcaattgtactttttt

SEQ ID NO: 836298 - DNA, 456 bp, Homo sapiens
atgaactgtaactgtatcaatatcacaaacataatatcgagcaaaaagatgaaattacaggtagatgcgtacaataggatarcctttatgtaaatgttgaaaacttgcaaaacaattatatataaaatcagatatggatatatgtgtgcattgtgcattgacaatgtatttgtatctgtataagtggcaggtttaggatagaaaataccttagagcgggcagagaggtgtgtgagggaagcaaacaccatgcaagttatatggaggtttcagttctatttgcaatattttgtattctatttcctctgagtattaggtatatgggtgattattctgtatatacacatacacacacacacacatacataaacatacacacacacgtacacatagacacacacacaaacacacatatacacacatgcacacacatacatacacatatacaaacatacaa

SEQ ID NO: 836299 - DNA, 584 bp, Homo sapiens
gcagctgaaggcaaagacagatccccaaaattaagggtgccattttataccagatcctggatccccaagaggagggaaatactttgggagaagacagcgcagtgcttttaccgactgtgcatttatttcattgcgaggcaacccaaagcccatcggcccatttaggtggtttcagtttaagaaaattaaaatacaatttatttcacataagaagagaaaaaatattaaaggtccctcaaggcttcccaattgtaaactaggtaattctcaattactgaaaaaaagctataaaatgtcagttattcagatttattttcaaaatagctaaaacagatcatgatgtgttcttcactattagacaatgaagacatcaaaatatatttaagcgtctactatgtgcctagcactgtatataaaatacatgttttctatagtataaaagttaatataaagtacctaygagataggtagaaaaaggtgacatagcaagtctctacccataaagatgtcttttagccttgttgcaaagtctagaaacccttatgaaatcatttgcagatgactcagcaaataatgaagtcttc

SEQ ID NO: 836300 - DNA, 566 bp, Homo sapiens
gatccccaaaattaagggtgccattttataccagatcctggatccccaagaggagggaaatactttgggagaagacagcgcagtgcttttaccgactgtgcatttatttcattgcgaggcaacccaaagcccatcggcccatttaggtggtttcagtttaagaaaattaaaatacaatttatttcacataagaagagaaaaaatattaaaggtccctcaaggcttcccaattgtaaactaggtaattctcaattactgaaaaaaagctataaaatgtcagttattcagatttattttcaaaatagctaaaacagatcatgatgtgttcttcactattagacaatgaagacatcaaaatatatttaagcgtctactatgtgcctagcactgtatataaaatacatgttttctatagtataaaagttaatataaagtacctatgagataggtagaaaaaggtgacatagcaagtctctacccataaagatgtcttttagccttgttgcaaagtctagaaacccttatgaaatcawttgcagatgactcagcaaataatgaagtcttca

SEQ ID NO: 836301 - DNA, 485 bp, Homo sapiens
gttcacaagttttttgttaagtcatatcagttctgaaattaaaagcctgtccgcctctcactcttctatttcaagcagctctatcaatccccactagggtaacaacgggatgtacaatcccaggtacagaccacatgtcactggacattggtataatttgaatacaccaacatctgtcctctttgttaacagtgccccagtcttcacaagaggaaaatgcctcatctcatgggatgtattcttaatgaagggtaattcgaggaaccattttacttcatggaagctgcatctggtccctctcctacccctggcacagccagctagtagacaggtgattcagcaggggctgcatggaggtctctgcagcttatgtgcggataacgagaggaactattgaaggaattcactgtgagggcgggagagagttgctgagaggctgctgtgyccacacgcagccaccaacctccatcagaatctgcatggcc

SEQ ID NO: 836302 - DNA, 557 bp, Homo sapiens
tgaaaaaaaaaagcctaggagccctctgtttcctagttttaattttccgcaaagatggccttttgtctggtttcgtctttgcccacgcgctcatttcctgctcttctcccacatttattaagtagctattgaaccctgcttgcatcgctctgaaaattgcaaattccattgaagacatgagcagcttccaatgctggtacatctaaacctctttctggttctttgttttctaattagctgaggtttgggccagctttccttggagaatcactgctgttgtatgagttgcagggaattgccacccccaagatgccccccccacctgctccccatcaaccaagctggggacctcactggtaagtttgaggtagggtctggggtaggatctggggcctaaaccatgcccatttttacacacagaggatgrcagaattttgcgactggtgaacactaactgtgtgttagtagttaataatgtggtagtagttaagcgtgtaggctctggagacaggatgcctgggtcctctctacacctgatcctcaaccacaaaataggg

SEQ ID NO: 836303 - DNA, 553 bp, Homo sapiens
gcctagtaatcccagctactcaggaggctgaggcatgagaattgcttgaacccaggaggcggaggttgcagtgagccaagattgtgccactgcactccagcctgggcaacaagagtgaaactccgtctcaacaaaaaaagaaagaaagaaagaaagaaagaaagaaacagaccctctgccctgggtgcaggcctgcctgcctcccagatcccatctcccacttcccgtcttagaccctgtgtgggacaccgggcaccgtccagggcaggcctccctctgcccgccagctccacacaattcaacaggcggcgtcaaggcagcacgaccttattccagacactgtgcacagcatgaagcttcactcacgtttgttactttgccttctctcaaatctacgtgactctagttcacctaaaatgtgactgtgccctgtgtctgagtcagygtggattccactgtgcgctgtcgggaaggggcagtgaggcccgttgtcacccacaggcagtgaagtttcctgtagaggggagtctgtcatcctgagttcctgcagggt

SEQ ID NO: 836304 - DNA, 599 bp, Homo sapiens
tatttagtaaaaaattatggaacctgaattatttatcattaacttattattgatttaaraataatgtggtttatagatagcagttttttaatagcatctgatttgcaagatgtataaataggtaaattcttaattatatatagtttatattaaaggtaatggacacgtcaatgaatacttaaatatcttaattttttattatttagttttttttaattataagctccatgttttttttaatttattattattatactttaagttttagggtacatgtgcacgacgtgcaggtttgttacatatgtatacatgtgccatgctggtgtgctgcacacattaactcatcatttagcattaggtgtatctcctaatgctatccctcccgcctctccccaacccacaacagtccccggtgtgtgatgttccccttcctgtgtccatgtgttctcattgttaaattcccacctatgagtgagaacatgcggtgtttggttttttgtccttgcaatagtttgctgagaatgatggtttccagcttcatccatgtccctacaaaggacatgtactcatcattttttatggctgcatagtattccatg

SEQ ID NO: 836305 - DNA, 631 bp, Homo sapiens
gaacatattatgctattgctaattaatttagaaagtcagtggaattgctttgtgattttatcgttaatgcctatcaaggktcatacatttgccaggcattttggaagtactgagcaaaaagagataagcaaagagacattccctggattcagagtgctggtggtcagcctacagatatacaaacaaatccttaaagtgttcaaactattaaacatactgtactacagatgtataggcagtatggactgacaagcaaatttaccatgaagattaagcttgaggatctctcactcgtatgtgtcacttccaaagtttagtatgttgcctccaagaacatgaaaagaagcactaccttggccactctctgacagcctgaggactgccccaacctggtgattacatctaagccagtggtttgcaagtaggggacaatttttattctcagctaatgtttgccaatgtctggagacattttttattataataactcatggggcaggagtgccattggcatctagtggtagtggtcaggactctgccatacattgtgcaatgcacaagacagccccctatgacaattgattcttgagtttaaaatgtcaataatactgtggtccagggacaataagaa

SEQ ID NO: 836306 - DNA, 517 bp, Homo sapiens
atgttttggttattgatctcaacatatacataaacaattcttccaaaactgcggcttctcagctcccagmatcattttcttccaatatttctgtcttctaccttacacaagccaatcatttgcagtatgatactttcatttctaaagaaatatgtctttttgtgataactcccctgaataatagtaccaagtttattaataacttattaaatatatttcagtggcacattcttatatctcatgcaatgagtaattaaacatcagaccttgtcatcttctttaattatttaaaagtcatggcagaataaagtaacattgtatcttttttaagcttcaacattatgcctggtataaaatatgtgttaaagttctatttatcagttaaataaatgaattattgattaaatgaatgtaaatgaaaataatagttcccagaagagaaaaattacttctgattccatacatagctacacacacacacaaaagtatgtgcatatattcacatctctcaaaatag

SEQ ID NO: 836307 - DNA, 658 bp, Homo sapiens
tgcctcttctaataattattcaacaaaccattatggattatgaacctgaaggggtgttaattattagtctgctttaggtgytcacatttcttaccttggccctgttggcatatgatataaactcagaaaacattctttttggattatgtcttctttgttatgttatgtgtaccctaggcacagggattttagtctgtttcctttttaatattttacctgataattgacataaagcatccatgcagtaaatgtttgtgaaatgggtgaatgattaatgtatgttacacttgatacagaatgttaaatgctttaaaaagtaaccagcaagctactgcataagaaacactatgaaaaagatgattagatgataataatagtcaagacaaacattgttataagtaagatttatcttggaaatcagttaacagcaagaacagtaaaagtaaataagctgatgtatttgctttattattacaatacgtttcatcatttaacatcttccagagtatccttaaactaactgtattctggaaatgccttctaaaacattaaaataaaaatgctttccacaccaccttttaaaatcattaaaattatttgagaggctctgctgttttaaacaccttttaattaagtaagcctatggtcacttgtctca

SEQ ID NO: 836308 - DNA, 632 bp, Homo sapiens
aatcacaagcattcctgtataccaataataggcaaacagccaaatcggagtaaactctcattcacaattgccacaaagagaataaaatgcctaggaatacaacttacaagggacgtgaaggacctcttcaaggagaactactcaagaaacgactgctcaagaaaataagagaggacacaaacaaatggaaaaacattccacgctcatggatagaaagaatcaatatcgtgaaaatagccacactgcccaaacattccatgctcatggataggaaagattcaatattgtggaaatggccatactgctcaaagtaatttatagattcaaatctattcccattgagctgccattgactttctccacagaattagaaagaaactattttaaatttcatatggaacaaaaaaagagcccatatagccaagacaatcctaagcaaaaagaatgaagctggaggcatcatgctacctgacttcaaactatactacaaggctacggtaacaaaaacagcatggtactggtatgaaaacagatatacagaccaatggaacacagcagaggcctcagaaataatgccacacatctacaaccayctgatctttgacaaacctgacagaaacaatggggaaatg

SEQ ID NO: 836309 - DNA, 573 bp, Homo sapiens
ccttgaagggggatgaaaatgtgctagaactagattatgacgatggttgtgcaaccctgtgaacrtgctaaaaaaacatacaattaattttacactttaaatggatgagctgtatgatgtgaattctctgtcaataaatgcaaagctccttttgaaaaaatcaaacacaaataaaaacagcattggatattgggtgcttccctagtgacaagaattactgtattctcagaatacgggtccaaaaggggagaagcaacttgtcctaggccccactttgagccaataatgaaacaagatccctaagatttctgcttccaggtgattccctagactccagtaacattggcaaatttcttaaccctttatggttcaaatttattttttattttttttgttggtgtctttttccctcagtgatggtagtcttactgacacatttgcccagaaacatttctttaaggtgatataaacggaagacaggataacctaaaggaagtaggcaatatcaacctacagaagtctatttccctggacaatagtaagttacaaaacctgggcatggtctaaatagtt

SEQ ID NO: 836310 - DNA, 550 bp, Homo sapiens
gggcgacaagagtgaaactccatctcaaaaaaaaaaaaaaattgtctattcatgtcctttgcccactttttgatgttattatttgttttttccttgctgattggtttragtaccttatatattctaggtattagtcctttgttgactgcatagtttttgagtattttcttctactctgtgggttgtctgttaactctgctgattatttattttgctgtgagtttaattagtcccatgtatttaacttcatttttgttgcatttgtttttgggttcttgatcatgaactctttgcctaagccaatgtccagaggagtttttccaatgttgtcttctagaatttttacagtttcaggccttaaatttaagtctttgatccatcttgaattgatttttgtataaggtgagagaggaggatccagtttcattcttgtatatgtggtttgccaattatcccagcaccacttgctgaatagggtgtcctttcccccactttgtttttgtttgctttgtcgaagatcagttggctgtaaatatttggctttatttct

SEQ ID NO: 836311 - DNA, 623 bp, Homo sapiens
aaactcatgtgctcatacacacacagatacacatacagacacgcaaagcatttgcctaaattaacattttaaaattaacagaattaacccaaggattaggtttgaagattccatccattaattttacatagccttaatctaagcaaaatgtatcaatctaagcagagtcctacaatgtatgcataaaactgccatatctgggtaacttaagggaaaattctattgttggtttccctgtatacaattaaaccatttgaaaagtagttgtttcacacacacattctttttacttatatatttttattttcctaaaggctatgttgagattaggcagagcatcctaatgtgtggtctatggctacgccagcactaaaatcacttttgacttttaaccttttcaagttttgctgaattcaatatttcaatcaaaccctgagaaaatcagggttccacaaatgccagcccttcctctagaattatactggaaaataaacttttaaatatgtttaaactgttttaaaatttgtatataccaaccaatatattartatgcaacttcataaacactttgaacatgtataaatggctgtttcaatttttcatctcagcttaatatgtcatgt

SEQ ID NO: 836312 - DNA, 595 bp, Homo sapiens
aggccttagaagcttcatgttttcctaatcctgtctctttatgggctcaacccggaggttggcaaatgaaaaatcttgtggttactggattttcttctgcctgtctgtgtagytatatatgtgttgtctgggtgatgtctataaaaagagctctaattaattaaagaaggataggtgcttggatcaaatattgaaagggtagataaaagctgtgtggtaccttttagttcacgtgactttaatctttgagacatagaaaaagcctaaagattattggtaaaatgcagatgtcaaaatgtaaatttttgcctggggttaaaggattgttttgaattagataagataaagctagaagttcaaacaagttgtgaaaggattgtaaaaattaatcttgcaaaagaaattccaagtgtgaacatattaactaaattcaaaagcatataatatggtttttctgtaaattgagcactgaaataaaagcacaataaggtactcttaaggcactaatctctatggcaaaagttttaaggggttataaaaggtttctgctttttcaagaatttgagtcatcattttggcaaaataaataacttat

SEQ ID NO: 836313 - DNA, 623 bp, Homo sapiens
aaggtcaacataaaataaaaaatcttaaaggcagctagagagaaggggktaagtcacactcaaagggaactccatcaacctaacagcagacttttcagcggcaatcttacaagtcagaaaagatttggggcctatatacagtatttttaaagaaaaaaatccaaccaagaatttaatttccagccaaactaaacttcataagtgaaggagaaataaaatccttttcaggcaatcaaatgctaaggaaactcattatcaccagacctatcttacaagaggttcttaagggagtgctaaacatggaaacagaaggttgatacgtgctgccataaaaacacacttaagtacgtaacccactaacacaataaagcaattatacaatcaaggctacataagaaccagctaacatcatgatgacaggatcaaatactcacatatcaacattgaccttgaatatacatgagctaaatgcccctcttaaaaggcacagtgtggaaatttggataaagtagcaagatgcaactgtatgctgtcttcaagaggcccatctcacatgcagtgacacccacaagctcagaatacaggaatggagaagaatcaaacaaatggaaagcaaaaaagag

SEQ ID NO: 836314 - DNA, 594 bp, Homo sapiens
acaaaaggtggacttgtgacgattaatttttgtgtcaacttggctgcacacgaatgcccagatatttagtcaaacattattctggatatttctgtgaaggtgtttctagatcagattaacatttacatcagtggactttgaagtagactaccctccataatgtggttgggccttatctaatcagctgaaggatttaatagtaaaaagattgatttctgctgatcaagaaggaattctgacactggactgccttttgactcaaactgcaattcttcctggttttccagcttgctagcctatcccatcaggttttggactaaccactcctgcaaaattgtgtgagcaaattcttaaaaaccaaacaaaacatcctgctggttctgtttctctggaaaatactgaataatttatcatcccaacaattaaacatttaaaaatcttcatatttgtaacacatacagtttgatgtctctatccagttactgcataccttctgtaatatgaaacaatgytatgtttttattctcgtttgttgtttctgtcctgaatcttattatgcagtcagtatactaccatcaatctctaagtatatat

SEQ ID NO: 836315 - DNA, 594 bp, Homo sapiens
catccacatgcatatgaatgaagttagaccttaatcttacactacacacaaaaatgtactcaaaacagattacaaacctaaatgcaatacatgaaaccataaaactcctggaaggaaacataagagaaacactctttgacattgacctgggcaatgatttatttttttttaatatatgtacaccaaaagctcaggcaacaacaacaacaacaacaaacacgtggggatacatcgaaccgaaaagcttctgcacagcaaagaaaacaatcaacaaaattaaaaagcagcctattgattgtgaaaaaatattggcaaaccatatacctgacaagggattactatccaaaatacataagtaactcgcagaactcaataggaaaaaaaaagtaatgtggtttaaacatgggcaaaggacctcaatagtcatttctctaaagcacatataaaaatgagcaacaggtgaatgaaaaggtgctcaatatcactaatcaccagggaattgcaaatcaaattcacraaaagataccatctcacacccattagcatggctgctattaaaaagacaagaaatagcaagtgttggcaaggatatga

SEQ ID NO: 836316 - DNA, 575 bp, Homo sapiens
gtgtctttataacagaatgatttatattccyctgggtgtagacccagtaataggattactaggtcaaatggtatttttgtctctagatctttgaggaattgccgcactgtctttcacaatggttgaatcaatttacagtgccatcaacagtgtatagcattcccttttctccacaacctcaatagcatctgttgttttttgacttttaataatagcaactctgactggtgtgagatggtatttcattatggttttgatttgcatttctctaatgatctctgaagctgagtttttaaattagatcccatttgtcaatttttgctttcattgcaattgcttttgaagtcttcttcatgaaatgtttgcccatgcctatttcctgaatggtattgtctaggttgtcctccagagtttttatagttttggtttttacatttaagtctttaatccatgttgagttaatttttgtatatgatgtaaggaaggggccagtttttatcttctgcatatggctaaattctgccagcaacgtttattgaatagggaatcctttccccattgattgtttttgccag

SEQ ID NO: 836317 - DNA, 575 bp, Homo sapiens
gtgtctttataacagaatgatttatattcccctgggtgtagacccagtaataggattactaggtcaaatggtatttttgtctctagatctttgaggaattgccgcactgtctttcacaatggttgaatcaatttacagtgccatcaacagtgtatagcattcccttttctccacaacctcaatagcatctgttgttttttgacttttaataatagcaactctgactggtgtgagatggtatttcattatggttttgatttgcatttctctaatgatctctgaagctgagtttttaaattagatcccatttgtcaatttttgctttcattgcaattgcttttgaagtcttcttcatgaaatgtttgcccatgcctatttcctgaatggtattgtctaggttgtcctccagagtttttatagttttggtttttacatttaagtctttaayccatgttgagttaatttttgtatatgatgtaaggaaggggccagtttttatcttctgcatatggctaaattctgccagcaacgtttattgaatagggaatcctttccccattgattgtttttgccag

SEQ ID NO: 836318 - DNA, 628 bp, Homo sapiens
cttttaaaattattttgatatatttaaactagrttaaatatccctgaatcctttttaatgaattgttagctttaaaaagttatataaaatggcttttgtaatgcagaataaaagcatgacatataacttttaataataagtaggtcaaaagtcttgaaaaggtgaataaggagcaaaatgcctcatttaattataaatgttataaaaggtattaatatttaaaaattgtcagatattggcctgagaatacaccatttttaactaaatagtatacaattcaaggaaacctctctctttttctctctctgtcctgctctaagaagatattcgtgtggctctatgtatcatttagggttatggtatgtcaaatatcctgagttttaggtatgattatcaagtcatacgcaaaattgtgggatggattgggaaagagggggcatcaacagatatttattgaacatgattgttaaaacacagagaaaattcaaaatggtataaaatttgacacatataaaataagggagatgtcattgaccgtaattggaaactgagaagtaacaggttttttgaggcgaggaaattaaattttgttacattacatttagtgtgaagtgactatggaattcca

SEQ ID NO: 836319 - DNA, 646 bp, Homo sapiens
ccccagaaagtaagaagtagcaactactctagacttattggtaagacagytacatgtcatacgctgataaataaatctgacataaattcagggaacttttacctcagtaaaatccctgagtccagtggtgtggcacctgtcaaaatgtcttttctaaggtgaaggataaattgtttcattaagcctctcctacaagctaaaaggaaatacaatgtccagtggaattctttgaattttggaggcaacatacttagatatgctactgtggcccatttaccaagtgatctaaaaaggtgcttgtttttagtgcaacacagaacaagaaaaggctctgcaataggtctagccttccttgcaagccactctgtcacttggatcatatgatccatccagcagatctaatagtgcctgaagtggcagtagcagacagggccacttcagaggcttaggcatgtccctagatgtgaatcacagtgtagactctaaacattttacaccaaaggcctactactctgtggattcttactctccttttaagaaactgcttttggcctgctactaggccttagtagatgctaaacacttaaccacagagttactatgtgacctgagctgcctatttgaactgaatgttgtctgacacaac

SEQ ID NO: 836320 - DNA, 550 bp, Homo sapiens
aaaatctatttccaaagaggtatgatccttcgaccattatgtacttgttaaatattttctcttgtattagtttttattatggtatcttaacaaattactacaaatttagcagcctgaacaacacaaatttattatcttgcagtttccgtaagtcagggactcaggtaaaaattaattggtactctgcacagaaactaaccaggctgatgtcagctagaagtgctatctcatttaaggtgggagatcttcttccaacctcgttggttgttggtagaattcagtttctagcagacacaggattgagacccttacctcctagaggttgcccaccattttgtatcatttggccctctctcatagcatggcagttttctttctcaatcaatctaagatgcccataagggagcatcctctgtctytgactttcagacactcttttaatggggtcacttaattcattcaggaccccataggattatcttccttttgactgacttaaagtcagctgactagagatctaaacacatatacaaaatgttttcacatttgc

SEQ ID NO: 836321 - DNA, 630 bp, Homo sapiens
ctctggaaagactgtcagttcctcctgagttcagctcatgcatcttaatgcagcatcggctttcctgtagacsaccacatttcaggccctttgaaaaaactcatataaaaaaagacgtgatgttcaagaaacggaggtggcttgaataatttaacagctacatatagccctatgaaatgttaaaggggcaatagggtacaatggggagttttacagagactgtagcatggcatgcctccttctggcacagtcggctccttggtgctagtgatagttgatatgttatgatggtgaaataataattacaatgaagttaataagtactttaatagaagctaaactagcttactgatattcaggcctttaaaaaaataaaagggttcaaataacaacattatttggaacatttagctgacattaaaaatcattttctagaacatcccgtctttgctactttaaaatacatttgttatggataagaactgttcagccagctatttctttctttcaaaaatatgataggttttataatcgctttccaaagtgaaaggtaaaaagacagatgcaaagtctcttaggttgtgctcacatgattagaagaatcaatgtttataattcctcatatggtaa

SEQ ID NO: 836322 - DNA, 470 bp, Homo sapiens
tgcatgtgacttagtgagacaccagctagggtagccaagggagtgcttgtrtcacccttcccccaactctaggcagcacagttcacagatccaggagagacacttttcttctgtttgaggaaaggagaggagacagtaaaaaagactgtcttctaacttggataccagcttggtcatagtagaatagggcaccagacagagtcctgaggctcctatttcaggccctagctctgggatggcatttctggacacatcctaggctagaatggaactcactaccttgaagggaatgtcctagttctggcaagattaatcacctgctgactaaagagcccttgggccctgaataatcagtagtggtagccaggcaggactcatcattggcctcaggtaagactcagagccatgctggcttcaggtgtgacccagcatattcccagctgtggtggctacaggaaaagacttctttt

SEQ ID NO: 836323 - DNA, 618 bp, Homo sapiens
ctgagggggattcagttgaatctcccaggtgcttatkccttgctgcaaggcctctggaaactcctgctttatgaatctagaatcaatgaataaatatcctgacaaatagctacttacatgtaaactctagatgttatctcatttctctacactgcatgagcactgtgttgtatctttcggctaataatatagacaaactaagttaatgattattcttgcaaagatgcaaagattttttttaatctagtatgaactaaaagccataattaatcaccgagaaggatagcctcaacttttttaaactgactgtaaactgattacctagtgccactcggctaatacactggaaccagcccttggtagacagatgtgcccttccaaacagatatgcacagtaggcctgggctcatcccaatttggagctactcccaactactcggatctttgccttggatcagcccaacaaatgagcatcttatggaagatgaggccgctcacaaacccacaatgaaatacatggcttgggccctctctaatgaattactcatgagtcaggcatgacacctgagtctgggaggctcctctcataaagtcggtagtaaccttaacatagaaaga

SEQ ID NO: 836324 - DNA, 550 bp, Homo sapiens
gaagcacttgtacccaagagtggttgagaggtaagtggagaggaatgcagaasccaccttgggcaagtctcttctcttcaaacttgagttcctcatttcagaaataaaagtgttgaatgtgatatttcagggtccttccagagctgatattctgtgatttctagttattaatctgcttgagtgaaatggcttactggaagattcgaacttgtgcctgtctggaatcctagagtcctgggtcacagggtgttcaatcattccttcactcactcatgcattcatccactgaacgtttctcaagtgccttccaagtgcctgttcttaggtgctggaactgtcgagatggatataacacagttgttacctgaagaaactcagggtgcatctggtgaggcacaaatactttatgaggcagtaagagtgttaataaagatgagaacacaaaggaggaaatacctgtggtaggtggggaaggttttcccaaggcaaccaaatgagagtcatgagggaccactcatgttaagaatttttgttcattttctggttgata

SEQ ID NO: 836325 - DNA, 637 bp, Homo sapiens
actcactcatgcattcatccactgaacgtttctcaagtgccttccaagtgcctgttcttaggtgctggaactgtcgagatggatataacacagttgttacctgaagaaactcarggtgcatctggtgaggcacaaatactttatgaggcagtaagagtgttaataaagatgagaacacaaaggaggaaatacctgtggtaggtggggaaggttttcccaaggcaaccaaatgagagtcatgagggaccactcatgttaagaatttttgttcattttctggttgatacaagggagtgatcaaaagtagtttctaaaagcatctcacttccaaggagagttcaggataagaaaatacccaaggaattgttcatattcataacttggtggaatgtgacagcagaaattgaaggggctcccaagaagattccatgggctcaacagataatcattccacttgtcttgcaccgttaacttaacatagtaacatgctttaacatgtcgtagaattcaatgtcaaatgctcggtttaggtcctaattttcaatagcgtaaaaatgcagcggggtaagactttgaacttagacctaggccaaatcccagtcttatgtaacctttggctggcttctttacctgtctg

SEQ ID NO: 836326 - DNA, 645 bp, Homo sapiens
cctcttttccattatattctttggtttatcctataataacatgtgtatgcttgcagagtttctttatgcatatacaaacaggtgaaaatatatttttattttctcccccttttttgcacatatatactgctgtataccttacctttttcacctaacaacataccttggagatctttatcagtacataaaaaatcctcactttcttgtatagctgccctttgtgatagggcatgataataccacaatttttaaaaatcgtctgctattgatgggccttcagtttgttttcaaacttttgctaatccaaatgatgttgcatcaaaaaaacttgtgcatacattattttgcatatatgtaagtattcctgtgggataaactcccaaaagtgtaactgctaagtcaaagggagtacgtggttgtgatattgactgatttggcaaattgccctctgtaagtgttgcattaatttataccaccaccaggagtatctaagagtgtcttttccccacagctttgccaacagagagtgttatcaaatttttggaattttgtcagtctgataggtgaaggttatctcggtgtggttttaaaatcatccttattgggctatgattttaatmcaacagaatggactcattttagtca

SEQ ID NO: 836327 - DNA, 546 bp, Homo sapiens
aggaccctcttggggcagcagagcaagggctggctttgagagagagcctccacttttttkttttttttttttttttttttttttaagtagagacggggtttctccatgttggtcaggccagtcttgaactcctcacctcaggtgatctgccctcctcggcctcccaaagtgctgggattacaggcgtgcagaccgcgctcggccagggcttcactttcaagctcagtgctgctctgaggggtggacacagccctgatgtcagtagctgaagacctgcctggccacactcagcagcagttagccttctcctcccgcgccccgtgaacaaggctgtaccctgggaggttgggctctgtctgaattccatcacaggtcctctcctgggccttgccctgctttgttgcctccttaggaggatgtcttctggtttcctaggaagggctttatatcttaacatccaccctgcattcaaaacccaagttatcaagaccacagggcaccacaaccctcctcttggccttgctgtttctattcttcagtgactcc

SEQ ID NO: 836328 - DNA, 613 bp, Homo sapiens
gtgacagagttagactctgtctcaaaaaaaaaaaaaaaaaaaaaaaagtaaaggcagtgtcttttgtctttgttcacaaagctcttctttttttgaggaaatgcttctgtctcacagcaatacaatcatgtggttttgatgggttttctaaatcaggaccctgctctgtagtgggcacatgatattccagacattctaatgtcttatttatctggctttagcgagtgttccagacaggggcatgcatcccaagtcagggcaattagagttttgcccaggatttacatttggatatggaggagaaagtgctttgctttttgcattatggaggtgggacagacgttaactgagtaatattatctgataattcccctgccaggtggaaaaagcccacctacaggaagagagtaagtccagaacaatgaaaaaaactaagttgaaagacctaagaagctcatttgagaacctgtatctgtcatcctgaaaccagttacacccygaatttaccagttacacaagccaataaactcttttatgctcagactattttgagtttctgtcacttctaacagaaagcatgctggctgctacaccacaaataaagagtaaatag

SEQ ID NO: 836329 - DNA, 613 bp, Homo sapiens
gtgacagagttagactctgtctcaaaaaaaaaaaaaaaaaaaaaaaagtaaaggcagtgtcttttgtctttgttcacaaagctcttctttttttgaggaaatgcttctgtctcacagcaatacaatcatgtggttttgatgggttttctaaatcaggaccctgctctgtagtgggcacatgatattccagacattctaatgtcttatttatctggctttagcgagtgttccagacaggggcatgcatcccaagtcagggcaattagagttttgcccaggatttacatttggatatggaggagaaagtgctttgctttttgcattatggaggtgggacagacgttaactgagtaatattatctgataattcccctgccaggtggaaaaagcccacctacaggaagagagtaagtccagaacaatgaaaaaaactaagttgaaagacctaagaagctcatttgagaacctgtatctgtcatcctgaaaccagttacaccctgaatttaccagttacacaagccaataaactcttktatgctcagactattttgagtttctgtcacttctaacagaaagcatgctggctgctacaccacaaataaagagtaaatag

SEQ ID NO: 836330 - DNA, 493 bp, Homo sapiens
aaacctctaagagatgtttgaaatttgcatttagaccaggaaatgtgtggtcttataagacatcctcacaaaaacgtaggactaggagttctcttaagatcrtctaacaattatttgagtgataaagaacactaggccaggcccagtgactcatgcttgtaatcccagcactttgggagaccgaggcgggcagataatctgaggccaggagttcgagaccaacctggtccaacatggtgaaaccctgtggcaggcacatgtaatcccagctactggagaggttgaggcaagataattgcttgaactcgggagttggaggttgcagtgagccgagatcaagccactgcactccagcctgggcaacagagcgagactccatctcaaaaaaaaaaaaaaaaaaaaaaaaggccgggcgcagtggctcacacctataatcccagcactttgagaggctcaaggcaggcggatcacgaggtcaggagttcaagacaat

SEQ ID NO: 836331 - DNA, 493 bp, Homo sapiens
aaacctctaagagatgtttgaaatttgcatttagaccaggaaatgtgtggtcttataagacatcctcacaaaaacgtaggactaggagttctcttaagatcgtctamcaattatttgagtgataaagaacactaggccaggcccagtgactcatgcttgtaatcccagcactttgggagaccgaggcgggcagataatctgaggccaggagttcgagaccaacctggtccaacatggtgaaaccctgtggcaggcacatgtaatcccagctactggagaggttgaggcaagataattgcttgaactcgggagttggaggttgcagtgagccgagatcaagccactgcactccagcctgggcaacagagcgagactccatctcaaaaaaaaaaaaaaaaaaaaaaaaggccgggcgcagtggctcacacctataatcccagcactttgagaggctcaaggcaggcggatcacgaggtcaggagttcaagacaat

SEQ ID NO: 836332 - DNA, 619 bp, Homo sapiens
ccaggtgatttgagatatacaggtgaaccaaatgaacaaagacagatgataaacartcaccataatacaatggtaatttatataatatcccagaagagacaaaatgctgtggcaacagggaacagtggagtagggtagtgggggaaaaagaaaggcactggttaccatttaaatagggaggtctgggaaggcctcactgaaatgggataatttgagcaaagatttgaagaagtgaggggaattagctatgcagatatgtagaggagaggtttctaggtagagaggagctgcagccaaggcatcattgagggcagcaagaagccattatgccggatcagggatgagaaggagagctctaatggggacagttcaaggagggcctggtggcctttatgggtgttggctcttcctcagagggaactagtgaaccattgcagggtattgggcagagcgctgacatgatctgacttatgttttcagagggtcatgtgtttggaatcgacatttgaggaatgtctattccatgtaattacatggaatcacaaagagtctatgacctaagtgagggagaatggcttgagccagtatggaagcagaagaaggagtgagcagtggttag

SEQ ID NO: 836333 - DNA, 623 bp, Homo sapiens
  misc_feature 1, 2, 3, 4, 5, 6, 7, 8, 9: n = A,T,C or G
nnnnnnnnnaaacacacacactgaattttctcgcttccacagtgtgaagaaacttgtggaaggagagtatgttagttttaggtcaatgcagaacgaattctcaccaatttggggtatttaaaacaaacaccagctcacaggtcagaagttctgctaggccaagtgactgcctcctgctcagagtcccacgagggacctccaggatgggtctggctgtgcggtcgttgcctccacctgagaagggtctggcttcgatccgattcgagttggtggcagaattcaacaatgcctcagggttgtgagccccaggcccacttgtttgttctgcctgctgccgtgaggatgctctcagctcctacccgtgctgcccaggtctgggccgtgaggctccctgggtgtgcacagccagtgctggggaatctcccacaggggagcgtaatcacaggggggttcagtcctcccttatacagggctcagatgactgcattagacccagcccttagcagccgttggttcaggatacccccyaatctaatcaggaagtcgggcgggcacatcaattcgtgcttccgcccacacccaagggaggggcagacacagggcgactctctgaggggcgggaa

SEQ ID NO: 836334 - DNA, 623 bp, Homo sapiens
  misc_feature 1, 2, 3, 4, 5, 6, 7, 8, 9: n = A,T,C or G
nnnnnnnnnaaacacacacactgaattttctcgcttccacagtgtgaagaaacttgtggaaggagagtatgttagttttaggtcaatgcagaacgaattctcaccaatttggggtatttaaaacaaacaccagctcacaggtcagaagttctgctaggccaagtgactgcctcctgctcagagtcccacgagggacctccaggatgggtctggctgtgcggtcgttgcctccacctgagaagggtctggcttcgatccgattcgagttggtggcagaattcaacaatgcctcagggttgtgagccccaggcccacttgtttgttctgcctgctgccgtgaggatgctctcagctcctacccgtgctgcccaggtctgggccgtgaggctccctgggtgtgcacagccagtgctggggaatctcccacaggggagcgtaatcacaggggggttcagtcctcccttatacagggctcagatgactgcattagacccagcccttagcagccgttggttcaggataccccctaatctaatsaggaagtcgggcgggcacatcaattcgtgcttccgcccacacccaagggaggggcagacacagggcgactctctgaggggcgggaa

SEQ ID NO: 836335 - DNA, 601 bp, Homo sapiens
tttgttttaaataccccaaattggtgagaattcgttctgyattgacctaaaactaacatactctccttccacaagtttcttcacactgtggaagcgagaaaattcagtgtgtgtgtttgtgtgtgggaaggggcggccgggagccgtgtccggttacggcgaaactggctcagcagaaacacagcagctaaaatctttgaaaggttctcatcgcagatccacaatcaaaccaccccagccggaacttctgcctgtacagctgctgtcacggagcagacttgaatctcacccatggagaccggcaggcaaacaggtgtgtctgctgagatgctcgccatgccccgaggtctgaagggcagcaagaaggatggaatccctgaggacctagacgggaacttggaagcacccagggatcaggaaggtgagctcaggagtgaggatgtcatggacctcacagaaggtgacagtgaggcctcagcctcagctcctcctgcagccaaaagacggaaaacacatacgaaaggcaagaaggagagcaagcccaccgtggatgcggaggaggctcagaggatgacaaccctgctgtctgccatgtctgagg

SEQ ID NO: 836336 - DNA, 608 bp, Homo sapiens
attcagtgtgtgtgtttgtgtgtgggaaggggcggccgggagccrtgtccggttacggcgaaactggctcagcagaaacacagcagctaaaatctttgaaaggttctcatcgcagatccacaatcaaaccaccccagccggaacttctgcctgtacagctgctgtcacggagcagacttgaatctcacccatggagaccggcaggcaaacaggtgtgtctgctgagatgctcgccatgccccgaggtctgaagggcagcaagaaggatggaatccctgaggacctagacgggaacttggaagcacccagggatcaggaaggtgagctcaggagtgaggatgtcatggacctcacagaaggtgacagtgaggcctcagcctcagctcctcctgcagccaaaagacggaaaacacatacgaaaggcaagaaggagagcaagcccaccgtggatgcggaggaggctcagaggatgacaaccctgctgtctgccatgtctgaggagcagctgtcccgctacgaagtgtgtcgccggtcagcgttcccgagagcacgcgttgcgggtctgatgcgggctatcactggcagttcggtgtcggagaacgcggcca

SEQ ID NO: 836337 - DNA, 530 bp, Homo sapiens
ccaactgcctgactctctccctgacatttgtggaagatttgaatatctagtagctgcccgcttttcttctctatcgctgttcctgaaaacgctgcagatgatatctgtgtcttaaaagggatgaytgacctggcattaagtacttactacccttgaacttctcaactgcagactttacctccaaagcccactgtgccaccccattccatggcaactgtagggtgtggccttggctctgaaatcttcagctttgccttatcactgcaggctcgtagtctcccctctcactccaagcttgaaatccttcactgttgcattctcaatttaaaaatctggtctgcaccctcctctcagcacacagagctctctgcaatctgtccactgtccgtttgtctccccgcatttcttaccccacacaaacagacttgcccctttcagacatcctgaaagactgtgtttccagtgcggctttgagcttccaaagtggtgcttcttttgtcctgctttttctcttttagtttactcctact

SEQ ID NO: 836338 - DNA, 551 bp, Homo sapiens
aagtggtgcttcttttgtcctgctttttctcttttagtttactcctactcagtccttcaaacctagtctgaaagtattcatttctgttaaaagcctttccatgttccatctgtgcagtctgctttattcgctccttcttccggctcccagaatatcctttatataactcctgggtacactcgctaaggccaggaggatgtcttgctcacattagtaactgcaacacctgggacaatgtcaggaagatggtagctaggacaagccttgaggatgttttccagaaaatattaacaccagagaaactggaaaagaggacataattccaagtttaaattttttctactgtacactttatactggtttgctaataccgttagatatttttattcacccctagatagtggttgcattttatcccctactgaagaagaacactgcatggttactacacaacagtatggacartgtttgaaagttgaatggaagatgatcaaatgaggttaagctttcaagttgggaaaaagggagaaagtgggaaaaagtaagtattc

SEQ ID NO: 836339 - DNA, 551 bp, Homo sapiens
aagtggtgcttcttttgtcctgctttttctcttttagtttactcctactcagtccttcaaacctagtctgaaagtattcatttctgttaaaagcctttccatgttccatctgtgcagtctgctttattcgctccttcttccggctcccagaatatcctttatataactcctgggtacactcgctaaggccaggaggatgtcttgctcacattagtaactgcaacacctgggacaatgtcaggaagatggtagctaggacaagccttgaggatgttttccagaaaatattaacaccagagaaactggaaaagaggacataattccaagtttaaattttttctactgtacactttatactggtttgctaataccgttagatatttttattcacccctagatagtggttgcattttatcccctactgaagaagaacactgcatggttactacacaacagtatggacagtgtttgaaagttgaatggaagatgatcaaatgaggttaagcttycaagttgggaaaaagggagaaagtgggaaaaagtaagtattc

SEQ ID NO: 836340 - DNA, 645 bp, Homo sapiens
tggtgaaggtgaaacatgagagatatacatgcttttatgataaattattttgtggtcatttaaattttcaatttagcagtgttgactgtgtttaaaatgtgaatattgacatrtaagagaaaaaatgttgataacaaaaaatacaaaacaaagcatgatagtgtgaatggcttttctgaaacctcagttgttgccttagtttcaaaaaaaattaaacaagagacaaacacaaagaagatgcagcataaagtaatttattgcaaaggagtaagtctattttaaaggttaggtgcagaatacccagtacatcttgagagagaagggattcagggtgtgttgcttatggaatgagaaagcaaagactggaactagggacttttttatgggagtcttatataattatttataaagaggtggaaagtggtgttattagtaagcatgttctggatggccctcttgatgcacggacacagtagctgtacatgcttgttcatttttcacatctcactagcatcttaaatctccacccacaggtgtgctttttactattataatgagtaaaaggtcagtttgaggaaaggtaaaatcaaaatgtgcatgctgtttacaggggagtttctctattggagagagctttgcttgaat

SEQ ID NO: 836341 - DNA, 597 bp, Homo sapiens
agaaacagaggaatgggttgccacatatgtttagttgaggatcaggatcctcctgtgtataaagacttttacatttattattcttagtacaaagcagtatttttaagatgtggacatgttaattcaaattaaagataaatcatttttattagtatgccactgtggcaaaacatctgtataaagttcatgcaatggtctgtttcatactctcccaaaataaggacaaatatgtatgcactgctggatcttagttttttgttgttgttgttgttcggtgtatttttttgtttatttacattttaaaggattttttcctaatttatgataatgttaatctacagaaagcttaccaaaagctctattttactacattttttaaaaccaaagtccaaatactcaaacattgaaagtgacattctcgattaccatttttcatttgatgtatctacacttattactactgcattgcagtttttttcttacgtggtgcaaggttataaaagtgccttccagttgatttttyaggtaacagtagaatctgttttctcagacaataacaggagaattttggatatattacgtttcgagttactacaa

SEQ ID NO: 836342 - DNA, 629 bp, Homo sapiens
ttgcgacatgcctgaacccatcacctatgtgatttgactcttttttttcccctgggccctgccctcagtggggattgtgacatrtcactgggcccatcatttccatgatgtgacttttgtgttctgctttgaccctgcttgcaggaggattgtgacatataactaggcccagcacctgggtgatgtgactctcatttcctgcctgtgttctgccaacagaatagattgtgacatatagctgggccaagcacccaggtgatgtgactcctgcctacagtggccattgtgacacatcttcttcctgggtcctgtttatgagtgggattgtaacaaatctttggccaagcaccaaagtgatgtgactctcgtttggtttctgctcacaggaggtattgcgacatatatctaggccaagtttagaggcgtaatgatagccctcatacatggacccagtcgatacaggagatttggcctctattttctaggcttagggcaatgggtaaggttctgggtgaagaagcataaggttctgggtgaggaaaggtcacaaaagattatgacaagcatattctctaaagcccttgtgtgacatttagagattacaggatccagcacccaagtgaaattac

SEQ ID NO: 836343 - DNA, 499 bp, Homo sapiens
agcaatgctccagtcctcatttgccattttctgtatgatttattttgaaaaagaggtttaattggctcatggttctaagcacagtgcttctgcttctaggaggcctcagaaatctttcaataatcatggaaggcaaagaaagaatcagttgtctcacatggcaaggggaaagcatggagagtaggaaggtgatatagagttttcagtgaccacatctcatgagaagtcactcattattgtgaggatggtacaaggggatggtgctgaaccattcatgagaaatttgccttcataattcaatcaccttatcccaggatccaccttccacattaggaaatataattcaacatgatattcggtggggacacayattcaaattgcatcgtcaatctttgaatataaagacatccacagcaggctttatccagccaacttctttgagactctttatagggtttgaggtctagagcatatacactaaaatattcatacttcaaaa

SEQ ID NO: 836344 - DNA, 499 bp, Homo sapiens
agcaatgctccagtcctcatttgccattttctgtatgatttattttgaaaaagaggtttaattggctcatggttctaagcacagtgcttctgcttctaggaggcctcagaaatctttcaataatcatggaaggcaaagaaagaatcagttgtctcacatggcaaggggaaagcatggagagtaggaaggtgatatagagttttcagtgaccacatctcatgagaagtcactcattattgtgaggatggtacaaggggatggtgctgaaccattcatgagaaatttgccttcataattcaatcaccttatcccaggatccaccttccacattaggaaatataattcaacatgatattcggtggggacacacattcaaattgcatcrtcaatctttgaatataaagacatccacagcaggctttatccagccaacttctttgagactctttatagggtttgaggtctagagcatatacactaaaatattcatacttcaaaa

SEQ ID NO: 836345 - DNA, 588 bp, Homo sapiens
tgctttagatcctgttttttttgttgttgttgttgttgtttttgttttggtttggtttggttatttaaagcataagacggatgctttgttacaaagcattcctttgggagcatgcctgcraacttattagaattaacattcatcatacttattgataggtaattaatgcagtaagaactcttccctttgtatttattagatgcaaagaagaataaatttattaaaatttggtatctacaagtgaactgcagtatagaagtcatcctagccaaaccctatgagattgggtaaaaatggtattgttagcagaacaggtgtgatgagtcaacagtgtcaaagagcatgatttctggaccaaaatatgaggggccattacagcagagtatacagtagtaccccttatccactatatgcacagaaagacatacttgacaagtttttctctgctgtcacaccacagcaacaatcatcaacaaagaaggcttctgtgaccaaatgtgtggagagtttttccccaccaacaaacaagcaatcatttctgctgatgacacaattcaattctcacaccctatctacagataacatcag

SEQ ID NO: 836346 - DNA, 613 bp, Homo sapiens
aagataatattattatggaatggttcatttgtgtgccgagtgggagtagacttgaattttctgccgtttccttaaaggaacrtgatggtaatttacttacttagatgatttaaaagacataaaaatatttaatccatagattactgattcataaacttctttacctcctcctctgtcactggcaattatattttctagattaacctaaatgaactattaatgaccaaaaactggactaattacatctactggggatggttttacttttagaggaattttcatctgtagacttcaacagtagaaaatgagcttcctccttacctgttttggtgaggagaaaacagttgtacaatacctgatttgctagattttcattaaaattgcaaagttaccaactgttatctggtggaggaaagctactttttttgcttttcctcattattcccttcataatttctcttcccagttaaagagcagtgtttcaagaactcataagcatcaaatcacctcctatatttgggtatgaacatatatatgccattacctattaatgtatattatgtgtaaatcatatatgtatatataatccttatataatattttctctggatcc

SEQ ID NO: 836347 - DNA, 613 bp, Homo sapiens
aagataatattattatggaatggttcatttgtgtgccgagtgggagtagacttgaattttctgccgtttccttaaaggaacatgayggtaatttacttacttagatgatttaaaagacataaaaatatttaatccatagattactgattcataaacttctttacctcctcctctgtcactggcaattatattttctagattaacctaaatgaactattaatgaccaaaaactggactaattacatctactggggatggttttacttttagaggaattttcatctgtagacttcaacagtagaaaatgagcttcctccttacctgttttggtgaggagaaaacagttgtacaatacctgatttgctagattttcattaaaattgcaaagttaccaactgttatctggtggaggaaagctactttttttgcttttcctcattattcccttcataatttctcttcccagttaaagagcagtgtttcaagaactcataagcatcaaatcacctcctatatttgggtatgaacatatatatgccattacctattaatgtatattatgtgtaaatcatatatgtatatataatccttatataatattttctctggatcc

SEQ ID NO: 836348 - DNA, 599 bp, Homo sapiens
acctctgcctgctgggttcaagcaattctccagcctcagcctcccaagttgggattacaggcacccactgccacgccaggctaattttttgtattttcagtagagaggggtttcaccatgttggccaggctggtcttaaactcctgatctcaggtgatccgcttacctcagcctcccaaagtgctgggattacaggcgtgagccaccacacccggcagacaggttagatttaaatcctacaaccaaacgtttcaatttccaatattctgttgcatcatccttatatgttattaaagtatcctggccatgttaacattttgtcacccttagtaaacctcaagactaaatcacacgtctagaagtttctctaaaaaattcctccttcagtcatgtattctgattttttgttcagaaaatatcatccctctatactaagagatgaagtagtggagccaaaatcattccaaactcattagcattcttgcattatgcaggccagctgagctggacttgaacctgccccttgttggctgtatgatcttaggcagtgtaggagtaggtgrtgaaagctggccagaggggcagctgtgccaggttgg

SEQ ID NO: 836349 - DNA, 592 bp, Homo sapiens
tttgattgtattatattaaaaaaaagttctccaacttagtccttttccaaaattgtgttggataatttaggccctttgcattttcatataaaygttagggtgagcttgtcaatttatctaaagcaaatctgctggcattttgactgggattgcattgaatctaaacactacgttgtggagaattgacatcttgataatatccagtctttcaatccatgaacaagatgtgtctatgtatttagccctttaattcctctcagttctgtaatttccagttcatgggtcttgtctttcttttattgaatttttccctgggtgtcacattttttccatgctgttattaaacggtatcgtgttaaaatgttcaatttctggtagtcacttgtatacagaaatacaataggtgtttgtatattgaccttactaaactcatttattagttccagtagtatttttgttgattccttaggattttctacatagacaattatgtcatctgcaaataaagagagtttcgtgtcttcctttccaatgtgtatgccttttacttattttgctcaccttatctcactgactaggagcaatgttgaat

SEQ ID NO: 836350 - DNA, 622 bp, Homo sapiens
atattgaccttactaaactcatttattagttccagtagtatttttgttgattccttaggattttctacatagacaattatgtcatctgcaaataaagagagtttcgtgtcttcctttccaatgtgtatgccttttacttattttgctcaccttatctcactgactaggagcaatgttgaatacaaactgtgagagtggatgtcctagcctcattcctgatcggaaggggaaagcagcctttaccataagcatgatggcacctctgggataacagggtgcccatctagggcatggatggccttgatcgggctggaaaaggtgccttgaattcttggtttgctgaatattaatgatcaggaatggctgttgaattttgtcaaacgatctttctttgtttatttggatgacatatggcttttctgttttggcttgttcataatttggtttgttaaccttgattttaaatgtaaaactaactttgtattcatgggataaagtccacttggtcatgatgtattgcactctctctctctctctctctctmtatatatatatatatatgcacacacacacctatatataaaatataaaactacacacacatatgtaaatatatatacat

SEQ ID NO: 836351 - DNA, 693 bp, Homo sapiens
ctgtatgccatttgatggacaatttttactctgagtgaaatgaggagcccttaaaggattttgagcagataagtgacataatctctttctggctgctattttgggaagagactgttggggacaaggatagaagcagttaggggggttgttacagtaattcaggagagataatggtggccccagcatgagatgctagaagtagccagatgctggatgaaaccaacagaatttcccaatgaactggacctgggtgtaagaaaaaaaagtcagggatgatgcttaggagagactttcaggagtttatcttaagacattttaattaaaaaatatctgttaggtcaagtaggcagttgatcattaagtcagaaattcagaggcagtctaaaagttgttggcaatagagagcatcaaaagatatgggatttaatgttatcctcaagaaagtaagggtggatagaggatagaaaagaccaaggtcacttcaacattgaaaatggagggagaactgagaaggagccaccgttatgctaaaggaaaaccaagaatgtagtattctagaaaccaagaagagggtaatcaactgtgttaartagcagtgataggtcaaatgataattggattagtcaacatggaagtcattcgggactttaacagaattatggggagaaaatagtgcataatgggaatagggcc

SEQ ID NO: 836352 - DNA, 660 bp, Homo sapiens
gcagatgcaaagaaatattatcctttagaacccatttgatcccttttttaaacccaagaaaacataaatgcaacaatagatcaatttgactgtaaatattatctaagtatgtcctttaaaagccaaaggaatgtcagatacaatttattttccaccagtgcaagctgagacattaagtggcaattctacttccattagctaaatctggcaaatatgcaactgtttaaaggcattgtcgatagccattcacaattaagtatttgtactgatgccttattaaattacccttttcaagtaggcataataaactaggagttcactgtgcagattttcatggggaaagtcagatcagtatggaatttatttagagagaatttagtgcactgagtaatgaagtaaatgtcaaatgttttgaccaaataaatcttatcttccttaaaacttttttttgaggtcaagagacacagcaaaataaaaatcccagtgattataatggtcataatttataactttattgaaacaactttaaaactttgattgttttttaaataatgaaatctgttttstttttaactgacagcattgccctacacaggggatttctactcttcctttacaaagctggtttcttccaaacattaagatctcttacagggactg

SEQ ID NO: 836353 - DNA, 660 bp, Homo sapiens
gcagatgcaaagaaatattatcctttagaacccatttgatcccttttttaaacccaagaaaacataaatgcaacaatagatcaatttgactgtaaatattatctaagtatgtcctttaaaagccaaaggaatgtcagatacaatttattttccaccagtgcaagctgagacattaagtggcaattctacttccattagctaaatctggcaaatatgcaactgtttaaaggcattgtcgatagccattcacaattaagtatttgtactgatgccttattaaattacccttttcaagtaggcataataaactaggagttcactgtgcagattttcatggggaaagtcagatcagtatggaatttatttagagagaatttagtgcactgagtaatgaagtaaatgtcaaatgttttgaccaaataaatcttatcttccttaaaacttttttttgaggtcaagagacacagcaaaataaaaatcccagtgattataatggtcataatttataactttattgaaacaactttaaaactttgattgttttttaaataatgaaatctgttttctttttaactgacagcattgccytacacaggggatttctactcttcctttacaaagctggtttcttccaaacattaagatctcttacagggactg

SEQ ID NO: 836354 - DNA, 526 bp, Homo sapiens
gccaaaattttaaaaatatagattgggtgatactaactttgggcgacttattgattaacctgtttctgatggtagaaagaattattctatcttgtgtctccgtggtgtaattttattagtgaagtgacaaaccatgcttcccagtggtgccttgaactgacttggaatgtacggtaaaatacagatttcctcaaatgaattgccaaaaccattaatctttatctaaggacccataatagtttgttctcagtagcaggtgggggagagagagaaaatgtcttccagaaagcactttggcagtcaatctggttgataataaaacttgatgaaacatctgtgattaatattaattctgattctctctttaatggataattgtgaaaaagataatttatcccatttcatttagactacagctgagtttttcaatttagaaaaagaacatttctccaygtttctcaggtatgagactatagggaaaaaaaaccaggtgcacaaaacctgccaacagacaggcaattttcta

SEQ ID NO: 836355 - DNA, 596 bp, Homo sapiens
agcacccaaaattactgcagcttcacagacatcacacacttaaaaaaagactcctggcttcctttcaaattccatcagtcaacttttatcaaccataggggaagcagaggaggataaacactgcctgcgataccatttgggttttaggttttgggtttcttccagttaagtttgcaaaagtgtgaaagtactaaagaacagaatattgttcctcattcttactatacaataaatacttccaaatatgtccttaaatgcaatcctttgtgattcccttaattaatcttgactaatccttgaaggaaccatgatagcaaaaatttagtgtctagcataaccttactacagtttccctttttaagttctcatttgaatttgataagttaatatgtactttaaaaaaatccacatcatttctattcaatggcacttgaacttttaaaaaatgtttcaaagaaattaragctagatatgattggaaataagcaaaacgagaaagagttgtcctatgtgtatgtagcacaaccctccctgtgtcctttaataaaaagcaggactctggtcattccatgatgtcactggcattccgcaccaaa

SEQ ID NO: 836356 - DNA, 663 bp, Homo sapiens
tgagatggccttctccatcgcactgggccaggatccagcaggaggagatcacagcaagtgtgcctttgagaagtttgttattaaaatgaaataaaggatggtattttgatacatagttctctgagaatacagagaaagtagtgattcattctgaccaggagatctgggaatgctgatggttggcagtgaggatgtcctctgtttttgaacaataaatgcaggaaaagaaactgaaaagaatgccaggtatggtggctcatgcctgtaatcccagcactttcggaggccaaggtgggtggatcacaaggtcagagttagagaccagcctggccaacatggtgaaaccgtgtctctgctaaagataacacaaattagttgggtgtggtggcacacacctgtaatccctgctactcaggatgctgaagtaggagaatcacttgaacccgggaggcagaggttgcagtgagctgagatcaccccattgcactgcagcctgggtggtagagcgagactccatctcaaaaaaaaaaaraaaagaaaagaaatggaaaagggatgatagagagtcagggttacaataaggtctcattacaatacagctttaaacattagaaaacaaacactgtcttgtgtaatcatacacttctaagttagacatatttc

SEQ ID NO: 836357 - DNA, 577 bp, Homo sapiens
gttcctggagttttaaaaaartcagtttttaaagataaacaaactaaaactagtccaagcactgagacagagtattaaaagatggtagcacacccaaagagcacggtgggtcttgaatagctaacatgtttcaagtagtggaggaagatgtgcttaaatagttacctatttaattgcctacttatctagttagcagtgataatgtaagctccctgatagcaggcactgtatcttacatgtttacatgaaagcaggtctttcatgtttacatcccaggaaacacaaactgtatttcctatggaaatggcaaaataaattcctgttgaatggaacaattttggtaaattctgtatgattcctattcaaattggaaagaattaaaacaaataacattaattttctttcaatattaatatgtatcacagaaattgtaaagcaatatctgacagaacaagaaacataaattcaagtaacttatagaagacctgaatttggggaatatgtcatcatatatagcatttctgtgaaaaaataatcaagagaacaaacttacacgcgatacttttaaaagaataat

SEQ ID NO: 836358 - DNA, 596 bp, Homo sapiens
atatcacccagtcacattagtgtcgttttcacagcgacaaatttagacggtttgttacgcagcaattgataastgatccaacacactctaggataagaaatggcactcattcagcacttactgagttcttagaatgcacaaccctgaaaaaaagacttgcatattaaatcaagataactatggtgtggaaagagctgtaatatttgacaggtaaggacacaaaggaaggagtcctctgctttggttagtcaaagacttcacagaaaagaaaaaacatgaattttgtcttgaaagataatccaactaactaaaaataaaaagattcaaataggtacagaaaacaatgaaggtgtagaggtgagaaatcaacaggatgttcagaagcctgtgtatgatttcatacagtaaaagtaaaggtagctgttggagagaatcaaaagatgaagcattttagactcagataaggattaagtaaattcttagtaccccattttatggattttaggtgagaatgtcagaatagaagtcagtttgtgctcttaagtctacactatactgcctctctaaaatttccaatatatttctgcagcatctaa

SEQ ID NO: 836359 - DNA, 637 bp, Homo sapiens
ccacccatgcccttgcccaattggcccatgaacaaagtgaccataaagacaaggataaaaattacacatgggttcagcaacatggattttcatttcccaaggctgatctgactacagtcactgctgagtacccaaaatgccaatagcagagaccaacatttaactccataccattccatgtctagatcagccagtcacttagtgccaggttgattatactggcatcacaggaagctcagtgttttgttctcattgaaacagacatttaccctggacagaaatttttcttctctgcctgcaatgcttctgccaaaacaaccatctgtggacttaagagaaacacatattcactactgtgatattccacacatcattgttactgaccaggaaacttcttttgtagcaaatgaaatctggcaatgggctcttgcttatggaactcactggtattaccacatttcccatcaccctgaagcagatggcttgataaaataatgaaaccttttgaaaattcagttayagcacagtgtaggataattgtatggctgagataatgtcctcccgaaggtggtacatgtcctgaatcagcaacaaaaatatggtaccatttctccaattgctaggatccatggctctg

SEQ ID NO: 836360 - DNA, 385 bp, Homo sapiens
cccagctacttgggagcctgaggcaggagaatcacttgagctctggaggcagaggttgcagtgagtcaagatggtaccactgcactccagactgggtgacagagccagaccccaccmcaaaaaaaaaaaaaaaaaaaaaaaaaaaaaaaaaattaattcaagatggattaaagattaaaatgtaaggccaaggactatagaaatcctggaagaaaacctaggtaataccctctggatatcaaccttggcaaagaatttattactaagtcctcaaaagcaactgctacaaaagcaagagttggcaagtggaatctaattaaactaaaaagcttctgcaaggaaaaagaaattatcaacacagcaatccgaaaacctacagaatggg

SEQ ID NO: 836361 - DNA, 623 bp, Homo sapiens
gggatttgggttgcctcctgcacagtcaaggagagtgtcactcaggctagtcatagatggcatacctacaggcttgggctgattttagatagttgttcagagcagtcaggcaggcgccagaggcacaagccctgtgagaggtgtgtttggaatcacttggtatccaaatcacatgtcatccctaggagcaaggagaccggttggatttggggctggtctggaatgaagaagcatctctcagcttccgaaggctgcatggctcacggcagtatctcaatcatgccctgcccgtttgcacatttggtcctgttggtagttacctctctggtgactggcaaagtcagcaaggatattggggtggagcaccctggctaagcaccctcttgattatagagctatggagtagaagacagatggagaatgagaggcctgtgagaacaatcagtcagttgccatctttcagagctgctcgagttcaaaagtgtgtcatacagggtattttamcattgctacctttaagggattcaggtgggaaccctaggctgtggcttcacataatggaacttgggtgccatcctaccctgtgatgttgagctggccagcactggtgtaggaacctcaag

SEQ ID NO: 836362 - DNA, 557 bp, Homo sapiens
aaaaaaatacccaatagtttgtttgatttgctatcctttcaattattcatccactcctcccagcagatgcacatataccattagaaagtaaatgtattaggccgggtgtggtggctcatgtctgtaatcctagcactttgggaggccgaggcgggtggattacctgagctcaggagttcaagaccagcctggtcaacacggtgaaaccccgtctctactaaaatacaaaaaattagctgggcatggcagcatgagccagtaatcccagctactcgggaggctgagacaggagaattgcttgaacctgggaggcagaggttgcagtgagctgagatcatgccattgcactccagccttggtgacagagcgagattctgtctccaaaaaaaaaaaaagaaagaaagaaagtaaatgtatttaataagaataaaaaagtacaaatwtttctttcagtttaattgtattattttttcaaatggctactaagttgttagaacataaatacttattaagttgtcttggatctgacagaatcattaggcatttcttttggctta

SEQ ID NO: 836363 - DNA, 582 bp, Homo sapiens
atttctgacaggatatgggcatcttcaactttacaattagatattgtcaaattactctccaaaggaattttattaatttacttccccatcagcgtcaatgagagaacctstttttcctccatataattgccaacatctaattttgactttgccagatgtatactttgttattactgcaaaacaaacaactgaaaatctcagtgtataaaacaataagcaatgtatttatcatatgagatggctgatctaggctggggtctgctagagtagtgcagccagatcacttatatcccatgtgcccagctaggcactattatgatactcatttaacagatcagaaacttagaatcaaaaaataaggcaactttcctaatgtctaatagcaaatgagtaaccatttacaagccagatatccagataatgttgaataaaaggaaattaaggtattattttcatgttcatgatttttaagtgaatgcttcaaatattttacaagttaatgtacagagtttcacctattggcagcggggtgtactggatgttgaattctgttgaatacatacttgattatgacagacttaa

SEQ ID NO: 836364 - DNA, 576 bp, Homo sapiens
ataatagcagaagtacagtacaaactaaactccaagtggagaaaacagaagaatcaacttcaagacctttttgatgagcctgttttaatccttctcctgctctatcccagttttccacatcaagagtgcctgcctgtggaaaccatgagttatgcataataactttgtgtggcttctgcaggaggttagtgtctgagaattaacctgagctccagactgtctcaacagaactttaagcaactgcacataatgtttttcttcaacagacaagttattccccctgctaccctgattcagaaagcttcccattcccagcacttctataaagcactgctcccagtacctctttagagcactgaccttatatatgctgccggcagactcatcctggggtccccgtttgccttgtcaatttcagcttctctgctccagcagatcttttttgttcacatcgtcgaagtcccgtgttcagacgccacttgttggcatccttggcgtccctgttctgagtcaccacttgttgagaacccaattstgtcactgtttggggcaccactatgtaacctgcatggacct

SEQ ID NO: 836365 - DNA, 598 bp, Homo sapiens
ataaaggaaatattattagagctaaaaagagaaatagactcaatacaataatagctggagacttcaataccccaatatgcctgatgaatattgatgcaaaaatcctgaacaaaatactagcaaatcaaattcaacaacacattttttaaaaatcattcatcatgactaagtaggatttgtcacagggatgcaaggatggttcaacatacgcaaatcaatccaatgtggtacatcatattaacaaaatgaaggacaaaaaccatataataatttcaactgatgctgaaaaagcattttataaaattcaacatcccttcatcataaaaacatttaaaaaaactatagaaggagcatacctcaacataataaaatccatatatgacagacccacaacaagtgtcatactgaatgggtaaaaactgaaagcctttcctttaagacctagaacatcacaaagatggccactttcaccactgttattcaacatagtactggaagttgtagctagagcaaacaagagaaaaatataaagggcatccaaatcagaaagaaagaartcaaattatcattatttgcagataatataatcttatatttg

SEQ ID NO: 836366 - DNA, 583 bp, Homo sapiens
attcagcatgactcacagagcagtgctgcagaaatagaggtggatggacacattctattttttcattggtacagggactaggtaaggctaattactgaagacacagaaatataaatactaaattttatgataagaaaataaaacatactagaaacaacatacattttatttataaaaatccaaaacattgttaaatgaaacaatacatgaaagataaaaataaaaaatcttggccgggtgtggtggctcaagcctgtaatcccagcactttgggaggccgaggtgggcagatcacgaggtcaggagatcgagaccatcctggctaatactgtgaaaccccgtctctactaaaaatacaaaataattagctgggcgtggtggcaggcgcctgtagtcctagctactcgggaggccaaggcaggagaatggtgtgaacccaggaggtggaacttgcagtgagccaagatcacaccactgcactccagcctgggcaacagagcaagactcygtctcaaaaaaaaaaaaaaaaaaaaaaaaaaaaaatcttagtggggagatggtagatgaaatgaaatggtgaaat

SEQ ID NO: 836367 - DNA, 631 bp, Homo sapiens
gatgtattcgagggcctaggccttatctttcaccctagagacttaggaacatgctayagaaagcagccatcagagttgtccagatgaccactgtaattttatcatgtgctttgccagcctgcctgtactccttactgccatcttgctagcactggctatgccactgggggagtttgaaggcctccttctccttgaaggtgtgaaaggaaaataaagttattagaaaactgcattcaaggacacctgtcagagtcctatagctgattataaaaaaaaaaaatcttttgaaaaggataaaagtgaaacaactgtggatgacaagtcttagaacagtcataaagacacaattgacaaggaaatttggttgcttttgtggcatacaacaattttacattatcataattactactgttaacatatgctaagacatatcagaatcacaggaatttcatacaatgcgggaacatatactaataacacatttatataaatatatttctaataactttggagactgtgacactagaatagaggaaaaacttccaagactcccatggagagctgaaatgttcatgaatatcaaacagaataggagttaactccatggattgaactaatagaagactgaaat

SEQ ID NO: 836368 - DNA, 643 bp, Homo sapiens
gaaagcctcctaggcttctgcctaacccctaactcaggtagaagcctgccacatgggaggagcttccacaagaacctctactagggcaacaccaaggggaaatatgaagtyggagccctgacacagagttccaactgaagcactgcctggtggagctgtgggaagggggctgatgccctctagaccccagaatggtagagctactggcagcttgccctctgtgcctagaaaagccacaagcactcaactccaacccatgaaggcagctgcaggggctgcacccggcaaagccatggaggcagagctgcccaaggccttaggagtccacccattatacagtgtgccctggatggaggacatggagtcaaaggagattattttggagctttaaaatttaatgactgccctgctgggtttcagacttgcatggggctattggcactttcttttaggcaacttttccctttgggaatgggaatgtttacccaatgcctgtaccaccattgtatctgggaagtaaataacttgttttgattttgtagtctcataggtagaaggagacaagtctcagatgagacttaggactttaaacttgatgttggaatgagttaagactttgggggactgttgggaagagattatt

SEQ ID NO: 836369 - DNA, 623 bp, Homo sapiens
aaagtaatggttaaacactgctttcagagctcaagagatgatatgctttctgggtttaattcaaaatccatatgtaagtaaaatgggtttacccattggagataaagtttggytacagtatagggtgatattataccatttgcttagttgtcgggattttaattttataaggatctgttgtttactgcttagaaatttatattaaaaatcagtgatagtttgtgtttgctgaaggtgataattaagtacagcagtggtacagctgagggttcagagagtagcaaactacattaataaaagaaatagttctggatggatgtttaagggttaccacttccccaccaaaagtgggaaaggacagtaagtattaaaaatgttcttatgttggtgccaacttccaggccgtagaacgcttttattctttactgtttgagattggtagaaaatgaagagagaaatattttgggtaaggcctgaatagttccaacagtagaattcgttgggaaaatatttttatgtgaaccaaaaaaataacctaagggaggaagaaaacatttgctataacttaaaatataattttgacatggatctaccattgtattttgaaactgtatagctatagt

SEQ ID NO: 836370 - DNA, 488 bp, Homo sapiens
ccaaattgatttaaaaacttatagttacacaaaacctgcacacaatgattataagcagctttattcgtaatcaccaaaacctggaaccaaggatgtcctttgacaggtgaatggataaacaaactggaatatatccatacaatggattatttagcaataaaaataaatgagctagcaaaccacaaaatgatgtaaaggacccttaaatgtatattgctaagtgaaagaagctagtccagaaaggctacatactatatgatttcaattataagacatcccagaaaaggcaaaactatagaaatagtacaaaacagtagttgccaagggcttggggaaaggcagaaagggcttaagagctgaaatagaataatctcatggaggtgaaactatttctcacaataatttaacggtggatacatgttgcccaggctggtctcaaactcctgggctcaagcaatccrcccatctcagattcccaaagcagtggg

SEQ ID NO: 836371 - DNA, 450 bp, Homo sapiens
cccttaactatcttccccttcccttaaagtcaagcttctgggggggcagagtggagggggcctttattaatccaattcccagtcatttctgaaccctgtctttctaacctggctcatatgctcaatgaccctataaagctgaaagatcaccatcctaactatactgacttgaaggaaaactacagtagctaaataggatggacaatactaaaggagttaaacgaatgctgcataaaggtcaagtaagataaagacaaatcatcctttggttttaaaaatttgaaaatgaggactttttaaacttttttctctttttcagcctgagttgttacacactccttcgtggattccgacttccatggagtatgaggatctttataacaatttcrccagagctctaatgcaacaagagtgggtgatgagcgtaacaagtggtggtcaaatggctac

SEQ ID NO: 836372 - DNA, 450 bp, Homo sapiens
cccttaactatcttccccttcccttaaagtcaagcttctgggggggcagagtggagggggcctttattaatccaattcccagtcatttctgaaccctgtctttctaacctggctcatatgctcaatgaccctataaagctgaaagatcaccatcctaactatactgacttgaaggaaaactacagtagctaaataggatggacaatactaaaggagttaaacgaatgctgcataaaggtcaagtaagataaagacaaatcatcctttggttttaaaaatttgaaaatgaggactttttaaacttttttctctttttcagcctgagttgttacacactccttcgtggattccgacttccatggagtatgaggatctttataacaatttcgccagagctctaatgcaacaagagtgggtgatgagmgtaacaagtggtggtcaaatggctac

SEQ ID NO: 836373 - DNA, 597 bp, Homo sapiens
ttttacttttatgaaatgaagaattatagtggaagaaaatgttcttgctttgttccaaattcctcctcgtctttgtttttcattgttgggggtcagtaagcctatacataggtacgctcacaattttatgctcaactttctccctgtaagttatacttatgtgtattagttcctgccatttataatagctttttggcactttattattttgacaaaaggaaaccactttacattttttaaaatgatttttacatttgtttcatctagtgttacattgaagaaaaagatgtttatttaatatccttcatttggaaatataagaaaataaagcgatttatctacaagcttacattttgctttggcaactgtgaaaatatatagaatgattttagtacttctggaaaagaagtaatttatgtctgtcacacttgaatcccttactctcattcttttttaaaatataytgtacaaagaaatgaagtttttatctgttacatcaatgagtttataatcttagggtattggtatgccaaatagaaaatacaaatagaaatgtagttataccaaaaagcaaaaatacaaagctcttcttacttt

SEQ ID NO: 836374 - DNA, 532 bp, Homo sapiens
acgtgagtgtaacaattaataggagtaaagaaagtaatagtaggtarctttgtaattgagaaggcataaattgagggaattgtttgatggtttctttcctctgtgaagtaatgtgcaggttgtctgctgagggcaaaggtaaaaggctacaggagggtgactaaaggcacagccattgtcgcaaatgtggaggaagctgattgaaatacacagaagtcattccagggagtgctgataattactctaagactagaaaccatgcatgcctaatagcacctaggtcagtgcaggaaaaagtgagagagttttaaaattggaaacaggatatcaattgaataaagaatttaaacaaacaggagggggctttaacttgagaggaaatagaggcaacaactaagaaaatttctctcccagccaataactaatgtgcagaataaaataaaggagctgagagcatggaaagttgtggtcagagtggcatgttaaatacaacagaaggagcagctttaatgatgacagatcacaggacaca

SEQ ID NO: 836375 - DNA, 629 bp, Homo sapiens
gtgaagttagacttttataagcaattattttctgtttaacagtattcacattaaattakttacaacattttagaatgttttaacacgatttacgcaatcagtcaagtggctacatttactagtttattgaatatgaggtttatccatttagcaatgtaaggaaaactttagttctgtttctcagttatcaggagtgaacataaaactattctaaaccacaattagtttaccagcatagtacaaaataaaatgacaactaacgaaataaagcaattaaagtaacttatttttactcataaggttaccataataataaaaattcctttaattttcaaagcactcttcatgaaaagtagttggggtaaaattactatttgttcaaagtagaataaaagggaaggatgctctaattaaacattttattaaaattaaactctctatatgaaaggtagaaatttaatctggaaacctagatagattttcaaattcagataaaatgggttgacaacctataagcaggtaatattacagcaaagaaaatgtaggcaattacagtgacattcccaataagagggtgccctacattaattcctaacactggtggttagcagcccaaagtaaaccaaacc

SEQ ID NO: 836376 - DNA, 635 bp, Homo sapiens
atttggccaagacttggtaactgggtgaagttagacttttataagcaattattttctgtttaacagtattcacattaaattagttacaacattttagaatgttttaacacgatttacgcaatcagtcaagtggctacatttactagtttattgaatatgaggtttatccatttagcaatgtaaggaaaactttagttctgtttctcagttatcaggagtgaacataaaactattctaaaccacaattagtttaccagcatagtacaaaataaaatgacaactaacgaaataaagcaattaaagtaacttatttttactcataaggttaccataataataaaaattcctttaattttcaaagcactcttcatgaaaagtagttggggtaaaattactatttgttcaaagtagaataaaagggaaggatgctctaattaaacattttattaaaattaaactctctatatgaaaggtagaaatttaatctggaaacctagatagattttcaaattcagataaaatgggttgacaacctataagcaggtaatattacagcaaagaaaatgtaggcaattacagtgacattcccaataagagggtgcccyacattaattcctaacactggtggttagcag

SEQ ID NO: 836377 - DNA, 566 bp, Homo sapiens
agagtagaagacaaaaacaatttattatctcaatagatttggggaaaaatggcaaatctaatacacagttataataaaacmtcaaaacaaactagaaatgggaaggaacttcctcaacctaataaaggtgttgtaaaaattgattaacaaacattatattagtgttaaaagcctgataattttcttttttttttttgatacagagtcttattctgttgcccaggctggagggcagtggcatgatctcggctcactgcaacccctgcctcccaggttcaagtgatgctcctgcctcagtctcctgagtagctaggattacaggtgtgtgccaccaggcccagctaatttttgtattgttagcagagatggggtttcatcatgttggtcaggctggtctcgaactcctgacctcgtgatctgcccaccttggacttccaaagtgctgggattacaggcatgacccactgtacccagccaaggctgacaattttcttcatagaatcataaataaagcaaggatgtctgctcttaccacttctacttaacactataattgaggtcctatg

SEQ ID NO: 836378 - DNA, 625 bp, Homo sapiens
ttttaagttaaattaagctaaagatgcagtctatttaaataaagtatttgattgccttttcaggaagaattcacaaaggtatttgwttatcatgcaaattaaggaacaatagtgaatttaaatcccgaaccatatcattgattaaatttctctgtaaattctatgtgaaaattcaattcaaaatcctgggaagtaatattttatcttttgttgcattttgtttagtttaaaagaaaaatagttggaatatttgatgatccaaagaatctaagaggttagatgatggattcggctatagtatagggagtgatatatatactttgaaattctctgtttgaatttgatccacacacatgggaagtaggttttagtgacatcattagctttttaaaaatgtgaactatttattcttgcatttattctactaatatatgtttagtataagtcattcctttgtatggacttttgtaggcaataaaggacaaagatttcacagaaaaatatatacttgatttatggttttataaattaacttaggaagcattttataacatgtatatacattctccttttgtatatgtgtgtgtgtatgcataagtttgtatgtgtgtgtgtttatgtatgt

SEQ ID NO: 836379 - DNA, 487 bp, Homo sapiens
ttgttaagactggcaaatatccaggttactggcgatgaagccgtacgggtctgcagcaatgtcaattcccttcctcagaagaaagaatttgacggaggggcataagatagaaaaagagaccgagacaagtttcagagcaggaatggaagtttattaaaaagccttagagaaggaaagaaaggaaagtacacttggaagaaacccaagcagtcaacttgaaggacaagtgttccatttaaccttgatcctataacttcatatgctggcccacttccagagtcttgcacccctttcccttcattcttccctaagggtgagctgcctgcgtgtgtggtgtgctccttacacttgggaggtgagcaagcgcygtgtgtttagcaagttgtacgcatgcctacctaaggcctaattctcttttccaatggaatgccccctgaaagtgatgctgtgccatcttgcctcttaatgcacatgctcaagcttgcct

SEQ ID NO: 836380 - DNA, 624 bp, Homo sapiens
tttagcttgaaagtattaaggacttttgcatccatgtccatcagggatattggtctatagttttctttttttgatgtgtctctgtcttgttttggtatcagagtaatactcgcctcgcagaatgagtttggaagtactcctttttcctttatttttctaaatagtttgagtaggactggtattaattttcctttaaatgtttggtaaaattcagcagtgaagcgatcaggtgccaggcttttcttcacctggagactttttattatggcttcgatcatctcacttgttattggtctgttcaggttttggatttcttcatggttcaatcctggtaggttgtatgtgtctaagaatgtattcatttcttctaggattttgaattttttggcatatagttgctaatagtagcctttaacgatcctctgaatttttgtggtattggttgtaatgtttcctttttcatatctgattttatttattaggattttctcccktcttttcttactctggctaagaaaaagtttgtcaattttgtttatcttttcaaaaaaccaacctttgtgcttaattctttttagttattttaatattgttgttaaatttatctgacagtgttctgaattc

SEQ ID NO: 836381 - DNA, 600 bp, Homo sapiens
gatgggatcttgggttagtgactaatgaagttcattctctgaagaggttcttgcctttcaagcctatcaaatattcttatttgcttaggctgaccacagcactatgaaattccaaataggaagagatctgcrgcagcaacagaaataacaaaatatctaggagacatcaacaaaagctgtacatgatcttacaaagaaaaactttataagctttgttaaggaaaagaaaaggattattgggaacatgagaaaagggaaaaggcatcccatttttcatggatagagtgattaatattataacaataccagttttaaccaaattaatctaaattcaaagcaacctcaaataatatttcagcagaactgttgtcaaagaaatagccttatttttaaactctgtagaaaaataagagttcatagatagctaagtcagttttgataacaaaaagaacatttaaaatatgtgttacaatagaaacaataggccaatagaatcctgggaagcaataaagggttcaaaaaaatgcttatgtgcacacagaaacacagtatatccgagaatgttaccgcaaaccagtgggaaaaaatggatttttaaat

SEQ ID NO: 836382 - DNA, 562 bp, Homo sapiens
ggatggggagccatggggagacctgggtatggggataggctttgaggacccctggtaggatgtaaattacattttttacataattgtgggttatcccttagtgagaaaaaaaacctgtagatatggcacttcactccatttgccctctcgtttacaaaagagatctagctgtaggatggtattatagtttacacttccctcgggtggccatgtctctcctctggaaagaggatactgtggccaggtggtgctgcataaaaatataagtcacttcttcagcatttgagggtcaaattggtcccaattatccagaatacacctcaggagtggcttcacttttgaaggaatgtctcccatctgaaaggagaacataggagtgcccgcacctctagtcatcccctagtgagcactagccctagggcatccctgtaggggtgggttgcccctacacacctgtgggtgtttctygtaaggtgggacgagagatttggaaaagaaaaagacacagagacaaagtatagagaaagaaataaggggacccggggaaccagcgttcagcata

SEQ ID NO: 836383 - DNA, 522 bp, Homo sapiens
tcttggtcacagataaaaagacaaggctgggctaggcgctgtggctcacgcctgtaatcccagcactttgggaggtsgaggtgagcggatcacgaggtcaagagatcaagaccatcctggtcaacatggtgaaatcccatctctactaaaaatacaaaaattagctgggcgtggtggcgcgtgcctgtagtcccagatgctcgggaggctgaggcaggagaatctcttgaacctgggaggcgggggttgcagtgagctgagattacaccattgcactccagcctgggtgacagagcgagactctgtctcaaaaaaaaaagaagacaaggctgggcaagatggctcaccctgtaatcgcagcattttgggaggctgaggcaggcagatcacctgaggtcaggagtttaagaccagcctggccaacatggtgaaaccccgtctctactagaaatacaaaaattagccgggtgcggtggcagattgtaatgccagctactgggaggctgaggtaggagaattgct

SEQ ID NO: 836384 - DNA, 642 bp, Homo sapiens
tacaccttaaatattgaacccrttggtgggcaatctgagccttccttttggacactttatatcccatctgcagagaaatttaaggttcttatagtattttagtcaccccctgggttgggctacacacaagaaggtcatgtacatactagagtacactccattttccaattttagatcccttagatccccaaggcttgtgcaaaaaacaaacaaacatggttatcctgaaagccctgagggaggggcactgtccaagtgtatttctgttttagccctacccagtttcccagtataccatgctagtgcgttgacctatttattaatgtggtctgggacattgtctgcattactattagcaattttgctgggtggtgcctaaatcgtagcagtgtccctattttaactataatatcccctcccaacaaggggactgggcagcttgttactactagaaattcttgttggaagatttgtttctcaaattggcaagtcaaaagaggaataaagaatcttttttgtggctctccttccattcccataacgcttgtggatggggaggaagcttttcctacgtaagtagtaagggcaaagtaatttgtccctgtatcaaaaagaaaccaaatttgggtgcccaacatgtcc

SEQ ID NO: 836385 - DNA, 642 bp, Homo sapiens
tacaccttaaatattgaacccgttggtgggcaatctgagccttccttttggacactttatatcccatctgcagakaaatttaaggttcttatagtattttagtcaccccctgggttgggctacacacaagaaggtcatgtacatactagagtacactccattttccaattttagatcccttagatccccaaggcttgtgcaaaaaacaaacaaacatggttatcctgaaagccctgagggaggggcactgtccaagtgtatttctgttttagccctacccagtttcccagtataccatgctagtgcgttgacctatttattaatgtggtctgggacattgtctgcattactattagcaattttgctgggtggtgcctaaatcgtagcagtgtccctattttaactataatatcccctcccaacaaggggactgggcagcttgttactactagaaattcttgttggaagatttgtttctcaaattggcaagtcaaaagaggaataaagaatcttttttgtggctctccttccattcccataacgcttgtggatggggaggaagcttttcctacgtaagtagtaagggcaaagtaatttgtccctgtatcaaaaagaaaccaaatttgggtgcccaacatgtcc

SEQ ID NO: 836386 - DNA, 623 bp, Homo sapiens
ggagtgaggaatgggaaattactgtttaatgggtacagactttcagttttacaagatgaaaaaaaattctagaaatgaatggtggtgatggttgcacaacaaggtaaacattcttaatgtcactgaattggacacctaaaaaatgattaaaatagtaaattttgttatatataatttagcacaatttaaaaatagataatttttttaaaggatatctacttattgtgtcctaattacctcccttttacaggtaacctctctgtggatgacttctaacttccaacttacccaaatttccacctatgcccgtaatttacaagttatattatatttctaggtatactaggtttagattcactgggatcaaaattctggttgctaccagaaatactgctgttgagaattttaaaaagatagaaagcatgtgacatgcaattttatagagagagtaactatgtttgtataattatattattctctaagactgacctcttttctatttagcttaacatatggtagtatcctgaataggattctctggttcatcagaacagaaaaagcagatgagttttattacacaatgttaytgactaacatcagttacagtattaaagaaattattc

SEQ ID NO: 836387 - DNA, 698 bp, Homo sapiens
attttgtggtatacagaaaggcagtggaacaatcccagatttcagaagttggttgataaaatcaacatmcaatgttaagagaaaatatatttatcttcctgaagataaatcaagcagcttgatcacagcttgatcagttgtgttaacatctgtagggagaatgtgtgaatcagtaagagatggaatcattatggacacagagagaaacaagatgtcagagagatcccaggtggcacagtgtatccagcaaagtctaagcaccaccagaatttgaagacacccaaactcaaagttcctagaaagtgttgttaacagatagagatggtctggataaaatatcccttaaaattatccaccttctttttgcctgggtcctttctcattaaacaaccatattcttatgctgaataatccctctttctaggaggtaatattcctcccttgcagactttcttctgttttgagtctttcttttactctacactcttgttggacaattaccttctctgccacagcttcaatgtcctcccataattaatgagtatcatatcactagctctagtttaggcatctctcttgagctccaaacccattgatccaattctctacttctttatatctccacctggagattccacatgaacttcaagctaaacttgctgaaaacaggggattagttagagtctcaagcagaagca

SEQ ID NO: 836388 - DNA, 533 bp, Homo sapiens
gtcaggaactgtcagtgttctccatactattaaaagtagagaccctagcattttgggtctaattagattaagcagccaacttcagaaatcccaaaaccagcaacaaaaaaatccactcttaaaattctgttcctctagaaccactcccagtgccaaaatctgtattagtgtcctctagagggatagaactaataggatagatgtatatgtgaaagggagcttatgaaagagaattgactcacaggatcacaaggtgaagtcccacaataggctgtcagcaagctgaggagcaaggaggccagtccaagtctcaaaacctcaaaagtagggaaactgacagtgcagccttcagtctgtggccaaaggcccaagagcccctggcaaaccattggtttaagtccaagagtccaaaagctgaagaacttggagtctgatgttcaaggcaggaagtatctagcacaggagataaatgaaagccagaaatcycaagaagttgacttctctcaccttcttctgcctgctttattctagtt

SEQ ID NO: 836389 - DNA, 476 bp, Homo sapiens
actgcaacacctaaagcaagtcctagggctgaactgggctgagacaatggaccrggagagtacatgacctactgagataccaactggggtggctaagagagtgctggcatctctcctcccctaaccccaggctgcacaattcacagctccaaaacagacccttctttccttcttgaggagaggatgtcaaagagtgggtatgagtttgtcttgcatctcgggtaccagctgagccacagcatgataaagcaccagtcagaattgtgaggcccctgttctaggccctagctcccaaatatttgtagacataccctgggccagaagagaaccaaaggaaggaattcactgtcttgaaggaaagaactcccctcaggaaggatccatcacctgctaactgaggagtccttgggccatgaataaccagcagtgacacccaagtattatgttgagggccttaggtgagatgctgaaacttg

SEQ ID NO: 836390 - DNA, 429 bp, Homo sapiens
tttttccctcaatgcagttgggaccattatcttattggaataattttctcttaaattatgctaaattagaaaataattggyttattttctaagtgtatatgttcattctatttaaataaaagcaaatagaaatattttcccttttaaagaaaatgaattacctaaagcggatttcttaaatttaataatcatattgggaaatattagttactcaaataacacactttaacacatatattagctatttttgcatgtcaagttacctattttctgcaatatttattttactgggttaaaatctcaatctcattaagaatccaatttacttcacaaaatgtttgctatctattatacaaaattaagaggtaggagatattgtctgaatccagagcctgttgatgtttacgcagctaaccttcagttgtttaa

SEQ ID NO: 836391 - DNA, 602 bp, Homo sapiens
gtagggttcagaaactagagaagtactttgtggtttgagcacagagttaagtgggtagtgacaggacaagaaacaggtgaggtaggcagaggccctgtcactacagaggtttgtgactcatactcacatttaragtcatttcttcagggatgctttttccaactcactctggatcaggtcctctgatgcattctcagaacgtcctatactttttactttcgggcacttattgttacttgtgactatataattgtattatcatttgattaatgtcattttcctcacaagggccctgttagggttcatttatcacgcctttgtattcccagcaattagcacaggtttctgcatgtatgtacttgatcaacattttaaaataattgaattactaaataagtaaataaaacctaagaatcctaacaccacacttcttgttctagcctggttcatacacctagagtctccttctatctgaagatatagaatctgaattgaaatacaagtacttcccccagccaccaccattcaaagatgcttttggagatggagaatgggagtggggctgtgggcagacaaataaagtgaagaccctataaatgcaa

SEQ ID NO: 836392 - DNA, 584 bp, Homo sapiens
atctcccttgtgaatagcccctgcggtccagcctgggcaacatactgagaccccatctctaaaaatataataataataatgacattataatcagccctgtttataaaacacccctgaaattaaccagaaaaagatttgaaatgtacaattatatctactgtaattgtctatgatactcatcccagtgtagagagcttttaagtattttttaatgtattataagtatgtatgtgtgtattcagacacacccacacaaacccacgcacacgcatacacacttttttaaatcacaattctaagaggtttggagacctcagacctcagaccacacattactgagtgagagacgttgaaaagaattgagcaagaagctgaaaaagctctcaaattagtcactattttcaatattattctgttatttgtagaggtatttcataattcctcttttatgtataaatgcatattgtgccccattatgttttgaaaatatcagtaatctgagagtttaaaaagttccatccaacattktttatgtatattgtgttatattttgaagtttttctttgaaattatattttttctta

SEQ ID NO: 836393 - DNA, 607 bp, Homo sapiens
aatagtccactggtccattagtgggctttgtgttaaacacaaactgcttgggggaataaacttttttttttaatgtaaaaaaggtaagctgggcacggtggctcacacctgtaatcccaacactctggaaggccaaggcaggaggatctcttgaagccaggagttcaaaaccagcctgggcaaccaatggaaacctcatctctaccaaaactaaaaaaattagctagacatggtgacacgtgcctgtagtcacagctacttaggcggctgaggtgggaggattgctggagcctgggaggtcaaggctgcagtgagccatacttgcaccactgcactccagcctgggtgacagagcaagactctgtctcaaaactaaaaaaataaaaaaactaaagaaggtagagaaaagagaaaactgaaatagtatggatataataatagttcttagaaaaagaaaggatatgggcaatgtctttcattcatacctctccctraatagaggtttaaaatattaaaacttggtagtcagtgaaaattaaagattagaaagttctaacaaaatcctagagatgaaaatcctactgctgctattaccagattataggtc

SEQ ID NO: 836394 - DNA, 623 bp, Homo sapiens
atttctccttttcagaatactataaattcagtgttttcttaayactcatatatctgcaaggtgagtcagaagaaatgttgttctgaaggggtgatgtttataagatggcacaataggaaattttgaactcttcccccccgccatgaacacaccagttcaacaacaatacacagaaaaaaaaaaaaaaacatccctctataaacaattcggaaacttgttgagaggctattggaaatgggacagcatgaagccagtcacactgaagctggtggggacacagcgccatgcaatcaggaagaaagccctgattcccagcttttctgtggggttggaaaaagttggactgcattttcaattttcaaatttttcaagggtttccaaggctctggcttttgtcttgcctgtgtcagagtactgacggtatctagcatactgtagatgcctgggagccacagaagaaagatggtattttttactaacatacaagcactcattttagtccatcttccttgctcaatgtggcatgagtgggtgaaaaatcacatattacatcttttccctgaagaagaagagagttgtaccatttatctaatattccaagtctttctgcctgagggagagag

SEQ ID NO: 836395 - DNA, 610 bp, Homo sapiens
agacaaagaagaggaaaagatagatgtgaatggtcttgttgagatgaacaaaccaaaattaaagaatgttggaaaataacccattgagctcatttactaaatagtaggcatttaggttccagacaatcaataaagtcttcttttttaagtatacccagaaggataactacgtggccagaacctcagtgtatcttccagatagacagctatacatatatagtgacaattttcccaagtctaggaaccgtggaagcttaatatatcaacaagagaagtagtgtagcattttgtgtttccgccatataagctgaatatgtatttatttatgggtaatacttattaaacattatctaaatataataggattctccaaagtaacatttatgaaaccagagacaaatcttaaaaagttctaatcatgtggcctctggacccaaaacggactgtggagattcaaggtgggtgcttaaccaacrtctcatcaaacttaaagcaatggctattatgacaacatatttattttaagaaagcaaatgaaaaattatgaaaaggctttgtctgtttttaaacagaatatttatgttcattcacattgttctatgttatctac

SEQ ID NO: 836396 - DNA, 604 bp, Homo sapiens
ctagctattttcctaagactttactgtttgctgattactaacactatatcctgtgagttaatttaacattggcaatgggatcacttgaggagaggtacaygcataccttagaaatattgcaagttcactttcagaccaatgcaataaaatgaatattgcaataaagcaagtcacacaaatttttggttttttaatgtcttaatgcatatgacagttatgtttacactatattgtattctattaagtgtacaatagaattatgtcttaaaaacagtgtacctaccataatttaaaaatatcttatcgctaaaaaaatgctaatgatcatctaagctttcatcaagtcataattttttgcttgtagaaggttcactggagtagtacttttaatatttgtcaagagtgtttcctttgcattccccacttggctaactcttcggcacaagagtcctagcttctagcctatttgggcttttcagaagccttcctcacaaagcttaatcatttctagcttttgatttagagtgagagatgtgcaactcttccctttacttgaaccccctacaggtcattgcaggattattaactggcctaatttcaatat

SEQ ID NO: 836397 - DNA, 604 bp, Homo sapiens
ctagctattttcctaagactttactgtttgctgattactaacactatatcctgtgagttaatttaacattggcaatgggatcacttgaggagaggtacacgcrtaccttagaaatattgcaagttcactttcagaccaatgcaataaaatgaatattgcaataaagcaagtcacacaaatttttggttttttaatgtcttaatgcatatgacagttatgtttacactatattgtattctattaagtgtacaatagaattatgtcttaaaaacagtgtacctaccataatttaaaaatatcttatcgctaaaaaaatgctaatgatcatctaagctttcatcaagtcataattttttgcttgtagaaggttcactggagtagtacttttaatatttgtcaagagtgtttcctttgcattccccacttggctaactcttcggcacaagagtcctagcttctagcctatttgggcttttcagaagccttcctcacaaagcttaatcatttctagcttttgatttagagtgagagatgtgcaactcttccctttacttgaaccccctacaggtcattgcaggattattaactggcctaatttcaatat

SEQ ID NO: 836398 - DNA, 604 bp, Homo sapiens
ctagctattttcctaagactttactgtttgctgattactaacactatatcctgtgagttaatttaacattggcaatgggatcacttgaggagaggtacacgcataccttagaaatattgcaagttcactttcagaccaatgcaataaaatgaatattgcaataaagcaagtcacacaaatttttggttttttaatgtcttaatgcatatgacagttatgtttacactatattgtattctattaagtgtacaatagaattatgtcttaaaaacagtgtacctaccataatttaaaaatatcttatcgctaaaaaaatgctaatgatcatctaagctttcatcaagtcataattttttgcttgtagaaggttcactggagtagtacttttaatatttgtcaagagtgtttcctttgcattccccacttggctaactcttcggcacaagagtcctagcttctagcctatttgggcttttcagaagccttcctcacaaagcttaaycatttctagcttttgatttagagtgagagatgtgcaactcttccctttacttgaaccccctacaggtcattgcaggattattaactggcctaatttcaatat

SEQ ID NO: 836399 - DNA, 452 bp, Homo sapiens
agaggaaggtaattacttgttcctgttcttagttttctgtacacaaatgggaacagcatgatattactggagactagatattgtttaacaaatacatcgttctttttatttcaaaggaaagactccattctacaaccatagtctatgcattcagccaatcctctcacaaatgcaacctgtgggtacgacgagttacagagtagagtacagattaattatcacagttttacaaaatgttaaataattaaaatttaaaattcttcttcctaatgtgaaatgtttacataaaaacaaatattcaaaagcctacattgcttaaaaaatctgcatttgttatacttagaatactttttaaattttttaaacattttttgatatcttagaggaaaaagaatgtgygatacccaattattccaaaataccagcacatcatgaacacattagtatagata

SEQ ID NO: 836400 - DNA, 528 bp, Homo sapiens
ctcagttgtatgtcacttgtttcttttctcttgctttcaggatccttttttatccttgacctgtgtaaattcaattatggaatgccttgagatagttttytttggatttaatctgcttagtgttatacaacctttttgtacttggatattgatacctttctctatgtttgaaaagttctttgttattatctctttgattagacctttctttctttctttccttctttttcttttcttttggttttctttttttttttttttttttttttttttgaggcagagtcttactctgtcacccagtgcagtggcacagtcttggcttactgcaacctctgcctcccaggctgaagtgattctcctgccttagtcctttaagtagttgggattacaggcatgcaccaccatgccaggctaaatttttggatttttagtagagatggggttttgctaccttggccaggctggtctcaaacttctggtaccaagtgatttgccttccttggccctccaaagttctgggattacaga

SEQ ID NO: 836401 - DNA, 528 bp, Homo sapiens
ctcagttgtatgtcacttgtttcttttctcttgctttcaggatccttttttatccttgacctgtgtaaattcaattatggaatgccttgagatagttttttttggatttaatctgcttagtgttatacaaccttyttgtacttggatattgatacctttctctatgtttgaaaagttctttgttattatctctttgattagacctttctttctttctttccttctttttcttttcttttggttttctttttttttttttttttttttttttttgaggcagagtcttactctgtcacccagtgcagtggcacagtcttggcttactgcaacctctgcctcccaggctgaagtgattctcctgccttagtcctttaagtagttgggattacaggcatgcaccaccatgccaggctaaatttttggatttttagtagagatggggttttgctaccttggccaggctggtctcaaacttctggtaccaagtgatttgccttccttggccctccaaagttctgggattacaga

SEQ ID NO: 836402 - DNA, 617 bp, Homo sapiens
gtgtgataagtgtgtaaaaataaaattatctgggtrctattgttatgtttactgattcaaagatgtaggcatatgtgtaattgggaaacttctacaaacatgaagcaagcaatcatttttaattttagtctctaggactccctggaatatcatccagtactaattatttggaaaatgcacaacagtatgcattctatttagtgatttgtgtatttaaatgtatttcaaaggtgtgtggtactttttcttaaatatttttacataattgcattaatattataaatatcattttattgcttttgtaatttttttctggatgatgtcaattacctgcatgaacagataattacgccacccaagtaagatttttaaaaattttagcctctataagtttcattaatattttcatctactaattttctttaacaattctaaaactcacttcctattaaaattatatcaatgtcaatatcttgtgtttttttcctgaatattcttgaatttactaaggataaccatgtcataaaatattcttttttcctgatttttttttttttttagacagagtcacactctttcacccagtttagagtgtagtagcattatcatggctcact

SEQ ID NO: 836403 - DNA, 630 bp, Homo sapiens
tagaatatgctgagaaaatgacatccagcgacagggaggggctggtcaggaaagcccaggttctgttcctgtacaccsctagaaacaggatgtccttcagtgctttagccaagagagtagtgtgtcctttgtgtataaaactatgataggctgattttcaggttacctgagctgcagtgcaaatggagcattcacagatgagactgtggataaaatacatgaggaaaggtggaactgtcacatttatattcaaagaataatataataaaatgactctgtgctctctctccaagcctgctaataaagactataagaaaagttacaaccaaaagtaacaactcttctctcacctccagcatgtatgaaaggaacagagggctttacactaatcttcagagagccacatttacgcataccatggacctgattattgagcaattgatcacaactttattggatccttcttttaatttctagcacagcagcaactgcatagacttctgtcaggtttttccggtgagcaagcttatacaaaaatattgtgtttcatgacctgaaataagtatattggcacatttattaagtatataatttctcatgcctttagagagagtctagattgaaacaaaa

SEQ ID NO: 836404 - DNA, 587 bp, Homo sapiens
catgagtgagttatcaacccatctttcaggacagaattaagtcttgtggggagttacttctaatcacccaactgtggcatagttcatacctaaatgtgttttyatatactagagactcctaaatggttattttgagcttacagcctccttcttactatattttatcagtgaatgaatggtatataagtatgtggctgggacatttatgtacctagtgttttggtctttaaacacctaatacaggtaaatgtaggccagggtacataagctatctggccctataatcattctgagatatatttctaatttgtttgtgcaatcatctgtgaaactttccacaagatagttgagtacagaagatttgaatattaaagaagagagttggctaattcaatacgtaatttctgataaagatttttttcgtaaattgtttttcaatgttcaatcatccttttttcttccaaacatactggcttgaattatattttgcctctgttattttccattatgcaaatgagtggtatatggttatggggcaagggcatttaaatacctagtatttatgcaaatgaaaaactactaaccag

SEQ ID NO: 836405 - DNA, 640 bp, Homo sapiens
aagtcatcagtttgaaaagaagcccctatcagggcaacatgaattctactaaaattgaagcaagaccaaacatcaaatttatgaygaagtgtggagagaagaattgtgaaatcatgactttatgaaaagtttatggggaccatcagtttttaagtggataattcatttgaagaagggacgaagcgatgtcaaagatgaagcctgtaccagcagaccatccacacccatttgagagaaaaaaaaaaaatgtagcttgtttgtgccctaattgaagagggctgacaatggtagaaacaatagccaacaccacagacatctcaattggttcagcttacatgattctgaccgaaaacaaagttgagcaaagttcgcacttgatggataccaaaactgctgcacccagatcaactgcagacaacagcagagctttcgatggaaattctaaacaagtgagatcaagaccctgaagcatttctttgaattgtaacgggatgaaatgtggctctcccagtacaatcctgaagacaaagcccaatcaaagcaaagactgccaagaggtggaagaggtccagtcacagcaaagatggactggttcagagcagagatcacagcaacattttgggggaatgctcaagccatt

SEQ ID NO: 836406 - DNA, 312 bp, Homo sapiens
agccactgcgcctggcccacactggcttctttgttcactgaacagtgcaggtgtctggccacctcagtgcctttgcacctactcctagttcatagatgttctttcccagtctttgcactggggggcttcctgtcattcagacctctgccaagtcacctcctctgggagggcttctccaccacctactcagatcattgccctattttgtttttctcctctcatarctggctctcttgtttgcttgtcttcctcacctggatcctgaggtccttgagaggagagcagcacttgtcctgttcactgcggagtctc

SEQ ID NO: 836407 - DNA, 601 bp, Homo sapiens
ggatcccgggagccttgccgcactgccttgtgggtggcttggcgctcgtgattgcttcctgtgaacgcctcccaaggacgagcccagtgtagttgtgtggcgtgaactctgcccgtgtgttctcaaattccccagcttgggaaatagcccttggtgtgggttttatctctggtttgtgttctccgtggtggaattgaccgaaagctctatgttttcgttaataaagggcaacttagccaagtttaaggtcgcgtgcgatgcattcttccctagccaaggggcagtcaccacgcgcccttctgcctgtgagggattccaaggcaagactgaagcctactcctggttttattttagaggctattgtttgcctccagaaggcgctatagcagatgctacaaaaggtgaattcatgtctccaagaaagaaaaataggccatgagtgtgaggcgaaggaaatgtggacatgagagttagttctgttttgcctgcacggtgggagcggcgtattcggcgcctggaaygagttgtgtttgcccaggagcatgcagccagccgcgccgtgtgcatctgccgcacagcattgaacacagctactctcatt

SEQ ID NO: 836408 - DNA, 625 bp, Homo sapiens
agcttctgctcatgcttcagggtcgctgatgtggatccaaacagccacacakaggagtctcttcagtggggggtgctggggggtgtcactgggaatgtggactgcaggtgagcacaccccactaacctcatttaacctatttagtgtcttatgcaatttaagaaaaaccaaaaaccaaacaacaacagcaaaaaaaccccacaccaacccacagtctttgaaagggttgggttccaccaggagactcaggcgtcttagtggaaagaatgatctgggctctggctgggatggcacaggcagctggggggcggtgcccgccgccgggaggcgtgggcctgactcagtggaaggaagtggtgtgtttccattgcagagctcaaaaacaaggtggtttgaggaacgcttgtgtgtcaccggcatttccctgttgtgtttatgaagtgaggtgggaatcaagctctggggttactctaattgtgtcttttacaagaaaccaagaagcccccatggaacacaggcaggggctgaggcggccgggaggggctggggaaacccaggcgcaagcgcgctgggctgggaggacggggccggccacctcacccggctctccagcaccccattttaa

SEQ ID NO: 836409 - DNA, 532 bp, Homo sapiens
attatcattttttaaagtctatgttttaaaagtaactctaaagataataggcattttaacatacaagattcaacagagcatgtatcattcaataattcacattttgaagtggyaattcagaaaacactatgcttcatattttggtgtgtaccgccactgacaaatggcaagacctgtatctcaattgtgaaagttggcaaatatttagtgaactgaagctgtgtggatgtctaattagattaatccaggtttcaatgattgatttttgagtaattattttgtcaatttaagcaaaatcatgtttatgtttctgctgtactaactagatgaacataggaacataattgtagctacttttttttaagcattacgagtaaaaatactctttgaatataatgccagagaactcatatggtatcaaagcatatggcattcttaatataaaatggacatatatatggaataggatttatagaaggcattaaggcattcccttgggggttctcaataagttattgtgcaaatttaaatg

SEQ ID NO: 836410 - DNA, 648 bp, Homo sapiens
ttcttactttacctagcttttggatcctccaccatctggtcatctacctaggtttgatcatgtttttttttgttgttgttgttttttgttttttaaatccccagcacaatctttccttattaaaggagaaaagacacatttcttccttacattaaaatattcaaaattatgagtatttatcaagttaaattatatttaattaaattatatagataaatcattcacaactatatataagttaaaatatgcatatttcataattgaaaaaagaaaagcaatgcaagttctttgtaaaacattcgaacagtttagaaggatataaagagaaaagaaagagtctgtatctggctaggcatggtggcacatgcctgtaatctcagctactcagggggctgaggtaggaggatcacttgagcccaggagtctgaggctgcaatgagctatgaccgtgtcagtcacgacagagcaagaccctgtctccaaaaagaaaaaagtctatatctgcccaactccccayggcccccttcgtttcatcctctcagtgtggtctctctacctagaaataatttctgttaacattttttggttattattatagaaattatacacaatgtccagaattttttcacaaagaataaatctattctt

SEQ ID NO: 836411 - DNA, 619 bp, Homo sapiens
gatgaaaagtattgatcctgggtatgtctgtgagggcgctgccaaaggagattaacattggagtcagtgggctggggaaggcagatccacccttaatctgagtgggcataatctaatcagctctcagggaatataaagcaggcagaaaaacgtgaaaaggagagactggattagcctccagcctacatccttctcctgtgctggatgcttcctgccttcaaacattggactccaagttcttcagttttgagactcaaactggctctccttgctccttaagcttgcagacagcctattgtgggaccttgtgattgtttaagttaatacttaataaactcccatatatatatatatatatatcctattaattctgtccctctagggaaccctgactaatacatgctgtcatccaggctttgttgtttcatttctagaacacgtagaacagctttagcataattcttaagggccccagcattttcagaatgatacaagagcattggcttcaacttaaagtcacccactgcattagcttctgacaagaacagcctgtcctctgaagctgtgaaaccaggaaytgacttctcctctctaggctatgaaagtcctagatggcatc

SEQ ID NO: 836412 - DNA, 594 bp, Homo sapiens
tctggcctgcacggctgagcttcccaaagtttagctgcacaagtccaagtgcgcaggaggcagagaactggatttgccccagggttgtggttttgccaaatgaatgggatgaagggagatgggcaagggagttggaagtttctttcaccaaattcattgttaatttcatcagaacaaaacgattcttttgcttgttcccacagagaaagcaacatccccaaatacatatgaaacaccgatcactaaaggcacaaaacagacaccacatgatcctctattccacttctcttaggcagctctgttcagctacggggactcacctagttccctggcagtagcccaagtctctttcagcaacagcagccttgggaatcttctgtacataataccttcctgaggttggtttatcagcacattaaaagcacctcctaccagacacacagaatggagccccattagaaaaaaacaactaaactctaatgtcatcctgcagcagactgcaatccacacaccagtgtccagggtrtaatcagattctccagaatatggtatacacagtccattcttgactgctggcagtggcaggcaggagaa

SEQ ID NO: 836413 - DNA, 548 bp, Homo sapiens
aactcattccaattacctgctacctgctctgccctgactcctgccaaagcactcaccccatcattctctttaaattagccaatcagaattagtttagcctgtgcgtctaacccttgccaacaggggaatgacayagcagcaggggccatgtgcgtcagggataagaaccccttcccctcccttgtccaagtgtgtgttcaccattgcaccatctttaagggcacactcttctatagaagtaacttgccttgctgagaattaaaaaaaaattttatatttgagtggtattccttttgtagcatcgaaactttatatgtaacaatttgggggctcgcccatgattgcattcccctcccgggatggtctctggttctctctcgtgaggaggcttgccctgcccccttgtggtggcctcaggggtgagaaatcaagacccacccagtgcgaggaataacccgagctctcagcaacgcagaaaaaaataaaaaataaaaaactggccagcaacctagcttaaaggatcttcacatactgcagcgatgactctg

SEQ ID NO: 836414 - DNA, 518 bp, Homo sapiens
cctggtgaggtaatttgctttactcagcactcatccactgattcagatgttactcttatcaaaaaatactttcccagatacatctagaataatggctgatcaaatatctgggtaccgtggtccagccaaattgatgcataaaattatcctcccacttccccacccctggcccctccaaggccctccggggttctccgggagtctggctctccatctcctcctctttgccctccggcttccaggctgtgcgaccctgaggctcttccctgccctgttctacccaaaggggcctcaggggcttgaattcctccttcttggacctttttctctttccagtcagtggatcccatcactttgagggctcctggaatgacattttccccaagaagcctctcctgtataaaactgggggttgttggctgtgcccasaggatgggggtggcttccttgccctcttcaccccccacacccctgcccccttccccctgcatcactgccgggctggactgggggtgggg

SEQ ID NO: 836415 - DNA, 631 bp, Homo sapiens
tgaaccttatagacacttggctaagtgaaagaatccagtctcccagaaacccacacatcgaatgattctatttacatgaaatgttcagaataggcaaatgyattgccagggactgggggaaatgggagagtggggagtaactgctcatggagatggggtttctttttggggaaatgaagacgttctgaaattagtggtgatggccacaaaactttgtgaatatactaaaaaccactgagcactctaaaagggtgaattttattgcctgggaatgatatctcaatttaaaaacttttttgtaattaaaaaaaaagacaagtcttgcctttagaatcccctctcctcattccgggaaagtacgtgtcgtgggcaagtctaagcagaaagtgtattgaatctgccaggttgaccacctgtttcatgcagcttagggtcagaagaatctgtagctctgtcaagaagacgcagggctacagataggaaacaggagggaataatccagccagaaattatcttgcccaaccacagagggcatcatctacattctgctgggatccataccagaggaggacagaaacagaaaataggatcgggactggaaactagagctgtggttgtcttctggatggat

SEQ ID NO: 836416 - DNA, 601 bp, Homo sapiens
atcttttctatcttctaaaaatggaaggaaaacatatgtcagaaataatctgatataggtccataactgccagtgaagaaaaaattgagagctagtggcaaccaagtccttactttaggtagccacagcacttttaacatgtaggtgtggataggaaaaattctttcttaaacacataataaacatattttggagatactgttctacattgtctacatgatacaaacggaaacaaacttaattagcctagaccaaatttcaccctgatgcacatagataactcccactgtgatcattatgcaaaagccaaggtggtgtttggatcttggaataatgtgtgtttttccaagggcagaagttgatctttaacacataggcaagtaataatctccacctgtggctttcacagaaacttatgttttaggggttcctgtgatggtggtggtagtggtgggaacttctggtcctctgtgattagttagtagtctgttggtggccaggaaatgggacaaacagcaactgyggccatgaaacagacacaccgtcaatgagggtctacctcaccagtgcttccctccactagcattgcttagttttcttt

SEQ ID NO: 836417 - DNA, 625 bp, Homo sapiens
tgttgggtggtgaaagaaagaacactagtcacaaaaatttgttatatcctaagatataaaataaataagtaaaataaaagagagcccagttggcctgctgttttcatccctaggcgtgggtccgatatttacccccactagagcaagtgttctgattccgaacagccattcatggatgccctgacagtgtgcaatgtaaatgtgttttctcttttgggggccaccagtcctgtcacaccctctgcactcgctgagcttcttgacctgctggacagcagaacaatttcttcatcagcagctaaacaggtatgtccacactcccgacagcttctgactgtgctactgtcccaagaaatgttttctgtgacacccaaatgccatcactgagtgactttcatcatggaagtattaaatgccagtagtggtgtttttaatgctgaaaggtagaaacattttatttagcaagcgtatgaagccaatatgtgcaatgcaggcagtttgcttctcgtcatcaccgctaacctggggaaatagttattgtctggtcttgccctgaacatctccgcctgacrtgtctcctgtagcccttttacacctgagaactttccctcgtgcccaaggcagc

SEQ ID NO: 836418 - DNA, 533 bp, Homo sapiens
cctctgaattgagaagaatcctcaaggtgctatgtggccagccccatgctcggtgggaagactgcttatcttcttcatgtgctcttcctcgggrtatgtagtacagggttgtggtccttctccaggagccagaactactcttggctccccgttgagtttgtggtctattaaaactccctcccacatcttttgcacacgaagggctataaatctaggttttccctctccaccacttgttcaattgattttttggagcctgaatgcaggccttgacttatatctctgtttaatttcatcttgtggtttcagccaagtgttctggcctgtcgaggccttctgtagtttcagtctgtcattttttgcgttagcgctgtctcataaatttgtcatctgcagattggatcaacacatcttctcgggcttcaccaaatcactgaaaaacctgccaccatgtcacaggacagacatatgatattcctccagagacggctctccttcggaaagcactctttgggaatgtagttcctaaatca

SEQ ID NO: 836419 - DNA, 533 bp, Homo sapiens
cctctgaattgagaagaatcctcaaggtgctatgtggccagccccatgctcggtgggaagactgcttatcttcttcatgtgctcttcctcgggawatgtagtacagggttgtggtccttctccaggagccagaactactcttggctccccgttgagtttgtggtctattaaaactccctcccacatcttttgcacacgaagggctataaatctaggttttccctctccaccacttgttcaattgattttttggagcctgaatgcaggccttgacttatatctctgtttaatttcatcttgtggtttcagccaagtgttctggcctgtcgaggccttctgtagtttcagtctgtcattttttgcgttagcgctgtctcataaatttgtcatctgcagattggatcaacacatcttctcgggcttcaccaaatcactgaaaaacctgccaccatgtcacaggacagacatatgatattcctccagagacggctctccttcggaaagcactctttgggaatgtagttcctaaatca

SEQ ID NO: 836420 - DNA, 475 bp, Homo sapiens
ccaaagaacgcatgcaaaggaaggaaattcaagtgtttccttcctgcctgctgggtggccacccacaccctctctcttctcttgggccacttgtccctaacttcttttcttcatgaagatccttggcagctccatggaggtgaaaagggctatgaatgctcttcttcctcataactctctaggcttcctggtgaacatggagaagaaaccattttcttcattcatcagtggctcagggatctgtgaaccttcccacctgccaccctcatgcctggagtgatatgtgcctggtcattagggagcactcttttcccagctgccaccctcatttctggagtgatatgtgcctggtcattagggagcactctyttcccagctgccaccctcatttctggagtgatatgtgcctggtcattagggagcactctcttcccacctgccgccttcacgcctggagtgatgttgcctggtcatt

SEQ ID NO: 836421 - DNA, 475 bp, Homo sapiens
ccaaagaacgcatgcaaaggaaggaaattcaagtgtttccttcctgcctgctgggtggccacccacaccctctctcttctcttgggccacttgtccctaacttcttttcttcatgaagatccttggcagctccatggaggtgaaaagggctatgaatgctcttcttcctcataactctctaggcttcctggtgaacatggagaagaaaccattttcttcattcatcagtggctcagggatctgtgaaccttcccacctgccaccctcatgcctggagtgatatgtgcctggtcattagggagcactcttttcccagctgccaccctcatttctggagtgatatgtgcctggtcattagggagcactcttttcccasctgccaccctcatttctggagtgatatgtgcctggtcattagggagcactctcttcccacctgccgccttcacgcctggagtgatgttgcctggtcatt

SEQ ID NO: 836422 - DNA, 475 bp, Homo sapiens
ccaaagaacgcatgcaaaggaaggaaattcaagtgtttccttcctgcctgctgggtggccacccacaccctctctcttctcttgggccacttgtccctaacttcttttcttcatgaagatccttggcagctccatggaggtgaaaagggctatgaatgctcttcttcctcataactctctaggcttcctggtgaacatggagaagaaaccattttcttcattcatcagtggctcagggatctgtgaaccttcccacctgccaccctcatgcctggagtgatatgtgcctggtcattagggagcactcttttcccagctgccaccctcatttctggagtgatatgtgcctggtcattagggagcactcttttcccagctgccrccctcatttctggagtgatatgtgcctggtcattagggagcactctcttcccacctgccgccttcacgcctggagtgatgttgcctggtcatt

SEQ ID NO: 836423 - DNA, 475 bp, Homo sapiens
ccaaagaacgcatgcaaaggaaggaaattcaagtgtttccttcctgcctgctgggtggccacccacaccctctctcttctcttgggccacttgtccctaacttcttttcttcatgaagatccttggcagctccatggaggtgaaaagggctatgaatgctcttcttcctcataactctctaggcttcctggtgaacatggagaagaaaccattttcttcattcatcagtggctcagggatctgtgaaccttcccacctgccaccctcatgcctggagtgatatgtgcctggtcattagggagcactcttttcccagctgccaccctcatttctggagtgatatgtgcctggtcattagggagcactcttttcccagctgccaccctcatttctggagtgatatgtgcctggtcattagggagcactctyttcccacctgccgccttcacgcctggagtgatgttgcctggtcatt

SEQ ID NO: 836424 - DNA, 487 bp, Homo sapiens
tcagcaaactatggcccctgggccacatcctgccacctggttgtataaataagttttatgaaaacacagtcttgtctattcgtttgtgaaatgtctataactgatatttttacaacagcagaattatrttgttataatatataattatataaatatatttacataatacatttaaatatatttacatatatttaatattattaaatatatttaattaattaatgtatttctatattatatatttacatatatttatgttatattataaaatatatttatttatgtttatatttatatatttaattttatataaatatgtatacattataagtattttaatatataaatatattatataaatatatacattacaaatatatttataactataactgactttttataacagcagaattatacatttataatatttaattctaatatataattatatatttaatatattatgtatcatttacaacttata

SEQ ID NO: 836425 - DNA, 487 bp, Homo sapiens
tcagcaaactatggcccctgggccacatcctgccacctggttgtataaataagttttatgaaaacacagtcttgtctattcgtttgtgaaatgtctataactgatatttttacaacagcagaattatgttgttataatatataattatataaatatatttacataatacatttaaatatatttacatatatttaatattattaaatatatttaattaattaatgtatttctatattatatatttacatatatttatgttatattataaaatatatttatttatgtttatatttatatatttaattttatataaatatgtatacattataagtattttaatatataaatatattatataaatatatacattacaaatatatttataactataactgactttttataacagcagaattatacatttataatmtttaattctaatatataattatatatttaatatattatgtatcatttacaacttata

SEQ ID NO: 836426 - DNA, 629 bp, Homo sapiens
gtccccaataagtaatattccatgcagtggtaactttgaactttggggagaaaaagartctaatggaaaatatagaggagttatatcttcatttgttttgctaccaaaaccctgatttctgggtttttcagtttttacatgggaatagtcagaatgaaaagccattccaaagactcttttccccatttttgttgatttcttcaggtgcctaggagttgcactgtttgagactttaatctaattcattaccctagcttttctttaataagcagattaactggtcttcaaattagaatgacacacttctttattttaaaaaagccagcatctggattaagtaaggtttagattttcttttctttcttcatttggtaatagctatgatgagtttaccacaggctggttttgctttttttaatgtaatattttctgaactcattgataagtatacccccttcttgctggtcttgcagcctcaggaaacccaggctgttgttaacagtcctagaagcaccagtgtgtgtcctgccacttggcatggatcagtcgcatcataaacatttgtggtattcattaattcacaagttccaaaacaattttcaaatgtgtaagactcattttatttatgc

SEQ ID NO: 836427 - DNA, 622 bp, Homo sapiens
ctgcagaagggacaacacagccggaagtccaaggagagcgcatgcacccatgccttggggaggctgccatacctccagcatgccagctgccatgacaccttctggtaaggacggacagtcacagggctcacacayggtggccaggctcggcattcccttggcttttcttgccactgagggcactgggcggagcagccctgctgtggtctgatgtggaaggcgagtggattctctgtggccatgtccactttggtcagagagtgctggggaatgaagaggggggagtccagccttctctggagaggtcccttgtggactgttgtccatgacctcctcctgtgtcacccgaactctcacctcatggtccaggaaggctcctgctttgcaccttcaactcccatctccctccatcacatcccagcggtaccaagaagttaccactggaattttctttggaactgaaaatttctgtgggcaaaagtccagcagcttcggttcagaacatgtataaatactttttccttcttcacctgcctcatggatattttatgcttggatcatgtccggtcagtggggggagaatcgagttttactaggacttccgatgggtgaatactggaag

SEQ ID NO: 836428 - DNA, 634 bp, Homo sapiens
cccaaaggctagtctaactttcttaccaatgtacctgggtccccttgtcactgtaatgttcttcagatcccacctttagtcatgcattcaacaatatttactgagcaccaacttactgtctagacacaggagatctactggacagcaattctgattcaacccatactgggtctaggactagacacaatctcactggtcctatgatactaaaaacctagttatctggcatattgaaggggcctcaagcccagtcatgagggagaccggaaggcatctcagggaagttaatgactcctgaaagatgaactgaaattagtttgttaaagaggatgtaggccggacatgatggctcatgcctgtaatcccagcactttggaaggctgaggcaggtggatcacttgaggtcaagagttcaagaccagcctggtcaacatggtgaaaccctgtctctactaaaaatacaaaaattggccaggcatgatggtgcatacctgtaatcccagctacttatgaggttaaggcacgagcatttyttgaatccgggagatgggggttacagtgagccaagattataccattgtactccagcctgggagagcgagactttgtttcaaaaaaaaaaaaaaaaaaaaaa

SEQ ID NO: 836429 - DNA, 592 bp, Homo sapiens
ttgaatcatgcactaactagatttcaaattggtgccctagattctgctaacccacaatctcaccttgtccatgacctgaattctgtttctgctatacatttgtacttgaaatagcttccggtcctctaatgcctttgtcttgtcctcctttttttacttgattaactcacagttcagaggccttacgttgctacacagccgagatatgacatcttctttcttttacaaattgtcacgtgttcctattcaatgtatggtctggtaccttctgattctaaagttcttagctgcattttagtggcattaaatgttttagttgcatttacacattaaactaatcaatagaatgtctggcaaatagtttttaataaaaactgctttattgacttgctttgaagtcaaatggtcctgccatttaatattgtgatgaaccttgggaaagtacaaaattccttttggtctcagatttcatatctatgtatctcccagggttataaaagaattatgagatcatatgcatacmtgcagctaaaatatgactggcacataatgggcacttaataaataatcatggctgttgccttcttatatt

SEQ ID NO: 836430 - DNA, 492 bp, Homo sapiens
gaagatgcaaaaaaattgtcacattttgaagagttccctgaaattgtacttcagtgaaacgatctgtattatggttcaagaattgtgttatatttttctttggaaatgtttctaaacacattaggaaattttaacatattggggaactttaacacagttaaagttgagagagtaaaattctatcatggtgaaacctcttaatatttgattagatagccagcaaaatattttgtattgacaaccttcaaaatgcacaagcatattttttaatcacaatttcaacttaaaaatggaaaatgcacattgaactatccttactgtatctctattttcaacatagtttttttcacacaaacaataatagatgctgtgaagattttgattattggcattctgttccttgatagaaagcatctttgctgaacrctttatcaaaacaactattagataatgaaactgacccactagtggttcatgtgttctgaggtcaaa

SEQ ID NO: 836431 - DNA, 567 bp, Homo sapiens
ttctttaaagtttcattgggcccatttctggtgctgtcttgatttatgaggaaggacttattcagatgtaaattatttccaagaacatgaatgcatggattgaacagaaaaaaatggccatccttaagccttatggcagacaaaactgaacacgtcaactgaaaagagaaataaacagaaacttctcatggaaatgatgcaaggaaaagactttaagcctcctgaaaattatcagtttgtattataaacccaaaaatgggtaagtaaaataacctgttatagaagaaataaagccacatctctggctctgattattcacagttctttctcttcctgtgtcccagttctggtatatcactggtgttccatctctccagctgtgggaagattaaaaatgttaaggtcttctctcattctgcatgtccagtctccaacatcattcttagagttctgaggtagrgattgaagatataatattctattaaatttaaaaaatatactcatatgtagcatagtacctatagttaacaatattgtatcatatacttaaaatttttctaaggtggt

SEQ ID NO: 836432 - DNA, 569 bp, Homo sapiens
tataaagatgggccagagagggatttgaagatgttggacctgaagattctgsttatgcagccacaagccaaagaatgctggtagaccccagaagctggaaaggaagaaacgggttctcctccagaacctccagagagagcgcagccctgccaacaccttgatttcaacccaatgatacctgattttggacttctgacctccagaattgtgagagaataaatttctgtggtttcaggcaaccaagtttgtggtaatttgttacatactgaaaactaacacaaacataaagaagtaggccccgtacagaatgcagtctaacgaggttggtggcagccacatacagctttcagaagcagcagtagcaaagtttccaggactgctttctagttcacagtgagcagcagagtctatgtccacaaggtctggccgtggagtgctccagtataatctgtgctttgcttttgctatgttgtctctgaccctctctacaatcctgtgagctactgagtatattttcacaaattacttttctgcctgaactatagagtattccattttttacaactgag

SEQ ID NO: 836433 - DNA, 522 bp, Homo sapiens
tcattgcacacatatttgaacaaaggaggcaaatattttgttatctggttgtttggagagtatttttcctccataaaagatgatagcgtggtgtctcaggattgtttaaaactaaaatgtctgcacccaytgtgtgctgcagaaactgcagtaaaaataagcttttgtgctaacagtgtaagaagagaagcctttgagggatgatgagattagcactctgtaggttcaaccaggtctgcagctggatctatagaccaagaatcaggaagtcagaggaataaagtaataatgatagctcccatttcctaaggcttttcatggtagtatgtggtgtgcttttcatgggttactcaatggaatatccttaacatccctaagaggtcagtaccatacatattcccagttcaaggaggaaagatgaggctcactgagatggagcaatctgcccaaagttacacagcaggtctgtgacagctccacgtgactccagagctctcaaccactagccaggtcgtctacaca

SEQ ID NO: 836434 - DNA, 640 bp, Homo sapiens
ccaagtgttttacaagttatatgtcaggaaacagggatgaagaccattatatgtatttcacaatatcacacaagggttccatcaacccaaagaaacactgtacactgcaagccagaaccccaaaaagctagtcacatccttccttcaaatgagaaatggtttgtgataatgaacatacagaatgaaaaaacaaatctattatgagccaacccagattacaaccctttgattattcataagaaatgaaaaaagtgtttaacttcttctacaaaagtattcattatgtttaatttatatttaaaatatttaaaccatagtgttacaggacaggaaaatatgttacaggaaaggggtcccaatccagaccccaggagagggtttggatctcatgcaagaaagaattcagggtgagtccacagtgcaaagtgaaagcaagtttattaagaaagtaaaggaataaaagaatgtctactccatagacagaccagccccgagggctgctgttcatccatttttatggttatttcttgatgatacgctaaacaagggrtggactattcattcctcccctttttagaccacatagagtaacttcctgatgttgccatggcatttgtaaactgtcatggtgctggtggag

SEQ ID NO: 836435 - DNA, 543 bp, Homo sapiens
cggaggttacagtctctttcagctcacccgacttcttcagctcctttacttgctgctccaactgcagtgtgctcttgttctcgttgttctggacagagagaagcaatcagtggccacccactaaaactggagaccccagaacttagtgtctgcctcccatggcaccgggaagggtggaggcaggttagaaaaatatcccctctctcccacagccatcagagcagggctctggctcacagatgcctttagaagtaccatttcatgtgaaggctacaatgccccattttacaggtggggaaacaaaggccttgagggctagggaagagggcagcctccccaggtggggcaacgcaccagctcctcgaagccgctgcgtggctcggcccgctgctcgtacagggcttcccaccccagctccagcatcctctccagctcccgcagcctctccagctccygcagagtctcctgctgccacagcctctcatcctgttgccgaagcctctcctgctccaggagctcctccacctcgtccaggagctcctc

SEQ ID NO: 836436 - DNA, 609 bp, Homo sapiens
gggtcatgctaagtctctgtcactaaccctggaaagctattatcatctgataagcattttataggatgtggacagaaatsaagcattctctcttccacttgaagaatgctgaggccttgccagcttggtggagggttgtgcatgaatggttaatggggcacagcccagaagtgaacagaaaagaaacaaaagtaggtcaaaggactatcatgacatctccaggcaagggccaggcatttcccagcactcagaaggcagctgtgttggaatcagaagaggacaggctgagtaagaaggccacttttctgacccaaatgccccagtttgccaaaaacgagggcaggggtgggaaagaaaccttgattaccatatctgcagtcccatggctcaaacaaattaggtcactcacctcgtacataaattactcaatataagatccctttatgctgctttgaaaatggaggagactaacattcagtaaggctgtattctatgcagcatttctcaagcctgctgtaccttagaatcacctgggcagctttacagagttctgatgactagttcccacctggaacagttgtagagcaatctgtggtgggggcatggtgc

SEQ ID NO: 836437 - DNA, 585 bp, Homo sapiens
ttgtgagatttatccacgttgctccatagagtcggagtttattcatttcattgctgcatastattgccgtttgtgagtatacataatctatttattcactctgctcttgctggacattcggttactttctagtttggggctgttacaaatggtgcttcggtgaacattcttatgcatgtcttttggtactaatttggtcttggggtggagtttctgggttataggatatgtatctgttctgatttagtaagtactgccaattttccaaagtgattgtagcaaatacccagaagtgcatgagagttctgatatttttgctcactaaaaaaataaaaaaaaatttttttgctcacttaaaaaaaaaaaaatgaactcaacggccgtgttcattttagctattctggtggttgtatggttgtgtctcattatggtttaacttgcacttccctagtatctactgaaatagggcaccttttcatgtgtttactggccatttggatgtcttcttttgtgaaatgcctgttcaagtcttttttccagatcaggttgtctgcttttttcttaattatttgtgggaattcttta

SEQ ID NO: 836438 - DNA, 677 bp, Homo sapiens
gtgcatgcatccattcattcatttattttttcttctcctatctgctcccataacattctgtcttacaactctggatyactgcagcctattccatgagcatcttctttgcaccacagccaggcactgtgtcagtattaagaatggaactagacaacactcagtccagaaaggaaggcagacacagatatgagtcactacataacaaaggcaagggcaggtgctagaggcacccatggtgggtacctttgtgaagcattagttacagcatgtcctaatgatgtggtaataactaaaggccatcaaatcaggctactgcaaataaaaacctatttatttatgtccacaagggcaggttcattttcaaagggctgtaaccaaaaaatagaatgagaatcagaaaatgaagtcagagtaaaaacacacattctgggcaccttgtgttccaaatctgccctcatttcatcacataggattcccaaatctcccagcaattgtccccagttcccaaggtgtctacaggctcacactccaggctgcgcaccactcctttgggaaaactccctgcttcctaagaagctggctgtggactgcaggtttcagctccttggactccatagccttttccagcaagaagctaggcagctctgcctttccctttccccgcctccctggcacgc

SEQ ID NO: 836439 - DNA, 543 bp, Homo sapiens
tatggtttggctggctctatgaccccacccaaatctcatgtcaaattgtaaacttcagtgttggagaaggggcttgatgagaggtgactgagtcatggaggcagacttcccctttgctgttctcatgatagagttctcataagatctggttgtttaaaagtgtgtagcacttctcgcatcactctctgtctctcatgctggccatgtgaagatttgtttgcttccctttcaccttctgccatgattgtaaatttcctgagacatccccagaggcagaatcccatacagcccacagaactgtgagtggattaaacctcttttctttataaattaaccagtcttaggtatgtctctatagcagtgtgagacctgactaatactgaaaattggtactgggagtggagcattgctataaagatacctaaaaatgtggaaggagctttgaaactgggcaatagacagagratggaacagtttggaggggtcaaaagaagataggaagataagggaaagtttggaacttgctagagacttgttaaatgg

SEQ ID NO: 836440 - DNA, 482 bp, Homo sapiens
ttcgaggcaataataataagattaacaacaatattaataataaaatatactacttgcacacgaacttaaaagtttaaagaaaagaaaaaagatttttaaaagatactaccatattttaccatttattatatcactgattggtggttgtgtttttggcagtggtatttggattttcttagttggtaaggtaatttttttgactgattccacaagtgattacacaagtgaaaaaacatttaataaaaatttgtttactgaatagacaaatgtataaacagccttgacacatttgttgtattggtcaactcaattaattgctgccagatgaatgaatgaatgaacatttgctgagtgtctagcattcatgtaggtactcttstactttgtcctatcaagttctccacttacccaagcaacccactttacaggtagattatttaaaataaggggacccaggtcattgcaaagagggcttgtggggc

SEQ ID NO: 836441 - DNA, 626 bp, Homo sapiens
taatgttctcaggggctatgagattgcttgtggctgaaaatatcaattcctctgggtacttcagcaattactccttacagaaccaaagtcaaatacctatatataaattatacatatatatgaattagacacacatatactgtatacacacaagcacacacacaattttaaaattgtgccacatgaaccatgttgcaccaagatttcaaagcactgagtcctatgttcaaaaattctttttgctgagtctctatcatgtgatagacaatcttctaagtataagaatataaatgatacctgccaccaagtgacaatatttgggtgtgataattacaacttagtatcatgcttccaagagaattatatacagcatttaatactgtattaaatatacagtatttatacagccaggcaccaactgtagtctggtagatctggttagaatattccctttgtcttgagaaataacctactaaggatcattacttttcatacacaagaacgcattaaactgctgggctcatgcagagatgtcaaaatactttaatatgactgaagcmctgattatggagagaaaatggcaaacaactcagctggagaagagacagatgaaatagttatggagg

SEQ ID NO: 836442 - DNA, 607 bp, Homo sapiens
cttcaaatgagaaacttggcatgaaggcctttgcacagaaaagtttcattaggaagattgactattccttacttcctaccaattgtttttacctattttattaaatttttttatgtttaacttacatacttccaaaattacttgaagcagtttacaaataaaatgtttaagaaagaaagaggagtagggctgggcctggtggctcatgcctgtaatcccagcactttgggaggccgaggtggacagatcactagaggtcaggagttcaagaccagcctggccaacatagtgaaaccccatctctactaaaaatacaaaaattagctgggcacagtggcaggtgcctgtgatcccagctacttgggaggctgaggtgggagaaccacttgaacctgagagtggtatgcaggtcaaaccactgcactccagcctcagcgacagagtgagacttggtctcaaaaaaaaaaaaaaaaaaaaaaaaaaaaaaaaaaaaaaagaaaaagaaaagggggtaattaattctaggccccaaaaatgatcatattacaacacttggcaataaatttggttcaratctttctggcagcaaaggtgaaaaaaaaagcgt

SEQ ID NO: 836443 - DNA, 657 bp, Homo sapiens
catgcatgcaaatgtttattgcagcactattcacaatagaaaagacatggcatcaacctaaatgtccatcaaytacagattggttaaagcaaatgtggtacatatacaccaggaaatacgatgcagccataaaaagaatgagatcctatcttttgtgggaatgtggatggaattggagtcaatttttcttagcaaactagcacaggaacaaaaaaccaaatactgcgtgttctgactcataagtgggagctaaatgatgagaacacatggacacaaggaaggggacaacagacactgggatctttttgagggtggagggcgggagaagggggaggatcagggaaagtaactattgggtactaggcttagtacctgggtgacgaaataattgatataacaaacccctgtgacatgagtttacctataaaacaaaccgacacatgtacccttgaacctaaaataaaggttaaaaaaaaaaaaagaaagaaagtaggagaccctgagggcttctctttgttggggctgttataacaaaataccataaactgagtgtttgtaaacatcagaatctatttcttataattctagaggccagaaagtctaagatcaagatgtcggcagattcagtgtctgatgagggcccacttcctggttcat

SEQ ID NO: 836444 - DNA, 630 bp, Homo sapiens
aacctgaggataatcagccgaggaaacgaggtccctgctatgtaagcttctgttctaagagtgctctgcagaggtgggaagttttctgttaagaaattagcatccaacagaatcaagccatctgtatgaatccttccagccaggtctctctctgcctttccagaaagtgcccgtctctgtgtcacctcccacggcccacactacatcttccagagcccactccatgcctgtcagctcggcaccctggaggggccagtggtgggacagggtgtcccaggccaggagcccaccctggcagctcctttgtggacattggggcgatgatcagccactcaggcagtggcgatggctgaaactgtacccagagtccacatcagtgctggctgggacagaatggtgcccttctggggtgggacgggtcccctagaagagacttgctaagaagtggctggtcggacgcctcccaagatggctctgtgccagcggctcggagctgggggcttggagctggggtctcttggagcaggtctctgttgctggtgggtcgggcctcctgtcgtggyggtggctgctcagccttggcaggtgaggcctgggctgggcctgtgactggccctgtcggtgtcacaa

SEQ ID NO: 836445 - DNA, 537 bp, Homo sapiens
gagggaggactgtctgagcgtcagaggacagaggagcaggtttcaccagcagatcatgagggaggactgtctgagcgtcagaggatggaggaggtttaaccagcagatcactaggaacagaaagtgagcayggaaaccccacacattgctttggttgtggtgaaaggcagaaatgcgtaataccagccaggggtgtgaatacggaggacccagaactggaattatctgtcacacctagaaagattatttgaactgtttgaaattatttggatcctttcagagaataacttgccctatttaaaaatatcgttacaataagatcaagaggaactttttctgaaaagtagttatctgacgtttgcatatcataaaaagtatgtcattagtttaaatttactgtggagagagatttagatatgctttttttgtctctatattctgatacaaaattattaaacttccaagactcttaaaaatctatgcacattatggtcaaatgatcacgaaattctttattgtgtttttaatgtattaaat

SEQ ID NO: 836446 - DNA, 584 bp, Homo sapiens
catgaccgacaccgtgggtctccacctcccgagcctatgactgacaccatgggtctccacctcccaagcccatgaccgataccctgggtctccacctcctgggcccatgaccgacaccgagggtctgcacctccagagcccatgaccgacgctgcgggtctccacctcccgagcccatgaccgacaccgcgggtctgcacctcccgagcctatgactgacacagtgggtctccacctcccgagcccatgaccgacaccgcgggtctgcacctcccgagcctatgactgacaccgtgggtctccacctcccaggcccatgaccaacaccgtgggtctctacctcctgagcccatgactgaccccgcagttctccacctcccaacccatgtccaggacatactgggggggcgggtgcattgcatgtcctcctgctgtttgtgggagacctcggtcasagcttttcatcagcatgttgactgcctgggtgtcacaaagggtgacttggggacgtggcccacatgcagcgcactctgccatgcctcactccagtgccaggtgctggcagcacacagagcaggcccagc

SEQ ID NO: 836447 - DNA, 403 bp, Homo sapiens
atattcagagaaaattcagttaatgaaaagatcagtcatattatcttgcaactgtgcctctttggtaaaaaagatagataaactggatggcgggtttgcttagaaggaggtgacagagtgcacyttcactgtctctccgtccgaaaatagaagcagagggaggacgtaagtcaggtttttggaaaacgcgtgaagtggtttctaagtccagggagtgtggtgtgaagcatttgtctcactcggctggggctggggtagaggaggccagcggccgccctgggcgtcgtccacaccccagtgactcagttcgctgggttagcttctttcttcccagcaggattcggcgttccgggtcttccctgacacccaggggctccaggatcctggcgcctctgatctgggg

SEQ ID NO: 836448 - DNA, 604 bp, Homo sapiens
ctgctacaaatggcacctgcaattcaacttcctgaaatgtagatggtggtgtttggtgactctcccaaagttttttaaatgatccattagaaaactcacaagatgaagcgaaagcagccgggagcccacgaccrgtgtccatgccactcagtgctctgagtctgcacttggtagccccaaggacaaggccaatgggagacgctcctgccccggacacagctggcacgggaggctggaaccacgagggtgtcttcctccctcctccctcgctcccacatgcaggggacagctgggcatcaggggcaggaagccagaccccactgacacgcgtggcctgtgagcaccagcacccagccatgccaactcaggcttccatgtgaccactgcctgagggtcccatgcagcgcccacccagcctcctactgcaccatccctgggagcctccggggtggcctctgtcctcgtggcgtgttccatagcatgtggcccagctggggccatgcatgtctgaaatgcgtaaccagaaggtagtcaccgcctgatcacacagcttccaggggctgcgtccatggcactaaaccacccattagaaggttgaagaagc

SEQ ID NO: 836449 - DNA, 489 bp, Homo sapiens
gatggaagcacctttaagttcagtcctccctccccaaagccagccagcgccatggctttataaccctgtgagtgagatttgctggtccatgtgtagcttctgcaagctgtggcatccctccagcrttagggtttgaagagctctcactgttgtgggctctctcccctgccgcccccatgttactcaggaaattctctcacacgtgaacgcgcccctgcgtggctcccggagatcctgctcacacgggacgtggatgctgcacgtttccggaagctctagctgttcctttcctctgttcttacatcaccatgacaatagcattgcagaagagaacatctgtgaccaaatgtgcggggatatcccccccccccactcagcagtggacgctgagttccgacactgtccacttggagatggtgtcagacccacaggtgagggctcgctcctcaaggctgcccccgactcagcagcggacaccagcagggtcct

SEQ ID NO: 836450 - DNA, 489 bp, Homo sapiens
gatggaagcacctttaagttcagtcctccctccccaaagccagccagcgccatggctttataaccctgtgagtgagatttgctggtccatgtgtagcttctgcaagctgtggcatccctccagcgttagggtttgaagagctctcactgttgtgggctctctcccctgccgcccccatgttactcaggaaattctctcacacgtgaacgcgcccctgcgtggctcccggagatcctgctcacacgggacgtggatgctgcacgtttccggaagctctagctgttcctttcctctgttcttacatcaccatgacaatagcattgcagaagagaacatctgtgaccaaatgtgcggggatatcccccccccccactcagcagtggacgctgagttccgacactgtccacttggagatggtgtcagacccacaggtgagggctcgctcctcaaggctgcccccractcagcagcggacaccagcagggtcct

SEQ ID NO: 836451 - DNA, 590 bp, Homo sapiens
agtagttatctgggagcttaagccagctttaagctttacttatraagtgttatcctgacaggtacacaaattcttcaacctgagaattgttccagaatttcattcataaaaacagtggtccccaacctttttggcaccagggaccagtttcatggagactgggtttccatggatggggagcagtgcgggtggtttcaggatgattcaagctcattacatttattgtgtactttctattattattattacactgtaacatataattaaaataattctacaactcaccataacatagaatcagtgagggccctgagcttgttttcctgcacctagacggtcccatctaggggtgatgggagacagtgacaggtcatcaggcattagattctcatgaggagtgcacagcctggatccctcacatgcgcagttcacgacagagttcgcgctcctatgagattctaatgccaccgctgatctgacaggaggtggagctcaggtggtaatgtgagtgacaggtggcggctataaatatagaggaagctttgctcactcacccgccgctcatctcctgctgggccactgggttccta

SEQ ID NO: 836452 - DNA, 416 bp, Homo sapiens
atggaatagaaacaacgtgctagtcctcctggagcttacattctggtaaggagtcctgtcaaataatgtaartgacatattgcatgctacatgatgatagaggctataaaaaactttaagagagaagggttccagcgggcaagagattgcaattttaaagagggtgtttaagaaaggccttactgagaaagtgacatttaggcaaagacttagaggaggtgagtgagtgacctataagggggaaggcatttaagatagggcatagagccactaaaaagtcccaagaaacagcaagaggtccatggggggcagaagtcagtgtggagcagagtgaggtaagtgtgagagaaagcggtggagaaggatcaaaggatcaaaggggttgactgtatggtgccttagaggccaccgtaaaa

SEQ ID NO: 836453 - DNA, 500 bp, Homo sapiens
ccacccgcctgggcctcccaaagtgctgggattacaggcgtgagtcaccgcacccggcacttttttttctttttaataractgtgtgctctataaatgtaatgactattattttttaatcctttcattctcatgtcttagtcctagagaggaaatagatgcataaaagaagaatggatacaggaataaaagaaagaaaaagaggataattcttccatcttttccgactgtcacataacgactctgaaaattttgggcgtttttaaatttcaaaatttcttcttctttcttttatttttagagataagatcttctgttgcccagaccagagtgcagtggggtgatcatagctcactgcaacctcaaacacctaggcttaagcaatcttcctgcctcagcctcccaagtagcagggacgacaaggtgtctgccaccacacttggcttggcatttttaatgtgtatcacacaaccacctgcatccttagaatatctttcaata

SEQ ID NO: 836454 - DNA, 665 bp, Homo sapiens
ttgtatatttagaaaaccccatcgtctcagcccaaaatctccttaagctgataagcaacttcagcaaagttttaggacacaaaatcaatgtgcaaaaatcacaagcatttttatacaccaataacagacaaacagagagccaaatcatgagtgaactcccattcacaattgcttcaaagagaataaaatacctaggaatccaacttacaagtgatgtgaaagacctcttcaaggtttcagtccctttaaaaacacagttctcccttgaacctcaatcctgagtagggaaggtaaactaatttctggatatctttggtttataaatatattaattataaaattttattttctgccataaacatggaaattacttgtatcagcagtcttttgaattgtttgagatctgaagtaaaaatctcgaaatagtctttgtacttgtttttattttaaaggtcacatgatatagtgctatggtttagcacttatactgttagctctgatccaaggtgcaagtttaaagaatgctgttcactgttaatttgaatgacaagcaagttttaactttatttttccaaagtgatatgaccatctgtttatccatctatttcccatctgtctatctatcttcrtatttttatattgtctgttggagttgagcaaattca

SEQ ID NO: 836455 - DNA, 500 bp, Homo sapiens
gtgtctactgagccatcagaactgtttggaaatcatttttctgtctcttttcaatttccttttgagtttccataatgtctataccaaagcctttattctgaatcctattgtactttcaatgccatcatgctctatagattgttacctcacagagaaaagattatcaggtgggatatccatgactttgcattccctcttgtagacattcttatagggacacccattcttcccttatgacccagaggtagagatgcctttgcttattttctgaagtagctgctacgtccataccacagagaccacatcctgtgagctgtctgaatcctggttagtctttttcttcaagaatcctttcccttctgattataagtaagctcagatattctcaactttcatctatctttccttcaagcccaatctccctccttcaattcttcagtgaaatgtataacaacgtagcttaagccctrttttttcaaaataattactatctatccatt

SEQ ID NO: 836456 - DNA, 660 bp, Homo sapiens
gctcatggccctgctctgtcactaactagctgtgtgaaatgtggataagttacttaatcttttatgcctcaatttcatcattgtgaaaacagtaatagcattataatcaattcctctgtggctggtgaaaagatgataataggcacacatgtttagatggccatcaaatcatggttaccttcccattctgagtgcagatccaattgagataggcataatgaggcataaggaagtgaagatgttggctgcattatgagaaaggtaattggaaagcatgactttagacctacagccaagagtgtttaccagtactttaccctcaatcagacttactaacccagtcactagtgcaaccgagttactacaggcttcccctgaagcggcactgcatagcacagggcagtccagagtgcacccatctgcctggcagactggctcctaaacaagcctggatggacttcagccttaccttttaaaaactcatgtattagagatgtctttcctcctctttggcatgaacaagcaatacaaagaggaattagaaataatgatctactctgattgaattttctccagaagaaagaaagtttttcataaaatggagcccagtaccatgcataatagaagtttctgctgaatawtccatcttattatcactat

SEQ ID NO: 836457 - DNA, 558 bp, Homo sapiens
atttccaaagttatacattctaactctatgaattctgaaagtgtgtgttttttcaacatacagctaaggagaaaggttcatatggctttcacggtcatcaaatgctaaataraaatctctgttaattttatatattgaagaaacctatttatttttgtatattgaagaaactctgaatacatgtaaatttttaactcagcagggttttcaagagaaaatatgttgtgcactaaaaaatatcggcctagagtgagagtgtaagtttaggaaagacctacagcagttgcctccatttagagtaaaaaggctttgcacgtccaattaatcatggggattccataacactctgctatattttaggacatgcaataggctacagtggatgttagaacatgtaagacttcatataattcaatcaataattctatttaattgagaaacatttattgaatacttattaccagtaaccaaaaaagtgctggaatttgtgatcagatgagctacatatatggggaataaatattaattaacctttgtttttctattacattctcattt

SEQ ID NO: 836458 - DNA, 510 bp, Homo sapiens
gatagattatgttaggccatgaaacaagtcttaaaaaactcaaactgaagaaataaataaatcacatcattcctcccagactacgatgaagtaaaactaaaatcagtaacaagaggacatttggaaaccatccaaacacagggagattagaaaatatgctcctgaacagccagtgaaacaataaagaaattaaaaaataaattgaaaaaaaattgaaataaatgcaatggaaacaaaacataacaaaacgtgtgggatacagctaaagcaatgctaaaagcaaaatttatggcaataatcacctacatcaaaaaagtagaaaaatttccaataaacaacttaacaatgaaccttaaagaactagaaaagcaagaaaaaatcaaaactcaaattagtagaagaaaagaattaatagtaatccgagcaaaagtaaatgaaattgaactgaaaaaaatkaaagattaatgaagcaaatagttggtgctttgaaaagataaataaaattgacag

SEQ ID NO: 836459 - DNA, 646 bp, Homo sapiens
tacaaataacaaacaaaaacaaagccaacttttaaaattgacatctgaaaagtatcaatttctttttatcccacttccccatattcttttttttttaaccagtgccagcttaagggattcttatgatctcacattatcccacttgggatggttgaggctggaggtagctaccatgttaatgaccctatttggcactgatatcactgttttggatctctgccatgtttaccattacagataaggtttgttcagcttctaacaggacaatatctggcaaataatgggttagttatattacttcagaatttggaggtggttatacactacttcaaaggcattagtgtgctaaattcccatttccatgatctcttgtctttttatttagggacccaagatggctacagcagcttttaacaagacattcttagatgatgagagttctaaaccgtaaggctttaggggttttaaagaactttatttttacattttttttttttatcagaaagaaactatttccaagaaatctcaagcatgtttgttacaggacagtttggacttcagggttatcatgtaaaaaggcagacgtgccaatcccaatagtcttattcctggaccaagtctcawtcccttttattttgcttctttt

SEQ ID NO: 836460 - DNA, 583 bp, Homo sapiens
ttcaaatagataacctaatgatgcatcttaaagagctagaaaagcaagagcaaaccaaayctaaaatttgtagaagaaaagaaagaataaggatcagagcagaaataaaacaaattgaaacacaggaaacaatgcaaaagatcaatgaaacaaaaagttggttttctgaaaagataatattgacaaacctttagtcagactaagaaaaaaagagagaagacccaaataaataaaatcagagacaaaaaaggagacattaaaattgataccacggaaattcattagtggctactaggagcaacatggctactatatgccaataaattggaaaacctagaagaaatggataaattcccagacacatacaacctaccaacactgaaccataaagtaatccaaaacctgaacagaccaataacaagtaacaagattgaagcagtaataaaaaggctttcagtaaagaaaagcccagcacctgacaacttcactgctaaatcttaccaaatatttaaagaagaactgatatccatcttactcaaactattccaaaaagtacagcaggggtcccaaacccctgggccac

SEQ ID NO: 836461 - DNA, 597 bp, Homo sapiens
tcctgagctggggcagtccacccacctcggcctcccaaagtactaggattacaggcgtgagccaccgcgcccggcctggcatgggagcattctaacttgacttggggaaggggtgtctgtccacttgaggctgccaggtggctgaggctaagatgacctcatagagctccttcttggactgtaggcagcagagggcaccagctttggaccctactcttctcacgcgtgcttgcacatctgcccatgctcagtcacactgacccagattcatactggcccatatgttctcatgcccccacatgcatattcatgtacatgctaacgtacatgtgcacatatgctataccaccacatgtacaacacacgtgtatgcttatgcatgcacaggtacacacaggtacacacttggatatccagatgcacacatactaacctgcacatggataccctgatgcacccatgcatacattaacaccatgtacacacacacagtaacaaatgcacacacatgggcaaacccacagccatttgctcttccatcagcraattcgtgtgtatgtaaactgtatctcccgtgagaatagggctatctttgtt

SEQ ID NO: 836462 - DNA, 607 bp, Homo sapiens
accttacctgttggtaaaggttgggacaaggattaaatgagatagtcccataaagtgtctggcagagtaataattctttctggaggctagcagggaaggggcatgctccaaaagaattctgggacatgtggttggttggtttttttttcagaggcagggtcttgagcaggctggagtgcaaatagcatgctcactgcagctcactctcaggctcaagcaatcctcccacctcagcctcctgagtagctgggactacaggcacgtgccaccatgcccagccaatttttttaatttctgtagatatggggtcttgctatgatgcccaggctggtctcgaactcctgggctcaagtgtttgttctgcctctgcctccctaagtgctgggattataggcatgagccaccacaattgggcatttgtttattaattagtgcagtgcagggagttgtgttggttgctgggtctcagggcctataaccccagmtgggatcccctactttgaataggggcctccaaaacagaagcaatgtccattagttttgtgaatgtgttttcagtccatgaatggatgctcttaggtaaaacattaatcacctgcatcacgtt

SEQ ID NO: 836463 - DNA, 612 bp, Homo sapiens
gtctttatcagaggcatcccaggcatctcagtccctagagccccaggtcagagcttactccctgcccggggcctcagtgttgctgtgcatgaatgggctgatcccctcctccagctgttttggggagcaccgtaaaacagaacagagcctggctgggtgcggtggctcacgcctgtaaccccagcactttgggaggctgaggtgggtggatcacctgaggtcaggagttcaagaccagcctgaccaacatggtgaaactccatctctactaaaaatacaaaaattagccaggtgtggtggtgtgcgcctgtaatcccagccactctggaggctgaggcaggagaattgcttgaacctgggaggcggaggttgtggtgagctgagatcgggccacgcactccagcctgggtgacagagcaagactcttgtcaaaaaaaaaaaaaagagagagagagagaaaacagagctctacatactccaggtttgctcaaaccctttagtcctcaggccaaggcatggttggcacccaccccagcaggaggggtgtaagagggtcaggggtgtggagtcrgggatatagaaatgctgtcccttgttctgtccttggcagtc

SEQ ID NO: 836464 - DNA, 617 bp, Homo sapiens
aatcatgatggaaggcaagaaggggcaagtcatgtcttacatggatggcaacaggcaaagagagagcttatgcagggaaacaccaccttacaagccattagatttcatgagacttattcactatcacaagaacagcacaggaaagacatgcccccatgatttaattacctccaacaatttccctcccaaaacatgtagaaatttaagatgagatttgagtagagaagacacagccaaactatttcattccacccctggtccccgcaaatctcatgtcctcacatttcaaagccaatcattccttcccaacagtcccccaaattcttaactcattttagcattgactcaaaattccacagtccaaagtctcatcagagaccaagcaaatcccttccacctatgagcctgtgaaatcaaaagcaaattagttacttcctagatacaatgggggtacaagcactggggaaatacacccattcaaaatgggagaaattggccaaaacaaaygggttactgaacccatgcaagtccaaattccagcagggcagtcaaatcttaaagctccaaaatgatctgctttgactccatgtctcaccaatgcaagaggtgggttccca

SEQ ID NO: 836465 - DNA, 431 bp, Homo sapiens
tcattcaaaatgtaaattctgtctcaaactgttagcaggactaaggcattttacctcagttatctctttactgaaacatcctctcaacccagtgaggataacagagataagtttgatgaagatataagacatagttccaagatttcagatataagtcatcacttgcaaattcagcgattatttaaatttgccattcttcataaactagaacaatatctggaaattgtctctctgtctctgtctcacacacacacacacgtgcacacacgcatacaaatctaatgctccctcactttcccaattcacaaataattttgaaaagtttcccatttttttggcattgtgtgaaggtgttgggatgtattatttctggtgggatagtcattctcagttaagcaaagggtawgtttaaagatgtggaagtggccgga

SEQ ID NO: 836466 - DNA, 708 bp, Homo sapiens
ctgcacttcctgtctgatccttgagagccaaccggttcctccgctcctggggaaagtgccttctagcagtgaatcttttggctgctacggatgtcagggagccaacgggactgggttttggctgggtgcaggggaggttgcgtcaggggtacctaagcggtagcggcgtgggggtggggtgtacttggtccaaagctctgggctcctctggcgggcctccctgaatgtggcctggactcgcgcacaggccctgcctcgcaggttttcaggagcgcttggcttttcctccgctttgtggggcaggtctccagtggcccccgggcgcacgcctggaaatccctgtccgtctcgtcgttgccccctatggcctcaaagacacacgctcactgcctgtgctcttgggggacgtcagtgccacgtgtggtcacacgggctccagctcggactcgcctctgtctgtctttgccggtgtcgccagaagccgcgtcgggatgccggagcccccgggccttggagatgaaggcaggcccctgctccacccaggaaggtgggaggcagtgggctcatgggtcagtgcctttgcagccgaccacacgccttgcggccctggggatctttctgtgccccrgcgagaccctttccgcctcactgcattatgaccccattgccgatcgcccggtgggatccatcatcggatcccaagaggag

SEQ ID NO: 836467 - DNA, 640 bp, Homo sapiens
aagtggtaagtgaatggaagtcaaagctatttagtggagtargttgaaccaaaattgatgactaaatacatggtgtgtaaaggaaaggaaaagtttaagactgagtcttgggtatctggcatgcatagtatactaacaatgatatacacagttactttcacgcttactgaatgagtagtggtcaatgaaatacagaacaaagtcatgcaattcactttcaagttgtgttcttaaaacttcccatggcacccatgaagatttcaagagtcatttgttattatatcccatcttgactaataccaagttgttagaaaaaaatgaaatactattgtaacaataagctaaaataagtggtattgtcttaacaatgagaaagagcatgcggaaacttcagatcatagatgatgaaaactgtttcccctatccccactcccaagaagggagaggttgagattatacaaaatgattaatcgatgtgttcttcccagaaaaaaaaaaggcagagtttaatcaaataacttttccaacctttagtatatggttcattcaaactgtctgacctgtagtgtttcagaattaccaatggtcagtggtttctatgtactataccttatattttgcctttctaaatgggctatga

SEQ ID NO: 836468 - DNA, 611 bp, Homo sapiens
cgattactcagaagaacttattgtgtagttccagtccgagtccaaaggctttagaaccaggagaattgacagtgtaaattccagtagaaaagccaatcgtctcaagacgtaagaagagctgatgttttagttctagttcaaagacaagaaaagactaaggatccatctcagtaggcatgaaaatttcctctaacttaaaaggttaaccttttttttttctatccaagccttcaactgagtggatgacagccactcacattaggaagggtaacttgctttactcaatctaccaattcaaatgttaatagtatccaaaaccacgatcacaggcatacccagaataatgtttcaccaaatatctggtggttgtttttccaagcgtgattaattctggtgctactccttgaggcacaagagatgagtgaggtgatgcaatgtactgtagttctctttccattttttatattatgacttgagttattataagagcacaagacactggataattatgggcaaattcaacagtctgctcttagcagaggtagacttcaaataacrtatcatatattatcatgcagatgctggttttttctttttgtaattcaaaactg

SEQ ID NO: 836469 - DNA, 529 bp, Homo sapiens
cattcgtggagagccgtgattctgcctaccacaagtaggatgtacaaagcatggaaggagctacagccagaaacaattgtaccattgggaatttctagcagaataaatagcagttattaactgataagttaatagattaagtaaacctaaataattgccttcattagcagcgaggcttttgatggtccatgtatcacagataaacacaaatacatctttctcatttattccaataacaaaagtgttttttggtttgttttgttttgtttttgaaagtttggtatgagagagaaagagatgagccgatttgaccactccaggctagagtatatgtagctgagagtctatggctgagtggaggaaaaaaaaaaaaaatcacaagccctgtccaggttaacagagagagaaagctgtttctgttgagatttgatggcccccatcatascaaatttgggcttctagctagcctcagttattcagataactgaccttccttccttcctccctcttgtaatagtctttgtgtatt

SEQ ID NO: 836470 - DNA, 500 bp, Homo sapiens
cttcttttctatgaattaaatacattttatggtttcatcttatctccttttttacttgagaattaaaactctctatattgttaattttaatggttgyttttgagtttgtagtatacatctataactcatcacattctaccttcaaattataatatactactttacatacagtatcatgaagtaacattttcattattttatcctgttgttctgttattgtcatgtaatttatttttatataggttgtaaactcattataaattgttattattcttgtttacattcgaggttaataatgttgttttcttctctctctttctttttttttttttttttgagacagagtctagctttgtaccaggctggagtgcagtggtgccatctcagctcactgcaacctctgcctcccgggttcaagcgattgtcctgcctcagcctcccgagtagctgggattacaggcatgtgccaccacacccagctaatgtttgtatttttagta

SEQ ID NO: 836471 - DNA, 500 bp, Homo sapiens
cttcttttctatgaattaaatacattttatggtttcatcttatctccttttttacttgagaattaaaactctctatattgttaattttaatggttgcttttgagtttgtagtatacatctwtaactcatcacattctaccttcaaattataatatactactttacatacagtatcatgaagtaacattttcattattttatcctgttgttctgttattgtcatgtaatttatttttatataggttgtaaactcattataaattgttattattcttgtttacattcgaggttaataatgttgttttcttctctctctttctttttttttttttttttgagacagagtctagctttgtaccaggctggagtgcagtggtgccatctcagctcactgcaacctctgcctcccgggttcaagcgattgtcctgcctcagcctcccgagtagctgggattacaggcatgtgccaccacacccagctaatgtttgtatttttagta

SEQ ID NO: 836472 - DNA, 563 bp, Homo sapiens
taatatctcatcagaaagaatttaaaaagcaaagtgtattgaactttkttttgttttgttttgtttttgtttagttaatatcatttttctatcatgcagcttgaaataacacggtgctaagcatggatttttccaccgaatgaggaaattctaattctaattgttagtctctttatcaatgacgccaagtggcaaggaacatcaccatctttggagacctagtggtggagttaaactactacagggaaacaactttacgtatagaggagttgagcttcctagaggaaaaggtacatctgttttttgtttctcttcctttttcctgatacaacttagcagagcagcacaagtttgtaggtgtggaaccaccactttacccaacacatgccccagaaaattacccaattcctgtctattctgcttcccttggcaccccttttcacctcccattccaatcctgtcagtctcaatcaacttttactgctgacgtatgggcccggctgctgaatgccttgactagaatcctgaagagtaatcacatctgttgttacagttgtagtggt

SEQ ID NO: 836473 - DNA, 561 bp, Homo sapiens
tctatccattcatccaattttcatacagtacctactatgtgcctggyattgttttagatggaatagaaagccagagtccttgttgtccttttatgacttctaaatgttatttgtgttcatctagtacttgtttgtttcttttttttctttagaagcctctttcagttgggcttagaggttagaagacaaaaatgagtatttagatctatgattcagcaaattactgcagttctttgattttttggcttaaagtcaagttcagagccatctcttatttttatttaatgtggttattttgtgttctgttcttccagatttggctttctaattaaatttcacccagatagatgggaaaatgagtttgcctccctagctgctctcaggagggggaagggacttgcataataggcctgctaggggtggggagaagggattacagctggtggtaagtaaaatgaatcatgcatacataaataatagagaacagaccaccctggagctggcctggattgcatttttaaaaactatacatgtgttagagacagtgcagcatttctgcaa

SEQ ID NO: 836474 - DNA, 561 bp, Homo sapiens
tctatccattcatccaattttcatacagtacctactatgtgcctggtattgttttagatggaatagaaagccagagtccttgttgtccttttatgacttctaaatgttatttgtgttcatctagtacttgtttgtttcttttttttctttagaagcctctttcagttgggcttagaggttagaagacaaaaatgagtatttagatctatgattcagcaaattactgcagttctttgattttttggcttaaagtcaagttcagagccatctcttatttttatttaatgtggttattttgtgttctgttcttccagatttggctttctaattaaatttcacccagatagatgggaaaatgagtttgcctccctagctgctctcaggagggggaagggacttgcataataggcctgctaggggtggggagaagggattacagctggtggtaagtaaaatgaatcatgcatacataaataatagagaacagaccaccctggagctggcctggattgcatttttaaaaactakacatgtgttagagacagtgcagcatttctgcaa

SEQ ID NO: 836475 - DNA, 614 bp, Homo sapiens
agcagctttcacagatttccctccatcctcacagtaaactttgagaatggttaaatggaaatgaagataaagcttattagattttaarctgtcaagttattgtgaagtgcagatgttgtactgatcctcaaagaaaacaaaatatagattctactaatttggagagaggattcaaatttagtaagttaaatgtgaataattagactaaaaccctttgtgctaaattcatagaagaaatcagtcacaagtaaaaaataagagccccatgaagtctaattttgccttcttatctgagtgtgtagttgcatttgtctgagaccacatctcaatcaattctcaagttgtactttgtcaaatatgaaaacattagaaatcatacaccttaattattcatctctacaaaaagcaaatagtagctgctttcaatctcttcacagattctttttgtaaaaaggaaaaggctatagttatgactttcctctgggaaattgataaatatatactaatcttcaggatcctgtctaaaatgtgataacagtgtctataatccctgaggttaagaaactaacaaagaacgtactgtgtgcatataggtatgcatatgtatattactt

SEQ ID NO: 836476 - DNA, 650 bp, Homo sapiens
cctcctaccatggagtttgagatctgagaacggacagactgcctcctcagtgtgggttcctgacccctgaggagccaaacttggaggcatctcccagtaggggccgattgacacctcataaggctgggtgcccctcagagatgaagctttcagaggaaggatcaggcagcaacattttccgttctgcaatatttgctgttctgcaacctctgctgatgatcaccaagtgaacagggtctggagtggacttccagcaaactccaatagacctgcagctgagggtcctgactgttagaaggaaaactaacaaacagaaaggacatccacaccaaaaccccatctgtacatcaccatcatcaaagactaaaggttgataaaaccacaaaatggggagaaaccagagcagaaaatctaaaaattctgaagatcagagtgcctcttttcctccaaaggaacacagctcctcaccagcagcggaacgaagctgggtggagaatgactttcacaagttgagagaaaaaggcttcagacgatcagtaacaacaaacttctccgakctaaaggaggatgtttgaacccatctcaaaggagctaaaaaccttgaaaaaagattagacgaatagccaactagaataaacagcatagagaag

SEQ ID NO: 836477 - DNA, 650 bp, Homo sapiens
cctcctaccatggagtttgagatctgagaacggacagactgcctcctcagtgtgggttcctgacccctgaggagccaaacttggaggcatctcccagtaggggccgattgacacctcataaggctgggtgcccctcagagatgaagctttcagaggaaggatcaggcagcaacattttccgttctgcaatatttgctgttctgcaacctctgctgatgatcaccaagtgaacagggtctggagtggacttccagcaaactccaatagacctgcagctgagggtcctgactgttagaaggaaaactaacaaacagaaaggacatccacaccaaaaccccatctgtacatcaccatcatcaaagactaaaggttgataaaaccacaaaatggggagaaaccagagcagaaaatctaaaaattctgaagatcagagtgcctcttttcctccaaaggaacacagctcctcaccagcagcggaacgaagctgggtggagaatgactttcacaagttgagagaaaaaggcttcagacgatcagtaacaacaaacttctccgagctaaaggaggatgtttgaacccatctcaaaggagctaaaaaccttgaaaaaagattagacraatagccaactagaataaacagcatagagaag

SEQ ID NO: 836478 - DNA, 623 bp, Homo sapiens
tctcatcaggaaaaataaactaagacaattttctggaagttatacctagtaggttagtgtgggatagaatgggggaaaaagtctaatatgggaaatcacaaaaatgtccagaagagagactgaatcctcctgttcgtgttcagcctgactagcctgcagctgaatgttaaattctctagctatagttgatcaaaccaaactattatcaaacatccatataggtagatgaaattgacggaagacctatcagcacaggatcaggaaaacaaaaggtgtgtatgtgttctaaaaaagagtaaaatttatttaaatttagattgcatacatatgcagttctcattcctggcctttccaattggtaagatactttgctgggcactggatattaatcagaaaaaagattatcatattcccttacctgtacactttctttcaagttggaagagacagtcaataatacattaatatacatgggtatagttttaattctaaataatgatataattaaagactgyaatatactgctttgtatggttttcatgtgttctctaaaagttcatgtgttggaaacttaatcttacaacagcattggaaggtaagggactaataagaggtgatgagat

SEQ ID NO: 836479 - DNA, 585 bp, Homo sapiens
attgaatatctgatggaatttattgaatcctgtactcaatatagtattgaatatctgatggaatttattgaatactgtactaagacaaaatgcttgtgcagatactcaaagtaagatttttacttaatttgtatcacttttgcaccattgtaaagttgaaaaattattaacttgaaccactggaatttgtggacctccatattcaaaacttcattgtcattttcagttcttatatctcttctctgtcttttaatatttattactaatattatgacacctaatatgcagtgatattctaacttaatgctaagtatttaatgtcattatctcattcaatacttaaaatacctccttgaagatattttatgatgtctatttatatgtgaagtaactgaagttttaggttacataacctgccaaagattccatatcatctaattttcaaagcttaaagttgaactccgcgtattttccaccaaaagtcaaataagtaagcatgatatatctgatttttaataatgatatgctattttattattagwttaataagatatttttgagtgctgatataagaattgaggacca

SEQ ID NO: 836480 - DNA, 607 bp, Homo sapiens
atgggaattttgaaaaatatcttcagattgcttctattgtctcagtgaaaagaaagtaaggtgatcatttaaaagtgaaaataagagattaggtattggaggcttgagaagaaaagagaaagcaagcaatattcatctggaagagtgagagaatgaatggactagagcaatatagtaagatcacttggcagcattaggaacccactggaggttggtgatcatgattataaagtgagactattcaaagagattgagtgtttttctccagacacattcagccatacaagtaagggcactgagtaggcagatagatttaaccagcaaagcagtagacaggaaagaaagttgaagatataaatatgacaatgattatcaaggctgtccgtggaatttaagttcccagtaaagagggaagtgagaacctgatgatatcagtttccattaaaagatggtaggataaaaggatttttccagagagaatgaaaaatggatagatttggatattttttaaaactgaattagaaagttagaaggtggtgctrtgagaataaaatgttgaaattgtgattataaagggattacaacttggggtaacaacaaagtcaag

SEQ ID NO: 836481 - DNA, 588 bp, Homo sapiens
aaagcagtttgggtttcagataacagttctcctcctcatattacatagccaacaaggtagagaaagcatcaatttatggaccaaaatactcagtttccattcccagggttgccaaatgaccttggataagtcactttacttccctgagactcggtttccctgttggtaaagggccacagttatgtctcacagagctgttgtgaggcgtgagaaatcacacagaaatctttcagaatggtaaaagactatataaataggtgattgttagtcatcattagctagaaaactactatttatgcaatcgatgatcaatcaatggggtaagctgttggttggttaatgggttttcccacactgtgcctcagagagctgagtgacaaggaaaacccaaataagttgactcaatggccagttccactggcctgagagtcaggctgtcctgctgccaggggcagacaggccgcacacctaaatgcagaggataatggggcaactaggggtgatgctgagaggaaactggcatttttcacagtcttaggaaaaaagaagagagggacartgtcaccagtggatccatgtgggggctga

SEQ ID NO: 836482 - DNA, 607 bp, Homo sapiens
tcaccaccgttttagtagcacttgtcacatttctctcggatcctgataactcatccrtaataagagctaacacttacaaagtgcttattatgtgccaaacaagtattaacttgctcatcactttattttcacaacagccctatgaggtagagatggttattattctctgttttacagatgaggaaactgaggcaaggagaggcttaaggatttgcacaagggcacacaggtagtgcatggcacagccaggaataagtgggtcttcagagtctatgctcttaacctctataccacagaacattctatagttttactgttttcctgcagagggaacattaagccctccagggtctagttttggacattaagaagcagatattaactcatttccgtttctttaacactccaggcctttgcacatgctgttcccttagctgaaaacactgttctctgccattgcacagtggcttcctttcattcttcagtttgggtttaagtgctacctcctgagccagatccatcctgcccatcctgatgaatccaacccctctcccccatcgtgttgttctcgagcactgaaccctgttgatgtatgtatttgtttgtt

SEQ ID NO: 836483 - DNA, 631 bp, Homo sapiens
tggcctccatgtcttttccccggactcactcattttcctgtactccttatcctgattgggggcactaggccctaaagcagaaacctggaagtcattctattcttctccttcttttatatctacatagtcatgatgttctaacaagtatctctttaagagttctcatattcatcccccaaatccctgttttagtttcttcatcatttttaacctatgcaactataagaatcaaactagtttttctatctcttgtttcaaccccctctaactcattctctgcattgctgcatgagactttttttttttttttttttttttttttgagatggagtctcgctctgtcgcccaggctggagtgcaatgacccgatctcggctcactgcaacctccacctcccaggttcaagtgactctttcgtctcagcctcccaagtagctgggactataggtgcccgccaccatgcctagctaatttttgggtttttagtaaaaacagggtttcaccatgttagccaggctggtctccaactcctgacctcaggkgatccgcccacctcggcctcccaaagtgctgggattacaggcgtgagccaccgtgcctggctgagacatttttaaaacacaagtattac

SEQ ID NO: 836484 - DNA, 579 bp, Homo sapiens
  misc_feature 1, 2, 3, 4, 5, 6, 7, 8, 9, 10, 11, 12, 13, 14, 15, 16, 17,18, 19, 20, 21, 22, 23, 24, 25, 26, 27, 28, 29, 30, 31: n = A,T,C or G
nnnnnnnnnnnnnnnnnnnnnnnnnnnnnnngaattccaaagcttctcccacattttgatttttgttacagcattccgggtataaaatttaggtacaaaaatccatattaattactatttctgtataacaaatttagtcaaaattactggcttagagcaacaataaacttctttttaatctcatacaatgtctgtgttaggaatttgggagcagcttatcttggtggtcctggcttggagtctctcgttaagttgtagttaagatgttggccagatctgtaaccatttgaagcttactggggctggcaaatccatttccagcatgactcactcacatggctggcaaaatgttattggctggatggaagtcttaattacatgccacatgacccactccacagggctgctgagtgtccccattgtcactggcttccctcagagtcagtgatccaagwgaacaaaatagaaactgtactattttttacaatctagtctcagaggtcacacaacattacataatctattggttacacagattaaccctgatacaatggagaggaggactacactaattcttta

SEQ ID NO: 836485 - DNA, 615 bp, Homo sapiens
tctgaaggcagagacaaaatggtatttggggaaaagctttccaggacgaggaggcagaacatgcaaagaccttcaggtgacaaaatctttgggatgtttgaggaacagcagaggaaattgtaggctgtagcagatgattaagtataagagtattagtgatgaggttagggatggtaggttgggggagagtattataagtaattagagggactttggtttttgtgctgaatgatttgggaaaccattggagggttttgagcaaaaacgtgacatgtttggacttaaaatttaagaggatcgaggtgggcggatcacgaggtcaggagatccagaccatcctggctaacacggtgaaaccccgtctctactaaaaatacaaaaaattagccgggcgtggtggcggcgcctgtagccccagctgctcgggaggctgaggcaggagaatggtgcgaacccgggaggtggagcttgcagtgagccgagatcgcgccagcctgagcaacggagcaagactctgtcaraatagaaaaaaaagaggatcagtctggtcgttgtgctgagaaaagtctaagagagacgagagataggaagtccagtaattaggccatggcaata

SEQ ID NO: 836486 - DNA, 647 bp, Homo sapiens
gagacccattttggacttctgacctccagaaatttaagataaattcttgttttattccactaagttcatggtaatttgttatagcaacaaccaaaaaaaactaatacagtcaattcattgttttkgtttttaatcttcataggtacttgacagttgtacatatttatgggatacatgcgatattttgaccaagcatgccatgtgtaaggatcaaatcttggtaattaggattttcattacctcaaacatttatgatcatttctttgtgttgagaacattccaaatctacttttatagttatttattttgaaatatacaaaataaattattgttaagtatactcaccctatctactctgggcccaaggagatggggttccttggggtctcagaaaaaactttaagagcgggatctgatcgctaagaaaaggctgtggagcccaaaaagaaatttgaggtctcttggagatgccatgtagttctatggcctactgtccttaaaaatccttctcatctctattcacctttttaatgctttcaggaatcaatttcctccttcaggaaactggcattttctgtagagaaatttttctatgcaaatacttgtctttacagaagtaaatgaagttaaaaatatggaactttagg

SEQ ID NO: 836487 - DNA, 495 bp, Homo sapiens
gcttggtgtcatttcctgcagcagggtaaatctggctcctgttgttccatctgtcctccagcagcttcccatacaggcagctcacttcacttcattttcaattttaatgacttctgttctttattackccttttgtctacttttattttgttttggttattcttcttgttctttttctaacttcttgagttcatattaagttaattagcttttagtctttctaagtcaattactgaatgttttgaacttttcactttatgttactttatatatgttaggctattaaactaatccacgttctaaactgttattgctactggaaaatggtcccgatccagaccccaaaagaggattcttggatcttgcacaagaaagaaagggtgagtccatcaactgaaagcatgtttattaagaaagtaaaggacaaagaatggctacttcataggcagggaagtcccgagggctactgattgcccatttttatggttatttctt

SEQ ID NO: 836488 - DNA, 605 bp, Homo sapiens
ttcacagtgtaatcgtgtgcctracggctgtagctactaacttggcttacattgactgaccactaagggactctaggagtcagaatctaaatgctgagtgtctcaaaggtgtagagagaatttcagagggccttaccatgacatggggattaaactccagttctgcccaattctcgtcacgaaatccttatcccgtgcctctttgtgtttggtgtccccttgcctaggggacagttttcctgggtaacatcagcaagataacacttcagtcacattccatttgatactttgaatactctggggtccttacccaccaaatggatggagttcagctgctcaatcactgcctttctcagaactctgttgtccaaccacaattcccttcccctactcacgtagggatagggctatattggcaaaatgccgcccgaacagcctgctgacagtaaaccaaatattagtttctctcaccttcttgaaggcatttacagtctttgtaagcttttctcctaattttccctttcccgttcctgcttagattctaagaatgaagtgcatccttctccttttcttcatcaggtgaagtgggatttacccattaccat

SEQ ID NO: 836489 - DNA, 605 bp, Homo sapiens
ttcacagtgtaatcgtgtgcctaacggctgtagctactaacttggcttacattgactgaccactaagggactctaggagtcagaatctaaatgctgagtstctcaaaggtgtagagagaatttcagagggccttaccatgacatggggattaaactccagttctgcccaattctcgtcacgaaatccttatcccgtgcctctttgtgtttggtgtccccttgcctaggggacagttttcctgggtaacatcagcaagataacacttcagtcacattccatttgatactttgaatactctggggtccttacccaccaaatggatggagttcagctgctcaatcactgcctttctcagaactctgttgtccaaccacaattcccttcccctactcacgtagggatagggctatattggcaaaatgccgcccgaacagcctgctgacagtaaaccaaatattagtttctctcaccttcttgaaggcatttacagtctttgtaagcttttctcctaattttccctttcccgttcctgcttagattctaagaatgaagtgcatccttctccttttcttcatcaggtgaagtgggatttacccattaccat

SEQ ID NO: 836490 - DNA, 583 bp, Homo sapiens
tgaagagatacattgaaaagtacattgtttcattgagagatgaaacaagtgattgttatatctgattttcagttcagtattttagtagtttttyctcttaaaatcagttttacagtgtaaatttcttactacaaagctttatgttgaaaatcaactactttgaattgtaattagtaggaaaaaatatgtttctatctttgaatttacaaaaatcaacaaaaacatacaaaatacgggagatattacctagcagtatgtgtgaattttcttgacgttagttaatagtaatctcatcgtgagtcagacaaataaaacagtctctcaactaggaataacattgtaccccagggatatttggcaatgtctgtgaactttttgattgtcacaactgaagagtagggatagtctactgacacctacatctacaatgtatttctacaacaaaatattatctagccaaaatgtgaaatcaaattgaaaacatttagaacacaattgtaaataataatttagtaagcaaaaattttaaagtgtagactatatggatggaaatatttgtatattgggtataagtctcctagag

SEQ ID NO: 836491 - DNA, 614 bp, Homo sapiens
aaacctgaaaatacaatgaaaaaaaatgagataaattttgctagcattttgtaggttattcttatttcttaattcctacaagtttaaaaggcttttttttatgtgaaaactactttatcatgtccaagttacgtcaattattctgaattttaaaaatatttttattaattttttttttatttttatagagacagggtctcactatgttgcccaggttggtcttgaactcctgggctgaagcaatactcccacctcagcttcccaaagtgttgggattacaggtgtgagccaccatgcctggcctattctgaaaatttgtttaaacaagtgatacaggaaaaaataaggagaagtaactgattgacatgcaagagtatttaaacatggatggtacaaagatataaaatccttttttaactatttttataagaaatagctactttaataaatgacccaattttatctgaaaatagatcataaataagaagaattagaaggggttttaacaatacctaatcaaatatyctctcaggagatatgattattggcttttaaaagatctttaaaaactacaaattctaaattttatatttatttataaaaatgtagtattg

SEQ ID NO: 836492 - DNA, 603 bp, Homo sapiens
ttcctttgccttttgttcttttcaggcctttatgagctggatgaatgaccactcacattgagaaaggccatctgctttactgaatccaccatttcagatcctgtctcattcaaaaacattcttacagacatacccagaaataatatttaaactggaaaccctggggctagtcaaattgatacataaaattaatgacaagcacagaaactaactttgcaagaagctggttgcttttgtggcaagatgaatgaaaaaccagagtgagtaatcacatatgaatctactgatcttgccagttacttaaacaataagcccataataataattgtaatatgtgattttttgctgtagaattagcagaccttctattgacttcgaatagaatcatgtttctggggtagattgtgtcaactgaattaaatccaatctgcctgctgtttagcaccctttgcaaatctctctccacctactactagtctttagcaaactgctggctcagaataaatgccccagatttaaaaaaaaatatgaaagtctccaacattgttattactcaaagwcacagccaggagaaaagagaaatatcaaagaaatgtaaataat

SEQ ID NO: 836493 - DNA, 638 bp, Homo sapiens
ttttttttttttttttttttttttgagatggagtcttgttccattgcccaggctacagtgcagtgscacaaacttggctcattgcaacctctccctcctggattcaagtgaccctcctgcctcagcttcccaagtacctgggattacaggcatgtaccaccacgcctggctaatttttgtacttttagtagagacggggtttcaccatgttggccaggctggtctcaaactgctgccctcaagtgatctgcccaccttagcctcccaaagtgctgggattacaggcatgagccactgcacctggccctaattattaatttcttactgttcctaatttataaattaaactttattatatttatatgtggacagcacaaaacatagtatatataggatttggtattctatagcttcaagcaaccactggtggtcttgaatgtaccgcctgcagataagcgagagctgctatgtaataaagctgaggataaaaagtcaatatacaaaaatgagctgtgtttctatatactaacaataaactatctgaaaagaaaaatatgaaaataatcccatttacatacaataccacctaaaagaataatatatgtaggaaaaaactaaagagtttcgtgaaagacttg

SEQ ID NO: 836494 - DNA, 632 bp, Homo sapiens
accaatattctaaaagaaatgagaaggaattaatctcttaaaaattaagattacctctctctcttctktccatgcacccccccaccccggccaaccccattcagcattcctaactgaaggctgctatattggtgctaaatataaagtctcttaccagtgtgtgctctgcatatctgaaaatcatgcagtggtgaacctcttgagtgtatttctttctttctttattaatgaaaaggtttttatttgtgccctctgttattctcagaagtacaacacaaaacaaaatgggaaaccatgatttatcttctatttgataaaaacatctgcagaataaaatgagcctcttgttgccggaattgtcatcaatgatgactttgacaaaatgagcaatacataatttgctagctcccttgtgaagctgaaacagattgtcaaataaaacactggaggagatgcatatgggctgagtagactggctttgaataggaacatgcgcaggtggaggcttagtagtggctgtaagaaggaggacagccctaatttggagggtcatttgcatttgaaaatgctccttactaaattgtgagtattccctacaggaaaagagaatgcattctgccaaaactgcagct

SEQ ID NO: 836495 - DNA, 611 bp, Homo sapiens
ctttaaggatcacataagatcatgtgtataaaatgttttggaagctgtatgtgctgcacacatgtatgtgggggcctgtcacgtggccctggtgtcagcgaatgtcatgtgagagctgcagccacrtggcccagccaggtcagtggagcgtcttgcctgtacctgaggagggtgcagatttagtgcaggttgtccaagtgcaggtctacaaggagtaagtgctcaacttttttttgtttgttttgttttgagacagggtctcactttgtcacccaggctggagtgcagtggcatgatctcggctcactacaacctctgcctgatgagctcaagcaatcttcccacctcagcctccagaatagctgggaccacaggcaaacaccatcacgcctggctaatttttgtattttagtagagatggggtttcaccatgttggccaggctggtctcgaactcctgggctcaagcaatctgcctgcctcggcctcccaaagtgctggggttacaggtgtgagccacggcacccggccagctctcagtttttcgttttgagagtgaatactgccagatcaacaccaatcttggttgctgcagcattgaaagtgtcctca

SEQ ID NO: 836496 - DNA, 613 bp, Homo sapiens
tttccatagagccaggctgaccagacccgggatgggcagagtggtggcatggcgtagaaataggcccaaatgtggatacaaggcacatgagttctaggcagtgtttgacctggggcaagtcastgaacatttctaagcttcagtattctcctttatgaaatgaggaagccagtccaggtaatctccaaggtttctactcgctctaacatttctctggttccacttggaaagagcttcatggattagcagggacttgactgagagccttgatggaagtgtagatttggatttgagtgagaagagaaggaaggaaggagagcggccacctgcaaggagggaggtggccacccaaagttggggtgtttgctgggatgtgtgagaggaaagcttcacagggtgggactggccatggacagatctgcatgcaggcagatccagccgactcgaccaccgtccatcaggagccacagcaggttcttaaagggaataaacgctaaatgcattactttaaggagattaagctagtgtcaggtaagctagtgtcagattagaacagggctggatctggagaaaagtgggcaggaagggttgggaggtagccatgggggtaatc

SEQ ID NO: 836497 - DNA, 556 bp, Homo sapiens
aaaaaacatctagcaaactaactgattctagtttctattcaattaaaagaaatgccaccttgaagagagagaaatgggagggagtgcggaaggytccatttgacaagccccctgttgccaccacaggttggaaaagaagccaggatagaaggtgcctgtacaggaaaatgagctgtctgctaggatttctcactgagttttcaatgtaatatcgaaaagaaatgggaaacattttaggatcatttattctcagcacagaaataaaggtgcttcttgaggttgaattggactctggtgcctcatcttcaggactgtcctcattaacttgttgggatcttttacatgtcacttagcatagaatctcaccaaataatgcttcattctacaccttttaaaacccactggtttccaaaagtgtaacaagaatagatggcaaaagccctaaagtagagagttaagtacaaagcttcaaattgacatggttaataaaaaattaaggattgctatgagacacttcaggcaaagctaaacaaactaggggattgggtagtgtgaa

SEQ ID NO: 836498 - DNA, 526 bp, Homo sapiens
agcctgtttctactcagaagacaaggaatgattcatgagccaaattttaggttccgcatgttcctttttgcctgtcacattctgaaaaacartgtactcgtgtgcagagaacaggacacaatgcctttaagccctagtcgtctttcaacaacatagtggaagactagaagatgtggcttttcagaacacttacgtacaaaacaatctacttgcaaatgacagaataaagacaaaactgaaaaaagaagaaccttttcaaccaagagattctaagataaaggttactattctcctagaattttaatgaatccatttagtcactgacccctggagaatgtcaagttccacatttgcattgaaatggtagtgaacgctcatgcttcttagcagtttatcacaccaagactgctgtgttactctcttcctctttctgtgtatatgtacacacaatctttttttctccattgtaactgtcaaatctcaatattttttctgaagcctgataatagggttgaaaaatgtgacc

SEQ ID NO: 836499 - DNA, 582 bp, Homo sapiens
tcccagctactcgggaggctgaggcaggagaatggcgtgaacctgggaggcggagcttgcrgtgagccgagatcgcgccactgcactccagcctgggcgacagagcaagacttctccatttcaaaaaaaaaaattaatgcttctaagtataaaactgtaactataactcatagaaaacaaagcagcacagaattcaacaatatcttttaaatgcagtatccattaggaaggactactgttttaaaaagcctcagcactaaaattggctacttgcaataccaaatggtagttttcagtttgacttggtttcttcaacctttttcctttgacttcttatctttcattgcttctaaataggttttctaccattttttttttaatttttgctccagcacaatgagttaagtccagtaatgacagagtagagtccagcaaagagacaaataaggccctaggtttgaagatcataataaaacaagggttttaaaaattgtgcaaaccttgaaaataagacaaaatgaggactccatgttctttcactgccacattggagcatgaactgatagatccattcatgcattc

SEQ ID NO: 836500 - DNA, 554 bp, Homo sapiens
ccagagctatgcttcctgtacagcctatagaactgtgagctaattaagccttttttctttataaattacccaatctcaggaatttatttatagcaatgcaagaatagcctaacacatstccacattgtccataatggctatactaattcacattccaacagtgtacaagggttctcttttctccgtatccttgtcaacacttaccatttttctttttgataataggcattcttacagatgtgaggggataccttgttgtggttttgacttgcatttctctgattattttgagtatttttccctatgctagttggacaattgtatatcctcttttgagaaatgtctattcagatttttttgtccatttttaattgagttcttttattactgttgttttagttatgtattttggataatctttatcagacgtatggtttacaagtcatttcttccattccataggatgtttcttcactctgtgtattgtttgcttggctgtgcagagctttttattatgtaatttcacttactaatttttgttttttgttgccttt

SEQ ID NO: 836501 - DNA, 586 bp, Homo sapiens
caatatattctggtagcaaaagggagattaaatcaatgttgtcagaggtayaagtctaaaaggtacgtcttcactagtaaaactagaaaaggaaaagaatggatatttgaactatctcgatagcttctgtaatttttaagattatagttcaacattcaagcaaggactgtttgcacctacttaaaattttctaatagttaaatctttcctactgaaaattccaacttttcattgaagaaaagctattggtaaatgaatattatacatatatttctatgtatactcctgaatgtctctcttctctccctccctctgagtctgtgtgtgtgtctgtgtgtctgtgtgtctgtgtctgtgtgtgtgtctgtgtgtgtgtctgtgtgtgtgtgtgtgtgtgtgtgtgtgtgtgtattatatatgataacatatagattatcctagatctgagttactgcatggagaactgttgccctggagagtcacctggcacaatgacctcatgtgcatgagaaataaatctttgctgtatttaagcttctgagattttgagactgttggttgctgtagcataatttaataagattaa

SEQ ID NO: 836502 - DNA, 586 bp, Homo sapiens
caatatattctggtagcaaaagggagattaaatcaatgttgtcagaggtacaagtctaaaaggtacgtcttcactagtaaaactagaaaaggaaaaraatggatatttgaactatctcgatagcttctgtaatttttaagattatagttcaacattcaagcaaggactgtttgcacctacttaaaattttctaatagttaaatctttcctactgaaaattccaacttttcattgaagaaaagctattggtaaatgaatattatacatatatttctatgtatactcctgaatgtctctcttctctccctccctctgagtctgtgtgtgtgtctgtgtgtctgtgtgtctgtgtctgtgtgtgtgtctgtgtgtgtgtctgtgtgtgtgtgtgtgtgtgtgtgtgtgtgtgtattatatatgataacatatagattatcctagatctgagttactgcatggagaactgttgccctggagagtcacctggcacaatgacctcatgtgcatgagaaataaatctttgctgtatttaagcttctgagattttgagactgttggttgctgtagcataatttaataagattaa

SEQ ID NO: 836503 - DNA, 630 bp, Homo sapiens
gcatgccccaccactatcttccctgtgagtatcttcaagatctggccccgagcaatcttgaagggtgtggcatkcaccatgtgctgcttctggataccactccatctggtccagtagtccacagtgtggcaggggggaaggatgtactcatcataaagcacatctccgttgtagttgacaatgctacattgagccaagaaactaacatgccccttgggtcctgtgcccaccatctcagagtcaattgccaccatcatcttccttggcaacttctgggatgctctggagcatttattctcagaatgagcttgggtggagttctgtggtgcattcttctgaggatgattcttcttagaggatttcttccgggagcccttcttctgggagtgggttgggtggctattaatctttggaagggcactccagatctcccccaacaaatctagtttagcagcaacagaatcggccttcttcaaataggcaggaatcagtcaaaacactgcagctttctcgtccagggactgtcctgacccattgctggaggcagtgatcttcttcttttttaggaagggaggggtcttccaagtgccatccaccctaggagtttcccccttttctggaggttcagag

SEQ ID NO: 836504 - DNA, 630 bp, Homo sapiens
gcatgccccaccactatcttccctgtgagtatcttcaagatctggccccgagcaatcttgaagggtgtggcatgcaccatgtgctgcttctggataccactccatctggtccagtagtccacagtgtggcaggggggaaggatgtactcatcataaagcacatctccgttgtagttgacaatgctacattgagccaagaaactaacatgccccttgggtcctgtgcccaccatctcagagtcaattgccaccatcatcttccttggcaacttctgggatgctctggagcatttattctcagaatgagcttgggtggagttctgtggtgcattcttctgaggatgattcttcttagaggatttcttccgggagcccttcttctgggagtgggttgggtggctattaatctttggaagggcactccagatctcccccaacaaatctagtttagcagcaacagaatcggccttcttcaaataggcaggaatcagtcaaaacactgcagctttctygtccagggactgtcctgacccattgctggaggcagtgatcttcttcttttttaggaagggaggggtcttccaagtgccatccaccctaggagtttcccccttttctggaggttcagag

SEQ ID NO: 836505 - DNA, 637 bp, Homo sapiens
ttcacatcagacgacaaagaacatctggggtgaaaggctccattagaagagcaatgtgggatggtgctgtgctgacaactggtagtccctaccctacatctttgtagaggactggagcccagagyatgccatggtcaacttgcatgttgaagtgaagacctcattcgaggtgtgcatgtgcttattacagatatgccacggtgctaagtaccccaggactacaggaaaaaataagaattgatgctttatccatgatcatgaggcacacaggccagagcgccaactgtggaattgcacagcctgggttcaaagcctggctgggccatgaccacctgaatgacctgaggaatggtctcaggcaaatttgtaaaaagtagagacccttcctgccagggcggcatgtggtaagaggcgcatccagtcaggtcagggcaccgcgtcctctctttggaaacctgcggagcgaggctggtggcccttgaggccacggcagccatggagaaggcaggcctggctccaggcagcacagaggcactggagaggccccgggggagcctggcgggatctggctggtcctgcgctctgcttccaggttctggccctgtaacccaggggacagggccggccaagacagggc

SEQ ID NO: 836506 - DNA, 569 bp, Homo sapiens
gtgcttggagcctggggaaaagagttatgaaggaaacgttttccctgtgtaactttcatatgtcttgaatattaaaccatrtgaatgttttccttattgaggatataaatgtaattttaaagtaataaacagaatagatgttttttaaagagacctctaatcctgctagtttagaatcaaaagtaactggtggtattatacccacactccccaattgcttagccctattcccaaacatctgctggcacgtattttatagataaatttctggtaaatataaaatattataatttcattaatctgaaaatgttagtaaatctcagaactctgatgcatacgtatgttttacctaatagtctattcaatgtttattttgatttcagtattttaaagaaatatttttataccccaccttcccagattccttcaagatttacaaagagcatgaacaaaaagcatagggaaggaatatgtcttcttctgcctgcagtagagcttgttttacttaaatggtgagcctgttttacttcggataggaaccttcatttcatctgggattcaaattgctt

SEQ ID NO: 836507 - DNA, 479 bp, Homo sapiens
aggtggatcatgaggtcaggagatcaagactatcctggccaacgtggtgaaaccccatctctactaaaaatataaaaattagctgtgcatggtggcgcacgattgtaatctcagctgcctgggaggctgaggcaggagaatcacttgaacccaggaggcggaggttgcagtgagccaagattgagccactgtactccagcctggcgacagagcaagactctgtctcaaaaaaaaaaaaaaaaacccaaaccttacaggatcctcagttaagcttgaggattaactgaattaatacaggtaatagtagaaaggctgacaaactttttccataaagggccagagagtcaatattttaggcttagcaggccgaaaagtttttgttaacaactactcaattctactgwtggggtgtgacaactgcagagacaatggataaatggatggatggatgaggctgtgttccaacaaagctttacaaa

SEQ ID NO: 836508 - DNA, 559 bp, Homo sapiens
ggagattccaccctcgtgccaacaaatgctttgaaggcagggtaatatctaagtggggcttattaattgtgaacaccctatcgtgggtagctgattcttgcccccggaatgaatgtaaaccagccttccataaattgaattccttttctgaacatataattgaatttggagaagtgtgtgccgggggggtgtttaaataagtgcacaaatatggtaagaaggccttcacaccattacatctaattcagtaagcaaaaataatggcagggcacgttccaattagtgtttgatttatttgctttaacaaatccaattagtagaatgttttataaagtcatccaatgtcatacattcatggactcaacagatacaaacaatactcctaatataaaaaaatgttttaaagctctttgagcagtgaatttattataaataagatgatgtctctctgatggctcgagcattccccaaggaccaagaaaacagtgtctgatctgttcatttggttctttttctrtgagactttgtgcagcaactcaggttaatgtggcccattata

SEQ ID NO: 836509 - DNA, 577 bp, Homo sapiens
aaatgtggaccccattgactgaagagtagctgggtccccatgcagagggaccttgtgatgtccagcctttcttcaaagggacaatggccattgacttgggtaactatccactggggaactgacatatccaggtcacatctgctcctgactgacccacaggaggctacaaagcccctgcctttttgtctttgaggtggacccctatgtagaaatagccaggcttcagagttccctgtaggactgacggaagcatccctgtgcactcgctgcttctaccctgtcctgcttctgtaaccacccaatgggttcacttttcctgctgcctagtcagagccaatttattaagatgggggattgcaatggagaaagagtaattcatgcagagccagctgtgcgggagactggaattttattcttactccaatcagcctccctgagcattcaaggattagygtttttaaagataatttggtgggtaggggcttgggaagtgggaagcgctgattgatcaggttggaattatagggggttgaagtgagtttctcttgctgtcttctgttcctggatgggatggcag

SEQ ID NO: 836510 - DNA, 512 bp, Homo sapiens
tgacttcctgatttcctctgctaaacccctcattccacaacctcttctctcttcataccactgccagccacgcctttctaaatgaacatccttgctatgatttaggaastgcctgcagcttcttgacatccctccctgttcccatgtaggtggtcagagtcctgtcttcactgaaccttctttggaagattctccatgatccattacacaacttaattcttaactatccactaagttccactccctcttgcaaccctgcttcatgcccttaaggccaggttctttggtatgttttaaataattcactgagtaacttaaagagcacgataaagttaaatatctgttataagtaaagtttcggtaccacaaaagaaatagcactcaatataaaattttcttttttttttcttcttggcaaggctgtttacttctatagggtggttcaccctcacagatggagcaaaggtgagagcacatctcgacaagggaggaaaagggggtcttattcctga

SEQ ID NO: 836511 - DNA, 517 bp, Homo sapiens
ctataaacagcaacaactctgtatcagaaaatagaccttttattattcaaaacagmggctagactagcatcttatgttgcttccccatatcccaattctccacagaattatgtgatgaggccagattttcatctgcacaagaaccacaaaattatgagactggagtttatctagggtgaatgacatatttgcttctcctttcatctgagtaaagaaagcttctacaagcttaaaatttcactaaatggttttgaggtaggagatcattggccagacttgttttccaagcaccagtcatgacccgtgttgcctccccactgcttggagcaggatctggtcaatatatggtccattgaagaagccgggcaaaaccagtagatggcaaggaaagaattctctagttgccctccctggtcattaacataaagacactcctactgccaccattacagtttggaaatgtcatggcagtactccatgtgaatgacccaaaagttactttatatgtttttgaaaa

SEQ ID NO: 836512 - DNA, 665 bp, Homo sapiens
gtcaaatggtatttctagtttaaaattaagttttggccagttgtggtggctcacgcctgtaatccccgcactttgggaggcygaggcgggtggaccacgaggtcaggagatcgaaaccatcctggctaacacggtgaaaccctgtctgtactaaaaatacaaaaaattagctgggtgtggtggtgggcacctgtagtcccagctacttgggaggctgaggcaggagaagggcgtgaacccgggaggtggagcttgcagtgagcagagaccgtgccactgcagtccagcctgggtgacagagcgagactccgtctcaaaaaacaaaaaacaaaaaaaaagaaaaaaaattaagttatattcagatcagcatatctaaatgttgtaccacaataaggataattctcctcaaaatctcagaaaaacacatatctgtatctattccttcatctcttactttcttcaatatatatttatggaacacatagcaggtgtcaaatttggtgtggacacataaaactaggcacaattcctgtcatcaaggtgaacaaaactgctcccactgctttgggtgaactacttattcaataaataaatataaactgaaaattatattctggcagtcaaaggcagcactatggtgttaaataaaaatcagatagctgctt

SEQ ID NO: 836513 - DNA, 562 bp, Homo sapiens
agcagattaaactgtgaaaacttaagtcagacttctctgaaaggaaccggaaaacagactctactgttgccaaaagaagtacagcagaaacaaaggctgctcamggcacatcacagtagctgaggtaggcaactgaagagtctttaggggttcatgccagatgtattatccctcagtaggtgcctaaaatacagattttaggagcaactgcagcttcagttcaagaatctgtgaagggtgattttccagctgaaacaaatgaaagatgattgcaaggttccctaaagagctggtttcacaggcctaaaaattccaaattaaatggcagtgtcagtaggaactttagcaaccaagtgaaaatccttgctcactggggaaggaagaagctctgtgtactaggcaagatgggctagattgtgctgtgccaacatttggtgcccaaacaaaaaggcttactttgtgctaatatatcatggaagagggagggcaattgttctacactgacttttatggatcctgaaacaagaggacaaagttgttagtttctctccttctttctttc

SEQ ID NO: 836514 - DNA, 603 bp, Homo sapiens
gactacattttatttcttgtttgatagctgatagacatttggactgcctccacttcccggctctaacactgctgtgaacattaacatacgggtctttgttctcatgtctctcgggcggggcatatggtaattccatgttcaattttttcaggaacgcttagactgttctctagagtggctgcaccctgttccaatcccacccacagtgcatgcaggttccagttcctctgcaacctctcagtccttgctatggtctgtctttttgattcctgttatcctggtgggtgtgaagttgcgtcttgtctcttggctgagattctattccattatggagggggatgatggcgctcttttgtaataaactcgtcaaccagaaccaccagactcctctctttaaaacattagatctgatttttttctttttgttttcactgaaggtacgccctgcccccaccaattatttatgtatatgacacagttttacaaagtatyggaagacactagttggtttatagtgcttctgtggttggcttgattactttacagaactacctcaaggaccttaaagggacaaagtgtacacaaaactgtatataaaatata

SEQ ID NO: 836515 - DNA, 556 bp, Homo sapiens
aatctaactaatgcctgacgatctgaggttaaacaatttcatccccaaaccatctacccctctccctgctgtcccgtagaaaaattgtctcccacaaaaccagtccctggtgccaaaatggttgggggccactggcttataatacctaatacaatgtaaatgctatgtaaatagttattatactgtattgtttagggactaataacaggaaaaaagtctatacctgttcagtacacacacaccgtcctttttttctgaatatttttgatttgtagatggttgaatccatggatatggaacccacagacatggagggctgactttttcaactgtgctaatcctttggctaggccacatccctgtacctcagctactttataatctgaaagctgtgcctgcatggaaaggtgagctcctctaatcttacatacacacacacacacacacacacacacacacacacacasaatggcaattgctttcaaaccagacagcaattggtttccatttggtgcttgaccctgaggttagtaatgaaattaacatggaacatttt

SEQ ID NO: 836516 - DNA, 536 bp, Homo sapiens
gctcaggaatgggcacatgactgaacttgggccartgagaattaggccagaattttcattagaattgttggagaaaagaaattctcctttcactatatttggagctgtaaagctcatcctggagctattggaggccaccgtaaggtgaaaggccatgtgaatgttaagtctacatgaatgacaaaaaaaggagcttcctgagaatactgagtaagtgcacccagatccagccatgcctgaagctttggtatgcaataccctagatcccagatattaaagtcaataattagctttctgcttaagccagtttgagttagctttttgttacttgtcatagaaagaatctcaattaacatgtgttcagggcaacagagattgagatatatgttggcagctgatgttaacataattccattagtaatattcctgaataatttgagatgagaagatgaatgttgtccttgagctgcaaaacttcacctctctcctcccttcatctttgtggccccttccaaagaggtaaccccccatcagca

SEQ ID NO: 836517 - DNA, 589 bp, Homo sapiens
tgaatgaaaaaattaacatcagtattaacccaccaacatttcaaaggacactcagtgccatttaaatatatcagatcagctctatcagtattcattgagagatgtttagattcagccaggccaaaacaatgttattacacttcttaattttatttttattttaaaaagttcatcctacatatatataattatatagatatgtaattaatatatatttatgtattatatatatatatatatatatatatatgactctctgcctttttgaatgtgtgcccacattccttttatcagttgatcttcataaaagacttgtcaagtagacaaggtcagtgagatgagcctcagtttcaggaatgagaagaaattataaagaagagcagggatatctgaaggctgcagggagcagcattaccaaaggaggaacacaggtaccttttactttagcacaatctaggtgagaaagagggawgtagaaggaggctgtacatgtgattatttcatcaattctgcctgctcccagagagccagccgaacagtggccttccctgggcttgctatgccaacagttgccccaaaacattctcaa

SEQ ID NO: 836518 - DNA, 641 bp, Homo sapiens
agcagttcacattttcaagactattaattagatactcctcacataaacttgaagagtcagagttagtcaccctcagctaatagatgaggaaagtagaatatagaaagtcaggcgaattgccraagatttgaggccttttagtagaagacaagattgaagaaggatgtagactctgaggattgtgcttaaagccgggtcagtgcttcccgccacaaatctttgtatttcagcctcctcctatcacacaacacacccaggaacagaaacaaagaaacaaaccactgccctaatgtttaaaatttcatatttaattttgttcttatgtataaatgtaagatttaagtgtcatccattcatttgcatttaaaaataaactttagttctgaagttaacttaaaattttagtttaaaatctgctgtctttattcatgtagctggtttgttaagtacaatgcaaaagataaacttaagattctaatttttaaaattgtttcccactttcttataattctacttcatggagggaagtttggggttgttctattttgatttaatttgcttagttttgttttgttttttaatagttggagagatagggaaaagcgtttgcctcgccactgggtctggcaggctcctgtctt

SEQ ID NO: 836519 - DNA, 724 bp, Homo sapiens
aaaatgtggatgctctcagaggatttagttaaattgacattcctagtgcactttcatagtcatattaccctgtaggatttggaaaatayatatatattttagaattcgggatgttttaggtgtgcctgtaaatttggttgttaatatctgtaaggcagccttctgtttttcctactaaatcataagcgtgaacatcttagtgggtggcattatacatcctttatgtttgtagtccccaaaatggctttcacacagtaggcacttaaatttgtggacttttataggctgtgtagacatcatcaaattcctgtattctgggattaggtgctgggggcaggagatgaggtaaataatttgaagaatgccgaagataaattatgtgttgtaattttgtcttgagcatggttggccatgttttgtagaaaaactatttctcaggtaacctcaatcaggttgcctttggcaggaatatatcagaatttaggcgggatttaaggttgcaaacctcagagttctcaattgagctctttttctgggttaaaactaattcagtatttctaaacttaagaaagtttcttaaattaagctgactgcctttccattctgtctctgcctgtttcctcaatgataagaggaagtagtggtgaatgagggctgggatgggaacatttacattactggaataaagtcatgtgaggatcctactctgatgtgatgcttagct

SEQ ID NO: 836520 - DNA, 646 bp, Homo sapiens
tagcattgacaaatggtacacatttttgaactcatttcaaagtacaaactcccatttcatttcattttctaaggctctgaataacttatagacaatttaattggctgtatttgggatagagaattcctaaaatgctgagtataatatttggatttaaagaaaaagacaccataatagaggccattgttcaagtaagtagagacaggttcatgtattttaaactttggataaaatataaagaagatcattgagctctaatttgaaagaattccactgaaagactcagaaaacaatccactgtgagaatatgagacagaattaaaatatttgttggacaattgtttgcaaagaagcatttattttatatcactttttaacaagactgaattgtcaaactgtttaaaattccactggaaaaatttggattatcacaaaagtgtttactcttttatccttccttgtatattggattactcgtggaggacaacggaaagaatctgagatatgctggtgttagcagcaaatcagactgcatttcagaaaccttataggctatgtaaacacgtcacctttggacatgtattatcatagctgcaatattactggtgcaatgtcaggcacaaakaaatgaaaaattccagcacta

SEQ ID NO: 836521 - DNA, 682 bp, Homo sapiens
ttagaacttttcctcatactgaaaagccatcaacattaagagattacaggtttgacttaaatcaatgttattacagcaaacatgttaagactaaattttgaggcagactagattgtgagactaagtgaatgagtttgtgaacttagataacaagtataaatacttctattagttatttctcagtttaaagttaccattggtacctgacagatgtgattacattaagggtgaataaaaatatttaaaatccatcagtttgggcatcaaaaaattagaagagatgccatccccagaacagatacagggccagaggtcccctgcagttccaagctccaccttgactgtgagttgagaagaagcctcagaggaagggacaaagccatccaagtggctcagggtaattattactatagtaaatgatatggaaatacctcactataataaaatggcaccaagtagtgcttgctgatttaacaacagctcagattgggttgttacaaaattatcaaaaaaattggctacatgaatatcctactaaaacaacaaaatacagtaacctttgaacttgatgaactgagtaaaatgaastaaagcagactatggattagttctcaaatggaatttgcctccgattgctataaagcaatttgacagtcaaattaccgaaaatcagaaatgtgac

SEQ ID NO: 836522 - DNA, 633 bp, Homo sapiens
ccttcagaataattacaaacttctgtgttttaattacaatgacttttaggatgctgcagatttcttccaatcagttggcttttgtattttcttcctgtaccttttcagcacaagacttctaaactgtcttatacctgagtgggagtgttccttaggcagaaaccctaacggatagagcctgtttccatggcgcgatggaggatcactgaagtaggctctactgaatattaggtgtaaatgctttcaggtagcccttcttggttgacttaaactataaagcagtatttctttcaagccatttggaggcaatttacaggcaaaaaaacaatgtggtctacataaaagccataactctgatttccatgtgtcatgtgcatgttgcacaactccacagattattcatagaaacaaattaggaaaaggaagcaactccgcaatatgttttgatgaaagaatcactgagcatctcttacttggctgatggttagtatctatgtttgtttataaaacctatgcmaatgtaatgaaatggctcctatgatgttcaaggaaatagatgattgtattattacgatagttgtggcttttccataaataacttaaaggccagatttctctccccattaagaatca

SEQ ID NO: 836523 - DNA, 600 bp, Homo sapiens
gattatagcaaaaatgtataattcaaaactcaataaatttcatcacaagattagcagaaaataaataatatgatcatctctgtaaatgcagaaaaagacaacattcaagatkcatttggataaaaaaattctcggtaaactacaaaaataaacaaagactatatgcaaaaaaattttacagaaaccactatacttttctcatgatactgggaatgcctctatcactaatgtactcgacgttcaagccagaggaagaaatgttggaaggagaggagagaggagaagaaaaaggagacagaagaggaaggggaatgagagaggaaaggaagggaagcaacaaagaaaggagattaaatactaggaaaaaaataaagctttcattacttggaaattataggattatatacttagaaaattaaaagaatctacaaagtattagactacaaatagtttaagcattgttactgctcacgagatcaaaatacaaaatacgttatatacattttgtatgtatttgtgtatgtttacatgtatatatgtaaatacatacatactagcattaagcaaaaataaatttaaaacatgatgtcatttaaaatt

SEQ ID NO: 836524 - DNA, 595 bp, Homo sapiens
cctggaagcaactttctctgattacctctgggttcctaaagtgcatggcaccattaaggaactggarctagggaaatgcctgcaatgctactggctcctgctaggcaattggaatcaaagcatatttctttctttctttctttctttttttttttttttttttttttgagacagagttttgctcttattgcccaggctggaatgcaatggtgcgatctcagctcactgcaacctctgcttcccaggttcaaacaattctcctgcctcagcctcccaagtagctggaattacaggcgcctgccaccatgcccggctaactttttgtattttttggcgagatggggttttgccatgttggccaggctggtctcgaactcctgatctcaggtgatgcaccagcctcagcctcccaaagtgctgggattacaggcatgagccaccacatgtggccggaaccaaagcatatttcaaacccctcacctgacctggttttcatcatcacatgaatttccctgtctcatccttcttaacctttcctttgatgggaagggagacagctcatctgtctggagcggagaatagggcctgtgtggtg

SEQ ID NO: 836525 - DNA, 624 bp, Homo sapiens
aaggaaaaatgacataggtaagtaatgattttttttacctaagagtgtgtacttaggtatattttgtatgaattatatttccatgaagtgatttttttctgattttatttatggggtaaatattgttgttcaaatattctgtctttggcccagcctaacgtttgctctcctgaagatgtggggcaaacacctctcagatgggcatgttggcatgtggtggatttatgtttacttagtgagatatgttggatttaattccctctggcatcattcattgagcttccagtaaggataaagcaccatgcctggtgggctctctgggggaatgcagaggggaaggagacatggtccctgttattaaggacccacatgatgtgggagaacagaacaagctgtgacattagcgcaggccgtccgggagcaggctgtccacttgctgacctgcagacacctccatgcctttcaggagtcagctcaccagtcacgtctgccaaacttgtcccgagcatcctggcctggaagccgttacyccttcctttgtaaggcatcatacttctatcattgcccattccttatttgtactccttttgaaacaccctctccgccatagtttgtaagtatctt

SEQ ID NO: 836526 - DNA, 577 bp, Homo sapiens
tgattagaatttctgttccatttcctggaaaggcaatttccagtgctttctgtgacacccacgccttctccacaagmccgcaccctttactctttcagcaggtggctctgcctttcatctcaatgacagccatccagaactttcagaatgaattcacttgttttggcagacccaaggtccagccccagtatgagcctggagaccctgacactcacaaggttgttaacagcttttctcataagaaaaaatgtgttcaccaacctcagatattgtcgttattctcaagtcagtcacacacaagtctgtgtgtgccatttgaagagataaatacatagacacacacacacacgcacacacacacaccccaaaacacagtgcagcattgagagagaatctgtaattgtttgcagttccagagggggagaccagtctttctaggcagaatgcttgcttgctctttcagtgctctcctagtgccttgagtgacatgacaaagctgtagttagatgtcactataaaccagccccaaattatacaggagtcatgattaactatgattgcaggcctaaggcaggta

SEQ ID NO: 836527 - DNA, 648 bp, Homo sapiens
caggtcagggaacatcacacaccggggcctgtcaggggctgggggattgggggagggatagcattaggagaaatacctaatgtaaatgatgagttgatgggtgcagcaaaccaacatggcacatgtatacctaggtaacaaacctacacgttgtgcacatgcaccctagaatttaaagtgtaattaaaaaaaattactgctatcgatgatgctctgcaaagtaactctcccgtgtaagaaggctggttagtaatcgagtcagagggggagctggaagtaggtcaacatggttaattagagaaacagtgaaaaagctggtcctgtataccatagtgttttgctgatgtttattcaaaaggctaatgaggcagtaaaagaaattgtactttaatcagattatataaatgctcattaccaagttaaattttatatgatttaatcatttattcagcaaatatgttttggaatttttccagacaatgagaatactgcagttaacaagacagagaccctatctcatagagttaaattctggtagaaaagacagaatacaaagtaaatatataactttaagtagtggtaatagctattaagaaaagcyttgtaagggatgaggtaacaactggtgctggttgacaggatgagcag

SEQ ID NO: 836528 - DNA, 472 bp, Homo sapiens
tattagtccttcaactttgttatctttcaacattgtgttggtaagtctgttgttgtctctccaaataaactttagacatagtttacaaatattcacagaatgatttgctggaattttgactgggattgcactgaatgtagatcaaggtgggaagaactcacatcttgacaatattatatttttctcagtgaatatgaaatatccatttatttaattcattgatttctttcagcagtgtgttttatgtttcatcatatagatcttgtacataattttgttagatttattcctaagtgcatacctaagatatgcttaaggcataactcattttattgtgtttcactttattgcamttcacagatactgtgttttttacaattaagtgttcatgacaatcttccatcaagcaagtctattggtgccatttttgcaacagcatgtgctcacttcatgtctctctgtcatgttttgg

SEQ ID NO: 836529 - DNA, 598 bp, Homo sapiens
ttaagtttgaaatgctatgtcaccaggaacgactttcttcaagatatgtggaatttaaaggacaggagttgtacacaaaaaaggaacacccatgttcaatgccctgagttagtagattgcagcagtcatacttgaagcaagaattctccttcgaaatgtaatgaaagtgttagcaatacccatttagaacccaaacagactaggtaatgagcaatatgttaattagacaagaaggggccaggaagaggaggtgcttacttagtaggaaagaagcccttgaatccaaaatacctgagtgtttgtgattcagctcaagaatcttaatactcccttaaatgtatatgcaagaatacatttagaatacttacagaatatgggaggtaaaagcagcataattaatagtaactatctcctcttttcagagctgctaccagagagaggcacttgcttttttgctatggtcctggaatgttaattttgagtatccatataaaataaatctttaatraaaagatttctttatatcatcatgaaggtcaagtgaaagtcaacaaatgataatccaatatactaatgaaatttctttattagtgaccag

SEQ ID NO: 836530 - DNA, 619 bp, Homo sapiens
tgcttttaacagccgaaacacatacagataacacagccaaactaacagtatgatcatcttcccttccctgacccagctctcttgaagacactgtgaggcattttcagtcagtttatattgtaggaaataactttttttttttttttggcaggctgacaggccaagaccagatcttccagcaactggtgtctttagttcctggaaggttttgaaaatgttagactatctgtgcattgtgcattgcctttctcacttgtcagtaaagattgcaatgtattatcaccaccactaatttaattttctgaccgagaagcatataccttaaaaaatgagaaaagaaaaagaaatcttaatgatagcttcttgaacactttaggcattactgtaaattaggttttgtgctagaacagtctgtttggtgccaggaacaattcaaaaggcttacaatacaaaaaaggtaaggttttaacacaatgtagtctagacagaaattgtgcgacaatrcagtaaattcattattgtaaaatttaaaaaaattaaataaataatgcaaaattgtttttatttacctcttggtgctagatcctgccccctaaactagggtattttttactgacat

SEQ ID NO: 836531 - DNA, 620 bp, Homo sapiens
tatgggttaatgtgaacattttcatattacgattattaagcagtacaggttgtttggctaattatatatgaatcaggtgaaggcatttcgtaaattatttgcctcagtcttggacttaggaaaccttagcttgcgtcccaactctacctctgggcagttttgtgatccaagcacacttaatcttttgaacttcatttattcatctggacagagagggacaaaattcctcactcaaagttacagtggtttaaatgaaaacaaaaagcccatcatgtggaacacatagatgataaatataagttgaatctgaactatagaatataagttttccacctgttaatagtaataccattaacaacaataataatggcacacagatttcacaatcttaatgttggggctcagaacataataacccaaaagatggcaccttagtgtactattttaagttgaaggaacttgaaaaaaatcacagaagcaggagtctctgacctccctcccttctcccctgaagaccctaatgtgacaggtgttctgccctgamtgtgaagagaagaagtgtcacacctctcagagaggctaagacgaatctggacagacagtccttgctatgtttcttc

SEQ ID NO: 836532 - DNA, 618 bp, Homo sapiens
gtggttttattttaatatttttagttgatttttttttttttggtaagcagacactttcttgtattaaaaagaaaaaagtgtaaaagttggccgggcgcggtggctcacgcctgtaatcccagcactttgggaggccaaggcgggtggatcacgaggtcaggaatttgagaccagcctggccaacataatgaaaccccgtctctatcaaaaatacaaaaattagccgggcatggtggtgcacgcctgtagtcccagctactcaggaggctgaggcaggagaattgcttgaacctgggaggcagaggttgcaatgagccgagactgcaccactgcactccagcttgggtgacagagcgaggcttcgtctcaaaaaaaaaaaaaaaaagtgtaaaagctgaaggaacaatttcgagaaatgagtggtcaccagcattaaatgccaaagtggtcaaaaataggaagagagaaaaaatgtcactgaattagctaagaaattcatggtaaacrtaacccataagtaaaaaggctcaattattattttttggtaaacagttttgttcttaatagcatgaagtcatcatactaaatattgcttactgaatattaagctaagtactt

SEQ ID NO: 836533 - DNA, 563 bp, Homo sapiens
ctaaacatttcaattaaaagatagtgatggttagattggatttaatagaagacccagttataagataagctgtgtacaagaaatctggccgggcgtggtggctcatgcctgtaatcccagcactttggatgccgaggcgggtgaatcacctgaggccaggagttcgagaccagcctggccaacatggtgaaaccccatctctactaaaaatacaaaaattagccaggcctggtggcgggcatctgtaatcccagctactcaggaggctgaggcaggagaatcgcttgaaccccagagatggaggttgccatgagccgagatggcaccactgcactccagcctgggtgacaagagcaagactccatctcaaaagaaaaaaaaaaagaaatctactttaagtataacaacatatataagttaaaactaagaggataaatgtcatgcaaacagtaggcataaaaagctgcaaggctatattaacatcagaaaaaaatgrcttaaagacaaaaagcattatcagagataaagaggaacattttataataatggacagaaaattcttc

SEQ ID NO: 836534 - DNA, 644 bp, Homo sapiens
ccaaagcacttcccaaagtcaaacttgcaccaaaaaaaaggtcatggtcacagtttggtggtctgctgctggtctgacacactacggctttctgactcacggtgaaaccattacatctgagaaatacgctcagmgaatcgatgagatgcactgaaaactgcaatgcctgcagctggcattggtcaacagaaagggcccaattcttctccacgacaatgctcgtggagcacacattccacattccacgacacattccacaaccaacacctcaaaaattgaacaaattgggctaccaagttttgccttatccaccatattcaccggacctcttgccaaccagctaccacttcttcaagcatctcgacaactttttgcagggaaaacacttccataaccagcaggatgcagaaaatgcttttcaagagttcatcaaatcccgaagccgggatttttacaccacagggataaacaaacttatttatcattggcaaaaatgtgttgattctaatggttcctgttttgattaataaagatgtgtttgagcctagttacaatgatttaacattcatggtctgaaagtgcaatcacttttgcacggacctaatataaaattagaggaaggaaatcaagtctctaaaatatta

SEQ ID NO: 836535 - DNA, 631 bp, Homo sapiens
ggtaaaatgagttaagatatgtaaagggtttataagagtgcttgatagtaagtgctatgtaaatgtctgttaaattaataaaagaggtttgtgaagagactggaaataaggaggacagaccagaggcaaagatgtatgttaaatttataatagtcaaacattgacgccttcttcaacactcttagcagaatgtagttttactctcccttgaattcacatcgagttctaatgactatgttgttatagtttacctcacactgtaggttattatgcaattgtcacataatctttgcatccgtccaccgtgatttatttataccatatacccaataaatgtatcttaaagaatagagaaaaatagcatgccaaatagcagccttctctactaaaggtaggtttcaatttttcaagatgtatgggtgccccagctcattttaagtacagcaccagagggatgtaatgaggccctggattctaattgttcttttcttcactcctgmagcaagcagaactctaagatgccccaataaaacctctttctaagatgcccttataaaacctctttccctttcagtgtgagcagagcctataaatatgatgatgtattatgcctatgattatgttacattat

SEQ ID NO: 836536 - DNA, 667 bp, Homo sapiens
aataatgctagattagatttctatatgaaaaaaaatatcttgacctttacctcatgccatatacaaaaatcaattccacatggattgcaatctaaacaataacagtttagagtaaaaaaccagaaccatacaaatttttaaaaaaatcttgaaattcattcaaaacagtgacataagaagtaaaattttgaaaagaaaacacagaaaaattattttgctgacctttgagtatgcaaagatttctaaagattcctaatactacagggagctaatggtaaagaaaaacagtaataacttaggaaatatgaaaactaagagatttttattcaccaaaaccacctgaagagactgaataggtaattaacagagtgagacaagatatttgcaagacagttatctgaaaatgggcttatgaccagaatatgcaaagcactataaattaatagctacatgatgatcaaacaataaatggaccaaaaacttggtcaaggaaaaaaagagtattcaagtgtctaacaaacatctgaaaatatgctcagcatcattgrtcatcagggagatgcaaattaaaccacgatgtattattactactgcattaaacacaaaaggcaaaaaataacaagggacatggcacagacagaattctcttatagtagttatcagagta

SEQ ID NO: 836537 - DNA, 667 bp, Homo sapiens
aataatgctagattagatttctatatgaaaaaaaatatcttgacctttacctcatgccatatacaaaaatcaattccacatggattgcaatctaaacaataacagtttagagtaaaaaaccagaaccatacaaatttttaaaaaaatcttgaaattcattcaaaacagtgacataagaagtaaaattttgaaaagaaaacacagaaaaattattttgctgacctttgagtatgcaaagatttctaaagattcctaatactacagggagctaatggtaaagaaaaacagtaataacttaggaaatatgaaaactaagagatttttattcaccaaaaccacctgaagagactgaataggtaattaacagagtgagacaagatatttgcaagacagttatctgaaaatgggcttatgaccagaatatgcaaagcactataaattaatagctacatgatgatcaaacaataaatggaccaaaaacttggtcaaggaaaaaaagagtattcaagtgtctaacaaacatctgaaaatatgctcagcatcattggtcatcagggagatgcaaattaaaccacratgtattattactactgcattaaacacaaaaggcaaaaaataacaagggacatggcacagacagaattctcttatagtagttatcagagta

SEQ ID NO: 836538 - DNA, 641 bp, Homo sapiens
cacttgtcccacagtttggtgaggagattttcccttcctagttttgaagaggattttgtagccaaatattcctttagttatctctgaactacttccaattatcattttccctaaatcttcccatttatgtcagtatttatattataatagctcaaacagacttcagaatagaatgtttaaatagagtttaaagtcttggattactccctatagtctataaaatgaaatcagatttctttggtattttacccaagtgtgctagcctaacctggctatgcaaatatatgcaattctctgaaccgtccttccttttcatgccaccaggccattgataacacacatctttagttaaaatgtttttgcctcccaatattcccctggctcatttcttctgttcttcaggacttagttcaggtattttattccagttcacattttaaaaatagtaagttaggtgccccttcctttttctgtgcaaatatagcactgcattttatgatagctaactttatcttgttctcacaactgtcttttatcttgstattctcagataaatagatactcaaacaatgtccaatatcacaaatataattagatattaaaacctgagttttttcacctttagtctagtttacttttta

SEQ ID NO: 836539 - DNA, 486 bp, Homo sapiens
atctggaagcattggaatagaaagcaataaaacaataaaatggcaatttcaggaaagacaaatagtattgcagctttgaacagatactatgagataaaataaaatgtagggtttgcatcagtatattaatatacaaagttgtatctgcaaaaaatgattgagcaaatttgtaattacctgattaatataatctacctatatgctcaaactaacttatttagctcaaaatgacattttcattaatgaaattaactgaacagtttccaaattaatggtttatgtatgaaccaggctacatttatatccatatatagatcatgtataaatacatatacataaatttttaagtttgtaacactttgcaaacagtggatgatttcatgggctaaatccccacttaagtaagctcactcaattmaattaaatatttccctcataaatctcttgtagacagggaactattgattctcttttctcatctttgtg

SEQ ID NO: 836540 - DNA, 613 bp, Homo sapiens
ttttcttgaatacacttctgtagacagccataagatgggtagcaggaatgctgcactgaaccataatccaaagctttcatcaggttcacttgcttcctgtccttgccacaccatctgctcattctcgatctccacttgaacacacttcacattctccacttgtgtatcattcactattcttgctacataaattaacacaaattttgcagcttaaaacagcacacatttattatttcatggtttctgtggatcaggaatctgagtatcagacttagctgggtcctctgcctagggtttcacaaagttgcaatcatatattggccagggtgtgttctaatttggtagcttgactggggaagaattggcttcccaaatcacccagattactagcagactttatttccttgtagctttttgactcggcctggcttcttgctgactgttggctgttggctggaggtacccctcagctcctagaggcatcaacagttcctgaatatctgggcttttcccacaaagcagcttccttcatcaagccagcaacaagagtytctggggcaagttggtcaacaagatggtgtcttacatgcccaatgtaatcatggaagccatg

SEQ ID NO: 836541 - DNA, 587 bp, Homo sapiens
tatgtctagagttctgctttagaaatcataatgtggacatcattgatttctctgatgctggaagctgctgctgcttcttcatctttatcttctcctccctgtgtattgagagcagggacctccttgtgctgttttgggctctccttgttcacccagattggctgcatcagcaccttcttaaaatattagtgttgctgagataggagcttttggtagatggataaactgggatttgtaaatattttgcttagtttttttcccagagttttgcagaagagaataaggtgttggtttgttataaggtggtcctttataaagtttagacctattttaataaggctgacttgggttgaagataactagagccatgacttccatcttgatggacaatgagtactcactctacttttttattttatatttttattttagttcatttcatttaagacagcgtctgttacccaggctggagtgcagtgacatgatctcrgctcactgcaacctacaccttctgggttcaagtgattctgatgtctcagcctccccagtagctgggattacaggcatgtgccaccacaccggctaat

SEQ ID NO: 836542 - DNA, 621 bp, Homo sapiens
gctgctgataagcaaagggtgtatcactggtatgggtaacwgttgtgggaggaggaggggtctgacagatagccggatgattttaatgtttatattccactggggtaagctctaacaaagacccatcatttcccagataaccaattcttttaaaagaacatctgttgaaactggcaatttacattcttcttaaaatacggagcgacataattaaccctctggggagactaatattagtttattagagacaatttctagttctgtttatttttaacactaaacgatttgttcagattggggaaaaaattttttttttttttttggttgtggtggcgttggcttttacttggggttgacctttccttatcaaggacgtacaaggtgaatagctgggtgataatatatggtcccatgatcatcaaccaagcaccaacggaagccttttggaagtgcacagtattgtttaacacacaaataactcagcgtttagtaactttcaggtacaatcagtctattttaaagggacctcatgtgttattcatgtatgtgcacatgtgtttatgcagttacctttgtcttcattgatttggactcctttggtgctcgtaattggtgaaattc

SEQ ID NO: 836543 - DNA, 550 bp, Homo sapiens
acctgcttcggtgcctggcacagagtcgcaaagccacaaagatggtgcttgttggttgtatgtgttgtttccatctgataycaccattgaggggagcaagatgacatgtgcctaccccacgtgtccagcagcaaagccacctggcatagtgggctgctcagcgtgcctggttcatactgcgtgtttatagtcccagggtgttttcagagagcaaaagtcctttatgattagcaaattgcaggtcctcccctttctgatatttacagcccttgcaaccgcctgtacaaaaatcgggaaaaggcagaagacggctgtcattaatgtaaaagcagctggttacctccccctccccagcgcacacatcacctcctagtacaattagtcaccatgtcttttcccttccgtcaagccttttagcggagttcacagggatgccttcggtccagacactatgaccgttgacgaaggatttgaaatattttgagaactctgaaataatgcacaccagaaacgtccagctgaaaacaaaaagggaacaagatgacatttt

SEQ ID NO: 836544 - DNA, 461 bp, Homo sapiens
atcactttgtatgacagtcttcttgggaacatccattgggaaactcttcccttgcaggtgtctgttacaagtcctggttcacacagtgttgcgaaagaatagttgtatgtcacaattttctttatatagtatttattgagaaacctattctgttaatagaatgactcaaaatcagccaaccccataaatactgctcaagcatttagaaagactttctctatagaggcttcagacgtcagaaaaaaacttagagagtgactttcagatacagcaacctagtctatgttatagaacattctaaaaagagcagattttaatatctttcctcccacacttgctttgactccctcctttagtaattagataattatgtataataagcacattaattatgtgcaacagctgccrttgagtgtgtgcatgtacaactgcttgaaaacagcttgtgagttcactattag

SEQ ID NO: 836545 - DNA, 625 bp, Homo sapiens
aggaaattagaacatcttggatccggtctgtttcttccgttawctaggtctggtatcttaggcaagtccctttctgggcttcttttactcccatcagtaatggaaaatgtgaaactagatctctgagatgtctcctagatctccatattctttaattctttcatttaaaatatatacttttgtcacattcctagagatccccaaagcattgctccccctcttcctacatctgtctctgggataaagttaaactttggttcccaagcaaatttcgaagctccctctggggtcattaaaagtcttagtttactcagagcttgttggttttgcctagaaatctcggctgctctcaccaagtagagcaagagactactgttattgttttgagccagcccgtagcatagtaacaattctgggcaatacggagttgatccatatgcccagctccctggggaacctccttacttcagtctgtccagcatgcgtgtttgccttctgtctttgggcctttatccataggaaagacgaaatatgaatataatccaggactgagggaaaataatgactggaattgcagctactctattctaccacttcacattataaatagagaagctaagaccca

SEQ ID NO: 836546 - DNA, 410 bp, Homo sapiens
aaaggtttgatgttaatctgaaatgtctctgagaggccatacatgatttgagaatggattaaatatcaatgggtgactaggggattcttatactcagytaattttagaaagaacttttatttagagctgcctttatgcctgtgatggggcgggatacaccacaattacacattttcagaagggtggatcctttgatgacagatgtaatttctacccccttatttctccccagttaaaagattgccagttaaaaatcctttgaaaatggtttgatccttttcatacatgcaaatttttttccagtctttaggaaatttatataggctgtagtttttagccaaaaagcacacaccaggagttgagtcttttccttatccaaaatagaaagggtgtggattttccttctttga

SEQ ID NO: 836547 - DNA, 634 bp, Homo sapiens
catttctatttttttaacaacaaacttctcataggtcaaagaaagcctcacctcaaagaggtgaaactcccttttccttctcattcagtttgatgaaacaggattggaactcactgtttctgaactatcattctcagtgctaggtaatatggcagcccagtgctgctgagtgatggaaacctccaggctgacatctggtgttggatcattttagacacaaaggaaatccacttattctgaggctgctgtggaggcagccggccagcagttaagcaacagcataaagatcatgcttgcccaactttgaaattctaaaaaaatgaaaagaaaaaaaaaaaaaggaaaggaaagaaaagcatctgtccagcatctgttgttagaaactttctccctgttatgaacctcaggatgtctgtttctagaaatgtcagttcaccaggtaacattgctaagaccaatataatgtaggatactgataatgtggggaaatgaagtaataaaaacaggaatcctgtctctgttaaggtaraatcctatctaagatatagagatccagttgtgttttagggtacatatcaagacatctagactaataagccctctgtttagtttcagatttcttccaaatagtctt

SEQ ID NO: 836548 - DNA, 642 bp, Homo sapiens
tatgcatgcacatgtctttataatagaacagttcatattcctgtggatatatatatccagtaatgggattgctgggaggaatgatatatctgtctttaggtctttgaggatcaccacactgtcttccacgatggaggaactaatttaaactcctacctttataggtaggttacctaaactcagttctgaaaaatcagtttctctctttccctttggttgctctcatagatattaatgctgatatataacctctagctcagtgattctcaaagtgtggtccctgggaaccttttataaatgcaaattctcaggttctaagaactgttaacaaaaactttgattcagcaattattttgttttaacagaccttctaggtgcttctgatacatgctcagatttgagaaccactaatctgtctcaatctggattgcctttctaccagtataattaatttctacaagtctacatcctaaaggagccaggttaaaataaaataggatgagtgtggaattctaacaacttgaactatgaaagaagtactctcagtttttggctacataaattatataatgagaaaacttcaaatrgttaaaaattcctctttttatagcaatcaccacaaaattggcactcataattgag

SEQ ID NO: 836549 - DNA, 488 bp, Homo sapiens
tttgccctgggaaagaagtattcctggatccaggtttgactagggcagggtatagtgagagtgacactttaggragatgaaggaagacaatttgatgttttggctctctcagggagtggaaatgggtcaaataacaagggactgtattaggatagtggtcataaaatgagttaagaaagtacattcttttggctgggcgcaatggttcacacctgtaatcccagcactttgggaggccgaggcgggtggatcatgaggtcaggagttcaagaccagcctgaccaatatggtgaaacccccgtctctactaaaaatacaaaaattagccaggcgcggtggcaggtgcctgtaatctcagctactcgggaggctgaggcaggagaatcgtctgaacctgggtggcagaggctgcagtgagccaagatcatgctactgcaactccagcctgggctacagaatgagactgtgtctcaaaagaaaaaaaaaat

SEQ ID NO: 836550 - DNA, 617 bp, Homo sapiens
tctacttacattcatttccatggtggtcctaaacagggccctattattattagtatgtcatctacatgctgcattttctatttttatttctacctcagatatcttcctttcttttatttctttaagtttgctgccttcagttgatgtttccaactcaatatatctaaaacagtattctttaatcaccccgacctctcctttgtaacttttgagcttcttgttcttcccataatcttagttaaacataggccacccatccttccatttcttcaggccaaaaatattggagtcatccttggtttttcattgcctttgtgttctattgtcttctgatataaataaaagtcttaggccaatctgattgtcatttcttcataacttaactggattttcctcactaaaatttctaagatattttatctttctccttggtgttctacaacttcacactaatgtgtccaggtgtgtgtctgtttctttttatcatgrtcagtggtacacaggtcatttcaacctttaaaacatgcttcttttcactctgagcaacttctttgcataattttataatttcttctctcagttctcttcattctccttgcctttactcctaatattca

SEQ ID NO: 836551 - DNA, 638 bp, Homo sapiens
cagtatatttatggtacttttcaaagaaggtcttcatcttctttttcaatcagtgttagacatactgttyggatctgccaaagtctctctcactttatctcatgagaaaatgtctggcgctggggactaggaaggagcctctggctctagccatggtcacttatactactgccacactgtctttccagagaacactttagaaacttcacagctcccctattacttatgcatcacacatcaatactccacacagataccaccctcatcacacagcaacactgtttctagagagctctgtattcatgccatgaccaatctcttaatttctccacaaattcccactattttagcagtttaataaatttgtagggcaagtccctctccttgttattcttttccaaagtaccttggctattctttgacctttactttttcattaactgcatcagtatccatgaagaaccatgtgggtattctgcttggaattccattgactctatggtacattttagaaagaattggccatctccacattattaattcttcctctgtatcagcagttggcaaactatggcctgccctgtttttgtaaataaagttttattggaatgcaaatacatcatttatttccattttat

SEQ ID NO: 836552 - DNA, 521 bp, Homo sapiens
tgtatatatcctttctgagcttaactgtatatattttttaggtttctgtccttggggaatatcatgggagttatttagtctttatgtaaaattttaattatttaggatwatatgtttgtatgattacaataagacactgcggaagtcagctgtggcttaagtgttaagagaacagagtaacaatatccaggggccaatgtagacattgcttaggatgttggcagtatagcttcattaaccaaatcacatatagcatatgttgtggtctaagaaaggatcagaataaagttcttatagcgaaaggaacatcagatgctgcaaaaactttagcaagtgtaataggagcttgcatagttaagatgttaccttgctgtccctctgagtgtcaataaatatgatgaagttcatttacagtgaagaataaaggaggatacaacaattggaatttctcaaaagaagaggaaggaaaaagtttgaactgaaggcattttattgacattaaagagatggtgaggtggaca

SEQ ID NO: 836553 - DNA, 606 bp, Homo sapiens
taaaagaagtagtcagaaatattccattccacagacttacttgaatgagaaataagaagttttgacagccatttgtagtattctttgaatcaaaatattttataatcttcctgtaccyattagctatgattctctttgacaggaaatgttatgatatgagaatatctataaatcacacatttttttcaaagtggacagttgaattactgttttggcttttccagcactgtgttagattaatggaatcctcaccgaagtcctccgtcgatttgtgagtttgtaagtagaagagaattaattaaataacgaaagagtacagatgtcaaaatttgtattgtataagcaacagttctgctaggtagaatgtatcaggcatcttgcttaacaaatccttacaacaaaggttaagatactccgggccactaaaagcaacagggagctgttgatgcaatgcagattggaataagaatgagaaaagaaaacaacatccctcagaagtctagttttcacctttcccttaaccttctctgccaggataccttgatttttttttgttttttaggctgtatcagataaaatgtacatgtgtgtataggtgtgtgtaca

SEQ ID NO: 836554 - DNA, 518 bp, Homo sapiens
gcggaaagcctgtcttaaattgacattgaagtagaagtaatgtattggtttgctaactgaaaagtccagaggttgggatggacttgaggtcagggtttatctaacatttyagtaatgtaatgaaaaacccagtttctttccttctctctcctgtgccctcagtgtctgctttgtccctagacaggcatcctcatgatggcaagttggctattggcagcttctatgggctgcttgttccttgagtgtggccagtgggagtagagagcctctctcccagtagttcccctcccctcccctctcgcctttttttcttttttcttttctttttgcttcccttccctttcccctttcccctttcctttcccttctcttctctttcttttcttttctttcctgacagggtctcactccatgacccaggctgtagtgtggtagtacagtcacagctcactgcagcctcaaactcctgggctcaagagatcctcctgcttcagtctcccaagcagctgagaccacag

SEQ ID NO: 836555 - DNA, 586 bp, Homo sapiens
accctataagaaattctaaaggtaatccttcaggctgaaataaagacatcagagagtaacttgagtctacatgaaaaaaataaacaaagagcactggtgaaggtaacyatgtaagtaaatataacatacagtataaattggttttcgattgtaactctctttttcttctctctaatttaaaagacagttgcataaatagcataaaaggtaagtagctaataatccaaaattgatttttataagatgttaattataatcctcagagcaatcactaagaaagtaattttagaaaatagtaacagaaactattgttttaataaaggaatttaaatggcatactagataatatctagcacaaaaggcaatggaggaatagaagaataagaaggacactagacatatattaattgcatggtaatatggcatatgtaaattctactttaccagtattacattaatttaaatggattaaacactccaatcaaaaggcagagaatggattttttttttaatgtgatccaactgtatgttgtctacaagagatatacttagatcaaagatacaaatagggctgggcatggtgact

SEQ ID NO: 836556 - DNA, 583 bp, Homo sapiens
agccccagtgaaactgcagttttgggtctgagcctcccattcccctttaccctttagcaaggtttgaggatgtcgaccttccagctggaaaaaggctagtttctggtggcagcaccctcagggacactgaartggagcccttactgtgcaggccagagagggcaggcattgccgaggtcacacagcaggctggccacagagaactgcgtgtgtcagggagcattgcctgaaccaggccgtatctgccccgggacatgaaggagggtgtggccggtggccagcagcctgtccctcccactgtgggggcagcgcagagcctaggacctgccctctgcagtgctggtctgatggctcagtgtcccccactgcctgagcctgggaaggactctggatgctttaggttctgtgtgtggtgccccaggcacagctctctgctgcctgcccacctgcctgtctttgatgttttatttccttagtatttattggttcaatttttaaactcttacccttgtaggaagcccttcagggggcaaggatccaaaataaaacactgattaaaatgcataaaataccttttcttgac

SEQ ID NO: 836557 - DNA, 601 bp, Homo sapiens
aatatgtgatgtcattttaaaaaccactacaggtaactctgacaactgccaagtacacaggagtagaatgctcttgtagtaatgtttgtaaagataccaaatgattatatttrgaaatcatatggaaatatatactcaagaattgttcaattattttagcactgctacttgctttgcatattaaagatctttttgatattttagtcatgcttatcctacatacattcctactactggttccataatgcagaattattctttctttctttcaaaaaacaatcaatgcttaacatctgaaagaaatataatgcttgttatttcagtattagatcattgtccacatcaaaggagaagatcagttcaactatgatggatgtattttccacctccctagaattgtattgtattattttttcttgttaaaaatcataaggttcctggtcaggtgcagtagctcacgcctgtaatcccagcactttgagaggctgaggaggtcggatcacctgaggtcaggagttcaaaaccagcctggccaacatggtaaaaccccacctctactaaaaatacaaaaattagttggggccaggtgtggtggctcaca

SEQ ID NO: 836558 - DNA, 591 bp, Homo sapiens
tgggttgctgcaagactttggttacatttctagagttctgaaaaagtttattgtggtcaatttttttttttttttttttttttttttttgctattttttttggkatttgttgcttttatgaagggatgaatttttggaaggccctttttttttttttttttttttttttgagacagagtctcactctgttgtccaggctggagtgtagtggcataatctcatctcactgcaagctccacctcccgggttcacacaattctcctgcctcagcctcccgagtagctgggactacaggcgcctgccaccacgcccagctaatttttgtatatttagtacagacggggtttcactttgttagccaggatggtctcgatcccctgacctcgtgatccgcctgcctcagcctcccaaagtgctgggattacaggtgtgagccactgcgcccagcctgcatgtctttattccaccattttcactgatgtcacttacgacatgattttaaatctctgaaggctcactgggcacatgcctgtagtcccagatactcgggaggcaaaggaagaaggatcctttgagtccaggaattctggg

SEQ ID NO: 836559 - DNA, 547 bp, Homo sapiens
acagacttttgaaataattatacttaccacattcaaggggataaaagacaagacagatttttggcagagaactggaaactaaaaataaacaaatataaattcctagaactgagaaaatcagtaagtmaaattaactcaagtgaatgagtttaaatagcaggttagacacatctgaagagagaattagtgtactgaaagatataagatgaaaataaccagagacaaagaatgaaaggaattaagagagagtaagagagagagagagagaataccgtttaaaggtctggtgcgtgtatttaaagttccagaaaggcaagagaaagaggatgaatcaaaatcaggatttgaagagaaaatggtttagaactttctaaaactgatggaaaacattagtccataaattgcagaaatgatatgaaccctgagcaggagaaataccaaagaactctacatatataggcattattgttaaattgctgaaaaccaaaaatgagaaaaatcttaaaaggagctagagagcaaaggaaaattaccttcaaataagcaa

SEQ ID NO: 836560 - DNA, 620 bp, Homo sapiens
ttgtgaggattaataaacacaataataaagcacacagaacagcgtctggcattatataagtattagccaccaccctcattataatcaccaacttacgtatgggagtaacgcrggagaaaacaccagccgcttcacttcaggagtcatgggaattcgattcctcaagagaatggtttttgaagactaaaaacaaattcacgcccagttcctcaaatgtcagaagctctgctctccctcagcttgctctgctcccactctttcttctttaatgctgccttggctgcctaaaggcctggatgcaaatgttctcatgtttgaagggcagactacttacaccattactataatgcagaacattctgggggaaagcagtttgttatatatggagaaactttttctcttcttgaccaaataggataggtgttctgtctaccctctaaggggctgccagcaaagcccttggaatccaggccttttaccctgcactctcctcctccacagaaaacttcatgaaggcggaaggatgtacctgtttcctgctgactttccatgctgatggtagagtcaccccaagaaacatactgtgatattatcttttgtctgttggcttttaaaatcac

SEQ ID NO: 836561 - DNA, 448 bp, Homo sapiens
ggggctgtccttgcctttgctggtgtctttctctactccatcctcagctatctggagagtcttctattcatgcacttgtggaatagaaggggtaatatttaattcttctgtaaaagaaattttttttgcagagaaagatttgccggaaatatcaaacggaagactagctccttcagaaaatatttctgacttagtctgagatctgggaacagggactcctagatttctttactttcgcacattcataatcatagctatactatgctactaggatcaaaggacctttcaccaatcctgtcagtcgagctacttaatgtgtgagttaaactttctaataaratatattttattcaaccttgttcattcattcaattttagggttacagttctaaaagcttcccctttttgtgactcctagctcctgcaatttcaccattcaactcaatgt

SEQ ID NO: 836562 - DNA, 632 bp, Homo sapiens
aagtggtcagggcaaaataagcaggtcttgacgcgcagatttgytcactcaagtaagtcaccatgtggaaacgtccctggaagcagaggagttacctgcggagtaggcttgtgttctgttcttaggtgtgctggtgcctggaatacttgggacaacacgtttggttggtgtctaacgtctaatgctctcttctctgcttgtgatgatcatctactagtgggaatagatttgcacaaaatcacccacagtttcaaatagcctctctcttgcccaggtttttgcaagctggccatgacatagaggaagactagccagctccaacactcagtctgtctttgatcttggacccaatgtctcagggttctagttagctgaataaagcattcacacacttaacgacaagtgtgggttcacacacctcacttttctgctacccctctctattatttattatggatggttattcccttagttgtgaaaagtaggatttatctccgccattccccaaggtaaacaactcggagattcattcctaggggcactctcagttcccccaccatcctcatttgcttaccagactcaagatgcactgatcttctttcatatcctcaacaccagactcctttctgcct

SEQ ID NO: 836563 - DNA, 707 bp, Homo sapiens
aggtaaattatttattgataacaatactatcttagtccagtttctgttactagaacagaatagcacacaccaggtaatttatacagaaaagaagtttatatcttacagttytggaggctgggcaatcaaagggcatggctttagcatctggttagggtctttgggatgcatcatcccattgtggaaagatggaagagcaagtgatcatgcgcaaaagagaaagcatgaggggctgggctcacttattaacaacctactctcaagataactaacactcccacaataatggcattaatccattcatgagtatagagccttcatgacctaattacttcttacaggcccccaccttttaatacggttagactggcaattacacttcaacatgagtttcagaggacaaacatgtaaaccatagcaaacagtaacacagaactaaatatttggttctctctcgccagttagataatttatatcttattggaattacagccattttagtaatacatctacctgctatttaaaggacaaaatttaattgtgacacttgtgaccaatactcaggaattatgtaaaccatgaattaactatgttcaaaacacaattggtctgcagataatttatggtagctcatggccttagtcatactaacaaagtcttaagcaattgaacaataatgtacatggtaaaaaatctaggaggcaata

SEQ ID NO: 836564 - DNA, 549 bp, Homo sapiens
tctggttaaatatatgcaaatcagtatatgtgattcaccatgtaaacagaatttaaagcaaaaaccacaagaccatttcaatagacacagaaaatgcttttgataaaatctaacatcccttaatgaaaaaagtctttaacagattagaaatggaaggaacatacctcaaaataaaataaaaagccatctatgataaacccaaagccaacatcatactgaatgggaaaaagctcaaaacattccccttgagaactggaacaagaaaaagatgactgctctctctcaccactcctgttaaacatagaactgaaaatactatctacagcagtcaggcaagagagaaaaaaaaaaaaaaaagcatccgaataggaagtcaaactatctctcttctctgacaatatgattctatacctagaacatcctaaaatctctgtataaaaagcctcctaraactgataaatgactaataaagtgttaaggtaaaaaataaatatacaaaaatgagtagtatttctatacatcaaaaatatccaggctgaaaatgaaatc

SEQ ID NO: 836565 - DNA, 446 bp, Homo sapiens
gataggcagttcagatcacatggtgacttgattacctagagtcaaacattcagtttccaccaaagcccagtaacaggccaagacctgtctctcaaaaggagagtagttgtctgaagaagatggcagggccttgctccaaaatctagagactcctgctgtgattcaccagtgggggcttgccaaaggctccaaacagcatctctttctgccactgacacctgaagcaccattggttctgctgggtcatatggtccaagtggcagagcagcttgcacagcagcctggacctgttgcagagccttctcctgttctggaccccactcaaaactggcagccttttgggtgactcgataaatgggctggagaaasacacccaaatgaggaatgagttgcctccaaaatccaaataggcccactaggcctattttgtgcctttcttggttgta

SEQ ID NO: 836566 - DNA, 644 bp, Homo sapiens
cctaactccaacccctattttgttgtcttcatagcttaccctatctgcaattatcatatttgtttattcaacccatttgaaaatgaggggggtaataatatcaactgtatatgattattttgaaaaacaaatgtatcaatatatgctacatgcttagaacaatagcatatagtaaatgcttaataagtttaactattacttatattattacagtctcaatagaaagcaaacatctcaagaccagagaatatatctaattttggcgtggaaatgtattctacaaattcaggatacttagctcatggtagtcattgaataagcattttttggatgaatgaataaaattgcaagtagcaagaaggattctttttttaaaaaaatagagatcattcacagggatgattcagagatctgaaaaacaagatttctaagaaaaaaaagttaaaggaattttaattattgaacctagaataaacaaggccaagggtggttgtgaatggttaaataactatataaaagcaatcacatcattgaatttagtcacataayttctgttcatttaagttgtgaaaaagccaaactggtaattaagtatcacaaggcaaataataatagttatttcattgagttttcactttttagca

SEQ ID NO: 836567 - DNA, 443 bp, Homo sapiens
tataaataatgtcatttgtgaacaataaatgattcatttcttctttcctcttcctgttgcactgttgtgtttcctgctttattgcagtgaacattccatgcagtagaatgttgactakaaattgtggtaataaactttgttttctcattttggatctcaagcagaaagctctcaaaatttcatccctaattatgatgtttgctattaaagtatgtttgttatgaaatatttttattaaataaaggaaacttctatttatttctaatatgccatgaagatgatgatgataattattatcattacagtggttgttgaattttttcacatgcttcttctgtacctatcatgatgaactttttaaaaaaaaagttttgttactattgtgaattgtatgaattgatttttacgttcaatacccttggattcttaccacttgtcccaag

SEQ ID NO: 836568 - DNA, 610 bp, Homo sapiens
gcctcttaaccaacttctccccatcctttccttttcacatatctttcccagcctctggtgtttattatactattctcttatctccatgagataaactttttcagcttccacataggagtgaggatatgctatatttatctttccttgctgagattatttatttcacttaaatatgatgtcccctactttcacccatattgttctaaataaaaaaaattcatttttatggctaaataatattccatcgtgtaaatatgctacattttctttacatattcataagatgatgaacacaaggtttgattccatattttgactattgtgactagtgctgcaataaacatgaaaatgcagatatctctttgatatatttgtttcttttctttttaatatatactcagcagtgggattgctagatccagtctatcactgatgggcatttgggttgattccatgtcttagctattgtgaataatgctgcagtgaacatacacatgcatgtatctttgtaatacaatgacttatgttcctttgggaatatacccagtaatgggattgccagatcaaatrgtatttctggttctcgacctttgaggaatcgccaccatct

SEQ ID NO: 836569 - DNA, 599 bp, Homo sapiens
gtggttcttacttgggtatttaaacttaaacaaaaaagtcatgaacatgtgaccccatactttcttttcttttctttttttgaggcggagtttcactctygtcacccaggctggaatgtaatgatgcgatctcggctcactgcaaccttcacctcccaggttcaaaataataaaataataataatccttgttcaacaatgcttaggaatttcaagaaagtgcttgtctcttccagaagacagtgagcactgcaaaaatatttgctcagctctcgtgggtgagagcataagaatcctcagtcataaccacgtgggcaatcctagcccaagaaaggccctgcagtcccgaccatgcttggccccctgacaatgtgccacaggctggggaacttaggcctctctgtgcatttttggttcatatatataatacagaatgtgggaaaataaagaagtagattttttgcattatatttagttctgtgtgtatggtaatgttcatgttttaatttgtaattaaaaggctggaataaacaatatagaattaatgttacaaatattttctccacagccccgtatattatattcattgtttgagtgaaa

SEQ ID NO: 836570 - DNA, 588 bp, Homo sapiens
gctgctgtagtcaggatttcttgatctatgttgaatgggctatggatggttggagagtgtggattattacacttgagctcagacaagtctttcagaactcattytgagacaggaagtgatgaaatcagctctcacatgaactgtgaggctgtcacgtgcacttagccactttctgtctcaatgggtgacaggggaatgcggaggggagagtagggcatggggaagtgggtagtggggagcgggaagaagaggccagatacagatggtgggaaaagtcccaactctgcccctcacagtttcccttattcttctagggctaggattaagtaaactgggttatttctactcccaatgaccaatctctcattgtgacaatctgctgaatttaaccaccccttgtgaacattcaatttcccaactctgacgctattgacaacggttatggaagacagcaagtcgcatcattatcgcacagcctactaactgtttagttagagctgacacagcaaatggacttctgtaattcctcttctgctttatccctaaatttccaccctaaatagtaaagtggggggaaggtatagaaaa

SEQ ID NO: 836571 - DNA, 540 bp, Homo sapiens
agattttaaaggttctggagctatgaccacattatataagtatttaattttcacaacattttctaagtgatttcatttgtggaagatgaggcttagattaagtaacacgaagctgatacttgaaagactgctgtgttgaaagcaggtctgtttgaatataccatgctctttaaacttcattatagaaacattttctcagactagtacattggtgttttatgatttccaatagcataacaaatattttagttatatatgccataactaatgtggtagttcaagatattactgctaaaggtcatcagaaatatttctaaacacaatttatcgcatttcataaagaccatgggaaccttaaactggacggcgtatgccttaaagtataatatctgcaaactgtaaatccctttttttaaacaaataggagttgtgtcctaaaagggatggtaaatcataaacaaaacaataaattaactatataagaaagcagaraccatactcttgacattggaagtgattaccatattacaaaaacactga

SEQ ID NO: 836572 - DNA, 603 bp, Homo sapiens
atacacctaatgctagatgacgagttagtgggtgcagcgcaccagcatgtcacatgtatacatatgtaactaacctgcatattgtgcacatgtaccctaaaacttaaagtataataataataaaaaaattaaaaaaagaatgaaccaatcagcaggatgtgggtggggccagataaaggaataaatgcaggctgccctagccagcagtggcaacccgctcaggtcaccttccctactgtggaagctttgtttttttgctctttgcaataaatcttgctgctgctcgctctttgggtctgcactgcctttatgagctgtaacagtcaccacgaatgtctgcagcttcactcctgagccagcgagaccacgaacccaccagaaggaagaaactccgaacacatccgaacatcagaaggggcaaactccgtacacactgccctgaagaacggtaacactcaccgcgagggtccacggcttcattcttgaagycagtgagaccaataacccaccaattccaggcacactatgtacataactttaacttcttaacacataagatattccagcttcacttctcagacttcaaacttttactggttttaa

SEQ ID NO: 836573 - DNA, 579 bp, Homo sapiens
gacagcacatgtccagcaggcccaggtgaatgcgtgggactggctatcactagctcaaaattgccttaatatttattgacggcctaccatgtgaaaaaggcctcttacttgatttcttgtctctgtggaggtccctaaagaaatgattctgtgtgtctctggatttctcacaatctagagacatggaaagggagctggctatctggttcgggatccgtagaatacgaagtatggtctaaaatggtgtccagctatacccctgcccccaggcccctcagctctaaaatgctcagatcccagccctgcggttctgtaaggggcccacaaaaaccacagaattggatccctcatttcacatcccagcatatccaactgcctcctactcaaatgtcctgctgcattcaggccagttgtgctcctggcctgtgactcctgaggctgtgctcaggcacaaatgagaatgaacagcccagtgggtgagagcacacacattggaggctcagacacatctgtcagtgaggacacaaagaccaaatataaagaccarattttatcttcataaagactctatggttttca

SEQ ID NO: 836574 - DNA, 648 bp, Homo sapiens
gggatccataccctaaacctcagcatcgtgcaatatatccatataacaagcctgcacatgtacccctgtatttgaaataaaagttgaaattcaaaaaaagaaatgtgatgcaagtcacctatgtaattttaaattttatagtatccacattaaaaatggggatacagatgaaattaattttaataatacattttatttaacccaatatatccacattattatttcaacatataatcagtataaataataattaattcatgagatattttctctacctctaagtcttggaaatcttagtatgcttgaaaacttaaatcacttcttagttcagactagccacatttcaagagctcagtagtcacatgttgctgatggctaccatattggacagtgcagctctagaacaagcccttttcatgatatacactgtgactaaaatgaaggcattaacacctatttgataggttttctgaaaaagcttctagcctagtgtctgacatactgtaggcacctgttaaatcaaaacatctattagtttcctgtstgttttgctctttgctgatgtcagaatgccgtccacccaccccaccaccatacacgcacctagtcaaatcctttttgtccttcagaatccatcatattcctcct

SEQ ID NO: 836575 - DNA, 609 bp, Homo sapiens
tctcattttttcaattttattccaacaatgtagttttatactacttttatactgaaaactcacagtgttgcagttataatttggttaactccagtagaatattttgaaatcgcacaaccaccctgcataatattttggtgtactagacatctgacttatagatgaatgtcaggtatgtaatctgtttttaaaatagggctcacttttaacttagttttaagaaatgtattaaaataatgttataaccccattaaaggacattttttaaaagacaatattgttaacctttagtacaactattttcctttcccttcatcttcttccaaacattatttatatacttagaaaatttgtcactgtaatcataataaatagacaacgctgcattcttcttttgaaaccttccagtgtttcataaacactccatattgttacaaaatttcttgtctagaatttcaatgttggctttctattccaccaagctgatataatgtgcttgataatttcactattgttggactttttaagtgwtttcaatattcttctcattgtaatattatagatgtatttgttcttatatccatttttttgaattattgcctgaagata

SEQ ID NO: 836576 - DNA, 566 bp, Homo sapiens
gcattctggcataaagaatcctatacaaatagagcaaacccttaggaatcttggaaattccagataatctaactcatttgtaggccctttctttgtttctctgcttaggaatctgatagtcaaattatttttgagtttctctctcaactctaggaaaaggtgcaggaggtatcaacttaaaggtaaaaagcaaatgttccaaaaaagtacagataaagcaaatctgcacaaggaaagaaaggtcagtttcagcaaaatctattcaatgttaaattctaacaatgctattgctattataaacaataaatataacaggtaaatcatatcgcatgtaaaaatggcaaatatatagaaaaaaaggcagagcaggctaaaggaaattagagaaagtcaggctgagtatgaaataaactaggcaggcacacctcatgaaaaggccaggtgtgagcaaagacccgaaacagggtaaggagagcggcaagcgcagtgtgggagaagagcacgcmgggcaggggagcagtaacaacataaacttgaaggcgagtgtgccctgagactcggaggat

SEQ ID NO: 836577 - DNA, 663 bp, Homo sapiens
gatgggtgggagggggatgccaggccatgttttcagaaagttcctgtgttgcaggctgcaagcmgttccaccctggacctaggaacgtggcagacccacccacctccgggtaacagcatgcccaccctggggaaggggactttgagacagggaacttaatccctgcattttgcaaagagaaataaaatatacccagaaggagaaaagcctcagcccaagggataactgggggacctgacagccacttgctttcaaaactcaccaggcagagttgacttttcattgcaaccaggagcacagcatatcctcgtcttagtttttctcagactctgaggatcacctgggccagggcttttcaaaccctttctcagaggctgtaactccagaggctataacattgcctggaagaaggagcctgaacctccacttcaaataaaacaggcttgacttgtctattttacacaatgtgatgggtaaataaaaatcccactgcttggatccaaaagcagttttcactatttccgagctattttgtgttgaatatattatctagccattctttttgtgtgctctggttgccacctctgtaaaatgggaagaataattaagagtgcctatctcataggattcctgtggagtttaaatgggttaatgcatgtacaa

SEQ ID NO: 836578 - DNA, 644 bp, Homo sapiens
attagcctgtttctccctcagacctcaaccttttgttgaggggaagaaacacttgtggtagaaggaaacataattaatggaaggatcatgtgcatggactatcatcttatcagtgatgataataggcctggttgcctagatctttccagtcagccgccatgttctgtcagcatagctttcataatgtcctcttcctgtcattaacaatgtctttgggtttctgggttttctgtcctcaaattcatcctgaacaccataactaggtcgttcatcctggagagatatcttggtactttgcctcccaatgtttaaaggctccctattgccaatgatgaagtcctaacactgtatcctgacatctgcatccctacacagtatgatctccgctcatgtttatgatcttctgtcccactcttcttccgtgggaaccagaccattgagctcttgggccttcagacacctgtctgctcacctctctgctcagagttctttgcccggactgccctgcagtaatgatttttttgccctgcaataattattgcaataataaatacaataataaatgcaaaaataataaaaataatccaaacaataattattgccctgcaataattatctmtccatatcctcatctctcacagaga

SEQ ID NO: 836579 - DNA, 598 bp, Homo sapiens
acttgaacctgattccaacacagagtaaatatctcaataacagacaggagggagaagaaaatggctctgatgatcattaaaaaaggggctgggcacggtggctcatgcttgtaatcccagcactttgggaggtcgaggtgggtggatcatgaggtcaggtgttcgagaccagcccggccaacatagtgaaaccccgcctctactaaaaatacaaaaattagctgggcatggtggtgtgtgcctgtaatcccagctactcaggaggctgaggcaggagaatcgcttgaacctgggaggcggaggttgcagtgagccaagattgtgccattgcattccagcccaggccaccgtgcgaggaaaaaaaaggaaatgaaaaggtgtgccaggctgatagtcaaattcatctgatttacatgactttcactttgaacgtgcagactccaatgcatgaagcccaggttgaactgggaaatccaarttgcacttaagatacatgagtaccttaatcccgacacaggctttctgagccaggctctgtttaatcaatgggtgtttggaatgagggctgtggacatcatagcggctcccttttccctag

SEQ ID NO: 836580 - DNA, 516 bp, Homo sapiens
caaaacacatggatagattttctatcactgatggtaytggatacactgggcaggcctgctgtcttccacttttctgataaggatcttgacgttcaccatgtgccacgcccacacagctctagagtagactctcagcccatatactcacctgtaagccaaaaaaggtacacgtggtcaaaattaccccgcaaaatgctgcaagtcatccccacgaggtggtgcccagacactttgcccccgaagagctggaagagattagttccttcagtggactaccagccaaattcaggtgacttacatttagaggtcaagtttcttaatactcagcctgctgagatgcatgcacgcgggacacctgcagaagctgagggatcagcaggttcgagtctccccttccacgctcactgcaggtatttgctttctgagtgatgtggcaggtgaccatttcagttgttgactttctctttcttctttgtgagaaatgcacatagttgaatttgctcaatttaaatttgt

SEQ ID NO: 836581 - DNA, 573 bp, Homo sapiens
taaagcaggggccatgacagtaatgaggaaagatggccccgacaaagggacttgggggccgagatcaggagtggaactcagcaaggtaaacatgggagggaaggagcattctgctcctagggaagaacatgtacaaggaccccaagacaggaacgagtgtgaccttcaaagaatggaaaataaagggcacagagctgggcgaggtgagtgtcacaagacaatgggaagaagcagagataccataatggccctcatttttcccatccataaaataaaaatggtattcccttgtctcatctacaccatggagattctactatgcaccttgcttttctcttacagtggagagtcaaagctggaatcatagtccttaactcacactacttactgttggcagctgagagaataggacattctactttgatatttctgtattttctctccactttttgccatggagccatgtgactctgccyattgtgagtgctctctcactttctctctccctgatatatattaatgcatgcatcacacacacatgtgcatacatactgtttttgttgttttttttcg

SEQ ID NO: 836582 - DNA, 645 bp, Homo sapiens
agtgatttttgtgattttttttagacaatgatgattattgacagtttagaccatttgttgtaaccaaataggtgtgcttcttcctaagaacatatctgtaatattttcaagctaagacttcttgtattaactttattccttcattatactttaaaatttttgagaatttttccacattggtaagataccatatttaataaattacatgccatggtctgatattatcaaagtaacacaataaagtttaccaaatgataatattccttagaatacttaaaactcataacttttatatatgaaagcccatagatagtatcctgttaaatagattaaattggggacatagcacgatagtggtgctattaaaattgacttccatgtatgaattaaatgacagtgcattgttgatgtgctggtgtgtaaggcacaacttattacatgatttgagtccagcaatgaccataaaagtaaaagtcaattaatataggttgagtattccttttccaaaatggctggtgctagaartgtttccaatttcaattttgggaggattttggaatatttgcacatacataatgagatattttgggtaggactagaagtgtgttggattggggactttttttttgatttggcaatatttgc

SEQ ID NO: 836583 - DNA, 584 bp, Homo sapiens
ctgtaattgaggataaaatgaattaatgtcttttaaacacatggccctattcagcagcaatgtattgttttaatttgctagttggtacattacgagagcttggtaatttgttcatccctttattaggtgtaagattgaaatggggctgggaagggaaaaataacaattggctggatgagcagaataatatgttctttgaaatgaagcattctttgtaatggatgtttatttcagatgattacattgtacagtgcattcaaatgggaaaaacaaacaggaggccagctgcactaattttatcaaagttatttatatcagcagtataattaaaggcagtaatttcaaattaggttttctgaaaatccatttatagacaacacaaggcaacttgtcttagtggcatctaggccatgattgtgctctaggggcaatgttaactattgccaattggccttggcattttgaaaattaattayggtttcaaaagattctaaagtggttgcttcctggtgccctgaccagtttagatccaatccactaggagaacccaatatataatttatgagtgtgaaaaagaataatcg

SEQ ID NO: 836584 - DNA, 466 bp, Homo sapiens
attctgactgcttctaaaaatttattttgtttgcatgtgttttcagtctcatgataaggctcttaataatataagcccaatgaatatgatgaccgagtctttttattacagtgtaaacactcactccatgccagaatgtaagactagaagtattttctctctatatatatacagacttgcacacatgaataaaaatatttatatcaaagaacagagctagctctcacattcatccacatttgggggttcgaataaaaaaagagtataatcctgtatggaaagtgttacctaaggaaatatgacctcaagacaacctcaaataagaaaagactattgacacatacagaactactctagtccatatttycatcaaaattagagtgtgttgcatcagtttcccttactgactgccaattttatcaatttgtctaataaggcattcgattttaaaacttaaatcagaagc

SEQ ID NO: 836585 - DNA, 613 bp, Homo sapiens
ataagaaactcatgaaataatgggaatttgtaaagaagctaaatctagtattgtttttgaaatcattttatctgacgaagttttgaagtataataaaatctttcatgttcaaaatgtcttcaattaaaactaatgatattacttagaaaaaagtgtcctagtaattacaacttgattttgaaaactcacaacctcacggggggtcataagcagttaaacgtctacacttaaaagtatcatcgactcatttaatgttgtatgactgatattcatgaaataagccactttcttcttatttcttctctatcagacaagctggtggtaaattttgtgtctctggtcagcctctgtctgcaaactcttctcaggagtggaggctgcactacctgccttacttcctacatccctcacttccgtatcattccgaccctcacgtagaaaaccacctacaacatctgccaaaatacactgcttttcagaaaacaaaaatagtaaagccagaagaatagaaaaacactcaccctgattcgctctggtttacttacaagaaatgacatgrgttcctactgtgtaggcctacttcagtttcaaaaacttaaacctaaaaggaaaa

SEQ ID NO: 836586 - DNA, 571 bp, Homo sapiens
aattccttggctcaagtgatcctcccgcctcagcctcccaggtaggtggaattgcaggcatttgccaccacgactgattttaaaacttttgtagagatgggggtcttgytatgttacccaggctggtttatcacttgttatacaaattatttcttttttgttctaagataatgctcaatattcaaggagttcatccaaattgagattaggtgaataaatccgtgtcttcattatccatgctcttaaacgctttaaagactctgattatatatgcttaggctgtctttcctaactaaagagttctaaactttttttttttttttgagacggagtttcgctcatcgcccaggctggagtgcaatggcacaatctcggctcactgcaacctccgcctcccaggttcaagcaattctcctgcctcagcctcccgagtatctgggattgcgggcatgcgccaccacgctcagctaattttgtattttcagtagagacagggtttcaccatgttggtcaggccggtatcaaattcctgacctcaagggatccacctacctcagcctcccaaagtgct

SEQ ID NO: 836587 - DNA, 466 bp, Homo sapiens
tgggtgcaggcgggctgagtccaaaaagagagtcagtgaagggagataggggtggggacgttttataggatttgggtaggtagtggaaaattacagtcaaagggggttgttctctggcgggcaggggtggggggtcacaaggtgctcagtgggggagcttctgagccaggagaaggaatttcacaaggtaacgtcatcagttaaggcaggaaccggccattttcacttcttttgtcattcttcagttacttcaggccatctggatgtatgcatgtaggcttgggcccagaggcctgacatttaacatggataaatgtaaagttcttagaatcatacatacacwttggaaaagatggggcttaatcgcactttataagacttgaaggatgtttgagaatcactatgaaactgctgaaaataccaagaaaatttaattcttatgtatataaataatgtgtctgtttta

SEQ ID NO: 836588 - DNA, 618 bp, Homo sapiens
gataacataaaattaaccctttgaaagtgtacaactccgtggtttttagtatatccacctgattgcacaacgatcaccactgtctagttccagaacatttttatcaccacaaaagaaaggctgtatccaggcygggcacggtggctcacgcctgtaatcccagcactttgggaggccgaggcgggcggatcacggggtcaggagattgaaaccatcctgggtaacacggtgaagccctatctgtactaaagatacaaaaaaattagctgggcatgatggcagatgcctgtagtcccagctactcaggaggctgaggcaggagaatggcctgaacccaggaagcggagcttgcagtgagccaagattgcgccactgcactccagcctgggcgacagagcaagactccatctcacaaaaaaataataaaaataaaataaaaaaaaaaaagaaaggctgtctttctcctttcccattggccgtctttctccattccctactcctccaatcccctggcaaccactaaatctactttccatgtctgtggacttgactcttcgggacattttacataaatggaatcatgcaatgcagcacattttgcatctggcttttttcacc

SEQ ID NO: 836589 - DNA, 558 bp, Homo sapiens
atgctcaatatcttctctaggggtgtcactgtttggctggactgttcacctggctaccacacacaagtggaaaacaaactttttttttgagacggagtctcactctgtcacccagcctggagtgcratggctcgatctcagctcactgcaagctccgcctcccaggttcatgccattctcctgcttcagcctcccaagtagctgggactacaggcgcccgccaccacgcccggctaattttttgtatttttagtttcaccgtgttagccaggatggtcttgatctcctgaccttgtgatccgcctgcctcggcctcccaaagtgctgggattacaggcgtgagtcactgcgcccggccccagaaaacatacttttcaattatgtgcttttatatctttgaaaatgtgtgccgtgtgtgagtgtaggcaggtgtgtgtattaactttagtagtatttctgatacttccttttagatatttactaaatgttgtttataggaatttgaattacattatacttactttactaaatttattttgttgtatactgaaagaaaat

SEQ ID NO: 836590 - DNA, 461 bp, Homo sapiens
gaagtcccatgatctgctgaagaactaggaaagccgatggtataattaggtctgagtccaaaggcccacaaattaggaccaccacactagctggctgtggtgtcagtatctgtcatcccaccgatttggggggctgaagtgggaggatcacttgagccaggagtttgagaccagcctgagcaacatagagagaccccagctctaaaacagaaaaaagaaaatcaggagcaccagtgctccagggcaggagaagatggatgtcctaggtcaaacagagagaaaattctccctttctctgtgtttttgctctatttgggccctcagtggattggatgggagtgcccagctgcttagtgawggtgatttcctttactcggtatactaagtcaaatgctaatcttttctgggaacacattcacagacacacgcaaaaagtatgatttcccagttttctaggcatc

SEQ ID NO: 836591 - DNA, 600 bp, Homo sapiens
gtatgtttactttagaaagtggtttggcagtttctttaaaagttaaacatatgcctgttacaggactcagctgttccacaattaggtgtctaccaagagaaacaaaagtgtatctctgttcaaatagttgtacatgtatatgtgcacatacagcagatgcattcgtgatagccaaaagttggaaacaactaaaatgtccataaacaggtgaatggataaacaaattgtgatatatcaagggagtactacttagctaaacaaaggagcaaaaaaatgaatgttcaaaagaatgatgaataaacctccaaataattatgctgaaagcagccagtatataccgcatgtatacagtaaatatattttctataatttggggatttatataaatttatgtaaaatttatattaattctacaaaatacggtctatagtgacaaaagagttcagtggtttcctgaggaaggaggtgggacttgggactgtgtgatgggasggccttcaggaaacttgttgaggtgagggatatgtttgctatttttattttcagatggtttcatgattgtagattggatccgtttcctggggctatttcaccacaaac

SEQ ID NO: 836592 - DNA, 548 bp, Homo sapiens
gatgggaagactaagcctagtgatgaatgaggcacacatagaaagggacaggtgcaccaggacatgggtggggatggtccctgctccatagaaagggacaggtgcaccaggacacgggtggggatggtccctgctcctcatgtctgtgcgaggctttcatttgcaggcttcacagtgctttagaataatgtgttcatggaataaagagaaaggtagcatgggaggaaaatgttttcatacaaagcgaggaaattaaatatcacttgattcaactgggtattttaaggggaaaattacatgattaaatcacacccatggaagtttggtttagaattccattatctaagatggatgaacatttccaaggccctaaactgtgtattagaaagaaatcctaattgcatcaaaataaatgaaatgttatatttttgttattagtttttgagtgcctttcaacccagaagaaaactaaacttgatttaaaaaaaaaamagctttataacaagatgttagaggtgataaatttaaagtttgaataggaagagcat

SEQ ID NO: 836593 - DNA, 656 bp, Homo sapiens
cataaaatgtgctttgagtcttagataatttgcttgcttccttcatgactctgctatttataagatgacttaaagaaaaaagagctaaaataacttagcacyccccaacacacacatatacaaacccacaatgacaatgtaagattaataaaaaggctgtcaagttattttaaaaacaaggaacaaaataactcttctctaattctagcatttatttaaacaataattttgcataacagtatgcttttaactgaataagtttttaaaaacatcttttaaccagttttgtacactcagtttatcatcatctttactgtgtttctcaacgtggaaatggaagggaatgatgcaaatgacagtaacagcaattaacagcagcagttgtcatcatagcagcaagagtagagtatttttcatatcccattgctttccacaaatattttaggcctgacttttaaaaaataaataattaaatgaccaagtcatgcaaagagaacttcgtaaaacctgttaggaagttcaggcttaatcaactgatgcttaatcaatattttttgagttaataaaaactagcaaaatattgttttatatcaaatgctgactgatatccttaagaaattttgatgactcaagaaatctgttactacttcctcacg

SEQ ID NO: 836594 - DNA, 677 bp, Homo sapiens
ttccaattaaataatcaggactgagctatgtttgatgaaacacactcacatctttaaataacagcatgtaaaatattaaaatacaagctttcaaaaataaatacataaataagtagaaccctcgtaagaaatagtcaaacacattaagtcctttccagctgtccctagaaagctgctgttctctttttcattttcagctctggtaagggcagggaccaccctgcaggaagtgtcaatgatacgctgataagcttcttacttctctcctgtcagttggtgctccccctgtgatgagaaaagggttactgttgcaggtgctaaggaaggctgctcttctgtcactctgaagttgcttggagggatgtccccatgcagactctctcccagccctccactcagggaaggtctgtctgtacccactgccttctatagcagaaaacttgcactcctgaatgctttttttttttttttcaagaaagaagtggctgtggactcaactagattcttggtttgaaaaagccaaaacatattggtcactgattgtcacattgggttagaaatgtccattcatgatctcccttaagctgcacacaaccctatgaaataactaccattatctaccctattttgctaaagctcaaagagattaaataaygttgacagggatcctagccttg

SEQ ID NO: 836595 - DNA, 460 bp, Homo sapiens
tccctgtaaaccctcaacccccaagtccccaactaggaggggtcctcagctcaggctaccagtgcagccacctcaacccctggctgaacattcccaggaactgtggctatatggttctcagaggtagagttcccagaggctactgaaaacccctctaccactgccactgcagtggtactgccctttctgcccttgccctggggaatgagcaaagacccttagtgcttcaactgcaccttgagcaagcattaattgccctatggagaggttactggtctgtctgccctctttccccgccactcacttgtcacaaggtatgcctccctggcttgggctcacaggacagctgccgcaacccaagttgatcacactgactgatagcagctccacacctctcaagatggagccccaaaagataagtgaaagactctctrtcacaaccactgcaaagttcctttcc

SEQ ID NO: 836596 - DNA, 571 bp, Homo sapiens
gccttttacacattgctgtttcacctgctcctcccaccacaaaaaaattaatgaaactttcagcccagcttctttcaagaaggcatttctgggctgggcacggtggttcacgcctataatccccgcwctttggaaggccaaggcagatggatcacaaggtcaggagttcaagaccagcctggccaatatggtgaaaccccgtctctactaaaaatacaaaaattagccgggcttggtggcaggcgcctgtagtcccagctactcaggagggtgaggcaggagaatcacttgaacccgggaggcagaggttgcagtgtgccgagatcgcaccactgtactctagcctgggtgacagagcaagactccgtctcaaaaaaaaaagctatttctatacccctcgctactcatagtccccagtctgggctatgtgctcttctttgggcaccaagagtgctctgcactttcccatcctaacaagactcattgtataccagaagtacatattcaaatgtctctcctgctagatgtgggcttcatgaggtctgacccctgcctatgttgttggtcaatg

SEQ ID NO: 836597 - DNA, 479 bp, Homo sapiens
catgatacaaaaatagactgcagataaagcctttaattctacttgggcaaatmcaagaataacgtaagagtgttacttaaacttacatttagaaaagtcaaagattttaagggaaaatatataattactttgaaaacatagactatttttctagatttatttatttatttattttacctgtcacttacttaacaaatacttatttacactggtcaggcatgtgaaagagttttccagattctagaagcagactctccaaatcatgctaaaggctcacactgagctctcaatcaaaccatgatatattttcatgatccggtaagaggtgtcatccataatttcctttgttcccattttgtttataaggctagcccaaatcttaccgtgtctcaatcagtctgaaactccaagttcacatgtattatcagtcagctagattatctctcaaaggcaaatgaaaaaaaaaaatagtcctgttt

SEQ ID NO: 836598 - DNA, 479 bp, Homo sapiens
catgatacaaaaatagactgcagataaagcctttaattctacttgggcaaatccaagaataacgtaagagtgttacttaaacttacatttagaaaagtcaaagattttaagggaaaatatataattactttgaaaacatagactatttttctagatttatttatttatttattttacctgtcacttacttaacaaatacttatttacactggtcaggcatgtgaaagagttttccagattctagaagcagactctccaaatcatgctaaaggctcacactgagctctcaatcaaaccatgatatattttcatgatccggtaagaggtgtcatccataatttcctttgttcccattttgtttataaggctagcccwaatcttaccgtgtctcaatcagtctgaaactccaagttcacatgtattatcagtcagctagattatctctcaaaggcaaatgaaaaaaaaaaatagtcctgttt

SEQ ID NO: 836599 - DNA, 603 bp, Homo sapiens
tttttaaattttttttgtagagataagggtctccctatgtttttcaggctggcctcaaactcttgggctcaagcagtcatcctgcctcagcctcccaaagtgttgggattacaggcctgagccaccacttctggcagaatgttaacattttaaacaagaaatagcatataccctaaggtacatgctttcaaaggttgatatattcataagtgagcttgttttcctactgagttgtatttttcttccttgaattccattttgaattgtaaatcaaaagtaaaattctaagccctcctaaccatctgaatggactctcctctcagccaagggtgttccatagtaaacctgaaaaaactagttcaggccatgatgggaagcaggagccagacatgcctcattataccctcctcctttttggaattactgatagaacagactctttaaatctgataagaaacatttgcaatctattctctctgaaggctgctacctagagacttcagcckcttgataaaaccttggtctcaacaaccccttttcgtagctcatacattcctttctattgacagtaattctttcaaccaattgacaaccagaaaactt

SEQ ID NO: 836600 - DNA, 638 bp, Homo sapiens
  misc_feature 194: n = A,T,C or G
gctgggcatggcagctcatgcctgtaatcccagcataattgcarcactttgggaggccgaggcaggaggatcacttgaggccaggagtttgagaccaacctgaacaacatagggagaccttatctgtacaaaaaaaaaaaaattagccgggcatggtggcacacgcctgtggtcccagctacttgggaggctgnaagtgggaggattgcttgggcctgggaggttgaggctgcagtgagccacaatcattccactgcactccagcctggccaacagagtgagaccttgtctgaaaaaagaaaaaaaaattatgagaagaatagcattgttttacatttttgcaaatcaatttcataactggcttaatggaagagagctggattcctatagctacttctgcattgaatctgttgtgatacattgtcctgattgaagcacatgaagaaaatttgacctcaaggaggactttatggtcctctggatagggccttggggaccccccagagtacttagactgcaatttgagaactgctaatctagagagatgctacagtgtatgaagagacgagagctgggctcaagcctcaaggagcacccacgtttaatagtcaggaaggagaggataaacaaacaggtca

SEQ ID NO: 836601 - DNA, 527 bp, Homo sapiens
catttccttggttaaatttattctcagggttttttattgttgttcttttttagctattgtaacctgaattgctttcttkatttcttttttagctagttcactgtgagtgtatagaaacactactcatttttatatattgactttgtatccagcgactttagtaaattcatttatcagttttgtgattttttttgtagtcttttggttcttattttatgtacagataaattggaatgggtaggtttttccatatataagatcatgtcatttgtaaagaaaaatttgactttctgtcttccagtttggatgccttttttttctttcatctggttgctctggctaggacccccagtactatactgaataactggtgaaaatgggcacccttgtcgtgtttcagttcttagaggaaaggctttctgcttttccccattcagtacaatttagctgtgggtttgtcacctattgcttttattatgtcaaggtattttccttctatgcctaatttgttgagagtttttaccatg

SEQ ID NO: 836602 - DNA, 593 bp, Homo sapiens
atcaaaatgatcatatagtttttgtcttcattctgttaatgtgatatatcacactgatttgcatttgttgaaccatccttgcatccctgggataaattccatttggtcataataaatgatctttttaatgtgttgttgaattcagtttgctagtattttgttaaattttgcatcaatattcatcagtgatattggcctatagttttctttctttgaagtgtttggttttggtaacagggtaatactggcctcgtagaatgagtttggaaatattccctcctctgtttttcagaatagttttagtaggattggtgttagttcttctttaaatgtttggtggaattcagcactgaagccattgggtcctgggattttctttgccggggtgctttttattatggttttgattttgttacttgttattggtctgttcaggttttggatttattcatagttaaatattgttaggttgtgtgtgtctaggaatttatccrtttattctagattttacaacgtattggcatatagttgctcatagtagccaataatgatcctttgaatttctgtggtatcagttgtaatatctacttttc

SEQ ID NO: 836603 - DNA, 616 bp, Homo sapiens
accgctgctcacccgaagtgtatttaaggggtcccaacagcaacttatcaacattttttgttgtaaagcacasagagagcagtgaattctgtccattttgtgagcagcacatctggataaggcaggtgccccactgcattcagagcagctctgggaatgaggaaggaagagacaacaaaaggaacaggagccttccaataagcccagacattagacctgagccttgtccctgtcataggctagtcattattgattaaaaggtggacatcagataaacccaagagggacagccccgccaacgtccagagcaatgaggccctcactctgccctcacctctgccagtgtaaattctggggaatttctgaaacaccgtgaatacagaggtgtgactcagtgggaatcacaggaatgtcagaggacaaagcagttggtattaataaattgctttgagtctggaaacaaagaagtggccttctttgtttccaggctgaagtacagtgctgtgatcatagctcactgtaacctcgaactcctggcctaaaatgatcctcctgcctcagcctcccaaagcactgggaatacaggcatgagacaccatgcctggcctggccttca

SEQ ID NO: 836604 - DNA, 616 bp, Homo sapiens
accgctgctcacccgaagtgtatttaaggggtcccaacagcaacttatcaacattttttgttgtaaagcacacagagagcagtgaattctgtccattttgtgagcagcacatctggataaggcrggtgccccactgcattcagagcagctctgggaatgaggaaggaagagacaacaaaaggaacaggagccttccaataagcccagacattagacctgagccttgtccctgtcataggctagtcattattgattaaaaggtggacatcagataaacccaagagggacagccccgccaacgtccagagcaatgaggccctcactctgccctcacctctgccagtgtaaattctggggaatttctgaaacaccgtgaatacagaggtgtgactcagtgggaatcacaggaatgtcagaggacaaagcagttggtattaataaattgctttgagtctggaaacaaagaagtggccttctttgtttccaggctgaagtacagtgctgtgatcatagctcactgtaacctcgaactcctggcctaaaatgatcctcctgcctcagcctcccaaagcactgggaatacaggcatgagacaccatgcctggcctggccttca

SEQ ID NO: 836605 - DNA, 513 bp, Homo sapiens
cctagggtgccagtggagagcagggctgggggttcagatctttgagttccgcatggaccccactttgcagcaaaacctatagagagcaggcaggactggactccacagggastcaggcaggccatcatccccagcagctgctgtttgcttttgaagagctggagctcctccgattttcttttttcctttataaaaaaagtattgaggtacaagtacacacagggaagcacacagcttgcacagccaactttacacatttctacagccaaggattgatttgcctccccagtgaagatgcagaaccttcccaattttaagtgagagcacctcggtgctgcctgcccaggctcgcccctgacctcctggctcacccttgctctgggggcctgagcctggaaccccttcggggacagactggggatccaggcctctaacctcatcctgggtaggtcccccaagggtgctcagaggtccctcaaggcccttctaacaggaaagggggctatctccgct

SEQ ID NO: 836606 - DNA, 531 bp, Homo sapiens
aaatgctagcaatagcagacagattataataggagagagactatataataatcaaggcaccaaccgactcagaagctgtcacaggcccaartgtatatgtatgtgtctaacatacacgcacctcaaaatatagtaagcaaattgacagaactacaagtctaagattacaacccatttaactttatcaaaagttgataaatcaagcaatttaaaaagtactaggttataaaagatttgaaaaacaaaagtaacaagcattatctaatgggtgtgtgtgtgtaaaactttgcggccaaacataaatggtcatcatagatcatttaaaaacagttggtgatatacagattatttaaaaatttgaccacatactaggtcacaaagaactcaacaaatatctagaatcatcaaataacacagatcatattctctaaacacaacccaattaaattagaagtcaatactaaaatacagtctcaaactcatatatgtgggaactaaaaaattcactccctagtaactaataggctgaag

SEQ ID NO: 836607 - DNA, 630 bp, Homo sapiens
tttttcttttttttttttttttctgagaagggcattgytgggacaagtggtaaaatctgaataaggtccatagatcagataatagttttgtaacactatttgtgaattttgataattacactgtggttacataagggattactcctatttttgggaaatatacactgaagtatttttagtgtaggaaaagcagtatcatgtctgtagttttttctgaaataaattgtacatgtgtgcaaagagggaaaacatgaaaacaagtggggcagatataaaagggtggttctttgtgtcattcttgcaacatttttgtaagtctgaaattatttccaaatgaagttaccaaaatccactggagtagtaaaactccgactgaatagaggggccaggccgttcagcccggcaggttcacctgggaatgacactgcatcgggagagaagaggggacatgcactgggactttgcgctcacctgtgcctctctcacctcctccttcaaggattcagcctccacagctccgtctcaaacgcttccccactgcccttaagtggactgaatacatgacaactacacgacaacttcctctatttctctaactggaaaaacgggaaaatatcctgtcaggctttg

SEQ ID NO: 836608 - DNA, 524 bp, Homo sapiens
gtcaacttcattgaccttttcaaggactagcttttgtttcatggattttctctattgtttctttgttttcatttttactgttttctgggcaatctttttttttccttctgcttgcattgggtttattttgctcttctttttctagtatcttgaggcgagagcttagcttattgatttgaagaatttcctctttaaaccatgggttacttagaaatgtgttgtttaatttgtaagttatttgagattctcctgctatatttctgttactgatttcttgtttgattcgattgtggtccaagaacacactctgtataatttcgattattttacatttgccaaggcttgttttacagcccaagatgtcatgtatcctggtatatggtctttgggcacatgaaaagaatgtgtattctgcaggttttgggtacagcrttctagaaatgtcaattagaccctgttaattgaagatgttgttgaggtcttctgcatccttgctgattttctgcttggttttatatcagttg

SEQ ID NO: 836609 - DNA, 595 bp, Homo sapiens
atctgaatggatccctcctctctgtcaaggrcattccaaagtttacctgaaaaagaagttcaggccatgatgggaaggcagagctggacaaacctggtaataccctcctcctttttggagttactaacagaacagactctaaatctgataagaaacatttacaatctagtctgtctgaagcctgctacctggaggcttcatttgcatgacaaaatcttggtttccacaacctgttatcataacccagatattcctttctattgatagtaactctttcaaccaattaccaatcagaaaacctttgaatccgcctatgatatggaaacccccacttccacttgtcccaccttcctggactgaaccaatatacatcttccatgtattgattgatgccttatgtctccctaaaatatgtcacaccaagttgttacccaaccactttgggcccatgttctcaggatctcctaaatgctgtgtcatgggccattggccactcatatttggctcagaataaatctcttcaaatattttacatagtataactctttttcattgacagagacttactagttcctgatccttaaagaaatttctc

SEQ ID NO: 836610 - DNA, 501 bp, Homo sapiens
tggctaaaatggcttcaatcatacatttgcttgactytcaagcccatggtcctaacttgatcaagctataaaagaggtaggcatagcttggtcttgttggaatgtcattaaaggaaaaattttcaaaatcatgaagagagaatgactaatactccgacaaaaaggacaagagaaattttaagaaacttacctatgaagagaacgtagacaaggcattaagatacaggattgtttgcaaaactaagagctgttttatattactttatatctgtaactattacaatgtcatctttcctattctccgttaaatgttctcttatttccccgaatcttctccacacagcacttaccacagtttaacttgttatttgaaaatgaaaaactctcctattaaactgcagactgggtaaaggtagaccatgactttccctcaccatttctgccccaatacttatcataccatgggtgcggtagacagtgttgggagcaggggaaggagat

SEQ ID NO: 836611 - DNA, 560 bp, Homo sapiens
tccacacagcacttaccacagtttaacttgttatttgaaaatgaaaaactctcctattaaactgcagactgggtaaaggtagaccatgactttccctcaccatttctgccccaatacttakcataccatgggtgcggtagacagtgttgggagcaggggaaggagatcttggacacacaatctatagagcttgcaggcctccattctttatactaaaacaaaacaaaacaaaacaaaaaacgggcgtgctggatcacgcctgtaatctcatcacttttagaggccgaggcgggcagatcactaggtcaagagatcaacaccatcctggccaaaatggtgaaaccctgtctctactaaaaatacaaaaaattagccaggcgtggcagtgcgtgcctgtagtcccagctacttgggaggctgaggcaggagaattgcttgaacctgggaggcggaggcagcagtcagccgagatggcgccactggactccagcctgggcaacagagcgaggctccgtctcaaaaataaataaataaaataaaaaataaaatgtgacaaagca

SEQ ID NO: 836612 - DNA, 585 bp, Homo sapiens
attggcataactctattttgtacaagaatatattagaggctaccttcattcatctttctagccaaccatacgattaagtacagaaactaatttatctctcaaaattcagtaagcacttcatactaataacaatgrtatttatttgatgcttatttattgggtattatttattcccaatttgttttctaagtacttagtttttaacgtatttaattcttatagcaactaaataaagtagtttgagagcctccattttcaatctctgtaaactatcaatagattcaaggagtctgtcttacctaatttactacttcattgacttacgggcagaaggattcagtggttatcaagtattaaagtagaaaggatagctttttctgaacaatgcaagaaaagctgaaaaggcagaatatgatggtatttacacttaacagccttaacataggaccttgcacatactaagtgctaaggtgtttgttggagcacttacagattctatgcccatgcatggtttgcctttactgactttatttataagaagaggacctttaatgttagtgttctaacaattcagggaaaaaacta

SEQ ID NO: 836613 - DNA, 635 bp, Homo sapiens
tactggagctttccaagggctgctatttgcacagacagttcagaacaaaaagatttcagtggcggcatagaggcgagaatggcttatgacattcgtaagcagatgagtgtgtttgtgagggcacttcagtgagtgtgtccagggtatcatagacccttcaggaaacttctcatcacctaccccagctactgtccatcccttctacatatattcttctaatctttttaacaggcaactggattacaaccagatcagctgtattgaagatggggcattcagggctctccgggacctggaagtgctgtaagtactgctatttctcttgctcttttaacgggggctttgtgtctggacaggactaatgtggaagcttatctgctagcttaaaaccttgttgtcaaaatagtctctcaagagataccttaaataactcatggtgaatacagagaagagtctaaatgtgtgtgtgcaaaaccttgcgtaccatatctgtatatttaggtaaaattgtgtaaggtcwctcaaatgttctccttataaatgtttttatgagattcatagaatttgtcattgctaaatattgagataaaatcaactttataggaaaaataacataaaaaaaaacctcttagtag

SEQ ID NO: 836614 - DNA, 528 bp, Homo sapiens
acttcatttcactcacctcaattactcaaatttgtctcaaaatattctacagcatggacattttgctacatgtttccaccctttgccagaattattaattcatcaattcactcatttgttttaaaaatagctaacatttatggaatatttaccatctgccatgcattgtgctaaatgccttacatatggtatattatttaatccccacaagagtgctattaggtagctactattattatcttcactctgatgaaaaaattgtcaccagaagttaaagatctttcctgaggttgtagtgttaaaggataaaagaactagctccaatcagggacattggattccagtgcccatgctcttaaacattatactagccaacaaatatgtaatgaaatgtwcaacgtgcaaacctctctgctaaatgccatcattgtttacacagttattcctacttgatctctcttgtgtgagatattatatttcagtgaccttatgtgaggactgactgctttctgctcacagttgcaatat

SEQ ID NO: 836615 - DNA, 572 bp, Homo sapiens
gttagttgtacttgaaatctggctatttcattgaaacacatttgctattgtgtatgaagaatcaataacatggacagggaagaaagaarttataattatctttcaaaagctcttatttctccagtcttcgttaaggtatgaagcatctgcaaaaagtcctgcaaaagtgtcaagatagaattacctttctgaatcattatttcttttgcagcaattatccccctgaataataaagttatggaaatgaatgatagaaccaacctgaggaaattaatcagcaagcctgggaatacaatttgggtctccttaacaatattccaacttaattgaaaacaaggacagttaggttggtttttggtcgttttatgtctttaatatgtaattttcataaacgaaagcttcatattgcactttggggatgatggttacagagtacttgataagttttactgcaaggacatgtagtaatgtatatgccagcctcttatatgacaactattgaatttacactttcaactcttttaaaatataaacgtgtggattgcatactcctgtgttttgcattgcttgtg

SEQ ID NO: 836616 - DNA, 628 bp, Homo sapiens
ttcataaccataaactttgaaacaacatcaaacattataaatattttatgttcactcaaccaagcttgagggctattcatgcctttccggtaaaccactgctatagagaataaaaatatcagctcttatattgccactgtatcatgagtaaacacgtttattttccttaactagtttctgttttagtcatttaagtatttttcttatgtaattcttttgtctttctgccatgtcattcatatgacataagttttctttaacttctagagtgaaatttctagggaccctgacattttacataagctgtgaaaaacatcttgagaaggaaaaaggaattaacatgtgaaatcaaacttttgtagatttctggcctggcgtggtggttcactcctgtaataccagcactttgggaggccaaggtgggcagatcacgaggtcaggagatcgagaccatcctggccaacaagtcgaaaccctgtctctactaaaaatacaaaaaattagccgggcatggaggtggacacccatrtagtcccagctacttgggaggctgaggcaggagaatcacttgaacccaggaggtggaggctgcagtgagctgagatcacaccactgcactccagcctgg

SEQ ID NO: 836617 - DNA, 616 bp, Homo sapiens
gagtgagttctcaatgtgtgwgtgtatgtgcgtgtctctgtgtgtgtaactctggttacattgtggagggtagaaacctatatactttctaactttttaagctttgtttttatttttgctacaaatagatgccttaaaaatccggaactctcttagtcactgtcctatactcagtccccagcatgatgtctttttcattgtaactttagtgcagatgcattagttgtgttcaaagagaaactttagacaaatttaacttaaaagtttatttgagcaattcatgagtcaagcagcactcaaatcagaagaggttcagagaggtctcctagtggacagtgaatatttatagacagagcactgaaataatgtacagaaatagctttattggttgcagctaagtgtttgtcctatttggacatggcctaatcatttggaagcctgtgattggctgaagttcgactgcttatgattgagtgagaactggctgtctgtaatttaaaaatatgcccctagttaggttcagtttgtctatgtactaagtaagactgtagtttattatgtaagaactcgaagtatggagacagtcttaggccaatggcctcctgcttatttaatt

SEQ ID NO: 836618 - DNA, 616 bp, Homo sapiens
aacttttaaactctgcaattgtagtgtgaagatagccatagacagatgaacaagtgrttgtgtttccataaaactgtatttttataaagagcagtgaaccatatttgcttgcgggccttgatttcccaactctgtagcagatcattcctatttaggctttcttattttaaaatataatttcccgttatttcttgtttaacagcatctgataaacttgatttatagtgtttttaaaatcatttatcatacaacgtattttaaattcctttgttatttattctttgtcccattggctacttataaatttatttcctaattttcaatcatctagagattttcaagtgttttattctttttttaaaaaaatctagttaaattttattatactctgataccatattcaacatgatttcagttatttgaaatgatacagcatatcaatatgaatttgtggaatttttgtataccttaatcagatttgcattctgaagtgattatgtgctgcattttgtatgtgtctacaaagtctattttataattatgttcaattttctatatcattacttttttttgcttgtcaatcacttactaaaagtattgtaataaaatatcccat

SEQ ID NO: 836619 - DNA, 550 bp, Homo sapiens
aagtaaggaaaggtctacttatatttaagcaaagagcttaagaaattacatagatatmtctcataaacctttttaggctgaggacccgaagcaggaatgtgactgatatgttaaagatcatcaggattgctggtctgacaggaaggagtgagctgggaaaggagaagcaggcagtgagattaaatggatagcatgtgtagcaccatgcacaacctgttagacaatcaccagaaccttgattttaactccaagtcatatgagaagccaaacttttgaaggatatgaaggaggagagtgacaacataaatcgcatgagtaaaagctcataccggctttggtgttgaaaacagaccacaagagattagattataagtaataagaacaatattagtgtattgtatttttctaagtatgacatgatggcagttatttctaaagggttagaaacagtgaaaaatattaagattctaattatatggagaaggcagaacttctaaaatttattgctgcattaaagcagaatttgaaagaaaaaaaaagtgaagacatt

SEQ ID NO: 836620 - DNA, 550 bp, Homo sapiens
aagtaaggaaaggtctacttatatttaagcaaagagcttaagaaattacatagatatctctcataaacctttttaggctgaggacccgaagcaggaatgtgactgatatgttaaagatcatcaggattgctggtctgacaggaaggagtgagctgggaaaggagaagcaggcagtgagattaaatggatagcatgtgtagcaccatgcacaacctgttagacaatcaccagaaccttgattttaactccaagtcatatgagaagccaaacttttgaaggatatgaaggaggagagtgacaacataaatcgcatgagtaaaagctcataccggctttggtgttgaaaacagaccacaagagattagattataagtaataagaacaatattagtgtattgtatttttctaagtatgacatgatggcagttatttctaaarggttagaaacagtgaaaaatattaagattctaattatatggagaaggcagaacttctaaaatttattgctgcattaaagcagaatttgaaagaaaaaaaaagtgaagacatt

SEQ ID NO: 836621 - DNA, 569 bp, Homo sapiens
gttaccattctttatttcttctgcaagagatggtcagatcttcttkctggcttccacagtctggtgaatttgggacacattcatttgttcatggcccaaacatttgctaagtgcctattatttcctgagaaatgttagttaatgagccctattccttgctcttaaggagtttattttctaatggaaaaggtaaacaaaagcaggtaattatgttacagtgcacagtaaccattaagaagagatgaacatgtgtgcaaggaccctaaatgccttagctgggtgaagaaaaatggccacttttaagaaccaagttgcaaatgtaggcctaggtgcaggattaagaccatgttcactttgctcattagccatattgtcagtatcttaaggaatacttgtggggttggctctttccttagtggaacatctttatttcttgtctactttttatttcttataaaaaaaaaaaaaaaaggtaatctaacctaaccttttctaatgtaacctaacaagtgttattttttaaaagtatttttaggttctttgtgactacatttttgtctttccctaga

SEQ ID NO: 836622 - DNA, 569 bp, Homo sapiens
gttaccattctttatttcttctgcaagagatggtcagatcttctttctggcttccacagtctggtgaatttgggacacattcatttgttcatggcccaaacatttgctaagtgcctattatttcctgagaaatgttagttaatgagccctattccttgctcttaaggagtttattttctaatggaaaaggtaaacaaaagcaggtaattatgttacagtgcacagtaaccattaagaagagatgaacatgtgtgcaaggaccctaaatgccttagctgggtgaagaaaaatggccacttttaagaaccaagttgcaaatgtaggcctaggtgcaggattaagaccatgttcactttgctcattagccatattgtcagtatcttaaggaatacttgtggggttggctctttccttagtggaacatctttatttcttgtctactttttatttcttrtaaaaaaaaaaaaaaaaggtaatctaacctaaccttttctaatgtaacctaacaagtgttattttttaaaagtatttttaggttctttgtgactacatttttgtctttccctaga

SEQ ID NO: 836623 - DNA, 638 bp, Homo sapiens
catttataatatttgtagaattgcttgatttgactgttattggcagttcttgctaagaagaaaatactttgcagaatttactttcaactaacatgttttttttcttaccaaacatattccactgtgagggaaggataatgagctattgctgaactgcagtacaagtcaaacattttagctaccagaaacaaaaataatttattgggtgtggtaataaacatcaaggtaggctaggaaatggttagttttacccttcaaaaacaagactgcttttacctcagaaatcccaaaagctgcaaatataggagaaataatatgggacatggaaaaaaaagaaaagcctgatacctgtaaagcttttggcaaaatttttgccctcatcaacctcctaaagcattatttctaccctgactccccaccgtgttgaatattttgcccaaacattactatatttaatgacattttaagcaaaagttatgtatctcaagtgatgtactgagctattaacttctcacrtaaacatacttagagtaataatgttgacccctaagactcttctgcatgggtctggaatgctaaagaatgtattcatgaaaacattatttagctatctcctgctttgtaggttaaggagaagt

SEQ ID NO: 836624 - DNA, 638 bp, Homo sapiens
atttaaataggccatgggagtcagggaagacaaaaggtctaaatacttttctcttcaatattttgttttatggaaatatttttatattgaaataattgtatttaaatttagattttgtgataaaagttaatttaaaggtatgaactataaaaccaccacaggaaagaggataatgtttcaacagttacttgttaatgtaacagtttatacaataaaaagtaacccacagtataggatttttcacatttacaaagtgtcaagtgtttacttcttcatcaatatcgcctacattttcattatttaacatctttgcccaattcccactgtaaccaagtgtatttccatgcagtcaagttactacccagcttagtttgaggttaaatgtaaaaagctttgacgttttctgttctcagagtcctcctgcagaagcctttgttctgacctttcacccacacccccaggacttctattcactaaaaatgtggaattatccatgctaatcctggaattctggtcattaaaagaaaaaaaattgtgtatatcattctctgcatcaatttcaaaagttattcttcacacctatatttagagatgcagctgaagcttaaaaatawtcaattgggcatataattttataa

SEQ ID NO: 836625 - DNA, 636 bp, Homo sapiens
attaaataggtcttggagaagagcttttttaaaaaaagttatgttaatcagtgaataatatagcttcattttcttaatttaaaaaattaagtgtmccatcttcacattaggaaatgtattacaattacattgtactttacattccattaatatttttcatggcatgttttgtcttcaaagcttttataattcatatgtatttattgttgccaaacaaataggtaatctggacccccatttacaagatttcatgtgcaacattgagttttatattaatgtctttattaatagaatgagaagacaattcgtgacaggataagcgaaagatacacaaaagaaaagaagttaggatacgaagaatacaaatcagcagcagcagcagcagggcagtagcagcaacctttgtttctgagtgactcccatatgccagaaattgtgctacattctaaaaaagggagcatgatatttgtcttcatggagcttactacatagaggaaagaaaagtgttgaacaaataattataaatctggtgaatattgtgaaaaataaatttaggaatgtaaccactccatttttatatatttgaatcctcttctgctgaataaatttgcagtttaatgacttccttcccctctg

SEQ ID NO: 836626 - DNA, 618 bp, Homo sapiens
tggctgaatagtaacagctatgatttgtagctcctagcatgattgaaacagaagacasgtgatttctgcatttccaactgaggtacctggttcatctcattgggactggttgggcagtgggtgcagcccatggagggtgagctgaagcaaggcggggcatcacctcacccgggaagcataaggggttgggggatttccctttcctagcaaagggaagctgtgacagactgtacttggaaaactggtacacttctgcccaaatactgcacttttcccatggtcttagcaactggcagaccaggagattctctcccgtgcctagctcagcaggtcccacacccacagagccttgctcactgatagtgcagcagtctgaaatcgacctgcaaggctgcagcctggcagggggaggggtgtccgccattgctgaggcttaagtaggtaaacaaagcagccaggaagctcaaactgggcagagcccacctcagctcagcaaggcctactgcctctacagactccacctctgtgggcagggcttagctgaacaaaaggcagcagacaacttccgcagacttaaatgtccctgtctgacagcttggaatagagcagtggttctac

SEQ ID NO: 836627 - DNA, 621 bp, Homo sapiens
ctttttaacaatagctattctgactgatgtgacataatatttcattgtggttttgatttgcatttctctaatgatcagtgacattgagcttttcttttttcatatgcttsttggccatatgtatgtcttattttgataagtggctgttcatgtcctttggccacttcttaatgggttgttttattcttataaatttgtttaagtttcttgtagattctggatattagacctttgtcagataaatagactgcaaaatgttttcccattctgtaggttgtctgttcactccaatgatagtttcttttgctgtgcagaactgtttagtttaattggatcccatttgtcaatttttgcttttgttgctattgtttttgatgttttcatcaaaaaatctttgctcatgcccacatcctgactagtattgcctagattttcttctagggtttttatagttttgggttttacatttaagtctttaagccatcttgagttaatttttgtatatggtgaaaggaaagagtccagtttcaatcttcttcatatgggtagccagttatcccagcaccatttattaaatagggactcctttccttattgcttatttttgtcagctttgttgaa

SEQ ID NO: 836628 - DNA, 549 bp, Homo sapiens
tgttgaattgaaccatctaccattatgtaatgcccttctttgtctttttcgacctttgttggtttaaggtctgtttcatcaaaagctaggattacaactcctatttttttctgttttccattttcttgatacatttttcttcatccctttattttgaggctatgtatgtcacttcatgtaagatgggcctcttgaaaatagcataccaatgggttgtgcttctttattcaacttgccactctgtgccttttaattgagggcatttagttgatttagattcaaggttagtattgatatgtgtggaattgatcctgttgtaatgttgttagctggttattatgcagacttgcttgtgtggttactttatagtgtcattggtctgtgtagttcagtgtttttttgtggtggctgctaatgctgtttcctttatatatgtagtgcttctttcaggagctgttttaaggcaygtctgctggtaacaaattccctcagcatttctttgtctgaaaaggatcttggccaggtgcggtggctcacgcctgtaatccc

SEQ ID NO: 836629 - DNA, 592 bp, Homo sapiens
tttctggatgattcaattccaaaacatatccttactggctatgtcacttaatagcaatctgaagcaattctgtgttgtctaatcttcctaaatccaaatcctaacactgtgtacgcttagtttagaatagtggttctctggcttggctgtgctttagaataacatatgacactttaaaaagaaatattgaagtctgggactcacaatgtacccattaagtcagaatctctggggtttgggactcaggcatttttacaaagctccccagctgatctcatgcaaaagaatattagtatagatgtgctgaggctaaaggtgaacaattgtcctgtgtcccacagtgggggcaatgaataaaaatagagatttcttctttcaccatcttggacttcaatttatttcatttctattaggttgaaaacagcacttatcattttggttaaacaaatataaaacatctcctctcttctaacayataccatgtcatcaggctagagctgttaccaaatatgaatgactagcgtgtaacctcttgcccagagtttaaaaactgttgtttagggaatggtttttgctgtctgtctccttttct

SEQ ID NO: 836630 - DNA, 536 bp, Homo sapiens
taggattgtttttagcacagaggagccaaaaatctttgttgaacgaattaatggttacttcrtgagttgtgtgatcactggaaaagatgcttgaccttcctaaacatctagaaagtaggaaaactaacgtatccatagcatagagttgctaagaagagtaaataagataacgaagagtttgacacccagtgaaagttcaataactgttgtaaaagatttagggcaaacctaagatgtctttctgaacactaagatttttttcagatagttatggactgcatgtttatgtccccttgaaattcacatgtgaaagccctaatcaccaatctggcagcatttggagtaagcaagtaattaaggttaaaaaaaaaaaagatcatatgggtggggccctgatctgacaggataagtgtccttataagaaaacacatcagaaaactcctcttccaccttactgcatacgccaaggaaaggccatgtgaagccatagtgagaagatggacatctgcaagccaagaagagagccctcatcataa

SEQ ID NO: 836631 - DNA, 536 bp, Homo sapiens
taggattgtttttagcacagaggagccaaaaatctttgttgaacgaattaatggttacttcgtgagttgtgtgatcactggaaaagatgcttgaccttcctaaacatmtagaaagtaggaaaactaacgtatccatagcatagagttgctaagaagagtaaataagataacgaagagtttgacacccagtgaaagttcaataactgttgtaaaagatttagggcaaacctaagatgtctttctgaacactaagatttttttcagatagttatggactgcatgtttatgtccccttgaaattcacatgtgaaagccctaatcaccaatctggcagcatttggagtaagcaagtaattaaggttaaaaaaaaaaaagatcatatgggtggggccctgatctgacaggataagtgtccttataagaaaacacatcagaaaactcctcttccaccttactgcatacgccaaggaaaggccatgtgaagccatagtgagaagatggacatctgcaagccaagaagagagccctcatcataa

SEQ ID NO: 836632 - DNA, 627 bp, Homo sapiens
taatacctactttatagggttgttaacagcagcgtatccatgtgggtctgcagcagcctcagattctgcctcctcagaagaaagaatttgaccraatgacttaaagcagagggagagaacaaggcaagttttagagcagaggtgaaagtttatttagaagtttagagcaggaatgaaagcaagtaaagcacacttgaaagagggacaagcgggtgacttgagagatccaagtgcacagtttgacctttgacttggggttttataagttggcttacttctgggtggttgtgtcccatctcccctgattcttcctttagcggggctgtccacatgtgtagtgacccgccagcacttgggaagttgtgctcatgctcatttgaggcatttttcccttatcagttgagtgttcctagaggaaggtcagttaaactccatcattttgcttcttagagcacgtgcttgaacctactcatccaactcctgagatcttatggggaagctgctgatcaccagcttcaggtgttttctatctgttgggagactgcctttccctggcgctggttgtgaccaattattattttagagagacagtttaacaagcacctgaccatcaactgatggttgcca

SEQ ID NO: 836633 - DNA, 587 bp, Homo sapiens
ttcttaatgccatcactgacacraacaaaatgaatttcgaagcgtcagtatggaattttattttttacccatgtttgttggcagttggcagattcattctggtttagcgggtttgatattagtgaaattacatatttcaaaatataagaatccttatatcatccttcattttctcatctgctttaaaactcataggtgaaggctctgctatgcttttatatagttcagtctgcctattttaagtagtgctgagcatagagcaggtggtctataaatattttttctgataggtaaagctaaattcttccaaatagtccagacaattccacaaaaataaccatgctagttgtgtggtattgtataggaaaacaaagctgttgattgttgttttccactttttaagaggtgaaggtcaaaggcatattccagagatattgggaagttcttgccaaatgactgaagtaatcaactatcaaattattttgccatttcaaatatagacacacatcaaattagtttcaagagtgctctatgattaaggagtccatatttcatcttcacatgagagtctagttatgttttttgaa

SEQ ID NO: 836634 - DNA, 602 bp, Homo sapiens
caggccagtgggaaggctggaaaaaagtctaggctaaattaatactctggttccaatattcgctatttatatattgcatgaggaaacctgctggtggccccatggagtgatctgaaaaggataggagacaaagacggctatgagtacaaagggcattgtggacaagagctaatgtttcctcagggggagtatgagccagtaagaatgttagtaagaatatcagcaaaagtagcagcaataccagtaacaataaggtgctaccatttaattgagtgcctccaatgtgtcaggcataaaagttccatcatatacattgactcttgcacagatgaggaaatggaggtgaagagaaggtcagtgatttggccaaatttatttaactagaatgacgagggagtgggattcaaacccaggtacatctcagtctacagtcttttcatttcatcaagctagggtgtcaagaaggatctcaataactctttcatggtggccttatttttctgtcctccctgatttccaggacttatgtgagggtagatggaacttgctcagggcaaayggaatgaccatgttttgctaagagagtgagggagctttgattt

SEQ ID NO: 836635 - DNA, 682 bp, Homo sapiens
gaaaacggggttcctgttacagaagaaagcagaagaaagaggaatagatgctgggtagcaaaaacaataaatgtccactccagatatcatgcctctttgtagacagggaaaarcatgctcaaaagggtaagttatttatctggggtcatatagatagtaaatgcaaattgatatttaaatttaggatttatcatttacaaagccacatgttgatacacatgaaaggcagggaaatactgggtagaagaaggtggttcctcgtcaagggacccaccttcaagcctggaaacccaaggccctaaatgggaacaggcattcctgtttttgtgccaaaatgtggcattttagcccaccacaccacccatcttgtacccatataaaccccaaaccccaggctccacaagcagatgaacagaagggcagagtggcagggcagcagagaggtgcagcagagaaggagggaagaaaaagagtgtctgaacattgagaggagctcggctggggacggtcagagaggagatagccatgggatggccaaactccaggggaagatcatcttcccactctatcctctttctagctccccatccatcctgctgagagccacctccatccagcaataaaatcttccccatttatcatccttcaatttgtccatgtggactgattcatcctggacacg

SEQ ID NO: 836636 - DNA, 622 bp, Homo sapiens
ctcttgctgggccttccactggacctggcctcacagagccttagtttcctatctgaagaagggggatgaagttgcccacctrgtacattattgtaaatatctagttaaatgggattacagctctcgtcatagcccttgttattactgttaggtccactaaactcacatctgcttcccaaaagggaaggacttcacacagcttaccggctgtggttccaaatcgtcacacttggcttcaggccactacctgcacattttttaccagctaaaaaaatcaagcctagacttctcaaaacagagaattgagatcttctaatagtccttccagggcgactacactgcacaaagaagatgacacccatcttatttcaagggtaagtcaggtttcttggttggctaatttattaaaatcttagccccatttcccagtcaagggtggtgtggtaaaccgatggcatctaagaaaaacattcttctaaaacagccaaacagcatgcttcaacatgctgaactgcaaaatttccattactttaaaaatagttgacttttagccatatgctccaattaccaattttaaaagaaggaaaaaagaaatataacaattgtatcacacatatgcaag

SEQ ID NO: 836637 - DNA, 612 bp, Homo sapiens
cagtcagtttgtttcagttgggatccgagcacggtccactcattggatctctgcacccgccccttaagtctctgaatctgtagccaccttaacttcattttctccacaaagcccagcccagacatctcactttcccacctacaaggtattgctcatgctgtactcagtacccaaaatgtcctcagcccgcatgcccaaacatcactcaaaatccaactcaaatactgtcccctccctaaaatctttcgtgattgccagcagtcctcctcctaagcacagccatggggtctcctatagggattcctatatgattttatctccacttcacctgggtcatttactcttgtctataatcagcttgagagttacatatctccccttcaatctcctggaagggtaaattccacctgatttatatgtatagtcctcacgaacttagcacgatgccctgtacttggcagttgctcagtaaatcagtttgtaaggtgctgtatttaaaaataatgcaaacggagaaatgaaggatggcaagagtatctcacatgtcttcaacctccctcctctkctccctcatccattcccttgggagatatttgttgcataactgctgta

SEQ ID NO: 836638 - DNA, 601 bp, Homo sapiens
aggcatgcacactgtcatctctacatgcctcaggcccacacatcactgaagaagaaacaataattgtcccagagtcttgaatacgycatcaggtatgggcattttatttccagattttacttccttactgtgaagtatgagataacatctgtccttctgcacgtgggataaggggacgagtctagctgctaaatgtgagtgtatgagtatgattctgaggtctggtttgataccaggagttaataagataaagaacataataaatacattagaccaatattagtactttagatagtgagtttatgatttcaaatttgcagtgaagttaatgctggtaaagttgaatcatattgatcctcttgcctttcttttgaaaatattaaaatttaagtaagagctgaagaagatgatccttacaagtctgcagtcattcagaattactccacttgtgctctcttcttttgacagggttactaggcaaggagatttgggccacagacagattttggaaggagctttctagtgatggatgacaggactcttggtcctgtcatgttaacttgtttttcatgacataaagacacagaaagcatgcttatca

SEQ ID NO: 836639 - DNA, 518 bp, Homo sapiens
ttagtcattagggaaatgcaaattaaaaccataatgagataccactccacatccactaggatagctataataaaaaagaaagataataacaagtattggggagagtttagaggaattagaccacttatacattgctggtaggaatgtaaaatggtgcagctactttggaaaacagtttgccagttcctcaaaatgttacacagagttacggtaggacctagcaatttcactccttgctatatagctaagagaaataaaaacaagggaccgggcacagtgactcaagcctgtaatcccagcactttgggaggccgaggcgggcagatcacctgaggtcaggagtttgagaccagcctggccaacatggtgaaaccgcatctttactaaaaatacaaaaaattagccaggcatggtagyaggtgcctgtaatcccagctactcaggaggctgaggcaggagaatcgcttgaacccaggaggcagaggttgcagtgagccaagatcacaccattgcactcc

SEQ ID NO: 836640 - DNA, 597 bp, Homo sapiens
tttttaaaagtcttttttaaatatttgtgatggtttaatgaagatgacactgtgatactaacttgtttgtgtgtatttgtgagtgtrtgtgaatgtacaggatggcagctgcctgaagggttaaaagattttataggctgccacggaagagtataagaatgaagacaacatccttgacattattttcctttgtaaaaatatactttgtattctaaaagatggaaaaataataatacaaaaaggaaggggcttatctttacagggatttgatatttgtgaattcaggttatgagctattatgagacagcctgtactcaaataagagatctgaccactgctcaaaacagaatgaacttctgcttctggaaagatgaagtagaagtacttttccctacttctcccttgaaataccctggacattatatataaaataaacatttaaaaattctgaccagcctggccaacatggcgaaaccccgtctctactaaaaatacaaaaattagccgggcgtggtggcacacacctgtaatcccagctactcaggaggctgaggcacgagaatcgcttgaatccgggagggagaggttacagtgagc

SEQ ID NO: 836641 - DNA, 570 bp, Homo sapiens
tgtgtttttcacctgtgcataaaggcaatraaaagagaataatggaatgctaaaagctatgccgtaaacaagtcgagagcattgaatcagctaagcactccattccttttgaaactaactgacctttagtcacaggcatctatgaggatgctggattatcatttcaactgaagcatactttggttactataaccacgtgtgtaaaagtgatttgtgtaaatcttgagatacggtggcatacctttctgaaggtatgagctgacttaaaatgcctaccttttaattgctgttggattgtattactttaaaatttttagcatagctactaatataatgcttcttttctcttctagtagctcaaaaatatgtattctcattataaaatagaataaagttttactaaattttgttcaatatatagaaagtaaaaagaataaaagtactttccccgtatcatacttattgcagcaactaatttaatattctgatgtattttctttctttgctgtgcatagtttttatatcaatgtgaacatttggtgtatatacatttgtgggtacttttttttt

SEQ ID NO: 836642 - DNA, 570 bp, Homo sapiens
tgtgtttttcacctgtgcataaaggcaataaaaagagaataatggaatgctaaaagctatgccgtaaasaagtcgagagcattgaatcagctaagcactccattccttttgaaactaactgacctttagtcacaggcatctatgaggatgctggattatcatttcaactgaagcatactttggttactataaccacgtgtgtaaaagtgatttgtgtaaatcttgagatacggtggcatacctttctgaaggtatgagctgacttaaaatgcctaccttttaattgctgttggattgtattactttaaaatttttagcatagctactaatataatgcttcttttctcttctagtagctcaaaaatatgtattctcattataaaatagaataaagttttactaaattttgttcaatatatagaaagtaaaaagaataaaagtactttccccgtatcatacttattgcagcaactaatttaatattctgatgtattttctttctttgctgtgcatagtttttatatcaatgtgaacatttggtgtatatacatttgtgggtacttttttttt

SEQ ID NO: 836643 - DNA, 598 bp, Homo sapiens
ttacagtcactacattttttataagagaaaggcagaaaatttttaaaaatctttatatctcctgactttagctcttcatttcatttttatatagaggtatctgactatgaaataatatgyatactcatcttctatttaaaaagacaaattataaaacagactgtagggactctgtactgcttctcagacactgcaatcccacataggagcaaggtcagatttactgatacaggcaactgtccaaagcagctcttctcctgctagctgttgatgttctcttcctctctgccagctccataacaagggccctcacccggtgcaccaccctcgcccacacacacaccctgaccgaggccctgagagttccaggttcctgcacctgcctttcctgcccagggctttttgagaacagacagttgctctcaagcccagggctttctgagagcagacagttgctcttgagcccttctctgaggtcctctgaacacccctactccaccatcaatcagagcagttatactttttttttttgcttttacctattaggtttctgttaggttgaaacatatgaaactgctgatattcaaccgtattacct

SEQ ID NO: 836644 - DNA, 630 bp, Homo sapiens
atagcgaacactaccttcagctcagcctaaactaatcagaacagacgcgaagagtagcttactttctccttaccttctcagatgaggtcattaattaggacaaggagcagtttgggaaatttaggtaaagtgktacccaccccttcacctagaactaaatacccactaaaagcctagaatgagtgcagggccttccagagattccctatatagaaggtacttggccctgattatactttcccagtgctgctgggcagggtgagtagggtgggaaggggccagaaggaaagaacaacttaggtgcctcccccactgctctccaccccgttcccagccaggcctagctcttcatagcactgtctcactccaccaacattactcatctcacgatcctggcgcccccggggaaattatacattccttaatggcaaggctactcccaccaatgttggaactacattgaagagaatataaggggccaccaggactgaatacctgcctgggacaccctctgctcacacactatcggtaccaggtcccagagctccaagagagctacaactgcccttgaggccaccggccctattaagatgagacattcctcccagccctaagaagagccagccccag

SEQ ID NO: 836645 - DNA, 561 bp, Homo sapiens
tggttcttccaatgtggtatcagttaatcaccagatttattttasagctttgtctatggtttcttttcccctcatcctctttcatatttcaggttaaatcccttttgaacaggttagaagttctatcaaacacagttttccttttctcatggggtgcacatcatccttgccaaggctcagatgttctggcatgaaaaatcatggcctacaacactttaaaataatttctgtggccaatggttcacttccctggtgccttttcctcttccaaggctccacatgcttcgatttgtagcctggacttcaaagtcaccaacaatacattccagattcctttggctgcggtattattaattcccaaagagatcagcaaaacagccagcagttagtgggtttgaggagagactcaattgctgctactttttcagaagatgcaattactccttcctctgagttactttctgtacacattaacttctagacaacggtttcgattccattgttcttttgggatattgttcctcctgacttctctcctggattattttcttcatcttgata

SEQ ID NO: 836646 - DNA, 561 bp, Homo sapiens
gtattcctggttcctggaaaagtacatatagaatagtataaatacaataaatgtttgaattatcgtataacttgagtctaaattttaagttagtatcctgtattaagaactgggttgatcaaatggttctttctttgcacatatcaaggctttcgactattcccaaccaggtcttcccaaatttgggcatattcctgcctctgcctaccctgttctaatttggcactctaaagatagttcataaaaagcaagccaaagatagaaaagagagctaaggctacaggaggaatttactctttaacatttgggggaaggaaaatgaggcttgtctacagcagggactggctgtcttccagaaatggtttcccaaggtgttccctacctctctttttcttggatatctttttgcattatagatagccttgggaagggtgtcacctttatcctatcagttccacctaatcaactgtagtcatctgagagccagaattattattgatagaggggcctgggaaaggagaaraggaccaggagagaggaaggtatacttattgcagagga

SEQ ID NO: 836647 - DNA, 497 bp, Homo sapiens
caaacaaccccatcattccttcaargacctgtgcaactcttagaactacctaaaatttccctactactggatgaaggtgaaagatttggccaaggtttctcagcctcagcactgttgacgtttcaggccagttaattcttggttccagggggcagtcctggacgttgtattgaggcttagcagcatctctggactttaaaacgttctagaaggctctcaaatggcataaaaggactagagaagaaagaaatctataactataaactgagtagatgccaggagcacccccaccctcgtggtgacaaccagaaaaaaaaaattgtcaacagatactctcaaatgtccccagggagtggaagggcaaaatcacccccaattgagaatcatctcttttagccaagaattctttttatttatgatatcaaagcattttaatttatttttattgactgaaacagtggtttaagagaatgattgttcagccgtgggaagttaca

SEQ ID NO: 836648 - DNA, 269 bp, Homo sapiens
tgcttttatcattcaacctgtaatggtcatcattatcgactcagttgattaaggatgacaggatcagctacctattcattttatttcataaaaataagtgggtgatctaaaagtayagggtttggggaaaatcagatacctaaatagttgtgaaaattcttccagaagttgaaaggactgttcagagattattattgtcggtgttgatggtgtttcacctccttttaagtcctgcaggcgttttggtgacatttcagcaaactgtgtac

SEQ ID NO: 836649 - DNA, 554 bp, Homo sapiens
tatgattcagcaattaaaaggaacaacccactgatacatgccatgacatggatgaacctcaaaaatacgcctggtgaaaaaagccaggcttggcatggcggctcatgtctataatcccaggactttgagaggctgaggtgggaggattgcttgagctcaggagtttaagaccagcctgggcaacatagtgagacatctctacaaaaaaaaaattttttttaattagctgagtgtgatggtgtgcagctccttgggaggctgaggtgggaggatcaatttagctagggagatcaaggctgcagtgagccataatcatgccactgcactccagcctgggtgacaaagagagaccctgtctttgggaaaaaaaaaaaaaaaaaaaaaaaaaaaaaaggaccacttattgtatgattcccttgatataaaaggtccgaaaggcaaatctacagaaataggaagtggattaatgttccctggggcaaggggtgaaaaagggcataaraaatcttgttaggaaaactaaaaatattctaaaactaatttatgatgatggt

SEQ ID NO: 836650 - DNA, 542 bp, Homo sapiens
gaaattaaagttaattctggcccttatcagttggtaagccttcaaatttattatttcagaggaaaaattgagtactggtcatcaaatttyagttatgtctgggattaagacatttggcctgtggggcccaaatgcttttcaagagcttaggaagctacattttaaaaggaactgtataaactccaaaatatataaagataactataaaatcaaaaatcatatttaattatacgtcttttaaatttaacctatatcagctagttaattacaactcaattcaactttcagctgggtgcagtggctcatgcctgtaatcccagcactttgggaggccgaggtgggtgaatcacttgagcccaggagtttgcaccctgggcaacatggcaaaaccccatgtctactataaatacaaaaattcgcctggcatggtggcacatgcctgtggtcccagctactcaggagtttgaggtgagaggatcacgtgagcccgggaggtggaggttgacgtgagccgagattgtgccaatatgctccaatatggg

SEQ ID NO: 836651 - DNA, 646 bp, Homo sapiens
ggtgaaaccccatctctactaaaaatacaaaatttagccgggcatggaggygggcacctgtacacctgtagtcccagctactaggaaggctgaggcaggagaatcgcttgaacccaggaggtggaggttgcagtgagctaagataacgccactgcactacagcctgggctacagagtgagactctgtctcaaaaaaaaaaaaagaatcctaagtcagggccgtctgtattttggaggtgttattggcgagacttgctaataggctgaacgtgggaagagagggaaaggaagaggctagggtgaagtctgagtttctggctggaacatttggggagacgtcaatgccatttatcaggatgcagagtgtttgcagatgagcaagttttgggcacagagatggaaagtaaggttagttagaggtagagggacttgagaaagagaaaacttgtgaatagagaggaatgagtcaatgaaaaaggagaaaaatgcaagggacagaagagataactgacaagagaaagccccagggggcagcaaagggaatgtccaggaaaagacaaaacctctgcagatgtgagatttggccactgtttctgtgaagtttgcccttccctaaagggctctgcatgggaggtcgcttctgcct

SEQ ID NO: 836652 - DNA, 646 bp, Homo sapiens
ggtgaaaccccatctctactaaaaatacaaaatttagccgggcatggaggtrggcacctgtacacctgtagtcccagctactaggaaggctgaggcaggagaatcgcttgaacccaggaggtggaggttgcagtgagctaagataacgccactgcactacagcctgggctacagagtgagactctgtctcaaaaaaaaaaaaagaatcctaagtcagggccgtctgtattttggaggtgttattggcgagacttgctaataggctgaacgtgggaagagagggaaaggaagaggctagggtgaagtctgagtttctggctggaacatttggggagacgtcaatgccatttatcaggatgcagagtgtttgcagatgagcaagttttgggcacagagatggaaagtaaggttagttagaggtagagggacttgagaaagagaaaacttgtgaatagagaggaatgagtcaatgaaaaaggagaaaaatgcaagggacagaagagataactgacaagagaaagccccagggggcagcaaagggaatgtccaggaaaagacaaaacctctgcagatgtgagatttggccactgtttctgtgaagtttgcccttccctaaagggctctgcatgggaggtcgcttctgcct

SEQ ID NO: 836653 - DNA, 646 bp, Homo sapiens
ggtgaaaccccatctctactaaaaatacaaaatttagccgggcatggaggtgggcacctgtacacctgtagtcccagctactaggaaggctgaggcaggagaatygcttgaacccaggaggtggaggttgcagtgagctaagataacgccactgcactacagcctgggctacagagtgagactctgtctcaaaaaaaaaaaaagaatcctaagtcagggccgtctgtattttggaggtgttattggcgagacttgctaataggctgaacgtgggaagagagggaaaggaagaggctagggtgaagtctgagtttctggctggaacatttggggagacgtcaatgccatttatcaggatgcagagtgtttgcagatgagcaagttttgggcacagagatggaaagtaaggttagttagaggtagagggacttgagaaagagaaaacttgtgaatagagaggaatgagtcaatgaaaaaggagaaaaatgcaagggacagaagagataactgacaagagaaagccccagggggcagcaaagggaatgtccaggaaaagacaaaacctctgcagatgtgagatttggccactgtttctgtgaagtttgcccttccctaaagggctctgcatgggaggtcgcttctgcct

SEQ ID NO: 836654 - DNA, 589 bp, Homo sapiens
gaaatggagtccagcatgtgctcaggaggaaagagctacagtttaggggaatagaaccactcaggatttataagaaagggaatagaatctcttaaaatggaagatggtggctgggagcggtggctcatgcctataatcccagcgctttgggaggccaaggtgggagaatcgcttgagcccaggagtctgaaacaagtctgggcaacatagtgaaaccctgtctctacaaaaaatacaaaaattagctgggcgtggtggcgagtgcctgtgatcccagctacttaggaggctgagtgtgggggcctctgagccactgaaataggggaattgcttgagtctgggaggttgagtctgcagtgagctgtgtttgtgccattgcactccagcctgggccacagaatgagaccctgtctcaaaaaaagaaaaaaaaaaaaagcccaggcatagtggctcacacctgtaatcccarcactttgggaggccaagacaggtggattgcttgagcacaggagtttgagaccagcctgggcaacatgacgagtctttgtctctgcaaaaacacaaattagccagatgtggtggtgcatgt

SEQ ID NO: 836655 - DNA, 610 bp, Homo sapiens
tatccatggtaataatggtatccaaaggcatagttgaaatgtattagcctttactgttattcctgtgaaggcttatagtgttggcatccattccctctggatttcgagtctgtgttcacagytgataatctcacattgagccatgatactctttgtatcattatcattacctgatataaagaaaccagacagaccattacctgatacaaagaaacttcacagtgaattcatagaaaagacagaaaaaagttttgctgaatatgtcgtatatacatatatataatattttattttaaaatgtcattgaacatatacatttctttagctttttccaggggacattgcacctaagtttcaaaacacacaaaatagatcccctttactaaacagttttcattttggggttacaaaaaagtcaatgtttcacaatcacaaagcataaaggtacatggttctgaaacaatttccaggcagatttctctcattcactgtactagggtagttttggaaacccagaccatgatccattccttacaaatgatctccaccatgggcctccctgggtctccagaaaaaaaacaaagaaaactgggggcaaaacaggagtaaa

SEQ ID NO: 836656 - DNA, 659 bp, Homo sapiens
gttcattttttttgctatgaaggaatacctcagactgggtaacttataaagaaaagaggtttgttttgactcatggttctgcaaactatacaagaaggatactgctggcatctgcttctgcaaaggcatcaagaagtctacgatcacagcgtaaggcaaagagggagcaggtatgttacacagcaggagagggagcaaaaaaaaaatggacaggttctttttttttctttcttttttttttttttctttttgccagacggagtctcgctctgttgcccaggttggagtgcagtggtgcaatcttggctcactgcaagctccacctcccgggttcactccattctcctgcctcagcctcccaagtagctgggactacaggtgcccgccaccacggccggctagttttttgtatttttagtagagacagggtttcaccatgttagccaggatggtcttgatctcctgacctcgtgatctgcccgcctcggcctcccaaagtgctgggattacaggcgtgagccactgcggccggccaaaaacagacaggttcttaaacaaccagctctcacatgaactaatacagtgagarctcacttattactgtggggaaggcaccaaggcattcatgagggatccaccctcatgaccaaaacacttcc

SEQ ID NO: 836657 - DNA, 643 bp, Homo sapiens
gaaggatataatacagaattaatctaatataatattamaattcccattactattactgtaaatttatttttgcaaagtagcatagccttaaaagatgatgactagcttaagatctttaggaaataattagtagacatagtcatgaaaggtactagaggctatctttagggcccagattttcatatattttttgaattatataaactgctagttttgatattttccatgacaagccttaatatttcatttagagcacacataatatgtggattataagtgaccgatcaagatattaaagtatcttaaattgattgattttcattatcattttgagcatctagactatctcaatctttgagcaaagttgtagatattatttagggatttagatttttttaaaaacaaaaccaaaaaactgctttgcaagtaagttttttgttcagttctcagtaaatagcaatttctatcccatcaaattccatcatgttgctgcaaagaagagtagagcttccagcatccctttgtgttacacgtggggagagacaggatatctgaatatatacttatggaatgagcatgtaaatgtgcttttagtcttttcacgtgtgtgtgtgtgtataggcatgaccatgcatttgggcat

SEQ ID NO: 836658 - DNA, 585 bp, Homo sapiens
gagatagataatcggcacatatcgcttctcggccttttggctaagatcaagtgataatcagcaagtaaatgcagaggaaggagagctggggaactctgggcacaactttacagcttcgtggttcatattcttttctaggagaaaggaagggtggatgaggccccaatccatcggttggaaataatgggctatgttttattcctcagtgcactgagaaggagagcaacatttaagcgtgtaagtgtgtgtatgtgtttgtgtgtgtgtgtgtcagagaaagggagggaaggagagagagaaaataacatatttctgctgctttaggaagaccagagagtctccatctgctttgtaactgtagctgcttcctaaggtcatgtgtaggctacgcaaatcaaaggagtcttggaaattctcagcagtttttttttttctatgcagacctgttgaaccyctcatttttcagtgacccttttgttgccagagggctcaggagggtatctggaagccagtgggaccctagccccagcagtgtccaggttcttgacaccatggagagaaagaattcgatgacaaatcagaata

SEQ ID NO: 836659 - DNA, 621 bp, Homo sapiens
cttcaaggtccaggcaggaaatcctctggattctttaagaggagtcgcagagctgattattgaacccagaagctcagggacatagacggccacatctatacttaactgactttgccacttcataaagggagaaaatgaaagtctaaaaaagaaattcaagtctgagctcaggctctgaataaacagggctttgcttctttacctactgcgaggaaatcctccaccttaaatcctctttagtctcatgccaattttttttttttttttttttgagagcgtgtcttgctttgttgcccaggctggagtgcagtagcgcaatgtcggctcactgcaatctttgcctcctgggttcaagaaattctcctgcctcagcctcctgagtagctgggattacaggtgcctaccaccatgcccagctaatttttgtacttttagtaagatgaggcttcaccatgctggccaggttggtctcaaactcctgacctcaagtgatctgcctgtctcggcctcccaaagtgctaagatwacaggcatgagccattgcacccggtccctgtgacaaaggtattaattacttcagtctaatacacaattgtcacataatttttaaaaatccttatt

SEQ ID NO: 836660 - DNA, 584 bp, Homo sapiens
gagcccttttagtcacagctagagttggagcagctgggatgcaggaagccatgtcctaaggctgcacagggcagtggggcccaaggcctggcccataaaaccattcttccctcctaggcctctgggcctgtgatgagagtggctgctgtgaaggtctctgaaatgcctttgaggtctcccctctgttttggctattaaaatttggcttctttttacttatgcaaatttcttcagcctgcttgaattcttcttcagaaaataagtttttcttttctaccacatgacagggtgcaaattttccaaacatttatactctgcttccctttgaaatataagttccagtttcaggtcatttttttgcttagaaatttcttctgtcagatactctaaatcatcactctcaaagttcaaagttccacagatccctggaacaggggcacaatgcagccagtctctttgctaaagcataacaaaagtgacrtttgctccagttcccaataagttcctcatctccctctgatacctctttagcttggacttcattgtctatatcactatcagcatttttgtcacaacaatttaac

SEQ ID NO: 836661 - DNA, 486 bp, Homo sapiens
tcttgtaattttgtcatttgacatacatataacaaatgaaaaagcatggtgcttgttgtcaacrgacttggatttaagttctgaatctgccactaataagctttctgactgtgggaagtttaattcacctgtttcaccataaagtgaagatcacattagtagtacttaccttatcagagtttatataatttatggaaaatgcttagcagagtgcacagtacatagcggagtttttattaaaatacagtgatgcctacagcaatgaatgaaagccatgccctactttaagtgagggtcttgaggaacttacagttctctgaaggaggtaaggcagatacagaagctatcactgaacctattcactatacctgtgcagtaaaggcaaacaccagcatgaaggtacgcagtaagagaaagaaaagcatttattgcagggtgccaagccaggagagcaggcagctaatgctgaagacctgaacaccatga

SEQ ID NO: 836662 - DNA, 534 bp, Homo sapiens
taaaaagaaggaagaacacagcgtctatagtcacaaagaaagctcttctgagtaaactgcctattaagataattttagctcacaaaggcatataaaacagatcacaggcccagcatttcctcaccaaaaaaaaaaaaacaaaaaacattttccacaattcctctttagcacatcagacttgttctttggtgctttctgaaatatgagcaaatgttgctgtactccagccatgctaaatttattgtagtttctcaaccatgccatgctgtttctgatttccctgccctactacatgaattctctctgcctagagaacactttcctattatatccactcctgcaatttgtccattgtcctttgctcagtcttcaaggtgcactttaaagattatctcccctaattctcagaagygcttaggaagccaacacatattttgttttgattcatctttgtatccagtatttactgagtgcttcctgtttataaggacctgtactaggaattgtagaggaataataaaattacaaagcaaa

SEQ ID NO: 836663 - DNA, 613 bp, Homo sapiens
atcattgtaggtttattagagatgcatgatctaaggcaccacggaatataagtccccaacctaatggatcagaatctacattttccatgatcccaaaattactcctaaaatttgaggaagcactaagytgaaatattatcggaaacctaaaacacaaaattaaagagattatcttaacataactgaagtttctgcagcagagtaaatatttggtccaatctattttcacccgtcagatcaccagcactactactccttgttccctgttctccattttcaaaatatgccttgttctgttaggtaaatgaagcacaaatagagcaaaaaggtctattgttggtccctttttggactttaaacaatgacattttctatcacaaaaatcaataagggatactttggattatacaaagcgggaaaggaaagcaaatggagactgtgggggtcccagtttccctttgcttcagatactctccagttttactcttctctattttaattaattggcttaccctcctccggtgtgacatgctaatgtcataaattgaaatgaaatgcatttaaactctttctgcttctatattttattgtcctcatgtaattttgctatgaa

SEQ ID NO: 836664 - DNA, 592 bp, Homo sapiens
cagtttgggtgctttttggtagagcaggtgtgcagtgttgggggtaagccttcctcgtgcagatrgcttggactctccagagccagcaggctggaaaagctgagttgactgaactgcagagatgttggccacccttcccatcaggggctccatcccagggagggatcagagttttattcatataaccgtggctggagtagctgatattcttgcagggaggccccgcccagtcaggagggatggattgggggtcccatttgaaaaagctatctggccacgatctggcacagcctctgtgctgtgctatgggggattgcttcttgaccgaaccacctggactccccgaagccagcaggctagaatggctgagtcaacctcaccgcagaaatggcggccgcccccacctcaggagctccttcgtctcaggcattctccagcctgctgcccctgctggctggaattccaagccagtgggtcctaacttgtgaggtgccatggaagtggggtccacagaacgacacttctcagctccctggattcagcgtgctttctaggggagtgtacggatggatctcctgccttgctaggattc

SEQ ID NO: 836665 - DNA, 607 bp, Homo sapiens
attatagacactctgatgatgactttaaatatgtctaggatccttatgagaagaattataagtaaaagtgacaggaattatgagacaaaataatgcataaattaaaatcacagtcagctattgaaatatatttaattttcaagatttctgattctgttcattatctttttatattttttctattttaagcattttaaagatgctttggccagtatcaaattgatactcctaagggtgtatcaatttgacttgactaaaagtcccagaaatattaaagatgacaagatagaaaaatatgcctcaaagaatgtagaaattacataaagaactaaattgtctaattttatgtttaacagtttcccaaatgtgacaacaactctattgtcccaaatgtgacatttatggaaataaagtgtacaactgaaaaacaatttccaaaactattgatgacaaaaagcaaatttggatcaaccacactagaagattgattgatttactatttaattctctctayaaacaatgacattgccaaattattgacatgtgagaaggcaatccaaagaagcagccaaaaatgtactgagaggagctaatccaggaaactcta

SEQ ID NO: 836666 - DNA, 661 bp, Homo sapiens
atgactttaaatatgtctaggatccttatgagaagaattataagtaaaagtgacaggaattatgagacaaaataatgcataaattaaaatcacagtcagctattgaaatatatttaattttcaagatttctgattctgttcattatctttttatattttttctattttaagcattttaaagatgctttggccagtatcaaattgatactcctaagggtgtatcaatttgacttgactaaaagtcccagaaatattaaagatgacaagatagaaaaatatgcctcaaagaatgtagaaattacataaagaactaaattgtctaattttatgtttaacagtttcccaaatgtgacaacaactctattgtcccaaatgtgacatttatggaaataaagtgtacaactgaaaaacaatttccaaaactattgatgacaaaaagcaaatttggatcaaccacactagaagattgattgatttactatttaattctctctataaacaatgacattgccaaattattgacatgtgagaaggcaatccaaagaagcagccaaaaatgtactgagagkagctaatccaggaaactctatttattagatgatgctgaaggccagtgtcataactccacatcccagcactagctgcatctccagcccctcag

SEQ ID NO: 836667 - DNA, 537 bp, Homo sapiens
tgaagtccttaactttaagggaaacctgctcactccattctccctggagctccatgttgataaattacccgaaggaattttatgaatctacatcttttatgtctgcagacatgaccyttcatctgatgaatattgaaacagaattctccagtacaatagaggacttgtggacattagtaggagcttgctctgaaccaacactggtttcatccaggacttgaacctgggcattattttctatctgctcagtatattgacctgtcagcaccttacttattttttaagcacatgctcaatggccacccactccaagaggtttgaatgatttaatacatgaaaaacatttaaccacacctagcttatatatagtaagaactcaataaatattagctattaataattttaaaatggcttccgagtcttctaaacaaagactgaaatatgagctcggcttaacctgttaggtgtattaaaggcataacgacattatttttcatttgccatagtcacctgaagctgttgtttcagagacaatga

SEQ ID NO: 836668 - DNA, 493 bp, Homo sapiens
ggttgtagtaattctatttgtatacccttggaaaataaaaatgtctagcttgacggttaaaaaaaagaaggaactgaaatgcaacagtggttgtttttggtttgtagtctataggcaaccaatcaatttgttcttttcagtattttccaaattgtatttaatgtgtgtgtattaacttataattggaactatatatactttttattgttaataagttaaatcataatttctaagtaagtattttggaaaacactatacacattaaaaaaaaaaaacaacaaaaaaaactacctgttgagtactgtgctcactatttgggtgataggttcaatagaaacccaaatcttggcattctacaatatacccatgtaacaaacctgcacatatacccctggatctaaaaaaagaaaagaatyaggtcttttgaggccacatgtgtatataaacagcagtaaatgacgtatacattattgtaattgtagagaatgatttg

SEQ ID NO: 836669 - DNA, 355 bp, Homo sapiens
ggctggaatgacagcatgatacagacaataatatcaccctaggagatgctggagcaacaacagagaaggggcctaggtcctggaggacctttcagaacaaagctgcctacttcccctgaatagcccactattgtttagaccaggggtgtccaatcttttggattccctgggccacactggaagaagaagaaccgtcttgggccacacataaaatacactaacacgaatgacagctgatgagctaaaagaaaaaaaaaagtcacacaaaaaaactcacaaaaaaatgycacacaaaaaaatgttttaagaaagtttacaaatttgttttgggccacattcaaagccatcctgggcc

SEQ ID NO: 836670 - DNA, 629 bp, Homo sapiens
tccacaagttgtggggacactataatgctgcatcatctcattttagtagctggagtaattatttatgttaaataaccacaaagcgattattgccaacataatgattaaggtttatggtgcaatgtaraaggccaaacttgttatataaatggtaaacctcaataattcagtttttaaataacactttgagatttaatcaacacagagtaattgcattaaatctgaattaagttcacatcggagacatgataatatcaagcaaagcatctcattcttttttctaatatataaaacagatctcgtgatctcacgaatcaatgcagttcagttcaagttcactgcaaaagcagttttctactaaaggccatggattgtatagccccatcaatcttgacatatggagcttaccagtaaggcagagatatgtcttgggacattactcaaagcatgagttttctctatacattttattcaaatacattaaaattgtttttagcactatcaggtgttatttttctaatctaggccaatgcagctcaaattttagcacaaaaaattactgatcacataaaagaaatatactgtttccccaggaatttggatatacagctcaccaaaactttacctgt

SEQ ID NO: 836671 - DNA, 517 bp, Homo sapiens
atcaataattatgatggtgattaacacacagaattttaaaagaaaagattccagagggtttcagggacagccatatcctgacctgwccttgtgggtgtcaattctaaaggaataagatgtaactcctttagccagaatgcaaggaaatttagtatttggaagagacaagatcatctggacacatttcctgatgaatgcctggtaattggtgtatttctgataaaactcagggtactcgctgcttagttgttaaaataaaagatgaaaggtaaaaagcaaaaggatcagccaagggcaattaatgcctaactggccctgaagaaaagttcactggcccagtagtagcaatccttccaaaatgagataagcacatttcctaccaagaaaatatcataaaacctgaactgtccaaaactcaacatccccttctctctcaaggcattttcatggcaaccttaatttttataaaataataataattggccaaattcattttataaaacataaactccctaaa

SEQ ID NO: 836672 - DNA, 607 bp, Homo sapiens
aaataactattaactataatggcaaattgtctttgaagaagagaagaaaactcagaagactaccctggggagagtacccaaggaaaagtcaacttggaaggatgacccttcccaaacctgggatttaggccttgttggagaaagtatggttgcagcccactgcacaacagagaagttttctatgttgcctggatccgagctggtccaaaatcaccaggaaaggtggaaacacttctctggggtggaggtaagccaaaggctgtcagtcagagaagtcagccaagacaggaaacacttctccagcgtgcaggtggacacaaaattacagttgaaattagcaagtaggaaacacccctgctggttggtttaggctacaacgccaacaactagggtgcctgcaagcctccctgagaatttgcttgcagtgttctgtggaaacttgatgggaaggcatccacgagtctgatctccactggatatatctcatakgcattgctgacagctacacagcaggagcaagtacaagcaaaccaaagcataccagaatcagaagagaaaactgttcttggtgtttctctatactctactaacaaaagaaaacacagtt

SEQ ID NO: 836673 - DNA, 545 bp, Homo sapiens
gctactgtcataggtatttgttttcatgcacttgggtgagcaaatttaatcagttttgctaggcatacacttagaacttcaatgtcacaaaatgtggcctawttagctttaataagtaatatactttgtcaaagtagttgcagaaatttgtacttcgccggtaatttatgaagcttgcaattgttctacatgttctccaacacttgcattgcatctacttctcattttatcatctacctttcattccaatgcatgttgaatttatattttaatttgcatttccctaatgaataacgaagaggtccatatcttccttgttgacttacatgttgatcttttgactacttttctaatgagttatgctgtttttatgctattgcttcgttagcattgtttatatattctgtatatttttgagacatgaacattgcaatatcatctcagatcgctttgccttttcactcatttaattgtggctttctgtaaacaaatgtttctaattttaatgtagtccaatttctcattttttccctttggaataaaca

SEQ ID NO: 836674 - DNA, 541 bp, Homo sapiens
tgaattgacttttaaacgtytgaataattttttttctactatcagccatttcttgctgcataatagtttttatactataaaggtataacaaccagcttccctgtacttgtactttcaactggtgcattatgaccataggttacactcaacaaatgaccttagaattatttaatggttactcatgttattattaataaaaaacattgtataatgtcagcatctgtttcaatagtatccttggattatgtaatctgacctattgtctttagacacagatcctcactgaaagtgtaggcaccaagctttggaataacagggaaaggaagagactattcagagagaaatacaatgtaagagaatttggtattatagcaccaggtgatatagtgctattgtactgtattccatactcacaaaaaaatcaatgactcctcaagtgcatttatgaaagagaaaacaggatgaaaaagagaaaggaaagggatggaaataatcagctctattctccttctggcaggcaggagtccaactaagcaggttt

SEQ ID NO: 836675 - DNA, 589 bp, Homo sapiens
catacgtacttataaacatagctatagatacagatatatgcacaaaactcaattagtttctacagagtagcacacagttaggctatcattttaaatatcaattagagccttaatctatactaacaaaattagtaagaccattctaaatagtattagcataattcacctttcaaggttcacaattagatattcacctttggaagaaaaagagattgcatcttttaaataattcttcctttgttaataataaaaaaattcagtgcagccattattcagaatctttctcttgactgtctttacctaagtttgacacagtgatgcagtccaaacaaactaaatgccagcacattatatttattctgagttaaatcagctttctaaagtgaaaaatgtttaagaataaaaaacatttacatggtgagaacaatagaacttgtgtagaccaattttaagaacagcagtttcctgtaaagctgtcagawggtattgttaaatatcacatgttaatacagcatgaaaaatagtggatagaaacattcttattaataaactacatagtaatatgacattttttttgccacattttttg

SEQ ID NO: 836676 - DNA, 544 bp, Homo sapiens
taccctaatcaatctatctttgcatatactgttgtctcatgattctttaatttaaaacaattcactactactcatctaccaatataactattgggtactagtactgtaaaatattgcaatgtatttaatattaaagttcatcaatctatatcagtaaactattatttattatgttctgtcttactatttcatgttatttatttgttttttttttaacaaggctagagtcttgcctaggatatgactaatgtgatagcatattttatactctgaaatatagtgtatatgtccaatacatcatatattatttattgcatagttgaagacattgagttatctctaagttattacttcttggaatcaatagaacatatgaggtcactgatacaagcaattagaaaaacattaatattattgaaaacttgaccaaactgaggtgtaatctaacyagtagacaaatggcattatatgtcaggggcaaatgactgctgcctggattctctcagtggtaattgtttataaaacagatgataatttaagatct

SEQ ID NO: 836677 - DNA, 622 bp, Homo sapiens
gcccaaggccttctgagcccatcccttacaccactgttccctttatgtgagacatggaatcagtggagattattttggagctttaagatttaatgagtgccctgctgggtttaggagttgcatagagactgtatcccccttcttttggccaatttctcccttttggaatgggagtatttacccaatgcctgtacctccactgtgtcttgggaataactaacttgttttttgttttttgttttcttttgtttttttttttatttatgttacaggctcataggtggaagagacctgcattgcctccagtgagactttggattttggacatttgagttaatgctggagtgagttaagattttggggattgttgggaaggcatgactgtattctgcagtttgagaaggacatgagatttggaaagggctggggtggaaggatatggtttgaatctgtgtccccagccaattttttttttttttttttttgagacagagtcttgctctgtcgcccaggctggagtgcagtggtgccatttcacgccattctcctgcctcagcctcccaaatagctgggactacaggtaccccccaccaygcttggctaattttttgtatttttagta

SEQ ID NO: 836678 - DNA, 658 bp, Homo sapiens
actagcttagctcatatgttggtacattgattatgttggttatgaattaggtctgggataatgtttcctgagcatgggtttgggtttgtgtggcttgaactttctatcaactacaaaggagggaacactgacwttcctatcagcttgatgggggccagaagacaaaggaggtgtggtgggacttgaatgctatcaggaatcaaacattaaacaacaatgacattcttctggttttgttttgtttttaatattctattttttttgaagtaagaccgcttaacataaaatgtatcgttttaatagattttttttttaaagacagagtcttgctctgttgcccaggctggaatgcagtggtgcaatcttggcccactgcagcctccacctcccagattcaagtgagtctccttcctcagcctcctaagtaactgggactacaggcatgcaccaccatacccggatacgttttttttttttttttttggtagagttgaggcttcaccacgttggccaggctggtctcaaacccctgacctcaagtgatccacccacctcagcctccaaagtgctgggattacatgcataagctaccatgccaggccttttaatatatttttaagtgtacaatataatattgataactttaggtacaatgttg

SEQ ID NO: 836679 - DNA, 609 bp, Homo sapiens
atatttagggaggggcaggatgatggcttttaatagcaaagaagatttggtgaaatttaagtgttcaaggtccatagcttcatcagaatctcccyatatgtccccacgccatttttcaaaattatatatgtctttccatgttccattttcttagattccctttctttcaggactaccttaaccagtacagccattcaccacagcccagatatatactgattatctctggtcacctctccctccaaattaaataaaagaccaaaagttctactcatagcttgttctactgtgtgaatttctcttcacaagcaaactctcatagcactcttgagcaggactataatgtcatcatggtctacttctgttaatcttactgtatctttcaccttctggcacatctatttcactagggcatgtaagatatgtttcatgtcttgtttatcagatacaattagcataatgtcataaatatagtgagccagcatgatatcctgtggaatttaaaataatcaatggtctctgtggaccacattttgacagagagcaagagagttaatatagcccttgggtaaaacgtgaatgtttactgctatctttggcattcaaaat

SEQ ID NO: 836680 - DNA, 609 bp, Homo sapiens
atatttagggaggggcaggatgatggcttttaatagcaaagaagatttggtgaaatttaagtgttcaaggtccatagcttcatcagaatctccccatatgtccccacgccatttttcaaaattatatatgtctttccatgttccattttcttagattccctttctttcaggactaccttaaccagtacagccattcaccacagcccagatatatactgattatctctggtcacctctccctccaaattaaataaaagaccaaaagttctactcatagcttgttctactgtgtgaatttctcttcacaagcaaactctcatagcactcttgagcaggactataatgtcatcatggtctacttctgttaatcttactgtatctttcaccttctggcacatctatttcactagggcatgtaagatatgtttcatgtcttgtttatcagatacaattagcataatgtcataaatatagtgagccagcatgatatcctgtggaatttaaaataatcaatggtctctgtggaccacattttgacagagagcaagasagttaatatagcccttgggtaaaacgtgaatgtttactgctatctttggcattcaaaat

SEQ ID NO: 836681 - DNA, 569 bp, Homo sapiens
taaatgcctacatttaattcacttatgtgtaactagaagttagaagccagttttaaaaaatatgcaagtttacttataagtaaattatgagattttttygatgatattacctgtattatttttattatgagtacattaatttaaataacatattacacaggaaaatgcaagtttctccatcatgctgccttacccctcctactcacccaagtgctgctctttagattggcataccttttgttggattgattaatttttgcattgttatacatttttattcacttgatatatattaacctatatcaatttcctcaattgctgcatattattctattggtcagatgtatcgtaacttactaattcatgatttatggccaattagttgctaatttttttaaaataattttacatgggcatcttttaaaaaagttgaagtttagataaaaatggaagtggtgaaagctaaacttgtaattgttactcataggcatgtagatttttaaaagaagttaatcacattctgttagctaatgtagtacaatgacatttaatgagaaatgttttcctaa

SEQ ID NO: 836682 - DNA, 569 bp, Homo sapiens
taaatgcctacatttaattcacttatgtgtaactagaagttagaagccagttttaaaaaatatgcaagtttacttataagtaaattatgagattttttcgrtgatattacctgtattatttttattatgagtacattaatttaaataacatattacacaggaaaatgcaagtttctccatcatgctgccttacccctcctactcacccaagtgctgctctttagattggcataccttttgttggattgattaatttttgcattgttatacatttttattcacttgatatatattaacctatatcaatttcctcaattgctgcatattattctattggtcagatgtatcgtaacttactaattcatgatttatggccaattagttgctaatttttttaaaataattttacatgggcatcttttaaaaaagttgaagtttagataaaaatggaagtggtgaaagctaaacttgtaattgttactcataggcatgtagatttttaaaagaagttaatcacattctgttagctaatgtagtacaatgacatttaatgagaaatgttttcctaa

SEQ ID NO: 836683 - DNA, 631 bp, Homo sapiens
tgtttgcaaatattttctcccattttgtagtttgtctgtttattctgtggatagtttcttttgctgtgcagaaggtctttcgtttaatcaggtcccatttgtcacttttttttgtttgtttttgagamagtctcactctgtcgcccaggctggagtgtagtggcaggatctcggctcactgcaagctccgccttccgggttcacgccattctcctgcctcagcctcacgagtagctgggactacaggcgaccgccaccaggcggggctaattttttgtattttcttttagtagagatggggtttcaccgtgttagccatgatggtctcgatctcctgacctcgtgatctgcccgcctgggcctcccaaagtgctgggattacaggcgtgagccaccgcgtccggcccacttcttgtttttattgcaattgcttttggcatcttcatcatgaaatctttgccagttgctatgttcagaatggtatttttaagcttatcttctatggtttttatacttttaggttgcacatttatctaatcggtcgagtggattttagtatttggtgtaaggaaggggtcgagtttcaatcttttgcatatgcctaaccagttactttggcacaatttattga

SEQ ID NO: 836684 - DNA, 499 bp, Homo sapiens
agggttttgtgtctaaagttccacttaaaggaaattatgaaggatggcccttcaggagggtttgggacagataaatctggggggaaaaggtgggtcgaagaactttgaaatcaaggtgtcttgggcctgggcatggtggctcacacctgtaatcccagcactctgggagaccggggtagatggatcatctgagcccaggagttcatgatcagcctgaccaacatagtgaaatcccatctctactaaaaatatacaaaaaattagtcgggcatagtggcacatgcctgtagtcctagctactcgggaggctgaggcaggagaattgcttgaaaccgggaggtggaggttgcagtgagccaagaccataccactgcactccagactgggygactgagtgagactctctcaaaaaatcaatcagtcaattaatctaacaatcaaggtgtgttgagaaaattttatgtgactgaggaccaagaaaggctggaggaagttagct

SEQ ID NO: 836685 - DNA, 448 bp, Homo sapiens
ccaatgtgaagcactctggcataagatttttcagtgacaaaattgaacayaaaaaacttcagtaaaagtgtgtaatgaatattccataaacagaactggtgttgctgaattaaatatttagtagtatctattttctgaaaaaaaaatacatttgaaggcaatcacattaagaaaatggatacaatttcaggtcagttaatcagaaagatgaactgagttgcccaaggtcacattctccaaatttgttactgtgggacaataggacaaaaccccacctgacattcagtttattagcagtagcaacagtagtgtttttggttttgcttttgtttttttcagacggagtttcgttcttattgcccaggctggagtgcaatggtgcgatcctggttcaccgcagtctccgcctcccaggttcaagggattctcctgcctcagcctcccgagt

SEQ ID NO: 836686 - DNA, 535 bp, Homo sapiens
cttgatttgaggttgtattcttgtaacaagtagctgagtctcagccaatgayggtagtggagcttcagccaatcacgggctgtcaactgatcagaccatgtccgttgaaggcaaatgcctcatcacaccatgaccaaataaagcaaataccaggctggatccaatcaactgatttatgtacgtcacttctttcctctgtttatgaatactgcctgcccatgttgctcggtggagctctctgaaactcttctggttctgagggctgcctgattcatgaatcgtttttcgctcagataaactctgctgaatttgcctaaagtttttcttttaagagtttcacatgagaagtcagatcttgaagcaaacttccagtgatcccaggagcactgagtgaccaagttaaggtacccagcatgcccagtgtactcactgctctttcgcagcaactggggtcatgggtgagatttttgaatctaagcttcatgaacttctgatttgagctgagtttgagcatttttgatctacactgggtttc

SEQ ID NO: 836687 - DNA, 609 bp, Homo sapiens
ttttaaagatactatcaaactgcactctaaagaatttgaatcaatttagaccccagacaaaaagttacattcctaatacagtattttatcaacatttttgtagtagtcaatctgatatataaaaaaaaaaaattggttttattttccatatatctcataatgaggaggctgagccacttttattatttgtttgaaagcaatttgcaactctatttctgtgaactgcctgtttgtcatttgttcatttttgttagcttttcatttgtcttctttatatgaaaggtattaaaattttatattaaaattatcttttcaaaacttatcatttgtcttcactgcatttttgtcatgcagttttatttttgaggcagggtctctttctgttgcccatgctggagtgcagtggcatgataatggctcactgcagccttgacctcccaggctcaatcaattgtcctacctcagcctcctgagcagctggcactacaggtgggtgccaccatgcctggctaatttttaaatttttttagaggtggggtatcgccatgtttcccargctgctctcaaactcctgggctaaaacaatctgcccacccctgcctctcaaag

SEQ ID NO: 836688 - DNA, 632 bp, Homo sapiens
attagattgactattatcagaaagatccaagataacaaatgttggtaaggatgtaaagaaaagggaacccttatacactgttggtggtattgtaaatttgtacagccattttggaaaataggatgaactttcctcaaaaatctatgaacagaactactgtatgatccagcaatttcactgctagtcatgcacacaaaggaggtttaatcactatgtcaggaatatctgcactcttatgtttattgcagcattacgcacaacagccaagttatggaaacaacctaagtatccatcaaccaatgaacagattaaaaatgtggtatacatacacaatggaatactattcagtcagaaaaagaatgaaaacctgtcattcataacaacaccaatgaacctagaggccattatgttaggtgaaataagccaagcacacagaagataccctgtgattttccttgtatacaaaatattttaagaagtcaaattcacagaagtagagggtagaatggtggttactagagtactggaggctggrgcggggagtggtgatggggaaaggaaggatgttggccaatgggcactaaattagttagagagaaagaaaaagttctggtgttctattgcatagcaag

SEQ ID NO: 836689 - DNA, 510 bp, Homo sapiens
aaaacttctctgtggaagacactgttaagagaatgaaaagacaacccaccgtctgggagaaaatacttgcaaaacacgtatctgataaaagactgttatcyaaaatataaaaagaactcttaaaattcaacaacaagaaaacaacccaattaaacaagtggccaaaaaaatgtgaagccatgaaagaagataatacagttgacaatcagcatacgagaagatgctcaacagcatcttaggaaattgtaaattaaaacaatgattagataccactgcccaccttgtagaatggccaaaatttaaaccactgacaacaccaagtgctgccaaagatatggagcaacagaaattcagtgctggtaggaatgcaaaatagaacaactccttggaagacagtttgacagtttcttacaaaactaaacataatcttaactgtaagatccagcaatgacactccttagtactttcccaagtgaaatgaaaacttaagtctacaccaaaaccttcaca

SEQ ID NO: 836690 - DNA, 484 bp, Homo sapiens
atccaacaccagaatatgcattmttttcaagtgccaatgaaatgaaacatgctgtctagggcagttttgagaggaaaaatctatagcactagtagcacatattagaaaaaaggaaaaatcacaaatctgtagttgaagtttccatctttagaacccagaaaaagacaagcaaaataaacccaaagcaagcagaagagagcaaaaattaagacaagagcagaaatcaatgttatttagaacataaaaaaagaaagaaaatcaatgaaacaaaaacttgatcctttgggaaaatctttaaaattggcaaacatctagtaaggtgtttttgacaaaaaaaaaaaaaaaaaagaaaacacacattaccaatagcagaaatgaaacgggaatattgttactgcagataagaaaaggataatataagagtactaggaacaactctacaaacataaatgttatgtcttaaaagcagcagatcaattatttg

SEQ ID NO: 836691 - DNA, 484 bp, Homo sapiens
atccaacaccagaatatgcattcttttcaagtgccaatgaaatgaaacatgctgtctagggcagttttgagaggaaaaatctatagcactagtagcacatattagaaaaaaggaaaaatcacaaatctgtagttgaagtttccatctttagaacccagaaaaagacaagcaaaataaacccaaagcaagcagaagagagcaaaaattaagacaagagcagaaatcaatgttatttagaacataaaaaaagaaagaaaatcaatgaaacaaaaacttgatcctttgggaaaatctttaaaattggcaaacatctagtaaggtgtttttgacaaaaaaaaaaaaaaaaaagaaaacacacattaccaatagcagaaatgaaacgggaatattgttactgcagataagaaaaggataatataagagtactaggaacaactctacaaacataaatgttatgtcttaraagcagcagatcaattatttg

SEQ ID NO: 836692 - DNA, 601 bp, Homo sapiens
tattttaacaatattgattcttccaatccatgcacatataacaagtttccatttcttgtctcctcttcaatctcttccataaatgttcagtagtttttattttaaagatcttttacttatttggttaattcccaggtatttaatttatttggagctattgtaaatgggattatgttcttgatttctttcagattgtttattgtcagcacataaaaattctatgaatttttgtacgttgattttacattctgcaactttacagaatttatccattatagtactgttttttgatggagtctttagattttttttccaaatataagatcatatcatctacaaatagggataatttgatttttgacttcttcttttccaatttagatgccctttatttcttcattttttttctgattgctctagctaggacttccagtattatgtcgaataacagtggtgaaagtgggcatccttgttgtcttccatatcttagaggaaaagcyttcaggttttccccattcagtaggatgctagctgtgggtctgtcatatttggcctttattatgttggggcatgtttcttgtatacccactttttaaggatt

SEQ ID NO: 836693 - DNA, 656 bp, Homo sapiens
tgattttttttttttttttttagatggagtcttgctctgttacccaggctggtaacagagtgcagtggcacgacctcggctcactccaagctccgcctctcgggatcacgccattctcctgcctcagcctctcgagtagctgggactacaggcgcctgccacaatacccggataattttttgtatttttggtagagacggggtttcactgtgttagccaggatggtctcgatctcctgacctcgtgatcctcccaccttggcctcccaaagtgctgggattacaggcgtgagccaccgcgcccggccaagatgatcaattttattctccatagctttcaattaaaaactgctacagatacaatttattttgtcttatctggttgactatatctagatcatttactctattggacccttcagttcagagtcatttattatgtgactttcattcatcatttttaggttcttgctattaatacttattaaacatcagaactattctcgacagtgtgcaacattcatkgtaatcaaaaatttatttaatgcaccaaaaccacttaaaatttgttttcataaactattttgtaaaaaataattgaaatactatatatgagagaatttacaattgaattataattatgaatatttgaccacc

SEQ ID NO: 836694 - DNA, 574 bp, Homo sapiens
cataaataactacattattcatctgctcacttaaaatcaatctgagaaagttgggtcattacatctgctgtttttctttagttatctctgaaaacataattgatataccgtttaatattttggtaataacattgatctaactactaagtaatatttttattacatgtgggctttttgttttattttttcactttcaaatatatgtttgcttttatttatttatttatttattcatttttctcaacttttaggttcaggaggtacatgtacaggtttgttacatgggttaattatgtgttgctgaggtttgctgggcttagtttaaacaattggtacagtttctaaaactcttcaactgaagtctaaccagtgcatagaatggtgtacaaaggaatgaattacagaatgtgaacagactgatatcatcaccactcagaatttttttttaaaggctgtaacagacaaaacatgaagtagccacctctataagggcacrtaaagcactggattgtgattgttaatctgtatcatacaaagcagggattctcaactctccgggccaaagagtggtaca

SEQ ID NO: 836695 - DNA, 535 bp, Homo sapiens
gtctgtaccaaaaatacaaaaattagtgggatgtggtggctgcgcgcttatggtcccagccacttggtaggctgagatgagacgattgcttgagctcagggggcagaggttgcagtgagctgagattttaccactgcactcagcctatatgacagagtgagaccctgtcccaaagaaagtaataataaaataaataaaaataaaataaaaaatattctcgaaggaatgtgaaccctattgtgaactgcacatgtgaaggatctagattgtgtgctctttaggagaatctaatgtctgatgatctgaggtggaacaattcatccctaaaccaccacctccttgctggcctgtgaaaaaattgtctgccatgaaacggatccctggtgccaaaaaggttaaggactgtgaaattatcctgtctagtcatatgtctcatacaactctctactaccactgcttagcatartaattggcatttgttattactatatgccaggaataaaaaataaggctgggctttcaaagatgggctaaa

SEQ ID NO: 836696 - DNA, 518 bp, Homo sapiens
cattccatcatgcaaaggttgtgaattatattttataattatttacattttttaaaggggaactaattaatgaatttctcattggaaaattattctgtgragggaacgtgaaattggatgtcttctgatgttcttactaaatcaggactagatctatctagctttccctctagaacccctgggccccaggaatcccctggatagagttgttgttcagggaaggagaatggattattctaacaacttgcaaattaggagcctggtaatggaaactgcctcttttaacaaatcttcaagtggattcctaagctatccattgttcctgattgattttggacagagcaaatatatctataaatgggaatccctgacttgctgactactttgagcttaagcagtaaagatgtttggatatcagtagtgtcagagaggagaagtagggagtgggaggaatgggaaggtttttggctgacccccaaaaccagataaagagctggagctcagatagtgcccagcat

SEQ ID NO: 836697 - DNA, 541 bp, Homo sapiens
aattactatcaaagtaagtgaataaatggaagtgggtagaaacccagggtctatcaggctgcttctatgtgctggtcattttgtrtaactgttttgacacaccacaatatgggcattatcatctccattttatggttcaaggacctgatacttgaaggtgaaatgatttgcttaaggtcactcaagcccttctgcctcagagccctcctttttctactctgagggacaagaatgtctcaccagagtcccaaagatgcctcacagttcctctgccagcatttctcctgtgatcttctctgaagggcttttcaaccctggccactttatcctcattgtgttcttcttaccacagtgatgtgtggaaggaggtgcatgctaattttttcaagacaatgaagttttgtttttgctcgaccgaggcaagcatgcatccatccctctttcaccaccactccttctcccctgaaaaggaaaaaaaaaaaaaaaaaaaaaaaaggagtaatagatgtgcagtctctgagatccctctttgatttccact

SEQ ID NO: 836698 - DNA, 543 bp, Homo sapiens
cttggttgtttcttcctgttttgtatataaaatggcttgtttttcatgagttgcatagaatcattaaactgatttaattgatcaaatcatacccttacttcccaatagacattttttacattaaagcataaaacagagctaataacagattagtcctatttttctttataataatattaaaataattgcaatatattaataccaaatggactcattctattctaattataaatattcattagtataaaatacttgaggaaaaagaacatcaatctaaatgaaaatttatattttcaaaatgtgattcttttaaactttgtagtgagttacgtgagacaaccctaattcaaattaattaaaggaagaggaattttgttggctcacaaaacaggcacatccggaaggggggatctagttcaaacaacgtcagtgctttccttctctctccacrtctggcctctgcactattcagctttggagtctaatggtatcattctgcccatcctcaccccatgtgacaagaaagataagaggtgtgggagc

SEQ ID NO: 836699 - DNA, 616 bp, Homo sapiens
ctttgtgcttttgctaaatcaggccaagcccactcccacatcaatggttcttcatttgctatatttttggccgagaatactcatccccagatgctcctcacmtgctcgggatttaactcaaatgtcattccagtgaagccttccccagtgccctagtcagtatgacagcttccacccatgtgggagcctccatgtgctccgtctctgaattattgtatttcattgcacttagcatcatctaatcattgtgtattttaattatttttcactgtctgactccgctttgcttcttttgcttctttttttttttttttttttttttttttttgagatagagtctcgctctgtctcccaggctgcagtacagtggcgcaatctctgctcactgtaacctccacctcccaggttcaagcgattctctgcctcagcctcccaagtagctgggattacaagcgcatgccaccatgcccagctaatttttgtatctttagtagagacagaatttcaccatgttggccaggctggtctcgaactcctatcctcagatgatctgcccacctcagctgcccaaagtgctgggactacagacataagccaccatgccagaccatccctt

SEQ ID NO: 836700 - DNA, 634 bp, Homo sapiens
gaatgaagatttggtttatttcttttttttttttttttttcctctttgagacgggagtcttgctctgtcgcccaggctggagtacagtggtgcgatctcggctcactgcaggctctgcctcccgggttcacgccattctcctgcctcagcctcgcgagcagctgggactacaggtgcccaccaccacgcccggctaatttttttgtatttttagtagagacagggtttcaccgtgttagccaggatggtctcgatctcctgacctcgtgatccgcccacctcggcctcccaaagtgctgggattacaggcttgagccaccgcagcattttaactacaaaatttttcatatatagttttcacagaatcctagagtatgttataaagttcgacctttcatggcttttaagatggtcaataatttccctttcaacttttggaaccaattattttctaagtatttttaaattttcaagtagtcaactttttgttaccttttgataattttttcttatttattgaattatgatcagataatgttaactataaaatcattactctgaatttsctcaagttttctttgtagtcaggtacctgatcagtctctataaatgttctgcggacatatgaaaaaca

SEQ ID NO: 836701 - DNA, 580 bp, Homo sapiens
ccaaaaacttgagaactaaagcccagttgagtgacactgccctggcttatatagcccataggtgtcagagccaggacttaaaccacagccagctcaccccagaactcatgctccttaatcacttarcaccgacaatgggaaatgttaattaaataccagcacatgctataaggatcctgccacctcactattaataactcagcagccaatttgcaaaaaacattcaagtggattctgttaattgcaaacttatgctccttcctctatacaactaagggaacacctgaccatagaacacagtgcagggtcactgagtaggtggcacagggagtatggcacaatccaacatgaccactgtggccagagaatgctccatgttggaccaccatttctcctttacagaccaaatgtccacgcatggttagtcccctcccaagtaccagtcaagggggtgagaaaatcaaagcacaagcctctcctacacaagagtgaataaaaatgctgggagagcagggctcagctgtacaaagggcatacagggcccacacatacagctattgtacttctatccatagtctct

SEQ ID NO: 836702 - DNA, 641 bp, Homo sapiens
tacattgttttaaaacttaaagttaactactagtgatatacaaatatgaaataacttccaaaatacatgaagaaagaaagaataaggaaaattttagtgataaaaatataatagcaaaattaatattaagaaatataaaaatcaaaagtactaaaatcagatcaaatagaatttgaggaaaaaacattatatgggaataaacaataactttattttattactagaggcctggaatgatatagaaataaagcagttatgtgtctttacatgttgaatatcatagcattaaaatgtataaaataaaaataaaatgcaaaaaaattaacatgatctcataaaatcagtgggagaatttttcaaatatttcttggtatttgaaaaatcaagataataaaaggttatatgttaaacagctgaaatcatattttaagtaaaattgttttaataatcaaaaattaacttttttcaatttggcttcaaacatttataagtttttagcatagctcagggcacagttaaaatatctgtaacattcaaatctgtataggtaatayttctgaacatatgcaatactaataaaaattaacaatgaagttttcaaaaatcccatttgaaaatattatctccaaataattcttagt

SEQ ID NO: 836703 - DNA, 603 bp, Homo sapiens
attttatattgctatcttatgactagaattctgaggtaaaagcaaatgggtaagtgttccgtctttctgtgtgtatacacatatttagatatgtttatgtatgtrcatgtgttatgtgttgtgtctagcatgctatcaaattagcgcaaatgaatattcataaattaagtccaaatgcttttcaaagtcatgtgaatctttggtaaataaaactgggtttaaaattatggataaaaatagaaatgtcttccgaattttcaaattttgataaataagactaatttaagattgttggttcaataaaaacacctgaatctttggggttatcagcaaaatgttcatgtattcaactgtaagattcttattaggtgttcacctaatgttcagactttaaaaatgtttaatcaggaagtaactttgaatgatgactagatttgcctagtagcacaacttttataagtaatcttgctaaactattaaaaagaaataaattaggtaagtgtaatgagataaatgcttgtaagtgaactttttgtatagcttaaaatcttaaaattattttggatgtttactggacgtatgggtcatttccaattaagaaag

SEQ ID NO: 836704 - DNA, 462 bp, Homo sapiens
aattattattattggggtataatttaaaaggtaaatagtaatttacattaagcaaaataattgagtattctgttatactttattgcttacagttcatccttctgggattattttccttctgcctgaaaagccctccacaaccctattactcacccctgccatttgtttatttgccaatggttactgtatttgtttttgctttttttgcaaatgaatacacttaattttattttgaagaatatttttttggttgtaggattccaataactagccattcctttagtatttgaaaatgtcatctcagtggcaactagcttctatgatgtctcttgagaaatcagttgctagtcttcttgttgtcactcatttgaaggcaaagtatttaataaaaatattttttgytcatggtttttaatgactttgctgtgaattgcccagttgcggtttattttgtaaagttat

SEQ ID NO: 836705 - DNA, 613 bp, Homo sapiens
gtttttcttttctgctgcatcatcagcctgaaaattttctgaacttttatgctctgttttctttcaaaaacagcatgcttttaacarcacccaagtcatctttccaatgctttgctgcttagaaatttcttctgccagatacccaaaataatctctctcaagttcgaagttccacaaatctctagggcggagcaaaatgctgccagtttctttgctaaaacataagggtcacctttgcaccagttcccaacaagtttctcatctccacctgaaaccacctccgcctggaccttattgttcatattactatcagcatttttgtcaaatccattcaacaagtctttaggaggttccaaactttcccacattttcctgtctttttctaagccctccaaactgttccaacctctgcctgttacccagttccaaagtcacttccacattttcaggtatcttttcagcaatgccccacactactggtaccaatttactgtattcattcattttcatgctgctgataaagacctacctgatggttggtgaggcctcaaaatcaaggtgggaagtgaaaagcacttcttacatggaggcagcaagagaaaaatgaggaaga

SEQ ID NO: 836706 - DNA, 613 bp, Homo sapiens
gtttttcttttctgctgcatcatcagcctgaaaattttctgaacttttatgctctgttttctttcaaaaacagcatgcttttaacagcacccaagtcatctttccaatgctttgctgcttagaaatttcttytgccagatacccaaaataatctctctcaagttcgaagttccacaaatctctagggcggagcaaaatgctgccagtttctttgctaaaacataagggtcacctttgcaccagttcccaacaagtttctcatctccacctgaaaccacctccgcctggaccttattgttcatattactatcagcatttttgtcaaatccattcaacaagtctttaggaggttccaaactttcccacattttcctgtctttttctaagccctccaaactgttccaacctctgcctgttacccagttccaaagtcacttccacattttcaggtatcttttcagcaatgccccacactactggtaccaatttactgtattcattcattttcatgctgctgataaagacctacctgatggttggtgaggcctcaaaatcaaggtgggaagtgaaaagcacttcttacatggaggcagcaagagaaaaatgaggaaga

SEQ ID NO: 836707 - DNA, 606 bp, Homo sapiens
gctctgtttctctggagaacatggactaaaacagccatttatccatccaacactattttaagtgctattagstatcctagaagattggtcagggagagacttgagaagcaacatcctgcctatgctttgaatatggcatacactgttgtgattttttaatgaaagaaaaattttggtgctagattcagacacaaagaaagaatctgagaaactattagaaatatatggcaacacagtcagccctgtttttttttttttctttttttgtatctacaaccattgttaacagtgagtagaatattctctcccacactccaccactttgctcctttagatatgattcctgtgagccctccagggcttctgggtcagtagaactctgctaatcaaagagctactgaagcctccagtgtgaagatgagcacaaaattaaagcagaaacccatctctctattactcttgaatgtggcagctccggaatcccagtgcccagggctcatatttggagtacctttggacatattttagttcatcagaagtcttcgtttgtagtgttagtttagatgaattggtaaaattgaaagtgtatgaaatagtaatattttg

SEQ ID NO: 836708 - DNA, 625 bp, Homo sapiens
tcttatcataagggcactaattccatttatgggggcttgaccctcattaattaattacctcccaaagtacccaccgacaaatcctgtcacactgaggatttaggctttaacatatgaattttgaggagctatcaatattcatttcatagcaggccactcaatccccctgaaccagatattcagtttcctggtgtcacccagaattttgcttaccccctccagcaggacccctgctgtctgggaaaagctgtccagaattcagttccagctgacagggtatggctatgaatccaccactcagtaaaatggcagacaggtggagccctgctgccactgccacacccatttctgagaaaatttgtattgtaactgataagtgtcatggaggagtgtgccaggaaaataaagtgccttctaattttaaggttcctggctccaatcacagaatggctgagctagagaattgctttctggttttgcaaacaatcataggactrtaccttacaacctacctcagcagtaagtaatactacttataagcatttttgagtaactactctctggagctctttacaacaattgagctctcagcataaatgtgaatcttgtcatagagtgatgtaat

SEQ ID NO: 836709 - DNA, 576 bp, Homo sapiens
tcctggtttagtcttcggagggtgtatgtgtccaggaatttttccatttcttctagattttctagttgacttgcatacaggtgtttatagtattctctgatggtagtttgtatttttgtgggctcaggggtgatatcccctttaccattttttattgtgtctatttgattcttgtctcttttcttctttattagtctagctagcattctacctattttgctacttttttcaaaaaaccagctcctggattcattgattgtttgaaggatttttagtgtctctttctccttcatttctgctctgattttagttatttcttgtgttctgctagcttttggatttgtttgctcttgcttctctagttcttttaattgtgatgtcagggtgttgatttcagatctttccagctttctgatgtgggcatttagtgctataaatttgcctcttaacactgctttagctgtgtcccagasattctggtacattgtgtctttgttctcattggttccaaagaacttctttatttctgccttaatttcattatttactcatgagtcattcaggagccagttgttc

SEQ ID NO: 836710 - DNA, 576 bp, Homo sapiens
tcctggtttagtcttcggagggtgtatgtgtccaggaatttttccatttcttctagattttctagttgacttgcatacaggtgtttatagtattctctgatggtagtttgtatttttgtgggctcaggggtgatatcccctttaccattttttattgtgtctatttgattcttgtctcttttcttctttattagtctagctagcattctacctattttgctacttttttcaaaaaaccagctcctggattcattgattgtttgaaggatttttagtgtctctttctccttcatttctgctctgattttagttatttcttgtgttctgctagcttttggatttgtttgctcttgcttctctagttcttttaattgtgatgtcagggtgttgatttcagatctttccagctttctgatgtgggcatttagtgctataaatttgcctcttaacactgctttagctgtgtcccagacattctggtacrttgtgtctttgttctcattggttccaaagaacttctttatttctgccttaatttcattatttactcatgagtcattcaggagccagttgttc

SEQ ID NO: 836711 - DNA, 638 bp, Homo sapiens
atagcactgagttcaaagacttagattagtgctttcttaaacacttgttcctcagaatattgatgcaattttcaagtaaaatgaaattagataaaaaggsaaggtattgttttatgaaccaatatttaagaaacacaatgttagctgggcttggtggctcacacctgtaatcccagcactttgggaggcccaggctggcagatcactaaggtcaggacttcaagacctggccaacatggtgaaaccccatctctactaaaaatacaaaaattagctgggtgtgttggtgggtgcctgtggtcacagctactcaggaggctgagccaggagaatcgtgtgaacccaggagtcagaggttgcagtgagccgagctgagatctcaccactacattctaccttgggtgatagagcgagactccatctcaaaccaaaaccaaaaccaaaccaaaacaaaagaaatgcaatgttaaacaggccttaacacattccagtatctaaggacaattaagattttaatacaattacatgcaatgtaaatatccatttatattagagatttaatgggatttcccaaatgtatgttttcaaagaactctgttgttcagggtttgtgcttctactgtaaccaccactaactt

SEQ ID NO: 836712 - DNA, 630 bp, Homo sapiens
atgtactgccttaatgatcaatggtttctcttttcatgtgcttgttggccatctgtatatcttctttggagaagtgcttattcaattcgattgcccattgggttgtttgtcttttgttgtttaaatgtaaragctctttctatatgctggatactaaacccttaccagatatctgatttacagatattttatccattcctgtatgtttccttttcacaatcttgctaatggcttttattgaccgaaagctttgagatttttaaagtgcaatttatttttatttcctttttggcatgtgtttttggtgttaaagctaagaatcaactgccaaatccaaggttagggaaaacaccttatgttttcttctaacagttttatagttttagcatctatatatgtttttgatcaattttgagattctttttgtatattgtgtgctatggtctgaatatgtatgttgccctaaaattcataggctgaaatccttatcctcagggtgatggtattaggaggtggtggctttgggagattaatagaccatgggggcagagctctcataagtgctattcattctcttattaaaaatgtctgtgagaaacttcttacccctttagttatgtgacattagag

SEQ ID NO: 836713 - DNA, 582 bp, Homo sapiens
gtaggaaagaaatttataattactaattttctgaattattaatagtacttccaaaatggtaaaaattctttttagcaggaatgtttaaaacagttgctgaatgactattaaatatgccttagaagataatagactaaattatcactgtagtctctgtacattttattccaagccattttcaaatgatttttctttgctacatatttctttaagaaatacgtacagaaatgaatttattcaaccatccatctacccatccatccatccatccatctaaagaatatatggaagatttgagtttcacattttgctgaagaaaacctcagattcttcataaacccttaaaaaaatgtgataggtagtcccaaataaaccaatatccaatttttgaagttcagttgacatcattaacaagagtgaactatgaaaaaggggggttaatgcttccttctttctctctctttttggcataaatcrgaagaaaataattagaacatattatttctaagtacaagcattgagataacagaacttgtataatacatggaagaagctctttcagaagcatgcttcattattttt

SEQ ID NO: 836714 - DNA, 667 bp, Homo sapiens
cattcctttgattcttttccaagtcatttccagttttcattattggttatgttccagaaaggatggtgaacaatggaaaagaatgcccttgatgcagataacaaagggatgatttcaagaagcaaatttgatttaattattaaaagataaaagcttctctaaactataaatatcctcatctccatctctgtcacaatgtttcaagcttcaaagttttgacatttaacaaatatttattcgtatacatatctattcactaacatattactcagagcagatagagattatttactgtatatctagcattgtattagatttggagtgacaaagaagtaactgaagagattcttgactttgagagaattagaagtcattggaagaaaaagatgggttaaaaactgtgttttgtttgataacgtataagcctacatgtccccatctataataccccaagggagttaatatttgttttctaattgcaaatactcaatgcaaaataaagtgagttacgaacaaacaccaacaggaaaaaaataaaacaaccatctcaaaggagttcacamtgaattcataaaaatgctttctgatcctctctcatagagcagtttatagtgatattgctgttctgttgatggtattttttgttgtcctattaaattgaagttta

SEQ ID NO: 836715 - DNA, 523 bp, Homo sapiens
  misc_feature 494, 495, 496, 497, 498, 499, 500, 501, 502, 503, 504, 505,506, 507, 508, 509, 510, 511, 512, 513, 514, 515, 516, 517,518, 519, 520, 521, 522, 523: n = A,T,C or G
catgttgcacaagctggtctcaagctcctgacctcaagtgatccttctgcctcacttggctgctaaagtcctgggattacaggcatsagccatagtgccttgtccacataattatatatttaattggtagtttgaagtaaaattatccttaaatctaggtatttttgttgtcacatgtcataaccttgtaattgttgctacaacaagaagagaatgcctttttgctgaatttttaagaaaaactcaacattctggccattataccatctaggaattttacaacctatagacctatcaagacagaaattaatttgaaggtcacatcagccttcatatgaattttctgtaaaattgagatgacattttacatgttaactgagtaaaagtgacatcataaatgatggtcatttaggttctgtttctcttttccagctggaaagcccatgtgagaggtactttagggaaactctcgctaagtcagtcctccacctttnnnnnnnnnnnnnnnnnnnnnnnnnnnnnn

SEQ ID NO: 836716 - DNA, 632 bp, Homo sapiens
ttagcaagagacccagtgataaagaatataaatatagaagtttctctcccaaccagtggttccaaggtcagcattgcaggctagcagcccttgttcaaacagttattcagggactttggctgaggatggtgctgccattttaaatcatggctttcaagtcactctagttattcttctaatttgcagaaaaagaacatggaagtgtacatatgcaaggtgttatgggctgtgcctggaaatggctcatatatcttctcatattccagtggtgtggagacttagttacatctagatacaagaggagctgagaaatgtagtccctggctgggaagccatcttccagctataaatacaagattttggtggctgctagcagcctcagccacagctcttcttgtgctaccaagtatcttcccttacacagaaagtaatccctcttcatccagctagtgattcagctcacaatctaggatctctattaaaggtccatccctttacatgtggcttctaatagtctgacaatctctaaactgataggcaaattatttgctctcacccttgctgctgcccatttataatgtagttgggacaggatggccaaataaraagtctcaatttggaaaatggaataa

SEQ ID NO: 836717 - DNA, 453 bp, Homo sapiens
cacacacatacaataaagatcaaactaggaatgaaaattaaagcactggtattttggatttatgaaatttttaatccacagcattgaaaacataaaaaataaatatatattraaaaatgcaacataattatcaatagaaataaaaaaaaattacagggagggaagtgtaaaatccattttagaaaatatttcacccaaaatactaaaaataagtagttctgatgtttaaaaaaataaacttcatgggttgtaaagttcacttatatgttgtttcattacctagttatgccagataatgctttgctaccgaattatttgcttaccagtcttctggtttgatggcagaaggatcaggaatttttgctctttcatcccattcctcaggttttttatcattgggatcttcaatttctttgggaggtttgataggaggaaccacatcctctaggaggc

SEQ ID NO: 836718 - DNA, 453 bp, Homo sapiens
cacacacatacaataaagatcaaactaggaatgaaaattaaagcactggtattttggatttatgaaatttttaatccacagcattgaaaacataaaaaataaatatatattgaaaaatgcaacataattatcaatagaaataaaaaaaaattacagggagggaagtgtaaaatccattttagaaaatatttcacccaaaatactaaaaataagtagttctgatgtttaaaaaaataaacttcatgggttgtaaagttcacttatatgttgtttcattacctagttatgccagataatgctttgctaccgaattatttgcttaccagtcttctggtttgayggcagaaggatcaggaatttttgctctttcatcccattcctcaggttttttatcattgggatcttcaatttctttgggaggtttgataggaggaaccacatcctctaggaggc

SEQ ID NO: 836719 - DNA, 337 bp, Homo sapiens
gaaaatcctgggacaaggtctggatccctcatctccacacatgtggccttctcactctggtccccgctccactctcyagccctgtccctcacctccctccaccctcctcaaagtctgggtccctataacctgagtcacccctaccccctgcactcactctctcacctccaggcctctgcatataaagttccgtctgccttaagcacgcctctcccacctcttggccacagtaactccccttcgacttttgattttgttctcaacttactcaatcatcacttccctaagaaacctttcctgattccccaggcaccactgctccccccaccccccaggg

SEQ ID NO: 836720 - DNA, 540 bp, Homo sapiens
ggtcatgagtgggccgcagagaatcaggaactttgtggctcatgcctgtaatcccagcactttgggaggccgaggcaggcagattacgaggtcaggagattaagaccatcctggctaacacagggaaaccctgtctctactaaaaaaaaaaatacaaaaaattagccgggcatggtggcgggcacctgtagccccagctactcgggaggctgaggcaggagaatagcatgaacccgggaggcggagcttgcagtgagctgagatcacgccactgcactccagcctgggcggcagagcgagacttgtctcaaaaaaaaaaaaaaggaaaaagaaaaagaaaaagaaagtcactcaacctcttttccagttctaaaatctacgacagatacattaagtaaacttttctaatgaggtgagtaaaatcacgaacgcctcgtgggatgagccaggagctgggcggctgcaggttaacaatccttgttctgactgccctggttacagtytgcattccgggaattaccccatcacccgctcctcacc

SEQ ID NO: 836721 - DNA, 482 bp, Homo sapiens
ttttataggaaacaatcaagtgattgtagaaagaaaacatgcaaccaaagaatttattcagttaacatctataatttarcaaaataacatatgttcaaagccacttttcgaagacaaattaaaaggcccttatgaactacaaattgctaactaccaatgttcatttaaggaaatggcaaataacgctgatgacaaactatcccaagagtggctgctgtgaaaactggcatctcaaggcttagtatcaacctttctttagtctttgaaatcttatcaacacattttaatccaaatataggtggaagacatgcagtatagaggagactttgtttatatttttaaatatgaatataaaaatcacaaaaatatgggcacaaatatttgatgaaattaaaacataaattatttaaaccatatgaatcatcagaaaccctacaccagttagaaaatcatttattcacagttgatatagaaggaaagaa

SEQ ID NO: 836722 - DNA, 559 bp, Homo sapiens
tgcagtcgctggtccctcagggaggtgtgggkagctgtccccaatggggatgggctggaaggctccagactcttcttgcccatgaagtgacctggaaaggaggtgtccaggcacaaggaagtcaagcagccaggatcctacctcagaggaaaagttcctcatctctcccacgtttccgttcttgtagcgggaagacacttaaccttcctcctcttggtgcttccacctcaccaaggagccacaaaggtgtctgggtggtggcaaagcctgctccctcagcttttcctgaacaggtagagaggatggcacagctggcaggaaggtgggatggtccagggccagggagaaactctgctagttgtgtgggctgcttggacaagggacgaaaaagggcagggtaggaagtggagagtgaagaggcgcctggaaagtggaggtgcagcaaaaacacaccagcggttagaagattcggttaagtctcgcctaaggtaaggggcaccggctggcagtgggatttaggatctagcccagccctgtcttaaactggctgcgcgacctt

SEQ ID NO: 836723 - DNA, 559 bp, Homo sapiens
tgcagtcgctggtccctcagggaggtgtggggagctgtccccaatggggatgggctggaaggctccagactcttcttgcccatgaagtgacctggaaaggaggtgtccaggcacaaggaagtcaagcagccaggatcctacctcagaggaaaagttcctcatctctcccacgtttccgttcttgtagcgggaagacacttaaccttcctcctcttggtgcttccacctcaccaaggagccacaaaggtgtctgggtggtggcaaagcctgctccctcagcttttcctgaacaggtagagaggatggcacagctggcaggaaggtgggatggtccagggccagggagaaactctgctagttgtgtgggctgcttggacaagggacgaaaaagggcagggtaggaagtggagagtgaagaggcgcctggaaagtggaggtgcagcaaaaacacaccagcsgttagaagattcggttaagtctcgcctaaggtaaggggcaccggctggcagtgggatttaggatctagcccagccctgtcttaaactggctgcgcgacctt

SEQ ID NO: 836724 - DNA, 635 bp, Homo sapiens
agctgcgatgctcagtggagcccctgcttgtcttggagcagaaggatgatgtgaaagcaatgtccaagacaagacttactggaatgaagaggccagggataggaaagctayggaggaagccttcggctgatgtgtttaggtgtggcctaggggtagagctgggttaagtatttccagagatgagatgatagaatttcctgaagaaatctaaagaaggaagtaccaaagtgagtgcagaaagaaaaacggtggctggggaggagatggggagttttgggtgaggaaacatgaggaactgactctggggagtcatggggagagggtctatgggtgatcagtgacagagctcatgaagagaactggaccaggtgggtcacacgtctgggaagggacatgacttgataacacgatcactggcagtggagcagccccagggccctggcactcccaccatgggcttagtgcttctaccactaggccgcactgcctcttaacatcacctgtacagagacaaggaagcgagaggtgagcccagcagtttgcctcctctactcactctcccagatggggctttaagctcagagctcttcgctaaggcaaggtctgaaggaggatccgagctgcacttaagggga

SEQ ID NO: 836725 - DNA, 608 bp, Homo sapiens
gtccccaagcattcagtgacttcacggcaccttgtagcagagctagaactggaactcagcactcctgtttttcagyctaaagctccgctcaccaaaaatgctgcctctcagtgaagcgatatgaggctgttttcttctaagtctctcattttatggaagaggagacggaagccaggacatcacacatcttggggcatgcagggaccctaaccaagacaccttgagtctaggactcattgagagagaaaagagttaggcagctggagaccaaagtatttccacagctcttctggaggtgactatgagctgctcttcatcagaggaatttcattttgtctggggaccaggaggggaacctagcttgtggctctcatccaaggcaccacccagcttccttgccttcctttctctggatgcagatgaagctgggtggtaactgccattcactgaatacttcccagtccacaaggcattctccacattcacaatcttgaggaggaactgcagagtggtcactctcagggccctggagataggcaccctgggcccctacttcctgtgtggcctgggaaaggtctcgccctctcaggggtctagagataaggaaa

SEQ ID NO: 836726 - DNA, 609 bp, Homo sapiens
gggcaaaatgagctcagtaatacctacttcccagagactacaggaggattagaaataatgtacatacagcatctagaacagtactagggatggaattatgtgcttgacaaacactaactttggaaaatcaggatggaaaaacagagcacatttaaagattggcttggaccaggcacagtggctcacacctataataccagcactttgggaggccaaggtgggtgggtcacgaggtcaggagtttgagatcagcctggccaacatagtgaaaccccatctctactaaaaaaaatacaaaaattggccaggtgtagtggcgcatgtctgtagtcccagctactcaggaggctgaggcaggagaatcgcttcaacctgggaggtggaggttgcagcgagacgagatcgtgctaccgcactccagcctgagtgacagagtgagactccatctcaaaaaaaaaaaaaaaaaaaaaaaaaaaaaaaaaaaaaagattggcttgtaaaagggaacacccatcaaagctgggctttttttaaagggtctttytcaggctcatcccttcaggggttcctcctacccttgggagggaatgaacctcctcctatctagtc

SEQ ID NO: 836727 - DNA, 616 bp, Homo sapiens
tgaatcattcttctttaagataaaggaagaatggaataaaaccaacttggttaataaaacagcagtgattcatattaatgaggatattgagatgtatggtcatttttgtggtttggaaaattgtcwtgtttttttctgtactcagattggattacaaagtggccttattgtgtcttgatccaccagagtcacagagtggccttgtctgctataggcgttctgtaaaattgtttatggtgaagaggagaacaccatggtccctctgtgagtgccaggccagctcatagtagcttcaagacccagcaggtgataatgccaggtcaggccctggatattggaggctggttttctctttctcaatagagtaagtgaggatgtctttgagacaaccaagtaaagattttgaggatgtgtttggatatataagtctaggtcttaatgaaaatatcctgatagagaaaaaacagttgagtcagtttagcactgagtaggtagtgataatgtaataataataacaacttcaatgggctttatgtgtattaatttaatcccacagaatctctaaaagctaattactactatctcatttagtagtaagaaaattgaggcatagaca

SEQ ID NO: 836728 - DNA, 608 bp, Homo sapiens
tgaggtgtacaatctttgtatttagaaaatgacacatattgcattattttcttacattttttggttcagaaatgtttgatggcaatttgcttttgttttcctactaacaaactgtccctctatacatctttacacacatatacacatatacacatgcacgctcaagagcttcaatttattattaaaattcagaaaatttcccaacctctaaatcttttttaaaaagtagatctcctttgttgttgaatactttttttgccttagttcagggaatgtatcttaaggtatttttaaaagataattgattaattatttacaatatttaaactgctttttattgtgttgattgcattatatattttggtaattaaccttcatgtttgaaagccacattcgtaaccgtagattattctgctttaaagatataatgactttttgaatattgttgagtatataaattatagttagttgactttttaaactttcttatagcaaatttgtccttcagggaaaaaaagcatttttgttttaytctgccaaaagggtctcttttttttagctactgaatagtttcatatgcttaggaataatcatttatttttcttcta

SEQ ID NO: 836729 - DNA, 569 bp, Homo sapiens
atacatataaagaaacataaacacacacacacacaacttttccaatttgtctaaaacatatgtacttttcaactcagtccttatagcacttttatattgaagcatggcttacattccaaatctccagaaaagtcaccatctcttctttcatggcatttccaaatacaccacctttggtgtgacaagccaatcctcccacttgcttagcacagtattattaagtatatattaaaggtttaagatatttaaacaaatagcctaaacttatcgaagcaggttttgtttgtttgcatgcttttcagacaccaactggcaggaaaatttggtgtagatcttgtggctatttgccatgactggtggccaactttggaatgaatttctaatatctatggaatttcctgtaatatgagcattagctccttaagttagaagccggaaactcactttccaagttcttcctactcatgtgaaacagacttcactaataagtcacaccacctcagtctgctcaagaagaaagcaaaggsagaatgcagaaacagcatggcttttagcttctcacacagtgt

SEQ ID NO: 836730 - DNA, 489 bp, Homo sapiens
taactgaaattttgactggttgtcattgtggtgttttaaaaattcctctcacrgaatttcaaattgaagacaaacgtaactttagaaacggtgaaaatatgacaatgaaaactcagtagttgatttcttaagctggtttcaactccaagagtgaaatccttggtgcagaagagttcaacttaacagcctatctggcaaccatgtaacggacctgcctcaaaggcaaaacacccttaaaatgagataacttgagacaactccatcacctcagaagaattccaatattagactttcttatgacaatttctgctttagaaagatttggttttcaaagtccaccatgcctaaaaattacctggcctcaaaaataatatgctgaggggcagaaaccggaaacaaaagtttgcttactataggttccatttttatgaggctcaggaacagaaataaccaatgtatgctgagaaaagttaaaaattcacttagcat

SEQ ID NO: 836731 - DNA, 489 bp, Homo sapiens
taactgaaattttgactggttgtcattgtggtgttttaaaaattcctctcacggaatttcaaattgaagacaaacgtaactttagaaacggtgaaaatatgacaatgaaaactcagtagytgatttcttaagctggtttcaactccaagagtgaaatccttggtgcagaagagttcaacttaacagcctatctggcaaccatgtaacggacctgcctcaaaggcaaaacacccttaaaatgagataacttgagacaactccatcacctcagaagaattccaatattagactttcttatgacaatttctgctttagaaagatttggttttcaaagtccaccatgcctaaaaattacctggcctcaaaaataatatgctgaggggcagaaaccggaaacaaaagtttgcttactataggttccatttttatgaggctcaggaacagaaataaccaatgtatgctgagaaaagttaaaaattcacttagcat

SEQ ID NO: 836732 - DNA, 606 bp, Homo sapiens
atataacagtgaatatatgtttagtttgagttttgacatcttatgtaatgatttctgctttgaatgttttcttttttcacattttcctataatatattctttgtgtatatgtttgcatttsccttccataagattttgtgtgtatgtatgtgtatgtgtatcagttatgatgatacacagcagaaaaaaatatttttaaatctgcaaatatatataaagtagagatgcaccaaataaatatttggccaaacactgaaaagctgagtatcaacatcattattcacttgaagctgaatattactatcgtagaatgaatccaaagtgttatgaaattcaattttgattgcaatatttgccactgaaattccggtaatcaaaaatgtaaagcttgacgttattcaaggacagtaatttcttggcattgtcagctgcaatattgttcctgtgatcatcatagcacaggcagatgctaatttgtctaccttcctatatcatacataggaggaaattcccaccaaattattacactttcttccgctataatattaaaaaataaagtatatctatcaagactgtggatcctgaaaatgtagttgatggtgacga

SEQ ID NO: 836733 - DNA, 521 bp, Homo sapiens
agatagctaagaagaaaatggtagctcagagatgttagaaatctggtaggcctgcatagacaacaattggaattcatgactatcatggtggccagggcttgataaagggccggtagaaacaatgcaatttcrttttgtttttccttcacagcattttctgattctttagttgcagaaggtgagcaactaagaagcttagcataaaatggagctacccgactaaaaggaagttaagcagacctctcagcaaaaggatagacaaaattggagttcaacaaggaacagaggacctagaaatctccctaggcattgagacccctaaaaagctaatccctagctgaaaaggcaaactagaaatgcaccagctgccacaaaaactgaaatctagcctcaaggcatttcagcctgattggaccaagaggatctacctctaagccagaagaaaactacaatttctttggagggagatcccatctaaagactttttctcttaggtcaatgtctggcttttgatcataaat

SEQ ID NO: 836734 - DNA, 638 bp, Homo sapiens
ttgagatgaacatgtgattttagtcttttattccattaatatagtgtattacattgattgatctttgtatgttgaaataaatttgctttccagggataaattccatttggtcatggtatgttatcctttttacrtattgctgaatttgaaatgctgatatttgtttgaaggttttgcatctatattcataagagatattgttctatcgttttcttttggtttgtagatgcctttgtctgaatttattattaggctattaataatttgatagaatgaattggaaaaccttcctttctcttttactttttataagagtttggggggaatggtgtttgttcctctttaaatacttgatagaattcaccagtgaccactggtcttgggattttgtttgtgagaattcttttaattactatttcaatctttatacttgttataggtctatattgattttcaatttctttttatgttagtttcaatagtttgtgttgtctttttaggaacgtatgaatttcatttaaattatctaatttttcagcatgtaattgttaataatattgtttctaaaagtcagtattaatgcccactctttcatttctgattttagtaatgaaacaatttcttatttttctgttggt

SEQ ID NO: 836735 - DNA, 573 bp, Homo sapiens
agtatgattgtgcggttgctcagatgtcttcatagatctctaagaacttgtttgatgaattttggtgctccaatgttgaatgagtatatgtttaggatcaagtctttttgtttaattgagacttttatgattatttaatgctcctctttgtcccttttgattattgttgctttaaagtctgttttatcttacataacaatcgttatgcacactcttttttgttttctgtttgcatgatagacctttctccatcccattattttgaacctataggtgttcttaattgtgagatgggaagatagcagacgttgcatcttgctttgatgtccagcttgccactctatgcctaaatggggcatttagttcatttacactcagggtcagttttgatatgtgaacatttgatcctgccattgtgctgttggctggttgttatgtagacctgactgtatggttattttttcatgtcaatggtgtgtataattaattgcgttttcatagtggcatctcccttcarttctgtcagtttttgcttcatgtattttgggactctattgttaggtgcatatttgt

SEQ ID NO: 836736 - DNA, 560 bp, Homo sapiens
gaggccaccctggtcccaggtgggcaggggtcacccaggtgaccagactgcaccggaggcccagagagtgtgcaggagcatgaactgttgggctcccctgcaggagagragctgcaagcactgatgggaatccactgcagaccctggccagggggccagcattgttccaggtgcctctgtcccttcaggaagtttggggtcttcattaagcttgtgcttctgcagcccaaacacaggggtatccaggctgtgctggccgggtggcctttctctgttgatagttttgtcatctggaggagtgcttcaggaagaggcggttcattggatcaagtcctctctctggttttggagacagtaaagcgtaacgattaagaatgaaccttctgaagccagactatgttcaaattctgctcagccactgagtagcttggcaacagagggcatgtgcctcagtttgttcacctataaaataggcctaatgagagtatgtacttattttgtaggattgtcatgggtttgagttgatgcacgtaacacacttagagcagtgcctgttaaac

SEQ ID NO: 836737 - DNA, 617 bp, Homo sapiens
tgattattaagatcatcacatatttcttgcataattgaaaactaaaaacctggggccacaggccagctgttgaatcttaggcacatccacatctcttggcatgagtgtcctcaatagtaaaatgagcraattagatagatgaccttaaaggcccgtccccattctgtgatgacataattcaacagggatgcttctattgggccctgaatgtagcacagaggtgaaagggaacactacatagcaggcttacagagggggctggtgggaagagaacgagatggggcctgtgggatagatcagagccccgcaagctttgtggagtgcgggggaaggaagactgcaagaaagccagccaaggcggctgcctctccactcaactatgtgattaagtgactggcttctgtttttcacaaagccagtctccagctcaaagaacctcagggactattttaaagacaagttattcctttgtttttaattgtaattaagtaggtattttataatatttaaatggtgcaatttacatgtcacttccatgatgcgctgggtacccttcaccagaaggagagaacgtaagtttaagaggactgctgtgtattattttgtgactagggaag

SEQ ID NO: 836738 - DNA, 563 bp, Homo sapiens
tcaacatgagttttggagggaacattcataacattcagtactgtatcatacaaagtatatgggcttggccatcagactgcagtatattcaagtcctgtgcctgccatgggttagcagtcctcagtttgagcaatgttcttgaaaattctgaacatcagtattctcatttgtaatggagaaaaatactagtgaatttaatgaggcttaaaatagtagacatatatgtgggtgctcaatacacatttattcaaccacacccttctcatatccctttccaccattggcttaaatcaaatttaatttgtaagtagagtaaaaattaatacaatttcagtatgctagttatcacagagcagataaaacaatgtcctgaagtgtattgtgtggtgtacagtgttacaacacctaaattattcaatttaattccaggtaaattataattgmttcctgagattctaggtggaatatgtgtatttggaggacagagttactctgagtgtagttgaagagtaaaactatacttaaaaaggaggattagtcttaatgggaaaaataagataaaa

SEQ ID NO: 836739 - DNA, 573 bp, Homo sapiens
ggaaaaacatcgcatgctaatggatagaagaatcaatatggttaagatggtcacactgccaaagcaatttgtaaatgcaatgctattcctatggaactaccaatgacattcctcaaagaactataatgaactaytttaaaattaatgtgaaaacaaaaaaaacgcctgaatagccaaggaaatgctaagcaaaaagaaaaatttggaggcattatactacctaactttaatatatacaacaaggctacagtaaccaaaacagcatggtgatggtacagaaacagatacataaaccaatggaacagaatcgagaacccagaaatgtggccacacacctactacaatctactcttcagcaaagtcaacaaaagcaagtaacaaggaaaggattttttatttaataaatgatgctgtgataaatggctagccatatgcagaagaataaacctggactccttccttacaccatacaaataacaaatcaagatggattaaaaacttaaatatagaacccaaaactataaaaaagcctagaagacaaccttggcaataccatgcaggacatataaatgg

SEQ ID NO: 836740 - DNA, 516 bp, Homo sapiens
ggcttagagttggaaaggtcaaactctataggaaggtaagtgtgatggttaattttaggtgtcaactttactagattaagggatactcagatagctgataaagtgttatttctaggtrtgtctgtgagggtatttctggaagagattggcatttaaatcagtagactgagtgaggaagatccaccctcctccaatgttggcaggcaccatctaataagctgagcacccagatagaacagaaaaggtgaattctctctctctcttctaaagatgggacacccgtcttctcttgccctcagatatcagaacttgagttcctcctactttttaactccaggacttgcacagcagcctgccaggttcatagacctttggcctgagaacgacagcagtggcttccacagttctgaggccgttgggcttggactgagccactctaccaacgttcctggttctctagcttgtagatggcctgttgcaagacctctccactattgtgtgagccaattcccctaa

SEQ ID NO: 836741 - DNA, 641 bp, Homo sapiens
ttctccatgcacactcttattctattctggcaggaaatttaattgrtgcattttgattaaacttccaaattgatggctctcttatgctctgacttgtaataattgaaatgattaaagatgtagtttcttctttccaaagcttttcacttatcagttgctcctgttttattgagaaaggtgcttgtagtgatgttatattaagccaaactactttctgatttggttcaaacagactaacacacaaatgctaattaatatttagcatttagatatctgtatccaaattaaattggcacccagaggatgaaagattgaattattcagctgctgttgaaagctatatgtcataccgtgtttacaattgtagttatcagaagtcggctttcattattctaccaaatgtgtttattttctcatagagcattcaaatcttcatggttggctatctatatagaagataatattaaaggttttaaacttgaacaatttatataaaataaaaaaattaaaatctctagtcagataatgtcatttaagggccatttttggatgccttcccatatgcaaagatactaccaatgtagtatcttttgcatgtgttcccatatgcaaagatcaaccatttctgaagcagaatgctt

SEQ ID NO: 836742 - DNA, 603 bp, Homo sapiens
aaagatgtaatgatacatgagagtaagtagatgttacagagaataatgtgtgaggcaggaagcagaaagtattgtggctgcagaaaagggcagggaccaactaaagaatcttgagggtcacgttttcaagactkgcctttgtcttgtggatgatggtgcaatattgagagcttttaagaaacaatgatatgacttcttaccaactccaataattcatagcatgtctgaagccttagtataattaaatatgggtaagagaaaaaaaaaacaaaaacaatggagagactaatagaaagaaggaataaaggaaagaagaacaagataaagggctctgttattatttgcccctgaaaccaaggtcaccactcaatcctggcaatgcctgttttgctgatgaatgggttataacaaggtgtagttgctaaaagcttactcaatgataatgataataaaaccacagtaatgatctgatgtaccaggcaatgccgttgtactttccaggattaaggtatgatttaaaactgttttcacaacctctctgcattatgctgtgctaatttcaaaagtagcttttttgtttgtttttttcaaatcaaatatctg

SEQ ID NO: 836743 - DNA, 636 bp, Homo sapiens
gacagctaaagcacagtttggcttatttcaaactttactagcaraaacgcccgcctatttttagttttctaaagaacatgtccagtactgactcatactctctaccaaaaaaatgctgtatttaaaccatctggacatttaaaaaaaaagcatggatctttttacatacctaagtgtactttttttgtccatctttctgttctcaacttgttaaattattccagtttaaaaatcacctttaatattttctcctgacctgaactttggtttttctgctagttggataaatataccctcttaacttcagagagaattaagaacataattgctgctttggatcagggtcaatcaataaaatccatggtctaaagcctgccagaatgtatacaaaaattcaaagaaatgtctgcttcttaaataaagaaaatgaagatgtaggaaaaacatgtcttttagacatatatttgtttttgtatggtgtttagataattaaatatagagttaacagtaattatctatgggcttgttaagctgaagaaagatttctgaaatgcgttaaacaaacaaaataatgctttgttcctatttcattaatccactattagaagacaatgttaacaactctgcttaaacaca

SEQ ID NO: 836744 - DNA, 636 bp, Homo sapiens
gacagctaaagcacagtttggcttatttcaaactttactagcaaaaacgcccgcctatttttagttttctaaagaacatgtccagtactgactcatactctctaccaaraaaatgctgtatttaaaccatctggacatttaaaaaaaaagcatggatctttttacatacctaagtgtactttttttgtccatctttctgttctcaacttgttaaattattccagtttaaaaatcacctttaatattttctcctgacctgaactttggtttttctgctagttggataaatataccctcttaacttcagagagaattaagaacataattgctgctttggatcagggtcaatcaataaaatccatggtctaaagcctgccagaatgtatacaaaaattcaaagaaatgtctgcttcttaaataaagaaaatgaagatgtaggaaaaacatgtcttttagacatatatttgtttttgtatggtgtttagataattaaatatagagttaacagtaattatctatgggcttgttaagctgaagaaagatttctgaaatgcgttaaacaaacaaaataatgctttgttcctatttcattaatccactattagaagacaatgttaacaactctgcttaaacaca

SEQ ID NO: 836745 - DNA, 636 bp, Homo sapiens
gacagctaaagcacagtttggcttatttcaaactttactagcaaaaacgcccgcctatttttagttttctaaagaacatgtccagtactgactcatactctctaccaaaaaratgctgtatttaaaccatctggacatttaaaaaaaaagcatggatctttttacatacctaagtgtactttttttgtccatctttctgttctcaacttgttaaattattccagtttaaaaatcacctttaatattttctcctgacctgaactttggtttttctgctagttggataaatataccctcttaacttcagagagaattaagaacataattgctgctttggatcagggtcaatcaataaaatccatggtctaaagcctgccagaatgtatacaaaaattcaaagaaatgtctgcttcttaaataaagaaaatgaagatgtaggaaaaacatgtcttttagacatatatttgtttttgtatggtgtttagataattaaatatagagttaacagtaattatctatgggcttgttaagctgaagaaagatttctgaaatgcgttaaacaaacaaaataatgctttgttcctatttcattaatccactattagaagacaatgttaacaactctgcttaaacaca

SEQ ID NO: 836746 - DNA, 636 bp, Homo sapiens
gacagctaaagcacagtttggcttatttcaaactttactagcaaaaacgcccgcctatttttagttttctaaagaacatgtccagtactgactcatactctctaccaaaaaaatgctgtatttaaaccatctggacatttaaaaaaaaagcatggatctttttacatacctaagtgtactttttttgtccatctttctgttctcaacttgttaaattattccagtttaaaaatcacctttaatattttctcctgacctgaactttggtttttctgctagttggataaatataccctcttaacttcagagagaattaagaacataattgctgctttggatcagggtcaatcaataaaatccatggtctaaagcctgccagaatgtatacaaaaattcaaagaaatgtctgcttcttaaataaagaaaatgaagatgtaggaaaaacatgtcttttagacatatatttgtttttgtatggtgtttagataattaaatatagagttaacagtaattatctatgggcttgttaagctgaagaaagatttctgaaatgcrttaaacaaacaaaataatgctttgttcctatttcattaatccactattagaagacaatgttaacaactctgcttaaacaca

SEQ ID NO: 836747 - DNA, 641 bp, Homo sapiens
taaagtggagacataaaacagagaatagaaaaacaatacaatcaaggtacccaagagttgggtgtttgagaagatcaaccaaattggcaaactttttgctagtttgaccaggaaaaaaagtagtgcaagtaattaaaaaccaaaataaaaatagagacataactactagctttatagaaagaggaaagaatgttaagagaatgctaagaacaattgtacagcaacaaatagttaacctagatgaaatttacaaaatcctaaaaatatacacattttccaaactgactcaaaaggaaataaaaaatttcatcagacctataacaattaaagatattcaataagtaatctaaaatctcctaaaaaagaaaagtccagaaccagatgtcttcagtagttaatcatgacaaatatcgaaaaaagaaaaaaaaacttatcaaactgttaccaaaaatacttgataataaagagatattttaaaattcagttcatgaggctaacaatgccaaaatcagataaaaacatcacaagaaaaggaaaacatggaacaatatcccttgtaaatacatatgcaaaaatccttaggaaaacatwagcaaaccaaatcaaacaacatataagaactatacactatgaccaagcag

SEQ ID NO: 836748 - DNA, 566 bp, Homo sapiens
ttttgaaattcatatgctaggcagacattccagatgaaatacagagaattgttaaaaacccaaattgttagatgatctctcacctttttgaggttaraaagggtacttcctattttgaattttattatgtagcattggggacatggataaattatttaattttattgagtctgaatttttcacgataaaatgaagatgtttcagtaatttctgtaatatcttgcaattctagaactccacacttttataatatatcacttgcataacttattttaattcacagtatgtaacggaagtaattgtttgtaaacatgcctattattatatttttagatcacaaagataaggacttgaaatttaccttaagtgatttcttgatttattatgaagaatcaaagtgcttattcactggaataaagagagacatgcaggttttctcaaacactttagacagattaaatatattaaacttaaatacttccttttatttaaaattttcttttaatccacttaattttgtgtttatctagtgtctagtgggagtcaaaataataataaactactaa

SEQ ID NO: 836749 - DNA, 521 bp, Homo sapiens
gtctgggggcggtggctcactctctcagcactttgggaggccaaggtgagtgggtcacgtgaggtcaggacttcaagatcagcctggccaacatggtgaaaccttgtctctactgaaaatacaaaaattaaccaggcaaggtggcacgcccctgtaatcccagctactcaagaggctgaggcacaggaatggcttgaacttgggaggcggaggctgcagtgagcagagatcgtgccactgcaccccagcctgggcgacaaagtgaggatctgtctcaaacaaaaaaaaaaaaaaaaagaaataagatgagaattttaggcatcaacttcggagaggaaagaaaaattatttggaggtgcaaattcctttggtattagtaaaaattgactcacatgggccrtagtctccaccatgtccagtaaatgtcatcttcctctgttgctaatccttctgcttatatatatttgcttaatttttgccctgaccaccaggaaaagatttcccaagttccttttttctca

SEQ ID NO: 836750 - DNA, 575 bp, Homo sapiens
agctcagcccttctccttcaatatttcaatattgagttggttattctggatctttattctctccacgtaaactttagaatcagtttgttgacatccacaaaataacttgctgagactttaattggaattgcattgaatttatagatcaatctggggagaactaacatcttgacagtataaaacattcctatccaaggacttgaaatatctcttcatttatatagttctttttaaatttctttcatcagagttttgtagttctcatttagattttgtatgtgttttgttcgatttatacctaagtattttattttggcaggtgctaatgtaatggttttgtgtttttaatttcacatgttatttgtttgttgctgctatataggaatatgtttgacttttgtatataaaccttatgtcctgcaaccttgctttaataacttatttattccagggtgtttttttgttgatttttttagattttctacatcaacaattatgtsatctgtgaacagagacagttttatttcttccttcccaatcagtatagcttttagttttctattcttttcttgtct

SEQ ID NO: 836751 - DNA, 594 bp, Homo sapiens
ctttggtttttcaatagtaagacaattaatgacttaactttgatttatgcttaactttattttaaattttagcagtattcactgatcccttccagttgcagcaacagccctagagaaagaaaatgaactcttgtagtattttggcaataggagaggacatttgtgttacaacttaacatctctctctttttttttttttgagatggattctcactttgtctcccaggctggagtgcagtggtcctagctcagctcactgcaacttctgcctcctgggttcaagcaattctcctgcctcagcctccctagtagctgggattacaggtgtgtgccaacatgcctgggtaatttttgtatttttagtagacacagtgtttcaacatgatggccaggctggtcttgaactcctgaactcaggtgatccacccgcctcaacctccctaagtgctggaattacagacgtgagccacagggcttggcccaatctcttcttatttactaaatgcatactttaagtatatcatccccttgtgttgaggtatgtatagtgccatcttcttcttccrtgaaagacgcatcctgtcagtggggagt

SEQ ID NO: 836752 - DNA, 608 bp, Homo sapiens
ctagagcccaggaaggtggagcagcagaagtcagcaaaagccccctagaccccctgtgtcagggctgcttgaagagcytggtgtcacagccagtctggacatttctgaattttatttagcccaagaagcctgagcttcctatggtggcttcagtccagcagttagtgatgctgttcccctcagacccaccccaggtgcaggggcaggtgcagcgatcaaggaggcaccacctcatcccagggtgtccctgctcaagtcttctgcctgccccgccctgccccaggcctcctcagtcttgagacaagaggtggctgctccctaccccgagctatgcagaaggggcaagcttggtgtgcaggactttccagcgagtccttcggagttgctggaccgcttaactggacctcgagataacttctcccagagcagatgggtggggactggcggctccttagctgtaaccttcctaccccaaatcctgttgtttcgagagttaattctggagccacagggaggatgggaggcattattgcccttcatacctccagaagttctctttcaggcacaggaaaggggttttggcatctgccgtgcttgcagttttccag

SEQ ID NO: 836753 - DNA, 558 bp, Homo sapiens
caagggagaaaaaaagattgccatgatctgtatccatatatccacatactaccatgcaaggccagagaaagaaagctggggctcccccataatgtaacagctcctgattttatgcaatttctacagtatatgacagagggctggggcaaagtggaaagagaaagataaaaccccctgtgtaaagcacaagacaatgaataagcttatggcttatttaaggcttcgatgaagtttaggcgtccccaactaggaaagacttggattcaggtgaagagatgattatttattctattttaaatgcatgttttctctgcatcttagaatctgtgcatcttaatgtgcacatcacagacccttaagacaattcaaagatgcatcttagagtctgtgatgattaatttcaggtgtcaacttatttctgggtatgtcttggagggtgttgcaraggagattggtgtgagtatatggactgagtgggaaatatctgcccttctattctatctgggcccccagacgactggatgtgggtaagcatcatccaatcgactggaggcccaa

SEQ ID NO: 836754 - DNA, 576 bp, Homo sapiens
ttcttactgattcttcacaaggaaccaaaaatgataaactttgcctcatactggctcccaaatcattgcagggagtttatttagactgtgagacacttaacagagcttagcacrgtaagcatgacttgccatacacgcttcatcaggggatcactggccagcatgcagttatatttactaaaaaatttattgtaacggggatacatcaaccctagagagaatttgagaatgctatgctatattttgcagccaaacatgtatcatatatgcctgaacatttctatattactttgataacacagctctgcatgcctatcaaatgtttgattaaagctgactacagtgcaaattatctaatgctctttttgtgaactctcaatagtgtttcatcttaaccatatggctactgatgtggcagttaatgtatggtttccatcaggctttatagaactagatattctgtacctggaattaggaacgtactacattttcctataatctgctctcaacaattttcaagggaaaagaaataataaggtcgtgtcgttcatactaaagttacagccctgcttaaac

SEQ ID NO: 836755 - DNA, 470 bp, Homo sapiens
ggatgattaaaattaatacaataaatatatatcacagagaaataaagttatcaatatagagcaagatggacaaaaaatattattatattagataatttgggtgcatttaaggtaatattgaggcaatatctagaggtaataactggaaattttctataagtcattaaagaaaaaaattttcacattcaggaattggacaatttctgaacagaattgataaaaataaatccaaactagaaagaacactgatttggtgaatattttaaaaagaaatttgttcactgaaaaactaatacaataatgcaatgggcataccaagttccaaatccaaaatatacagtgcaagatagaatactatacacagyactgagactttttgggtctacaaaattttaagaaagcacactcatggattcattgaacaactgtttttaaagtaacaaagaaagaaaaaagaaaacactaaaaaa

SEQ ID NO: 836756 - DNA, 470 bp, Homo sapiens
ggatgattaaaattaatacaataaatatatatcacagagaaataaagttatcaatatagagcaagatggacaaaaaatattattatattagataatttgggtgcatttaaggtaatattgaggcaatatctagaggtaataactggaaattttctataagtcattaaagaaaaaaattttcacattcaggaattggacaatttctgaacagaattgataaaaataaatccaaactagaaagaacactgatttggtgaatattttaaaaagaaatttgttcactgaaaaactaatacaataatgcaatgggcataccaagttccaaatccaaaatatacagtgcaagatagaatactatacacagcrctgagactttttgggtctacaaaattttaagaaagcacactcatggattcattgaacaactgtttttaaagtaacaaagaaagaaaaaagaaaacactaaaaaa

SEQ ID NO: 836757 - DNA, 374 bp, Homo sapiens
atcatgcgagaatgtcaattgcagtattgtgttgtaattttaaaaaaaaactctaaatattcatcagtatataactacaaataaaaatagttggactatcatgcagactacaatgcctctattgtggcataatagttaataatacaatctctgagagcagaatatctggatttgaataatttgctctccctgtaaatgaccttgagcaaagtacttacaatcttttttctcttctgtaaagtggagataatagcattgccaatttattagcttgtcatgatgattaaatgagataatccatgtatcacaccaagtacccactacrtaataagcaactaattaaatttgactaatattaataatttcattattat

SEQ ID NO: 836758 - DNA, 640 bp, Homo sapiens
ctcatagcccatttagaaaggcaaaatataaggtatagtacatagaaaccactgaccattggtaattctgaaacactacaggtcagacagtttgaatgaaccatatactaaaggttggaaaagttatttgattaaactctgccttttttttttctgggaagaacacatcgattaatcattttgtataatctcaacctctcccttcttgggagtggggataggggaaacagttttcatcatctatgatctgaagtttccgcatgctctttctcattgttaagacaataccacttattttagcttattgttacaatagtatttcatttttttctaacaacttggtattagtcaagatgggatataataacaaatgactcttgaaatcttcatgggtgccatgggaagttttaagaacacaacttgaaagtgaattgcatgactttgttctgtatttcattgaccactactcattcagtaagcgtgaaagtaactgtgtatatcattgttagtatactatgcatgccagatacccaagactcagtcttaaacttttcctttcctttacacaccatgtatttagtcatcaattttggttcaacytactccactaaatagctttgacttccattcacttaccact

SEQ ID NO: 836759 - DNA, 353 bp, Homo sapiens
agagagggcgacggaaagagcgagaggggggagagagagagagagacgtaagagatagacagaagtgggcacacagacgcgcacacgcacgcacacagacacaaacacacacacacacacacacacacacacacacacacacacacaaccaagacgcacacagacatacagcaggtaacacccacccccaggctgcccctgaagctgccgggttctgctctccgcgactamgaggccaccggtgagacagcagcccacggacaccctggcagacctgtcctccacatcacaagggcgccacttttggggagactcacccgcacaccgtccgtgcacgcctgaggctgggatcc

SEQ ID NO: 836760 - DNA, 558 bp, Homo sapiens
cagagtgatcagatatcaagagtgggagattctctctaaactgacttagcagcattcttgyaacagctggactagtggactaggcagtgtaaagacagtgcccaaggacaaagtagagtcagaaagagtgctcctagaagcctgactaaagcgtagacaagaagaaagtcttcgtcagttcaaaagtcactttctatacttatgatttggccatgagcattcctgtctttacttggtttggaggagtggactcagcagcatgtatgttatgggaaaaaaagagattcggaaaaattacttacataagtttgaaaggcaagatgaatctggccatatggtaaaatccaacagaactcttctggttatgagtaatttgtaaaataattcatacattgcccattatatgcattagatatatgtaaattttaccatgctcattcttcagaatggaaaaagtgaaatacaaaggcaaacatggtaaagcaatttattttagtttttgtgagaagttgttcttctagagaatgttatatgactctatgccctcagtttgaaact

SEQ ID NO: 836761 - DNA, 623 bp, Homo sapiens
tattatttagtgaatatttaattactttagaatttccaaattcctgaaatcatttaacgctttttgaaatggtgaaaaactaaggtcaggattttatcatagctcaataaatgattttggccttggctaaatttttacaattcaccatttatactgaaactagtgaaacaaacagtatcacggtgcagaaaatcccaaattcaattttacttcaaaatacagacctacaaacccttgccccaaaccctttgtatcagatgtgtgtcaaattcagacttatttttcagatcttagaaaagttatagggtgcatgtgctatacattatgacaccctggaaggtctaggacagcttctggtgatcaaacaccccctactgctgccctaaactgtgtggctaaccagaagaagaagcttaaataaagacagtggtgctccatctgtggggcgggcctggctgtctcataactttagggcagggcaggtttgcccccatatgagtaactaaacaaatactcaaaacatggtttttcaggtgttttggacttctgaatcacagackgcagattgcagacctacacttttattatcactatgtatgggagagcacttaaaaattaaagta

SEQ ID NO: 836762 - DNA, 602 bp, Homo sapiens
acccgaggggctcacacattccctctggtgaccagctgtgggactgcaggagtggagacaaagtttggggactcccagtaaacagtagaaaagagggttcaacagctcccaggccattaattttcgagtctccaggcttggggcctgaagggcacactttgctaagggtctgaagggccatgtgtgggcttgagatgagaggctggcaggggttgggccaggacgattcactgtccttgttcccacaggccgagcctctccaggctggagcgccagctgcctgtgcatggagcctgcagatctggaacaatctgcactgtcgacacccagggccccaggacagggctctaaggcctctcttttgttctcgaacccttgtgggcccaccagccctcagttccctcagtcccactctccccagggagcaccccaagcactccgcatgggatttcacaagcacctccacggtaacctatctcaagtagaactctgcactaacttcttcctcaaaacacaaaaacytggctcactgccaccagcctgcctccccacggccccacgagtgactcacccaggatcccaccctctcggcacccccaccc

SEQ ID NO: 836763 - DNA, 498 bp, Homo sapiens
cgtgctccactgggtgaacggtccgcgtgttcatccgccgtccatcagtggacacgtggcggcttccgccttttggctctcgtgagcaaggttgtggtgcacacgtgtgtgcacatttttacgtggatgtgaacttgccgtttctcttggagggatcgggcattttcttgcctggggtgtgcatgtgaggctgctgtagcctcactgaggaagtgactgtcccaggctctagaggtgcctgagggcggccgagggatggggccggctccacagacgtccctaccgtggagctccagatggtgtgctcatgaaggcgacatcttcctgggctgcttctcacgaggggcgcaggtgggctcccgagtggcctggaagctggggagaggcgtggatgcggatggcgtgttgctcttgggctggcccccaggcggttcctgcagggcgctgggagcttggccygggctggggctcgggttggggctcaggggttggaccgag

SEQ ID NO: 836764 - DNA, 604 bp, Homo sapiens
tgggggaacacatgtctgtcaaaaggacagaacatacatacagcagtcaaccaaagtccttacagaaaaacatgatcaacaaggagaaaagagcagaatataaaccaagcacctattgctcaaacagtgaactgagactgcctcgaggaagtgaattttgggactgacattttaaatgaggaattagaagtgactaagaaaaggagatgcaggtattcaaaatgaaaaagctcacagaggctgagcaatggaagtgggctgaagagaggtagggctactcagcctttcacactgagtatgtgaatctgggtttacacagtacactggttctcaaacattagctggtgtcagaatgaccccaaaggcttgttacacacagatttctaggctccacccccagagtttctgactcagcaggtctggagtggggcattctaacatgttcccagattctgttgacgctgctggcctgggcacaatatgggctgagatcggaggagagayggagtttgttgactggagtgaactggagggtttcaaacgtgagatggcagtgagctatactttagctttcaatctgcagagatagtgggggagaaggaag

SEQ ID NO: 836765 - DNA, 556 bp, Homo sapiens
atatataaaatacttacacagtgttctacagtatgcttttcttcacctactgatacaccctggaagtcttctcttgtcagtagatatagatctacatcactctttttaatggctaccaagtattccattatatggacagatcataatttatttaaccagtcccttactgatggacatttggattgcttccaattttttgctattaaaatctatgcagcagttacatctttctacgtatatatttgtgcacttgtaaaactatgtctgtagactgaagtgattttgtttgggggtaaaagaatacaataaacgtataaaaaattattcacttagctttaattcacactaccataaatcatctagaagtggcaattgctctaattgcttaattattttgatttttatctttaagacttttttgagaataatttattctactcaaaattaattgcataggaattaagtcaaaatgtaatgttaacatattcctgatcattgatcagaaagtatcytatgttcaaattctacattaaaatattccagttttaagaaattt

SEQ ID NO: 836766 - DNA, 601 bp, Homo sapiens
atctcgaatgtatcattataagattgtctggtatgtgaaggtcacaattaaatattttaaggaatgatcartcttatcacttagatttgctgataaccaactccctgatctaacccctggcacagaaaactccaatgccagaaaaataagaaaacgctgagaaacctttgcttgaactacttagcagatctcattaggcaactctcaaattcctcccagctcacagggttagaaaatttaactctattcatggaaatttctaatttcagcacagattaagtaatttttggcacatgttggtttttccttggcaacacactgaaaaaattcaagcccaaagctcagttcactttttctcagttgcctctatgtctcttcagcaatctcagcagcaacagattggcatatatttctaccctatttaactcttgtttctattaccaatacctcttagtttcatatttaacttttttgtttatttcctgccttattccaataacaagacttagaaaatattaacaaaaaaagcaacttatgtttcaaatatggagcacaaatgatcacatttctcaaaagacattcagaaatcattttgcatata

SEQ ID NO: 836767 - DNA, 601 bp, Homo sapiens
atctcgaatgtatcattataagattgtctggtatgtgaaggtcacaattaaatattttaaggaatgatcagtcttatcacttagatttgctgataaccaactccctgatctaacccctggcacagaaaactccaatgccagaaaaataagaaaacgctgagaaacctttgcttgaactacttagcagatctcattaggcaactctcaaattcctcccagctcacagggttagaaaatttaactctattcatggaaatttctaatttcagcacagattaagtaatttttggcacatgttggtttttccttggcaacacactgaaaaaattcaagcccaaagctcagttcactttttctcagttgcctctatgtctcttcagcaatctcagcagcaacagattggcatatatttctaccctatttaactcttgtttctattaccaatacctcttagtttcatatttaacttttttgtttatttcctgccttattccaataacaagacttagaaaatattaacaaaaaaagcaacttatgtttcaaatatggarcacaaatgatcacatttctcaaaagacattcagaaatcattttgcatata

SEQ ID NO: 836768 - DNA, 588 bp, Homo sapiens
tccttgatgctctatcaatttttgctttacttactgccttatctacagtacacagcccatgtagccagtctgctgaaagttagacttgcaggaagccagattactacgtccagtaacaatcgaggaagctaaacrataactttttttttttttttgagatgaaattgggcacgatcttggctcactgcaacctccgcctccccaggttcaactgattctcctgcctcagcgtcccgagtagctgggattataggcatgcaccaccacgcccagctaatttttgtatttttagtagagatgggatttcgccaggttagccaggctaactcctgacctcccaaatcctccctccttcctgatccacccacgttgaactctgaaagtgctaggattacaggcatgagccaccgcacctggtcaaaacaataacttctatcacaaccagtccactactgccagaacgtgatgaataactaacagcttccctaatttttgtccctgcttccaacttaggatcacccagggaaagccaaagatgcacccatagtcaaccacatagtaccccctatctctagttagcccaccttc

SEQ ID NO: 836769 - DNA, 575 bp, Homo sapiens
attttgattcttcaaaggaaattacactggcagctcttggggcacattagtgatcagcaaaatgattagttcaacttaatcactttaaaatgaagaaactgaggctcagagcggttttgttgatgtccaagcagacaggggagttctaatccacctgacacaactaggtccggcgtccattctaagggctttacatttagctttgtcataatttactttacaatttggtgctcagacaatccattcactggaaattattaacagatgactttcgtcaccactctcactgaatgcccacagactgaaataaagacaacacacacctcacagccattactcatttctgtcagtttaaaaaattaacctgagcaagaatcatttttcctatttgaatagaacactccttcctcaaaataatattcagtaacactaatacaaataatgtaatrtcttctttcttcattaacctccaaagcgtgtatagaagagaacagaccagcagttctcagcttctggatctcagaactccttttcattcttaaaaagtatgaaggatcccaaagagcatttgttta

SEQ ID NO: 836770 - DNA, 457 bp, Homo sapiens
  misc_feature 455, 456, 457: n = A,T,C or G
attataggcgcatgccaccatgcccagctaatttttggatttgtagtggaaacagggtttcaccatgttggccaggctggtctcaaactcctgacctcaagtgatagcctgcctcggcctctttccaaagtgttgagattataggtgtaagccaccatgcccagccaaggaacactggtttttttccccaggttctttgacttagcctttattacaataatgactgcaaaacaagattaagatgagatgctgcttacttaagaatatttggaaacgcttcttaagcgactgagtgtcacaagacagcagccatcattggttcctctttggctttcaagacttccctagttctttcagtgggctcctgggttgcttgttccttacagtggttctgtagggyaacgccaacactgatttaattcatttcttcgaggttttattgagatgtttgacannn

SEQ ID NO: 836771 - DNA, 629 bp, Homo sapiens
tgactgtatcttcaaaaatggtattttaaatcatttatgatgctttcctattttttaggatctggttctctttatctggttgtttaccacaagatactatcgtttttcagaggtaataacatcctaatatctttgaagataagttttttagttttttctctttccatcatcgtcttagttttttccaggtttgtttccttcctctgttcatgtctttgatgtttggttgggcagtctcgcactggggatgctccagcagtgttgggccatccctaaccatgcacatttggaagagaggctctaacagcctaattggaagtctgtgtgtgaggttgtcgaccaaaatttgtctgatcaccactcagccttttgtttgaggattcccaaaggcaagatctggaagccttctctggggccattcagtttctcaaagatagaaacctgattggtgatgtgcctggcaataggcaatctggaagccctgactagaaatggcccgcagttccactgtgtccagccctgtgcctcactcctactctgygctgagcctgatggccccgtgtctagaatctctccagttcaacttctctggcaagtaaacctttgctctcttgttagcaagtttattg

SEQ ID NO: 836772 - DNA, 484 bp, Homo sapiens
tccaatgttcaaggaacatttaccaaaaaataattccttaaattgagactgaacaaatttcaaaaattttatgtcatttaaagtrtgttatctggccacactgatatttaaacaagaaatctataacacaaaatcaaccagaaaattcactattatttgggaattatgcaaatccttttaaataatacaggtagcaaaaaatcataagggaaatttaaaaacatttgtaattttgtgataatgaacatacagcaaagcagatcttgaaggattcagctaaagcagtgcatagaggaaaatgtatagccttaaatatataaattaaaaagagaaaatatttagaaatcaataatctaaatatatattttaaaaattgctaaaataagagcacattatgccaaagtacaaagcaatgacataataaaaataagaatataatgtaattaaaaaataaaacatagaatagaaaaaatcaacagagcca

SEQ ID NO: 836773 - DNA, 575 bp, Homo sapiens
tcaattgctggaaatagacagtgggtatgaagatacataaaagataagacaactcagaaaatcattctcataagccacatatgaggtctagtttaggtctacttcatacattataatcctgggacaggattgaaggagctcaaggagctatggctaccaacagtatgcctccctcatatctcaagaaggctggtagaaacttaccttggctcaaaactcacacacaggccattcttccacattccattgaccaaagtaaaccacttagccaagaccaacaccagtaggtggtgagccatgccaagaaaaaggaaaggagaacaaatcatgagcaaataattcaccctatcactgtcacagggacaacagcagttttagtgaaatgctaaaggcaaaaataagatttaagtgtgttttagaaagaatgggaagagagggaattggaaagatkgagaagaaaatgttttcaatgactttttctcaaagataacaaagaatgtcggcaggtaaaaaaggaggaatttattttgtttggaggaatgtctttttattttataaaatgtatattagctgct

SEQ ID NO: 836774 - DNA, 626 bp, Homo sapiens
agttgtggtcaagatactaaaagtgacacttgtaaagtgtcaatcagttggtggtttargcaacaatagtctctgtctgtatcgtctccccttaaattttgtttgaaaatattttatttcataaccttttactttaaaatgtaaacaattgagagtttaattttgaagatgggggaacctaaaaaattgtaatacaatgataaaagctctacaaatctttatatcttcatcaaaaattgttgacattgaaattaaggttgaataagcaggatggaaaatagtttcatattttgttggaagaggtgatatatgaaaaagagtttaagacatatgaattttttttcagcattcctatttgtacagaagaaaaagatttttttttctgaataactcttatttaaaatgaaaacaccattatgttggctaacaacagccaaagttctagtttttgaggccatatctttattcctaagtaaatgatgagaattaaaattaattttttcacttgaggccacttatatcagttttgcaaatatttgcttttttacttgtttttgtcagtagtttattatatggttctaagatctaacaaatatctttgctctcatctgtgtgacaagcctgag

SEQ ID NO: 836775 - DNA, 479 bp, Homo sapiens
aacctgtgctcctgtgatacccaggaatctagcccaagagcactttttctcatagcagaagggaaaagagaaaaatctggaagcccagaagtgaataaaaatcatttatatgaatagttttcccaaggaaatatataaactgtgctcgaattacaagctcatattttcaagaaaatcgcgtgtatttcaatctttatctttcataaaagaaaaatgacatgttttaaaattgagaggtagagagaggtaattaaaagtcacagttgaatattaaagatacaagaaaaaatttgaatatccctacctcgggattactggaaaggtcactgtgataaatttagaataacagaacaagaaattataaaaattattttgggtcaattycctgcctttaagcaataattaaactattgtataaagagaattatctattatggtcttaaaattttcaagagaaaattatcaatattcattaacaa

SEQ ID NO: 836776 - DNA, 578 bp, Homo sapiens
tatcaacccattctccaatgcaacaaaagcccataaagggggtaggggggagagagagacagaaagagagagagagactttgattagtgaaagaatcttatatctcatccctgctgatcttccccctgcagccttaaaatattagaggtttacagggctcttcgcaaaacttggtcataggaaagtgactcttcaggttcctatgcctgataacagatatgatatttttatctgatgtttaaggcccttctgtgtcaaagagaagtagatggcaactctctataagcaatactgttgcagcagttaaaattgaggcaaacagatatgaaatagtagatttttttccaagtagaggaaaatagggatgagctgacatgtttgcacaagaaatcatggactgaatttccaagagttcaggtctcaattctttgcagaggttattagagtccagcatcttctttaaagttactgatacatacaacaagcatcactgcttcctatctcaatcccagggcatcttcccattagccttccttyattcaaacagaagatactccttattggaaacgtaacccgtt

SEQ ID NO: 836777 - DNA, 592 bp, Homo sapiens
tgtcatgaatgatataaactgaggtccatttagagcctttaactaattggttaatgactacccttaatattttattcaggataaaacttcttcctccaaacaaatgatgtagatatccaggatctcagagttttcagccaaatacttgggcaaattcaaaaatttttttagagaaaaaaattctacccacagacacccttgcagaccttcctccaaatgagaattgaatggccctctgttgagatcagagtatgagtcagatttctgaaatttcaaatgagaaatgttagtctttctgtctgcacaccacacatataaagcatatggatgtcaccttaactgacgacacagaatatctgcactacagctctcctgagaggatccagccaagaatctactacagcccagcatttgcaaagagctcatttgacctatctcattttagagagtcaacctaaagaacataatagctgctcactcctctaggttcttctaattccatcattgcattagatcagcttgtgagataataaacttcatyggtcttattatcttgacttttttatcctacctctcctcaaaattcttagac

SEQ ID NO: 836778 - DNA, 588 bp, Homo sapiens
tgagcttccattttgtaacccacgatcctggtgaagacaatcgttagggaaaaaacatcttaaggattgtgtgttagggcaacctcatttctggcgtgaaaacaagccccgcaaacaccctgttgttactctggtgttctgactgcaaacacggggggatgtaagatttttacctaatcccaaacctcggccctgaagagttaatgatgttactcatgccactggggcacaaaagaaagacttgcatgttcgggtggttatggcttgcccagagcggtggaatgagccataaggctgaaggccaagggactcgggccacccatgcagtgaaataatcccccagaaatgcggtgccgggagtggaaatgaaagtaaagagaacagtcattccagggcattggctaaacctgactaaacctgactgatcatcaagcctaaagttctctcgactcccaaaactgcaaatctcagattttgggaggtactgcgtagaaaccaggaaatgacagaaatcaagcagttggaacmctgttcttgtccaactctgggtcttaagctctgttctcattttcagttccaaaagcaatg

SEQ ID NO: 836779 - DNA, 621 bp, Homo sapiens
tttctcttcagtatagctaaatgtcatcctttgttgtttgagaactgcttagaagtggcacgacctgactttaaagacatacttttaatctctcagctatactagttatagctaaaggcttttttcttttctawgagaactctcctattccgcagacaaaatcatacatggaagctcagtatcaagcaagtgacgtggatggggtgagggagcggtgcaggacccagtgtctgtgaagcccccacggtggttcccatgtctgcctctctttccccgcacctgtcacggtgcagaagcaggctgcagtgtcataagcatctccaggtctctgcgcttgtttccttatctctgaggtggtgctgttttgcctttttattattatcatagattattgccatccaggaattctggattttttttttaaattttagagacacaggcaatatcaaccaacataaaagatttttcatcttaaaagctgaaaaagcacccactaatttatatacacaaatggttaagtgttggaagcagcataataggcaaatgaaatagcatttggaaaaccagtaacatgtagaagtcttggtcgtgaccattaagttatttgtacatggtacaaat

SEQ ID NO: 836780 - DNA, 615 bp, Homo sapiens
gcaaaggaagaatacatcacctgaccaaagataaaactgatgaatgactggatcaacgagtggtcaggactaaaagacaccacacaggtacaatgagtgagcaagtcaatgacgctaaaggaggttgttytgtgtaggtctttatcaagtcggataatcttaagatattattgtctaacagtgaggtcagccggtatttatcttttaacagtatacacttttctttgcattcctctaaaactggccagactgcgttgcctaattattgctacaaaatacgtgaggcttttcgaatcttgtatttccacaggcatgattctgctgtatcaaaattatttttgacaactaaactctaattcatatttgatttttttctttccctctatcaaatctgtcacaaaattcagaatattttcccttcaaagacttttcatgtcagacttatggtttaaaatgacatctaaatggcagtctctgggtaggcaggttcccttgattccccattacaatacaagtctcaaaaatctatttggacacataaagagaatgagaggacaagccacagactgggagaaaatatttgcaaaacacatatctgataaaggactggtatcc

SEQ ID NO: 836781 - DNA, 607 bp, Homo sapiens
ccaaggactatttagagagatcatatgtattattttattacaagcacatttattattttattacaagcaggcctttctaatggcagtatcacaggtctgctatgttaactcatttctgtacacccactcactaagaaagacttgtaaatggaagtaacaaaagaaaaacttaccacatctagcaaattcatagctgtttgaagaaggtagcattgggctgcccctctcaggagaatctgatgtgtgatcatagtgcaatgaataacatccctgacatcgaaacacaaaaaatgcagttccgtattcccaaagacaattctgataatttgtgattatcaacaagttgatttataacaactacacttcctaatgcagaaagtctgcagaatttcaaagctgttatttcccattatggcctctattaagagctcaattttactatgaaacaagtctcttttaaaaataagactataggccgggcgcagtggctcacrcctgtaatcccacaactttgagagattgaggcgtgtaggtcacctgaggtcaggagtttgagaccagcctggccaacatggtgcaatcccgtctctactaaaaatacaaaaat

SEQ ID NO: 836782 - DNA, 607 bp, Homo sapiens
ccaaggactatttagagagatcatatgtattattttattacaagcacatttattattttattacaagcaggcctttctaatggcagtatcacaggtctgctatgttaactcatttctgtacacccactcactaagaaagacttgtaaatggaagtaacaaaagaaaaacttaccacatctagcaaattcatagctgtttgaagaaggtagcattgggctgcccctctcaggagaatctgatgtgtgatcatagtgcaatgaataacatccctgacatcgaaacacaaaaaatgcagttccgtattcccaaagacaattctgataatttgtgattatcaacaagttgatttataacaactacacttcctaatgcagaaagtctgcagaatttcaaagctgttatttcccattatggcctctattaagagctcaattttactatgaaacaagtctcttttaaaaataagactataggccgggcgcagtggctcacgcctstaatcccacaactttgagagattgaggcgtgtaggtcacctgaggtcaggagtttgagaccagcctggccaacatggtgcaatcccgtctctactaaaaatacaaaaat

SEQ ID NO: 836783 - DNA, 604 bp, Homo sapiens
acttttgtcaagagataactgctttatacaacatccttcattttagaaaagttactccagcacttttaaaattattttagatattttattatattgttttcagaaatagtctttccatagaaaatcccaatctaatatactgctgtttgtaagatacatcattattttatgtacttccaaggaaaaaaatgttaccaaactatgatactctggattctaagatgtgtctcaatttcagatatgctaaaacgtgaaaaaacgtgtatctcatgtttccatgaagtatcataatatgttggttaataaagctgattttgaaaacttaaagttactactacaaatgggaattgtgtctgaatccaactaaagttttttacttaatgctttgttaagtctcattctaaattatctcattctaaattatttcacattcttaaaaatacatatacatgtatacataaatatatagagattcagatttatttatatgtgggattgttttctttttccttcccaggtactaatttggtygaagcagataaccaagcggagtggaccgacgttcagaagaagattatcccgtggaacagtcgtgtttccgact

SEQ ID NO: 836784 - DNA, 604 bp, Homo sapiens
acttttgtcaagagataactgctttatacaacatccttcattttagaaaagttactccagcacttttaaaattattttagatattttattatattgttttcagaaatagtctttccatagaaaatcccaatctaatatactgctgtttgtaagatacatcattattttatgtacttccaaggaaaaaaatgttaccaaactatgatactctggattctaagatgtgtctcaatttcagatatgctaaaacgtgaaaaaacgtgtatctcatgtttccatgaagtatcataatatgttggttaataaagctgattttgaaaacttaaagttactactacaaatgggaattgtgtctgaatccaactaaagttttttacttaatgctttgttaagtctcattctaaattatctcattctaaattatttcacattcttaaaaatacatatacatgtatacataaatatatagagattcagatttatttatatgtgggattgttttctttttccttcccaggtactaatttggtcgaagcagataaccaagcrgagtggaccgacgttcagaagaagattatcccgtggaacagtcgtgtttccgact

SEQ ID NO: 836785 - DNA, 599 bp, Homo sapiens
gcaaggtttcctggtctctcccctgcctgtttatgccacttcagtttttgctgctccctgtcacttagtgcacacatgagcatcctcctattttctggaatatggtatgccttcttctgctagaagacctttgatgtgctcttccttctgtctagaaagttctcgtgtcccttcatctttcctcttgagtcgtcacactcagcccaattgtcatttcttcagggaaacttcctcttactctctggatgagggcatgtcttcctagtgtagactccactagcaccatgtacttctcattcgtagccctcactataattgcatttttctatgtattctttgataatgcttttctcctgtactctaaattccatgagcacaggaaacactgtgtctgcagcacccaggtaattgcatggcatgtagcaggcacacaaatttcttttttgttcctgttgaaatagatatgtataataatgagccatgctctagggtgttctgctgtagttcatctyggttgtatttctctcataatttaatattaataaggcataatcatttagtgggtttttttgaagcatcatccttgaaggattttgtta

SEQ ID NO: 836786 - DNA, 611 bp, Homo sapiens
caacctagcaataagtttaagggatgtttttacattatggtggactttataggaaacaaatattattcttgtgtcacatgtttacatgtcaaatataactctattcaagttaacatggaggctgcctgccacacttgggctgcaaacatctgtgattacaggatgtcagcttttacgacgcactgcattctaatccgataacccagtacactgtttttccattattcaattccgcatatagctgagaataggacacagtatttctaaacctttttttttttaatctagacttctgtataggatatatctatacattacatattgaattgaagatattactgttaccctattaacccggataatacaaatagttgaactaattcaagttccaaagtaaaatttcatgacttggatgatccagttcagctgtcatgaaatagggatgaaaaacggcacattataaaattttagtaaagtattttgcttatactacaaaagggccagcatatggtattcctaataaagagatwagataggaagaacgagaggtatttccaaactctagaatgccacttagcaaagcatcactgtggtatattttagcgctccct

SEQ ID NO: 836787 - DNA, 635 bp, Homo sapiens
tggtctccaactattaatgatttgcatgcttatctgtaaaaccattcttgagtataaaaccccaatatatgtatatttatttataaatactatacatgtacaattatcctcatatataatatgcattayaaatatagaaaaaggttttttaaagagagagaaggatataataatccatgttttaaaaatagatattttatatattaatagatcacataacattttgggtttttttctgagatggagtctcgctgtgtcacccaggctagagtgcagtagcacaatctcagctcactacaacctccacctcctggttcaagcagttctcctgcctaggcctcccaagtagctgaaattacaagtgcccgccaccactctcaggtgatttttgaatttttggtagagatggactttcaccatgttggccaggctcgtctcaaactcccaaactcaagtgatccacctgtctcagcctcccaaagtgctgggattacaggcgtgagtcaccatgcctggctgatcacgtagcatttttgttctcccaaaaaacattagagtggttccaagttctggttttagtttatcctaattcaatatgagactttagtggtgagcatggataaacgagatgcttc

SEQ ID NO: 836788 - DNA, 621 bp, Homo sapiens
attcatccactatcatgaaaagtaattcttaaatgaggaaagagaaaatttcatgtttttattatgcagatgaactcccscctccaaacaacaatgagcccagcagaggtggacccaactccaccagaactgacacccactcaccaggcctcaccattttatttgtgtttgccttggctgccaacggcaggctacctggagtctgcaagctgcccagtggcttagggaatggttgagatacgcatgcatgtatacatacacatacacacatacacacacacacacacacacacccacgatccaaatataaaaattaagctgcagagtcaaaattaataatgcttaattgaatttcctcaaaatgatagtccattggtctcatgagtctctatgaaaatgtcagtgcatttgcagagaccttgtaggtagcttttcttactttgtaacatttcttaagtatgcagaaaaatcacaaatgcttatgaataaagagttagttaccaggaggtaactaattttgaaaacacgtgttgtagaaaaataatacatatttatctgattcatttgtgggaaattttaatataattaaaattggtatattttaatataattgctaggaag

SEQ ID NO: 836789 - DNA, 707 bp, Homo sapiens
tatttcaaggtccccaaaagcaggatcctgactgccatctgcttagtatacgctattggtcatattaatggcacttaagaaaagktttttatttttttctattataaaaactataaaataaaataataaaagaagaataattagagaaaaatgatccacaccccttccctacacacccaaaacaatgattgcatggaattctttgcagctccatagataaagagattttgatgaaagctccagaagatgtaaaatgaacatgacatgatatacaaaaatgcaactccaccctgagactcacatgtggattccccagggatctgagacacacacatcccttcaggctatttattaggttgctgcaaatgtaattgtggttttaccactgaaagtaattgtggtgccctctttttaatggtaaaactgcaattacttttgcaccaacctaatatatatgatatggctccacattatacagtaaggccctcaaggataagggctgggttgtttaatgcttaagtctccattaatacccacagcaccctgtggtgcatccagtgtgcagcaggaacccagcaaaccttgttgcctgccccacctttgtgcccacagtcttttgcaacattcatgctttacagatcggtctcggcaacatcttaacacacgatatcttcaaaagtcaaacgagacttctaggaatttctcat

SEQ ID NO: 836790 - DNA, 446 bp, Homo sapiens
cagaacatatctctgtcattaagcaaagcaaatgttatatattattggatatttgtacaataatatataatatgtattcttggatatatttatatattatttaatatattattggatttctatattattggatatttctatattgtcctgttcctgttgcctcctcagaatattttacattaattactgacttttctatgaaacagctcataacttgtagttgtgaatattattgttttaaagtagaaacatgtttgagaaatacttctgtgatattgtacaattagcaactttaaaaatctcttttcatttgatgctgatgcactaaaatattcatcttgatcaaaagttcactatattgaaatatctattgtgatatttaggggaagaatttaatctaatatcaccttaatcgytatacatgctttagcaacattttgtaaatc

SEQ ID NO: 836791 - DNA, 628 bp, Homo sapiens
tacttacattaacttatttaagactcagagtaatagtagaagttggttatatttatcaccccaatttatgaatgaataactgaggcatacagaggttwttacttctggatttctgtaaaatcactccattatttttcttgaaaatatttagatcactaaattttgagtacccccccatcttaatagtctctgaatgctgcttgcaaacagaaaagttatagtaacctttgcattgcctttattttatgttaaaatatgttttatagatgaagctgaaactgacagcagatggtggttggaaagaatccaatatttttcctttctccgtcatgtaatagtttttactatcctctcctcacttcacagattcatcccattaaaataaattttcaagaaatttaactaatgaagctatttttacagatatatacttggtatatgtttttaaatatataaaacaaacttaaggcccatgtttcaattgtagatcaaccatttctcttacgtattaccataatggtcacttgcctactattactcttgcctttaccatccttagtctttaaatgataatatgaaatatgaacagtgattattcatgttttcattctaaaggactctaaaagtt

SEQ ID NO: 836792 - DNA, 585 bp, Homo sapiens
ccccgtcactttcaggtacaccaatcagacrtacatttggtcttttcacatagtcccatatttcttggagacttcgttcatttctttttattcttttttctctaaacttcccttctcacttcatttcattcatttcatcttccatcacttataccctttctttcagttgatcacattggctcctgaggcttctgcattcttcatgtagttctcgagccttggctttcagctccatcagctcctttaagcacttctctacattggttattctagttatacatttgtctaattttttttcaaagtttttaacttctttgccattggtttgaatttcctcctgtagcttggagtagtttgatcgtctgaagccttcttctctcaactcgtcaaagtcattctccgtccagctttgttctgttgctggtgaggaactgtgttcctttggaggaggagaggcgctctgctttttagagtttccagtttttctgttctgttttttccccatctttgtgattttatctacttttggtttttgatgatggtgacatacaaatgggtttttggtgtggatgtcctttctgtttg

SEQ ID NO: 836793 - DNA, 326 bp, Homo sapiens
gcttctctgtaataagtttaattttatccatcctggcccaagtgcaaaggtgcacccttgccaaataatagctttatacaatgtgtcagacaggtaaactctagggaartaacagcgttggacagatcagcctggaatgagctatcagcaaagaggcctctttttcaaaattcaaaattaccaaactgaaaatgcaagtggatttcaattataggctgtagcttttagagaggtattgttctgttgtgggttttttttttttcctttccatttatatacaggaagcaatcactgtcagcatcatcaacatgaaatatgaatgacag

SEQ ID NO: 836794 - DNA, 624 bp, Homo sapiens
ttcatagacacccaaagggacattctatatcttggtgagtaaaattttagatggaaattatttattacagcacacttgcaggattgctatcctcactttactatttgtggtaggactatacttactgtggcacctgcaaagtggaattctggacagaaaattctaattgctgtattctgcttaattatcatctttatagcagggttaataattacaggaaagattcagctaaggttaacactaaagttactctggtcacccaataacgtattcctcccaatattatcgcaagttacaaaagatggcccagacctaaaattatctcctaacggcaagtcaagggggaatacatgttttactcaaagaaaaatgttgcttcttggccgggcgcggtggctcacgcctgtaatcccagcactttgggagcctgagacgggcggatcacgaggtcaggagacagagaccatcctgcttaacatggtgaaacccagtctctacgaaaaatacaaaaacaaaatcagcggggcgtggtgacrggagcttgttttcccagctacttgggaggctgaggcaggagaatggcatgaacccaggaggcagagcttgcagtgagccgagatcgcg

SEQ ID NO: 836795 - DNA, 624 bp, Homo sapiens
ttcatagacacccaaagggacattctatatcttggtgagtaaaattttagatggaaattatttattacagcacacttgcaggattgctatcctcactttactatttgtggtaggactatacttactgtggcacctgcaaagtggaattctggacagaaaattctaattgctgtattctgcttaattatcatctttatagcagggttaataattacaggaaagattcagctaaggttaacactaaagttactctggtcacccaataacgtattcctcccaatattatcgcaagttacaaaagatggcccagacctaaaattatctcctaacggcaagtcaagggggaatacatgttttactcaaagaaaaatgttgcttcttggccgggcgcggtggctcacgcctgtaatcccagcactttgggagcctgagacgggcggatcacgaggtcaggagacagagaccatcctgcttaacatggtgaaacccagtctctacgaaaaatacaaaaacaaaatcagcggggcgtggtgacaggmgcttgttttcccagctacttgggaggctgaggcaggagaatggcatgaacccaggaggcagagcttgcagtgagccgagatcgcg

SEQ ID NO: 836796 - DNA, 636 bp, Homo sapiens
tgttccttctcctggaggccttttagggcctgagagcctgcctgagaagtgccctgttgcttggtgaggatggcagtctctgaggacaggtgttgggscatgttgcacatgacacgcagtctagtagtgagccacttctctcattctgacacgttcttggagatttagccaaggacaaatattttgttttctaatgaaagcctatgaaagagggtttttgtaatcgatttgtttcatttcacaattagctttccaggaggatgtctttcattcacttgttcattcattcattcacccggcaaatatctccagagccccgacaacctgccaggtgtggtaggaaatgtataaataggccatgcaaggaacctgccttcaaggagctcactgtctaagcagtaattataattttgggtaaaaaggtcgggtggggcatgcaaaaggccgagtgctgagtggggagagattagaaaagactcttgcagggctgagtagaaaagctttcatcaagaaggtggtaccaaaataaggcagttagaaagcatagagggaaaaagacttcattctccaaagaaataaaagcataaaattatgaagagtcaactgaagaaggtattataaattgttctataaata

SEQ ID NO: 836797 - DNA, 638 bp, Homo sapiens
tctctgctgagagctattttgtagcttaataaaactcttatatgcccttctcacccttcaactgtcagtgtaatctcattcttcttggatgtgggacaagaacttgggacccactgaaggtragtatgaagaaagctgtaacactgtaaccctcccattctccatcagcagagggcagccaccccatgcagcaggaagcagtgtcagggtcaggccagccctggatccgcaggctggagcagggcagtggactaaaggagctgttagcatgctctaacacctgctctggggcttcagggttgtgggcatccccgtttgggtgccaccgcattcccctcatctggaggccagagtccaccacagcagtcggtcatgacatgcctggtccaaatgcaagccccacacaaagcctgctcctgtgctggcacttggagcagctagccggaccccacacttgcttgctcacacacccacttctgccatgggctgagtgcgctgtccttgtggccatgggatctgcgctggagtgcaagccaggcacagcctggtggtttgagtgagcaggggcatcaccagccatgaaggtctctggctggcaaagcggcactgaaaatatcctgcattagataggcatgtat

SEQ ID NO: 836798 - DNA, 583 bp, Homo sapiens
tgatagtggccatatgatatctatggccccataagatagtggagctgacaactagtgacatcatagacatagtaacctcaaagttgttggtactcagtaatccataccccaaaatatggtgctttgacatgctgaactgatggagcctcaaggtctcaatgacctctttaaccccctcaccttgtctcttaaagcacaggataaagttgttaaattcctttatccacctaatgtctggacccaccaaggaaaacagttgttttatttttcctctccctgtaagaccaaaaatataaccacacctgaacaggttctttcacaagatactgtacaagttaatctctgttccctgattcatttattttccctagtaattccctcaacagaattcctcttctctcccatctcccattacctgttttgtcaggattgtctataagcttctgaaccactttggggckggggggtggtaatctctctgtagttctcccagtgtacatgttaatatattttgtatgccttttctccaattaatctcgcctttgggagttattgtttcagcaaaccttcagagggcaaaggt

SEQ ID NO: 836799 - DNA, 516 bp, Homo sapiens
atacattccatgggttttgacaaatgtataatgacatgtatccaacattgttatatagaatagtttcagtgatcaaaaaaaaaccctctattctccacctccttcctccctaacctctgggaccaattatcaggggaaactcagccagatatcaggcaaaattcacccccgatatttcatgtaggttcttttctattttccctaagcatcggctggtttgagaaataaagggacagagtacaaaagagagaaattttaaagctgggcatccgggggagacatcacttgtcagtaggttccgtgatgccccctgagccgtgaaaccagcaagtttttattagtgattttcaaaaggggagggagtgtttgaatagggtgtgggtcacagagatcacgtggttcacaaggtaatagaatatcacaaggcaaatggcagggcgagatcacaggagcacaggaccggggcaaaattaaaattgttaatgargtttcgggcacgcattgtcattgataaca

SEQ ID NO: 836800 - DNA, 415 bp, Homo sapiens
tttgggttttacttttaaagtctttaatccatcctgagttaatttttgtatatggtgtaaggaaggggtccagtttcagttttctgcatatggctggccagtttwcccagcaccatttattaaatagggaattatttccccattgcttgtttttgtcaggtttgttgataatcagatggttgtagatgtttggtcttatttctgatgtctctatcctgttccatttgtctattttggtaccagtctgtctgttctggtactagtgccatgctgttttggttactgtagccttgtagtatagtttaaagtcagatagcctgatacctccaggcttgttctttctgcttaggattgtcttggctatgtaggctttttttgggttccatatgaattttaaagtagtttttttttctaa

SEQ ID NO: 836801 - DNA, 556 bp, Homo sapiens
acctacatattttagaatttgcttccctctgtgttttgttagasggtccgcatgtgaggttcttatgggagattttgaaggtggaaataaaaccacaatcattgtgttgctcacctatgttgttcctaagcttctggcttaactcatgggtgtgaggctgtagccatgcctgaaacttccccaaggatataatttggatatttggccctgcccaaatctcatgttgaaatagaatctccagtattggacgtggggcctggtgggaggtgtttgggtcacggaggcagattcctcaaggcctgagagatcctatcctgtccccaaaacagtaagtaagttctcaccatatctggctgttaaaaagtgtggcaccgtcccgcatccttgcccttgctcctgccaggtgagatgcctgatccccctttgcctgctgcatgattgtaggcttcctgagacctccccagaaacagatgcaggtgccatgcttcctgtacagcctacagaaccatgagccagttaaacctcttataaattacccagtctcaggtatttcttt

SEQ ID NO: 836802 - DNA, 522 bp, Homo sapiens
gtgtacacgccccctgtgatattgtttctaatatccaagaagaagatgatattactcccaatatcgcagggggtgtaaccccttttgtratattgttcctaatatgcaatgagaaagacgatgatattactgtcaatatcgcagggggtgtacagtccccttgtgatactgttcctaatatccacaggggaacaggatgacatcactcccaatatcgaagggggtgtacacctcccctgtgacgttgttactatttccagaagggaagagaatgatattacttccaacactgcagcggggtgtacacctcctccgtgatattgtttctaatactcaggaggaaagaagatgatattacgctcaatatcgcagggactctacaccccctcctgtcatgttgtctctaaaatccaggtggggagaggatcatatcactcccaatatcgcaggacgtgtacaccctcccgtgatattgttcctcataatcatcaggagagaggatgatattactctcagtgtcga

SEQ ID NO: 836803 - DNA, 522 bp, Homo sapiens
gtgtacacgccccctgtgatattgtttctaatatccaagaagaagatgatattactcccaatatcgcagggggtgtaaccccttttgtaatattgttcctaatatgcaatgagaaagacgatgatattaytgtcaatatcgcagggggtgtacagtccccttgtgatactgttcctaatatccacaggggaacaggatgacatcactcccaatatcgaagggggtgtacacctcccctgtgacgttgttactatttccagaagggaagagaatgatattacttccaacactgcagcggggtgtacacctcctccgtgatattgtttctaatactcaggaggaaagaagatgatattacgctcaatatcgcagggactctacaccccctcctgtcatgttgtctctaaaatccaggtggggagaggatcatatcactcccaatatcgcaggacgtgtacaccctcccgtgatattgttcctcataatcatcaggagagaggatgatattactctcagtgtcga

SEQ ID NO: 836804 - DNA, 647 bp, Homo sapiens
tagaatctaagctccatgaggcagtgacctttgtagtatttactgatgtagcctatatgcctggaacaatgcctggcatgtggtaaatactctataartaattgttaaataaatgagtggaagaaacattattgtgttaaaaatatagttccatataaaactttaagatcacacaatgtagtatttactgtaacatctcactcacctgtaacatttttaacttcatccatcatcacattcaaatcaatcttcccattatctttaagataaaaaagcatcaaaaagatttatggaaaaatgatataaggtccttaaattttgaaatagaaaatcaaaagtcaattattcaaaaacatttccctagaagtttatttttccaagtccaatgctcatgaatttaattaatatagctactactatttatcctataaacaaacaaaatctacatttcacaatgcaagagtaaagtttaaagcattcttctttccttcaggacaatcaatatattatagtaagttagtctattcaggggttggaaatttgagaattaaaaaattttgtttaaaaatggtatttccatttttgtcaacgctgactttacctttaggcttaggatgactctggcactaagttatccactaaaagat

SEQ ID NO: 836805 - DNA, 468 bp, Homo sapiens
ttaaactacatctttcctaatccagtacccatatattcaaaccaatttgtccaatttcattttccaacagttagtgggtagatttagtatgtgaatgaggacccgggaaaactttcatatgaaagcttcrtgtcagctctagaaatcaccacctcctggccagtgtattctcacttattaattatatattttatatataatgaattcattatcaagtgtgggtgaaaggaggggaactctatcatgtaattgctgtaaacttgtggtcagcaaaaacacagagaaaactgacacatgagttagtgtattctactttccaggtcagttttatgaattttaaaaatttgaactgcctgtcagtattttatttcaaaatgatctggattttggttataaatcagcaatatatattagtctaaatgtcatgaaatttgatgataggataacaacaaaagagctacacaagtt

SEQ ID NO: 836806 - DNA, 514 bp, Homo sapiens
tattatactgaccactttgaatacatcaatttgcaaagcaaacaaaccctgccctcatggagcctatattctggaaggggaagacaaacaataaaaataataaattaataaattatatattagaagataktaagtgctataggaaaaagtaaaacaggctaagactacccagggattaaagggttacaattttaaataggatggccatagtaggtgtcattgaaaaggtgacatgtgagaaatgatttgaagtagggaggaaattagctatgcagatatctgagggaagagtctgcaggtaagaagaagctgccagtgccaaggtcctaaggcagaagtttgaggaataggaggaaagcaatgtagctagaacatatgtgaacgaagggaaaagcagaaaatgtttccccacagaggtaaggaaacaaagtataagtagatcatatttggtcctgtgggccaggtgtttccaatgcatgggccacagactgatacgggtctgtggcctgttagg

SEQ ID NO: 836807 - DNA, 563 bp, Homo sapiens
aagttggttgttagaattagaggcttgcacagatcaaggttcaatttttttttgacaataatgatgtataaatggtgttgtatgtaaccgtcaggaggcacataatgtctgattctctctctttatgtggtaatagcaaccattgatgatcattgcctagatctgttatttcgatagtggtatacattagaattctaattgggttagaaaagtggaggctggaaagaatgattatgactagtctgtaccttttgagcaagcaaaccaatcaacatacatttttttaatgcaataaaaatcttctattttaatttttaaaaaaattttgtgtgcatgtagtgggtggatatatttatgggatatatgggatgttttgatacaggcgtgtagtgcgtaatgatcacatggatgatggggtatccatccccttaagcttttatcctttgtgttacaatccaattatactcatttagttattttaaaatgtacaatccaatctacattttgttaggtattttgtcttttgccmctttatagctttattgaaacttctattaaaggga

SEQ ID NO: 836808 - DNA, 659 bp, Homo sapiens
gattttgatcttctttaacatacgargaataattcattcgccaacacttttctctacagcacagtgccaaatcacagtagcaccaacacgtgggaaacagaacaggtgtaacactcaggatataactttaatacagcagaattaacatacaaataaaggtcatctccattcagagtagtcactttcagagactagtttcaagttgccatcccacaaaacaattttggaactcctcttttctaaccactttcttagctacctcataaatgacaaaagaagaaacagtttcacccctgcggtcactgcttatttatactaaaaatggccttcttcattttgatccttaattttatgtgtgagacttggttcagaaagacttgccaccttttccaaataccaaataccaaatccattctcaaaagatataatttgtcaccacagaatgtaggttaaaagaatgaggtgaaagacagtaaagaaatgtcaaatgcattattccaaaagtgtttgttgaacaatagtgatattattgaaataaggtaactttgaacacactgaccatctcttagagaaacacataagttctagaataataattttaaaactggtcatatttctactttggcacaactcatagacatgcctgatacctgacttct

SEQ ID NO: 836809 - DNA, 584 bp, Homo sapiens
agatctccagaacaaatgagtttaccgatttaatgcattttattttgggaagagggaaaaagataagagaactacattgtttgctcacattcccaggtagaacagtttcacctgggagccacgagtctctagatttcaggagaacctggctccagagaccaggcagggctttagggatagctggttcttaggtcatggtgattttatttgtaggactttgtacttacgagaaatccaaagagctaggcagaagagctgccttttctattctgaacccatggtagcactgtatccagatggttctggttatgaccacaagtcactccttccagttttgaaagtacaaccagctgtcagctccatcaaggtctgaggaactgccacccacctgtggccgtgtgctctagggatggtggccaagcctctggtgaaagggctacccacctgcacctgccagctttgcctctcaccatttccgccctgcatggctgaagcagaagtccccacagcctcctscccagctgccaggcttctcggcacctttcctagaggtcaggatcctacttggccagccctcgtgggca

SEQ ID NO: 836810 - DNA, 455 bp, Homo sapiens
ctgtccatttctggccatgagtaaagatgctgcctgtcaaacttcctgttcatacattagtttatttatagagtgtactctctatgtaaggtattgactgataatgttactttgacttcagatagcttgcagtttaatggaggaagaagacaaacatgcaaataactaggtcaatgaggcatcctttgtgttccattggaagctaggctgctttgtaaccttgttaatttctgtggttttggagtgcattcattagcaaatacaccccttgttcttatccattctctgcttttttctttatttggcatttgatgacattttttcatgtggggaaattgagtcaggtgaggtggaaagaraataaggacacgacactaaattctttgatgtttttccttaaaaaattgtttttcaagtgctccataaaggtttgtgaagttttaagagcataggac

SEQ ID NO: 836811 - DNA, 533 bp, Homo sapiens
ctgtctttattaaaaatacaaaattagctgggtgtggtggtgcatgtctgtaatctcagctactcgggaggctgaggcagaraatcacttgaacctgagagttctagtgagctgagatcatgccattgcactccagactgggcaacaagagcgaaactccatctcaaaaaaaaaaaaatcgagttcatccctctgtctctcactcttgccctcacttgcccttttaccttctgccatgggataatgaggtatgatggcgtttgccagatacctacaccttgatattgaaatttccagactccaggacagtaaatttattttcttgctaccataaccagtctgtaatattctattacagcagctcaaaatgcattaaaacaatcttcgtagcaattatgctgttagtgaaaaaaataaaaaagaaatgacttaaaaatccattatatcataatgggtaaataatcaagatatagtcatgtagaataatattatacaacagtgaaaatgaactgactctaccatgcaaattcaca

SEQ ID NO: 836812 - DNA, 533 bp, Homo sapiens
ctgtctttattaaaaatacaaaattagctgggtgtggtggtgcatgtctgtaatctcagctactcgggaggctgaggcagaaaatcacttgaacctgagagttctagtgagctgagatcaygccattgcactccagactgggcaacaagagcgaaactccatctcaaaaaaaaaaaaatcgagttcatccctctgtctctcactcttgccctcacttgcccttttaccttctgccatgggataatgaggtatgatggcgtttgccagatacctacaccttgatattgaaatttccagactccaggacagtaaatttattttcttgctaccataaccagtctgtaatattctattacagcagctcaaaatgcattaaaacaatcttcgtagcaattatgctgttagtgaaaaaaataaaaaagaaatgacttaaaaatccattatatcataatgggtaaataatcaagatatagtcatgtagaataatattatacaacagtgaaaatgaactgactctaccatgcaaattcaca

SEQ ID NO: 836813 - DNA, 529 bp, Homo sapiens
acaatagccattacaaaagttgtacttcactttaattttttaaaatgcaaaatgaaatacactgagtgacgtgatttttttscttattgaattgaggaaaatgttgcaaagtacaacttttcgagagacagtttaaaagtatatataaagtctttttcatagatttttaaaagactattttttgtaaaaattttgtgcaagaaaataatcagagatgggccaaaaattctgtgaaattacagtcttatttatcacaataaaaacttgaaaataaagttttcctgttataacaaaatatcacaatctgagtggctgaaaaatacaaattaattttctcacagttctctaggctagaagtctaagatgaaggtgtcagcaggcctgctttctactcaggcctttctcctcatctttcagatggctgctgtcttgcagtgttctcacatggttagccctgtgtgttgtctctgtcctaatctcttcttataagaatatcagtcatattggattcaagacgcaccctaacaat

SEQ ID NO: 836814 - DNA, 541 bp, Homo sapiens
catattggattcaagacgcaccctaacaatctcattttaacttaattatttctttaaaagtcctacccccaaatactgtcacattctatggtattaggggttagggcttcaacctaaaaattttggggagtatacccttcagttcataacattaagcaaatattaaatgatccaaaataaactgatataaaataatctaatataatatagttaataaaaaatagaagcttcttcaatgacattaaacaatgcacataatatgttgtgaaagaataaatttagaaaacataaatacatatttcaactttgttaaacaaaacctatataggaaaaaaagattaatattagtcatgtctaagtgacagatttgactgcccattcaaatggtagtattttgatctttttttcttatgtatakaccaggttatctaggatgaatattatttttataataagagtttttaatttactacatggagaagataacacatcaagaacaagcattaatatattaagagcaacatggtgaagtttattcatg

SEQ ID NO: 836815 - DNA, 490 bp, Homo sapiens
atacacagacaaaacagtaattatatcacacacaaaaaacagattaactatatatcatttatatataaagttggtttaattttaatgtccaagccctcagtagagggacttagcaaaattaattgcccaagtgatatatattgattatgtacctgtgtttttttctcctagtcattttgcacatgaatcaggttttgttgcagcctctgtggtttattttttttaagcacatataattaaaaaaatttttttattatactttaagttctgggatacatgtgcagaagatacaggtttgttacataggtgtacacatgccatggtggtttgcttcacccatcaacccgtcatctacattaggtatttctcctaatgctatccctcccctagcctcycacccaccaacaggccctggtgtgtgatgttcccctctctgcgtccatgtgttctcattgttcaactcccacttatgagtgagaacatgcgttgt

SEQ ID NO: 836816 - DNA, 265 bp, Homo sapiens
ctcaggactcagtttccaacgagagacaggtttatggtccatagataatgcctgttcattgggtaccaacatggtggaagtggcaaggcagctctccagggcttcttttataagggggttaatcccattyctgataactctgccctcatgtcctaattaattcccatctaataataccgtcacattggtgattaggtttcaacatgttaattttggataacataagcattcagaccataactggttccatagcaaatatgaataa

SEQ ID NO: 836817 - DNA, 631 bp, Homo sapiens
tcaaagacatcttggttttaattggtggttgcattagttatttattaccgcataacaaattatgccacaatttagcagctgaaggcaacgaatatttactatgtcagtttctgagggtcaggaatacaaatatttaactagctccctctgtttcaagatatcttatttcagttaggctttttgaaggatattgtgttaggccattcctgcagtgctatacatacctgagactgggtaatttataaataaaataggtttaattggttcagcgttctgcaggctgtatagaaagcatggcgctgggtatctgtggggcttctggtgaggcctcaggaagcttacagtcatggcagaaggcaaggcggtcctggcgtatcacacaatgagaatgggagcaagagtgagagagaaagagagagagagagagaggtctcagacttttaaacaaccatatcgcacatgatctgactgagcaagaactcacttatcaccaaggggatggtgcgacgccttcatgagaagtctgcctttatgattcaatcacctcccrccagtctccacctccaacactggggactgcaaacgttaaacctatatcacgtatgtagacaaaactaaaacctcagttggg

SEQ ID NO: 836818 - DNA, 608 bp, Homo sapiens
tattctacccggtgccaatttctcttgctctgtgctggaagaatgcccaggcagatcttctcaaaacagtaaactcaaacaacaaaaaaagaagaagacatagttttaaaagccgagtgctgtatactgcctctaacttatgataaatccccagtatattttgaatttttaaagagaaacctttacttgttttgcttctgtaaactttcctttgtgctaaaggactcaactttagaatttacaaacttaaataagagtctgaactaaagatgtatttagctcttggatatgctattaagtattacttgccataaaacaaatgtgccatacttctgcccccgaatcccgtaaaatatctacttttaggtattttatgacacagttaacagtgagcctaaaagtaagtttacgtacaaactaaaccaaaggtttttcataccaatgtctaaaaagtttagattccaaatgtagtctattttcaatacagtacaaactttttcaaagttggctcmaagaaagagatttctgtccctgtttgagggacatgagtgcccactgtggtcacctgcctctgccctgcaacttccagaaaggcctacagagctccc

SEQ ID NO: 836819 - DNA, 620 bp, Homo sapiens
caggtgacattttttgccttgtttctgatcttagttacaaaggctctagttttcatttttaagtataaattttcccgcakgttttttggtaaatattctttatcaagttgaggaagtttgccgctattcctagtttagttggttttttttaatcattaaagggtgttatattttatcaaatgattcttctgcatctactgatataatcatatgacttttcttctttaccctgttggtgtgatggattagattaatttatttttgaatgttgaatcagccttgcatacctggcataaatcccatttagtcatggtgtataattccttttatacatcgctggatttgatttactaatattttgttgagaatttttgcatctttgttcatgagatatattggtctgtagttttcttttcttgtaatatctttgtctggtgttggtgttaggataatgctggccccatagaatgagttagaaagtgtttcctctgcttttgtcttctggaagagattgtagaaagctgttacaatttcttttttaaatgtttggaataattcacagtaagcccatctagtctttgtgttttctgttttggacagttattaattattgattcaat

SEQ ID NO: 836820 - DNA, 621 bp, Homo sapiens
aaaaataaaatattaaaaagttaaaaaaaaaggctcaccacatgctggtggaaaaacccagatcaaggtgcaatctcatgaagcattcaaattccaaaaataaaaaggaaacaaaaatttccagagaccaatgaaataagtcacatagaaaatacagaatatcactgcagtattctgcaacattatagtaaactaaaaagctaagaatggtaccttccaaattatgagtaaagttatttctaatccagaattctatgctaagttatattatcggttgcctgtaaagaaagaatacaaacattttctggatttgcaaggattcaaaactttaacttcctatatcaggaagctattgagtaatatagttccagcaaaaagaaagtaaacagacaacagcaacaagaatggaaggcatgggattcaggaaatgaggatgtagaggtatatgaaaagctctaggctgatagcagggcaggaggtccttgagcataaatatgtatgtgtgtgtgcataaaatatatatgtatgtgtaccatatatatgtatatattcatgtagcaaagacrtcagcatgaggaagattaatgacatatagaaaactaaatagacaagcaaaggaat

SEQ ID NO: 836821 - DNA, 635 bp, Homo sapiens
taactcccattgatcttgtagccaaataaacccccatatgacatttttgcatayattttagttagaatattgtacttctataactgagttttatacccaaatgcattcttggtaaactgcatctcagtagtaaccttccattactctaatctgtacagatttttaaaaaattgtttatccatctgtgtttaactccttagtctcccacttagctgggtgtagtggcatatggacagacacatttcataaaacatgaagagataattcctcctttcttattcctgtattgtctctagctttctggtccaacaaatctacttataaatattgcattacttactgatgccattcaactcacagccatggacataatgaaaactcctagctcatttcccatgcatggttagttcacaggcaattatttgcagatgcaattctgcatgttggcttaattgacactttcccttgtttatcaagggtaatttctctgggaaattaacaacggtttacacctgcagctgctcaggcatgcagctagcaatccaactgtgactttataacccgatccttagactatctaagggttaaaaatcagcattacttaaggtcatgtgttcaggaatgtggcacttcag

SEQ ID NO: 836822 - DNA, 559 bp, Homo sapiens
cttttccaaatataaaggaaaaataaagtgaagatgaagtcattgatttggaaagaaacagagaatcctagtgtgactgtaaccccttgtttatgtatctgggctgtggctagaaggaagaacaagtggttttggcagaaggctgctagcaagacgctgtgtcttttaaaatcttcctgagatatctgggaagcaacaacaacaacaaacaacaacagcaaaagaaaagagggaagacagttaagggtgaaataattccactggtggcactgtgaggcgataaccaaggcaaagcactatcctgattgcaaacaaaacatggaaggatgagtattcctcaggatgaggaagctgaattctcatggcttttcctgcagaactcaagataaggcgctgttagtgatatcacatccacatccaccatraatgaagcctggattcggattacaaagctgaataaaccagatatcatctttggcataagtgtggctatttattggtatctaaaggatctgagtctgaaggaaagataaacctaagtatcaataagttgtgaaat

SEQ ID NO: 836823 - DNA, 575 bp, Homo sapiens
aaaaagcctgcatggttttgcccgctgggtgacccagagcttgccaagacatgatagtgtgtcctagacctgtctgggtatcacgctcttagggctgatgacacagtatcaaaaaatagcctttcccaagagagactttacaaactgctttagagccagccagagactaacacctggcttttacctctcttagacaaagctgctttgtcatcgtatccagcttcgttccgtgagactcctctcttaagaggtgtggacctttcttgcttggcaagcaatacactaagctctgattttctttcttttctttctttctttctttctctctccttccttccttccttccttccttccttccttccttcctccttccttccttccttcctttctttctttttttttttttttgagacagagtcttgctctgtcacccaggctggagtgcagtggtacaatcttaactcacctcaacctccacctcccaggttcaagtgattctcctgcctcagcctcctgagtagctgggattacaggtgtgcgccaccatgcaccaccrcgcccatccaatttttgta

SEQ ID NO: 836824 - DNA, 241 bp, Homo sapiens
gctgaatgaggaaacaagaggttcataaaaatccacagctactgtttgttccacagttcagcactttgccctctactcctcagccttgcaaatattacccagtgaagaaatctggtgggaatactgacggggtctgctggggcrggctagatgatcagtcccagcagggtgaagagacgcctgctgcccctagagggctgagtgcagggtggagggaaggatcctctgggtggtggctccc

SEQ ID NO: 836825 - DNA, 586 bp, Homo sapiens
gctttaggagccagaagtgtctttctcaaggacctgggaaccatctctttgacacgtaatcaacaagaaaggtgaagtccctactcccagtttctgtgagaggatgggagcctagcttccatggggccctgctagaaagacaagtttgtttttcctttggataaagccaattagctaacacagttggtcacctcaattaccatgtcgatttaggataaactatgtgtggcaaatgatggtgtcaagtcctcttacttgagactagctattttttactctgagaacaggaatgaaaaggcttggatctggttggctctataggaggggcagacttccttctgtctttgcaatctctcagcagattgcctgtgatgggcatcacattctggtttaatgcttattcaataataaaattgttttctttctcttctacctttgtggatagattttctgggttggagggagattttgtttttaattttatttcctcaagaagcacgaggaatcttggtggtaatggaatagttytggatcttaattgcggtggtgggttcacaaatctacatgtgataaaattgcacagaac

SEQ ID NO: 836826 - DNA, 582 bp, Homo sapiens
tctactaaaaatacaaaaattagccaggtatggtgggcacctgtaatcccagctgctcaggaggctgaggcagagaatcgcttgaacctgggaggtggaggctgcaatgagctgagatagtgccactgcactccagcctgggcaacaaagcaagactccatctcaaaaaaacaaaaacaaaaaaaccatttagaaatcctagagtttaaaagtacaacagactgggcatggtggctcacgtctgtaatcccagcactttgggaggctgaggcaggcggattacttgaagccaggagtttgagaccagcctggccaatatggtgaaaccctgtctctactaaaaatacaaaattagccgggtatggtggtgtgtgcctgtagttccagctactcaggaggctgaggcaggagaatcacttgaacccaggaggcggaggttgcaatgagccaagatcacaccattacactccagcctcrgcgacagagcgaaactcaaaaaaaaaaaaaaaaaaaaaagtacaacaaacaaaatgaaaaaatcactcaagggatccaacaagagatctgagctggcaaaataaa

SEQ ID NO: 836827 - DNA, 704 bp, Homo sapiens
acctcagtatttaccataataaatctgctcctatagttgaggcataccaccctcagaaacctatgtgtaaacaaaattgaacctggccagagaaaatgaacgtacttgtttaggaagrttgcattgcagaacaggaagaggtgctgcgcaatgattcttatggaatcattactgattggtcccataaggggatgtttagcttgaattgcacctctcagtttgcgtgtcatggccacactatgttcagctggtttgaacaaaatggtcagatggtagaaatggtaagaagtatgacaagagttcctattatctggaaacatggtggtagagtggcacctcaatctcaaatgatatggcccgctgtaggagctaaacataaggatttgtggaaactattaatggctcttaataagatccaaatttgggaaagaataaaaaaccatctaaaaggacactctacaaacttgtctttggatattgcaaaattaaaagaacaaatatttaaagcatcccaggcacacctgaccttaatgccaggaactggagtgcttgaaggagctgcagacagattaacagctagtaacccattaaaatggataaaaacacttggaagccctttgatttcaatgataattgtgttattaatctgtgttgtttgtctctgtatagtctgcaggtgtggatcctgacttctgtgagaagta

SEQ ID NO: 836828 - DNA, 638 bp, Homo sapiens
gtttggggaccagggagtccagggatcctgctctctccattccttcctcaccaactttctcctatccaatttgaatgacagcctgaacactgaatggccagtcaggagaaaggcatatacacamctcatccccccacatgcacatcagcaagtctatcagtcattctcattgggccaaatgtttggcatatcagaatttgtgatgtgagagggcaagaggattacagaatcttgctctcttgagcattagttctcaccctggtcctctctgtcataactagcaagttgcgttcaataaaattctagccaagctggtggtaactagattgaagatgctggtcacctgcaacccctttcctccacctgttcatgagtcagcatggctacctctcctcatgataaaagagctgggttgctgagttctggggatgcagagatttctcagtcttcctcctctccctccctaaccactttccccagcttcctccaaggtgaatcatcttctaagaacctgttcctccagccctgcaggagtactcagccccaggggctagctcagtttacccttcttcctctttccctaacaatatacctggcatcagactgcatctgaaacatgggtcaacacatgtgcatga

SEQ ID NO: 836829 - DNA, 537 bp, Homo sapiens
tctcacaaagattctctgaatttcttgaacttacaygtcaacttctttcgcaaaattggggaaattgttgtggattgtatcctcagatatgttttccaagttgcttactctctcttctctctcagacatgccagtgagtcacacgtatagtctctagagggtttgtctatttttaaattattcttttttatttgtttttgtctgactgagttgatttggaagactgatcttcaagctctgaaattcttccctcagcttggtctaatctgttattaagactttcagctgtattttgaaatttctatagtgaaattttcaattccagaagttgagtttggttcttacttaaaatggctctgttgtctttcgatacttggatcattttttgagttttcttggattgggttttaattttctcttgaatctcgttgagctttcttggccatccatattctgaattctatgtcagttgtttcagacatttcaatctggttaggatccattgctggagagatagtgcaatcctttagaggtaag

SEQ ID NO: 836830 - DNA, 577 bp, Homo sapiens
ttttgttgtctagtatacaaacagcctcattcagtgtagtggctacttttactatgattacatccattttacaataacttatttgtaagcattgaatgtagcctgttggcttcaagggaactttaggtataaatcagattcaacagtaataataattataataaataggctgacacatttagaaagaggaaatacagattacaggtgtgtctttctaggccatagataagagagcagaattatgcctggctggttttaggtgtagtaaaagaggtgagatctcctgtcttccattatgtagaatttaatgacggaaccgtgtagttcaggtaaagtctaaacgactgtgataatcactgtgaggaaagtaatttatttttacctggggccttttgtgatgcctccggcaccacaaagaccttcaaaggtgagctggtcattctgtgggcagaccttcctcygccttcaatccaagaatggaggaaagcattgtaaaaccagggaggcataaatacaggaagacatagttggcctatttgtaactttttcagacagcagggttctatactgtccttac

SEQ ID NO: 836831 - DNA, 491 bp, Homo sapiens
cctaggctccagtaatccttccatcttggccttctgagtagttggractatgtgccatgatgcctggctaatttctatgctttttgtagagatgggggtctcactatgttgcccaggctggtctcaaacttccagactcaagcaatccacccatcttggcctcccaaagtgctgggattacaggtgtgagccactgtgcctggcttaatttttttgtcgttgttgttaaaattgcttttgtggacttagttctaaattctttgccaagaccaatgtctagaaggttatttcctaggtggtgttctagtattcttatagtttgaggtcttacatttaaatattcaatccatcacgagttaagttttgtatatggtgataggtaggaggtctagtttctttcttttgcatatggatagccagctaccacaacaccatttattaaacagggagtcctttccttattgcttattattgttggctttgttgaaagt

SEQ ID NO: 836832 - DNA, 646 bp, Homo sapiens
ttatttgttcccttttcttcacaccctcactagcatgttgttttttaactttttaataacaggcattatgaatggtgtgaaatgatgtctcattgtggtttaaatttgcatttctcttacaattagtgatgatgagaattttttcatgtttgttgactgcttttatgtctttgtttgagaagtgtctgttaatgtcctttgcccattttaaatgaaattatttgggtttttttgctcgtttatataagttcctaatagtttatacatgtaaagcctttgttggatgcatagtttgtgaatattttcaccctttttgtatgttgtctgtttactctcttggtagcttatttcactgtgtagagctgtttagtttaattaggttccacttgtcaattttttttgttacaattacttttggggacttagtcaaaaattctttgccaaggttgatgtcaagaaggctatttcttataatttttatagagtttttatagttttttaaagttttttatagtcttacatttaaaatcttaattcaccttcagttaatttttgtacatggtgaaatataagggtccagtttcgttcttctgcattcagcaagkcagttatcccagcagcaattactgaatagggagtcatttcc

SEQ ID NO: 836833 - DNA, 576 bp, Homo sapiens
gggtatacaatgaaataaagatggcaaaaatagacactggggactactacagggaggatggagggaggggggcaagagttgataaactaactattggatactatgcaatatagccatgtaacaaacctgcacatattccacctgaatctaagataaaagttgaaattgttaaaaaaaaaaaaaagtttgagggatgggaaagtctgcagtatttgtatgtgaacaaagttaagttttatcagcttaaaatagtttattataactataagagttttaataagtcccatggtaacaataaagaaaaaaaatacagcagaaaagaaagagcaataaatctgtttagcagtatagaaaaccaccaaaacataaaaataagcaacaagagaggaagaaaggaacaaacaatttacaaaactacaagaaaataactaacaaaatggcagaaataagtcttgatttttcaataataagcttgaatttaaatacattaaattcttcaatttaaagayatggagtaggagatggatccccactctctatgatgtgcttttttcactttgcatgccggtaccaaaa

SEQ ID NO: 836834 - DNA, 621 bp, Homo sapiens
aaaaaatgttagtaagaaaaaattcaactatagtctattttaaacaaagcattaaataatagatctgtgtttaaaacaaaatacatgtgtgtgatagaaatacatgtgggttawgtatgcttgtagtgaaaaataggccacaatgtcttttcaagtgacttcaggcattgttttttaaaggcaaaatctaaattaatatattaatgaaaagcatgcatatcctctgcacttggaggttgtttcattatacatagagggctgttatagctctcttttaaagaaggattgcaagattaaccatatgcaacttaaaaatacatatgagtttatttttttaaatgatttagatattaatacaagttaacagtttatatgtcctagtctcatgacaatcttgaaatctaaacgtgttttttgagacttactcacccaacacactcctggatttgtggtcgtctgggagagtcttctgaggacaacattttttcatgaatagcaaacaaacctccaattatgatatgtcccggagaagtggcagccacaaagtcatcaggggtctggcaaggctgtgaagtagcaagaataatcacaaagcaggtaattagtataattaagaatgcc

SEQ ID NO: 836835 - DNA, 400 bp, Homo sapiens
tcccagctactctggaggttgaggcaggagaatggcatgaacccaggaggcagagcttgcagtgagcggagattgcaccactgcactccagcctgggcgacagagcaagactccatctcaaaaaaaaaaaaatcatcattaaatattttttaactttttcactatttattcattcattaaacattttccagtgttacaatattcaacccttggtacaagcaacaagaaaaattatttcagcatttcaaatatctttcataatgtgcgtgtgtcctggctcactggtggttacaataaacactaaataaaaacatcatctgatttycccagcttaactctttgtactcagcactaaattcaactgtttctttgctgctaaagatatacttgcattttcaac

SEQ ID NO: 836836 - DNA, 610 bp, Homo sapiens
cttttctttttttttgagatggagtcttgctctgtcacccaggtcggagtgcagtggcgtgatatggctcattgcaacctgcgtctccagtgttcaagtgattcttctgcctcagcttccygagtagctgggattacaggcgtgcgccgccacacctggctaatttttgtgtttttagtagagtcggggttttgtcatgttggccaggttggtcttgaactcctgacctcaggtgatctgcctacctcagccttccaaagtgttgggatgacaggtgtgagccaccgtgcccggccttgaatctatttttatttcatagtgaaatctatttttatttaaaaaaaatttttatttcactatgaaataaaaatagaaataaaaataaaataggtaaatttcatagtgaaataaaatagaaaatgcagacagaaaattatgcacaaaatttttattgattacagtgagaaactatatgtaacctaaatgactaatatcaaagaaatggttacataatttattgtacttttgtgtggctgaatattatttattaaaaggctcttttaatgatatagagaaatgttaattataaaaaaaggacacagaagcaaat

SEQ ID NO: 836837 - DNA, 641 bp, Homo sapiens
aagtcgaaggctgatttctctctctaatgctgcaagagaagatgacawgctgtaggttgtgatgaggcaatgtgatccaaagcagaatccttgcttttgttggagagcactggacatataaagacactgggcgtatttgtcaaaagaacagaaggtggaaggaaaggaagatgatctggcagtcaggtaacaccaatcccaagtctccactgaccgctcccgtctaaagagagcacagattatagtttgcccccatgagattgccattttgggttggaagatggtcgcaatttcatttttcacttaagcaaacgtccgttgccgtactgctaggtatgagatgagtaatcgtcagggacgcgtttaaattacaaaataatggtaaatgggagagaaagaatcttttctcggggttgaggccagatcctccagggctgggagacccaggagtgcgggccactgtgcaccctcgagcaaagcagtgtgtgacgagatgggatcttccctcaaatgctgagaagagccctcgccaatccctcggaaggttcccagaataaaaagcccggtccctgctgtgcaaagactgagcggtactccggtgtactttttccctgtcccaggcgtgcagagtccacgccgcg

SEQ ID NO: 836838 - DNA, 549 bp, Homo sapiens
attcaataaatccttttactttttccctgtttccacagagcaagaaatatcaaatcttaaagttaattataaatggaatgattaataatttttctctctagcttggattatatcaataataaataactcttttgaattattatatttaccacggtatcagatcaatagtacaatgtgtatttctcattttaccaacattattattattgttattattattattactattttgagacagggtctcactctgtcacccaagctggggcacagtggcacgatcacggctcatgtcagcctcgacctcctgggctcaggtgatcctctcacctcagcctcctgagtagctgggatgacaggcgtgcgcaaccacgccaggctaatattttttttttgaagagacagagtttccttatgctgcctaggctggtcttcaacttctgagctcaagcaatcaaccactttggcctcccaaagtgctgagattatgggcgtgagccaccgcgtgcagcctcaccarcattatttagctccctttgcctggaagggaaa

SEQ ID NO: 836839 - DNA, 509 bp, Homo sapiens
tcacatgggactcaaatgtcttcatattctttgcccattcagagaggtctatccacatcctcttccacagacctctttgtcaccatttttttttcatcacattgcttctaagtcccttrccatccagccaaatcattggccacagctcacaaatcagaatgtatttgtacttctgtgtatttctccttccatgtgaaatgaacaacaaagtgcactgttcaagttttgcttactgggagaatttcactccaccattgctccaaaaagagcctgtagtgctatagctgtccactttcagacagtgcccacatgttgtgtagaaccgtatgtaaggtgtttcttttttcctcagtcaattgatagtaaataactccccatgaagccagacaactgggctgggaaaaaataaatgtgccataaataggatccatgaacatttgagccactttctcatatacaggaataattcagagatattaatgtttctgttccaacctctgtaacaaagc

SEQ ID NO: 836840 - DNA, 650 bp, Homo sapiens
acatagaatctattttaaaaagcaacataaagttttattttaaaaacttcaggctgggcgtggtggctcacgcctgtaaccccagcattttgagaggccaaggcaggcagatcacgaggtcaggagtttgagaccagcctggccaatatggtgaaatcccgtctctactagaaatacaaaaattaaccaggcatggtggcttgcgagtgtagtcccagctacttgggaggctgaggcagaagaattgcttgaaccagggaggcggagggttcagtgagctgagattgtgccactgcactccagtctgggcaacagagtgagactctgtctcaaaacaaacaaacaaacaaacaaaaattcaataattacagcgtgttggatattacagcatttggaatgatataaatttacaatgaaaatgtttacaagtcaagttataaatttgcaggaagttatataacttttcaaaattcttttgtagttagggaagcatagattttggagatcattggcccagtttacaaaggattattgcctcatactctctgtctaaagttratttactgaagctagtctcaactcgttcctcccccatttgtctattctttccaaatttattcagaatcaatagtgatcaattagttactaat

SEQ ID NO: 836841 - DNA, 628 bp, Homo sapiens
aaaaacaatagaaaaaatgacaacaaaaccagcaaatgtttttgaaagatgagaatatctgtgtcaattatcaaaagrcactgtggatcttaatgttctctttccacagcccatcaacaaattgtacccttccaactccactggtctaggtcttcggtatcctgtaaatcagctgtctccaacctttttggcaccaaggacctgtttcatggaagacaatttttccacacacttggtgggggggcggttagcggggaatggatgaaactgttccacctcagattatctaacattagattctcataagaggcacacaacctagatcccttgcatgtgcagttcccaatagggtttgtactcctatgaaatccaatgctgcagctgacctgacaggagatggagctcaggtgctaatgctcactagctgctgctcacctcctgctgtgtaccccagttcctaacaggcgacgaacaggtactggtccacagcctcagaattggggaccctgctataaagtaaggtccaaattcaatttctcaatttttaccaaaaatctgagcaaaaccttgatcatctcctacagccatttagataccagtgctttcttagctaacagctctttttcac

SEQ ID NO: 836842 - DNA, 475 bp, Homo sapiens
tcaaagccagatgacatgtctctgctatgccacatattctaacctgggagccaagcagagcaagaacccccctttcacagatctaccctgcaaacatttgggggcagtgttcatgccttttggaacgttgcctgttttgccactcccagcttctctcctttccctgacctattgaaccagcaagacccaaacttgtcatggcctctgagggcccacaggactggccctgcccacctcgtcaactgcaggtcactcacctctccttcagactccccttgcttcagcctcctttctgttgggtgaggctgcccagctctctccagcctccagaccttggcctytgctgttccctgctgtcccccgagcgcaatgtctggagggcttcaggatgccccggcagatctctgaacctcacagagggctctctggaaaataagggccctggctctacctaggagcccccagatttcatgaa

SEQ ID NO: 836843 - DNA, 621 bp, Homo sapiens
ctaatctccaatctcatgactttaaatagcatctgtaccccgataattgtcaaatttacatayccccagcccagatatctcttctgaactatatataatctcacatatccaattgtttttgcacagtgtccgtgtgggcctaataggaatctccagtgtaatgtcttaatctgaactccttgttccccaaacctattccacccacattcttgatcatatggaggctacttggaaggctgaagcacgagaatcacttgaatccaggaggctgaagttgcagtgagccaagatcacgccactgtactccagcctgggcaacagagcaaaactctgtctcaaaaaataaaacaaaacaaaacaaaaaaccaattagctctctggaagaaaaaaaaaatgccctgatttgtagtgtttgccagtctcagtggtgtaaatacttgcaggcctgtctcaagcttcctgtctgatgtctctgaatgtggaacaggaaagagacgggggtgggaggggaggggaggggggctggctctggcacaacacggcaaatacgacccacagctaataaatgcaggagccaggatgtgagcccggtgtgtggatcctgagcccacgctcataacc

SEQ ID NO: 836844 - DNA, 492 bp, Homo sapiens
tagtttgctgacctctggtttaaagaaaagtgtgactttaaaaaatctctaaaccagtacccccaggagttaagcagaataaatcattatgtacaaatagtctctacctatacaaacatttttgtataaactttggtttataagtacttttttagaccctccagtatggttttctcatggaagtcgtgttacagaagtggttaggcctgtcacaaaaccacattgtcaattggtagaactgtgcagggtattacagagcagtgatatcatctcacaacatgggctacacaggactttttgtttttgcttatgaaaattttgagacattaaaaagtaaagaaagcaatacactgaacattcatatacaaatcatacctatatgtacacatctccaaaaaatatgtacttttttccccrtaactaccatgccattttcgtattttataaatgttataatatgtggcctctactaccggatccataattatactt

SEQ ID NO: 836845 - DNA, 561 bp, Homo sapiens
aggagcccacagaccacacctggacccctggtttcttaagggctttcttcataaattatgtcatgttgcatgaatataagtgtaattactaagagaatgtgtaatggcaggcttgaaaaaaatgatctgttttaaatatgctgtagaactttcttttcaaggtactatgctttttctataggaatgtatcctgtcaggtataatgtcagtgaatggcaagaaagttcttcatatggatcgaaacccttactacggaggagagagtgcatctataacaccattggaagatgtaagtgttagtcaaatttcatacgcctctcacactttgtgagtatttcacttgtgaatctctaccttattccttagagatggtcttaattttgttttgttaaatggaatatctggagcactgtttttcaggagcttctggtttgaagctcatagaaatttacattttgacttttgttgctatgtggagcagttatctcttagcrttaacagagaatagtctaggaagggagggtagaggatcgtctgatgtgccagcgcaagtccagtgct

SEQ ID NO: 836846 - DNA, 465 bp, Homo sapiens
actgagttcttattaaaattataaaacaactggtacttatccacccatctcttgaactttgccacctctccacctttccttaccccattccttcattctgcctagaattttcttgcctgcaactcaagatttcaaaatcctttccattaatataaggagatgctgataaggtagtgatttggtcaaaatgcataaaagtgtttactaaaacaagtgatttctactgtacataaattatacctcaataaacctagccttaaaaatatatacagaagcatatgcgcttattcaaaaaaaaaaaaaacagaagaaggataagccagaaaatgattacctaacaggtcagaaagaatggaagtagaaaagtaagaatgmgaccaagactcgaaatataccttttaactttcaagctctgtaaatgttttatatatctgaaaaaatcagagaaaataaaactgccaaacg

SEQ ID NO: 836847 - DNA, 590 bp, Homo sapiens
aaagaaccaagaaaagctgcgctgggaccccagggaacagctctccctctaagcgtgtatcacaacccagcctcccagacctgcggcttcagcacagccaggcagcmtcacgtgccctgacctctgaccctgggacagaccacacacctcttgtgcctctcatatgaaaagcccctaataaaggatcacacagctctctcttatctcctcacctacaacccagataagcacagagctcacaagcaaaaaatgcaaatggctgaattaagttccacagacagcagacgtacataggtgatgggcagcttcttcatggtaaggacggtgtcaacagggatggcattgttgcactgtcccacgcagcagcgcaccacgcctgtttttaagacgttgcttgtcagctctgcttgcaagaagtactcctgagaaggaaagagcgagaaagagagtcatggcgacacctccgttagggtctactggaaacactgatagcggcggctctgtgagaaccctttagatgcactgtaagtcccagagagaaaaaccccgcctaacccgttctcccttacttcctctaacttttccctgcc

SEQ ID NO: 836848 - DNA, 575 bp, Homo sapiens
agcggggctcctgtgtgtggcagctctggggctgctgagcccaggggacgtgaaggcgctgctggagcctcctacctgtcgacctctccagactcagcctggcttcctctgccttgcccccgtgcccagtcctggcgaacttccttcagttcatcaaacagctgaatcccttcctgcctcaggaccttggctggtgctgttgcctctgcctagagccctcttcttaggattctctgcatggctggcaccttctccttcaggcttcaccatcagaggagctctctgtggaggggccacctcaaaccaccccatctgatgtaggggcttgcctctgttttcccggagaatttatgaagacatgtggttttaaagatttatctgtgtgtgaagcaggagcaagtttcataggccacatattcatgtgtgcaaaactgtaatcgattatattttgtaattcttagtttctgaaccctccctctgtcacagaaaacagagtcttcttcagataaactcagccaaatgwagggttacaggatcatttctggttatcgacctaggcagattttctcccattc

SEQ ID NO: 836849 - DNA, 589 bp, Homo sapiens
caatgtgaaggcacagcaggataaggttgacctgatgcaaagccaccacccagagccctttctgttctcctgtactaaggcgkatggcttagaacagccaggctgtgttctaaggcttctgttagggagacccttgaccctggaggatggagggaggtgggtggggctaagctaagcggcagccatgaaggtccctcttctgtcttcatgattttaggatttctgaggtagaggctgggttgatatctatgatgcaacctaggaaaacttaccatgcctccctgttaaaggcagaataatttaatataaagcaaaggcttacatgctcagcagatgcagaatgaaagaagtgattaaaacattgggtggagttattccaggaataacccactagggagtgagggggtagataggagaaatggagggggaatattggacttgagcaaagatgttttaaaaagatgaagaacattttagtcacccttaatgaatgggaagtagattatttgggagcagactgatttccttatgttaaggtgttttatttcaaaagtcagtactttgggatgttgcctcaaattatctgtat

SEQ ID NO: 836850 - DNA, 508 bp, Homo sapiens
ctaatattcgtgcaactcatagggttctttgaggcatacaagagctaatgaatataagggtatgatagacagtcagcaagtttttgtcattattacttttgmtactgtgcatgtaacatttaatgtggtatggtgatcagtactctttggtggtagttttattttgttttaagagacaaggtgtcactatgttgcccaggctagactcaatctcctggactcaagtgatcctccccatcagcttcccaggtacctgagattacaggggcctggcttctgtggttgcttaataagtccatgttgaatgaatgaagagaaccagttcagtaaattcagtcaggtgatgtctgtcattaggtgaaccatcatagtaggttaggtatagaaaaggctgatgagaaattctgtagatgtggctttttggaaccacctgtgaatatcttcctataattatgtaggaatctaccctgtaaatattttcctagaaataaatatgtagattttttcc

SEQ ID NO: 836851 - DNA, 623 bp, Homo sapiens
aaaaagtggaaagggctctacaaagcttttctaagaactaattgacaayatggtaaggctatggggggtagggcatgctatttgtccttactttttccatgtatatgaaaatccaattgaggcaaaatattttggccatgagcataatttcacagtatatttttcaagctaatgagacaaagcatatactacttaaattctaagtaccctgataccaaaagggtgttgaagaagaatatttttcatttacacagttagcaaaatggttctgaaccctttctatcaactagagtcattgggagcttttaaaattacagatgcattggcaatctcactgcttaaaaattctaatgtaattggtttggggtagagcccaggcatagacatgtctatttgtttgtttgttgcccctgtgttgattccaaagtgaagccagagttgagaaccattggatgaagaaaataatactcaacagcgttgaagatgcagtcaagttggagcacacagaaacactgagtaaaaattagtatcatctgtctaaaatgtaatttggcaatatcttatatgcccaaacaattgactctctttctaagaatatactctaaagaaacaggcaaagaatc

SEQ ID NO: 836852 - DNA, 669 bp, Homo sapiens
agaccaaatcctgcctactgtctgtttttgtaaataaagttttattggaacacagccataccaatttgtttatgtaatgtttaaggctgctttggggctacaacgacgtagttcagtagggaccctacagtctacagagccccaaatacttagtatctggccctttacagaaagtttgctgacctccgacctaccgtgaagatccctgagtttgggtcctgcttctgcagtgtctatctgtatgatcataggcaagttgtctagtttctctgtgccttagtttcctcatctgtaaaatgaggatgatactattatctgtcttgaaagggtgttaagagcagcaaatgaacatgtaaagatctcagcctagggcctggactaaacactcaaatagtagttgctattactactgaacaaccctgcacaaactaaatccataatgaagatgctaaactgagaggaatttataattaaaaaggaaaattaacagtgattaaaaacctgaccaactcaaatcaacagcggtgaggctcctccctatgtaccgtttctaaaaatttgcaggaattctatttatatgtggggcatgcccagtgggagctttcaaacattggcaagtattgcttggtamtaagccattttaggaaaatatagactaaatccttggta

SEQ ID NO: 836853 - DNA, 601 bp, Homo sapiens
ctgcataaacaaactaacaaacaagcaaagagaaaattaattttaaaaaacctatrctttaacttcgtccttctgctttttaactttttgttgtttcaatttgtattttattgtattgcctatgtcttgaaaagttgttgtaattctattttatcatttcatcttttagtctttttacttaagacatgagtagttcgcacaccacaattacagtgctagaatattctgtgttttattctgcacttactaataccagtgattctgtatcttcaggtgatttcctattgcttgttaacatcctttgctttctgacggaagaactccccttagcatttcttgtgggacaggtctggtgttgatggaatccctgaggtttttttttgtctgggaaagtctttatttctccttcatgatggaaaggtatttttgctggataaactattctagggtaacatagaacttttttttccttcagcacttaaaatatgtcatgctactctctcctggcctgtaaggtttccactgaaaagtctgctgccagacatattggaggtccattgtatgttatttgtttctcttctcttgctgcttttaggatcct

SEQ ID NO: 836854 - DNA, 601 bp, Homo sapiens
ctgcataaacaaactaacaaacaagcaaagagaaaattaattttaaaaaacctatactttaacttcgtccttctgctttttaactttttgttgtttcaatttrtattttattgtattgcctatgtcttgaaaagttgttgtaattctattttatcatttcatcttttagtctttttacttaagacatgagtagttcgcacaccacaattacagtgctagaatattctgtgttttattctgcacttactaataccagtgattctgtatcttcaggtgatttcctattgcttgttaacatcctttgctttctgacggaagaactccccttagcatttcttgtgggacaggtctggtgttgatggaatccctgaggtttttttttgtctgggaaagtctttatttctccttcatgatggaaaggtatttttgctggataaactattctagggtaacatagaacttttttttccttcagcacttaaaatatgtcatgctactctctcctggcctgtaaggtttccactgaaaagtctgctgccagacatattggaggtccattgtatgttatttgtttctcttctcttgctgcttttaggatcct

SEQ ID NO: 836855 - DNA, 601 bp, Homo sapiens
ctgcataaacaaactaacaaacaagcaaagagaaaattaattttaaaaaacctatactttaacttcgtccttctgctttttaactttttgttgtttcaatttgtrttttattgtattgcctatgtcttgaaaagttgttgtaattctattttatcatttcatcttttagtctttttacttaagacatgagtagttcgcacaccacaattacagtgctagaatattctgtgttttattctgcacttactaataccagtgattctgtatcttcaggtgatttcctattgcttgttaacatcctttgctttctgacggaagaactccccttagcatttcttgtgggacaggtctggtgttgatggaatccctgaggtttttttttgtctgggaaagtctttatttctccttcatgatggaaaggtatttttgctggataaactattctagggtaacatagaacttttttttccttcagcacttaaaatatgtcatgctactctctcctggcctgtaaggtttccactgaaaagtctgctgccagacatattggaggtccattgtatgttatttgtttctcttctcttgctgcttttaggatcct

SEQ ID NO: 836856 - DNA, 645 bp, Homo sapiens
agaaaagttatttaaggatttccttaaagtgatattgtgaccaaaaataaatcaattggttttttacagaaaagtaactaaaatacacttagtttatttataattaagatgactacaaatatattaaagtaacgtgctagtttatactttcttttcatttctcttttcagttagatttggctttaaaaaaatcataaaaatcaattttaataaccacaatttaaataaaggaaacattgaaactttttaagaacataccaggattgtggatacgatccaaaagcttcacagaacgtgcactaactacacccccaacgtgtacaaggaatccaggaggaaatgccgtcaaggtaaaaaatggaaattcctagtggaaagaataagggaaaaatacaacttatcgtgtgtagagtgtaaaaaatttgcttattaaaaagcttgccatagcaactgtattacatcccttgaaataaaaggccacccattacacatcacacatgctttgtaattaaaagtttaattaaatgtttagagtttcaaatccatttccccatatatacaatgttatacagaatccaaagacccatttcatcagttctcaatgaagaaaaaaaaagtgttccwtcaatttaagatatttgaaac

SEQ ID NO: 836857 - DNA, 598 bp, Homo sapiens
aaatgaacactgatacattgccattatctaattaatctacaggccttattcaaattttggcagtagtcccactaatttcctttttggggaaaaagtttttttcttttggtctaggatccaattcaggattatatgttgtgtttagatgtcatgtctctttagctgtctttaatctgtaatagttactccatctttctgtgtctttcataatcttgatgttttggagagtacagtattggtcagttattttgtagaatgcccctcaatttaggtttgtctgagcttgcctcacaattagaatatcacagaagtgctgtccttctcatagtatatcctctcagaaagtatatgacatctatttttcccattattagtgttaccacttttttggtttgtttttgttttttgagatggggtcttactgtgtcgcctgggctgcagtatagtgccccattcatagctcactgtracttcaaattcctgggctcaagggatcctcctgcttcagcctcctgagtcgctaggactacaggcacttgtcaacatgcctgactaatgtattttattttattttgatttctgttgagagtctcgctgt

SEQ ID NO: 836858 - DNA, 598 bp, Homo sapiens
aaatgaacactgatacattgccattatctaattaatctacaggccttattcaaattttggcagtagtcccactaatttcctttttggggaaaaagtttttttcttttggtctaggatccaattcaggattatatgttgtgtttagatgtcatgtctctttagctgtctttaatctgtaatagttactccatctttctgtgtctttcataatcttgatgttttggagagtacagtattggtcagttattttgtagaatgcccctcaatttaggtttgtctgagcttgcctcacaattagaatatcacagaagtgctgtccttctcatagtatatcctctcagaaagtatatgacatctatttttcccattattagtgttaccacttttttggtttgtttttgttttttgagatggggtcttactgtgtcgcctgggctgcagtatagtgccccattcatagctcactgtgacttcmaattcctgggctcaagggatcctcctgcttcagcctcctgagtcgctaggactacaggcacttgtcaacatgcctgactaatgtattttattttattttgatttctgttgagagtctcgctgt

SEQ ID NO: 836859 - DNA, 605 bp, Homo sapiens
aagaaagatggaaagccaccatgaaaaaaatttaattttgcagaaatggaaaaaactacaaaataataaatgataatatagaagctaggggttccaagctctggtaactcaaatatcctggccagactaaatcatcaattaaaacatctaaaattgtatatacactccactgatgctctataaatacttctaaattagtaatccatgaccccttttacctgttgtacttcctggtggaagaaatagtgaaaaaattttattcatactgtacctcagaataataattttcagaaggcaaattgctttattgtggaggtgattaaaaagaaaaaatagaagacaaattacttttccaattttaaatgtacatactcaaagttaggcaagaacaagaaaggaccctttcagtttatatatacaacatacgcaagtgatactcaagtttcactttgaaattgtgatataaaaactatgttgttccatccacagtggcaagatcaaaatgttctagctccaactcttcaaccttgtgcaagctactttagtgctctgtgmctataaaatgaagaggctctatctgggactttctagctttaaaatcctat

SEQ ID NO: 836860 - DNA, 628 bp, Homo sapiens
atttattttcggtttactcattcatttaaaaaaatcacaagtacctttatattcctccttttttacaaaaagatagcacagtatacatactattctgaagaagacagcatttagactgctcttaaataaagttccacatatcagatcttcacaaatcttaaggtactactcattaaaaaagttatttaataaaaataacatattatttttattcttaaaattcagatccacttagtataagattattatgttagcatagacctagtggaagaaattatattaaatttaactattgtaaggctagaaccctgctttttaagaagaaaaacactgctcactttaatgatgcatattcagcacttattatatgtgaggcatggttttaagcactttccaaatattaacttatttaatcctcataataataccgctaaataggcaccattattaaccccattttagaaatgtggaaactaaggcaagagatgttaagaaactgttaacgtttccagctactaagcaacagttaggatttgaactgaagatcctggcttcagtgtctggggtcttaattattcacccrgctgccattctccatagttaatttacattgtatcttttttttttt

SEQ ID NO: 836861 - DNA, 409 bp, Homo sapiens
  misc_feature 1, 2, 3, 4, 5, 6, 7, 8: n = A,T,C or G
nnnnnnnnagtcatacatttaataaatgttgagtgtctactatatatcaggcactttactagtgctgggggtatatctgcaaacaaagcaataaaaacaaacccaaaaatttttgccctcatgtagctcacattacattgaggaaacacaggcaaaaaataatgtacctaagtgtgttggaggccgaaagattgagggtagtgatcaactcagtataccactggaggctatatgagtaaacagcaaactgttctcataaacgcagaatgttggcaaactgacaaackgcgtctgcaccagaaggaatgctgagggcagtcacgccccaagcgcagtgtttcttgtgattaggtacatctgaagcctgttagtaataatatgaatctgtgatcaattaagcagctgacca

SEQ ID NO: 836862 - DNA, 648 bp, Homo sapiens
tgcagtgatgcattctagctccgtatatccttatactcttgagctcaagtgaccttcccaccttagcctcccaagtagctaggactggaggtacattccaccatgtcttgctmattcttattttttgtaaagacagggtctctataagttgcccaggctggtctagaactcttggcctcaagggattcccaccacttccagcctgtatataaagtctgtaaggcaaaggagctcaatactttacccccaaataacttagcaagtaggggtggatccagaattataaccccagagtctagcttcaagttgatgttcttataccctatattaaacaaaaacctacctgatgtatcttaaatataatgtttgcataaatagttctctcagacactattcagagtagcaaagacatggaatcaacttagatgtccatcaacagtggactagttaaagaaaatgtggtacatatacgccatggaatactatgcagccattaaaaagaatgaaataacatcctttgcagcataatagatgcagctggaggtcattatcataagcaaatgatggcaagaatgaaaaaccaaatactgcatgttctcacctataagtagaagctacatactgagtacacatgtatataaagatgga

SEQ ID NO: 836863 - DNA, 601 bp, Homo sapiens
aatgaaaaaccaaatactgcatgttctcacctataagtagaagctacatactgagtacacatgtatataaagatggaaacaatagacacgggggactactggaggtgggaggatgggagcggagtgagggttaagaactatctgttgagtactatactcactctctgggtgacaggttcattctcatgctaaacctaactgacatgcaatttacccatgtgacaaacctgcacatgtatcccctgaaactaaaataaaaattaaaaaaaaacaaaaacaaaaacaagaatgcacataaggatgaccttgagggctcatgtaaaaagcaataacaatacactcaaggacagatataagcaaaggacatcatttttaattttagcataaaagaaaggactcagtagaatttccataagactaaatacataaaaagaaagagaaatttagaatgaaacaaaataaaaatyagcatcttcatcttatccattatagattttctttaacaaattagaaataaagatttgggcattaaagtgacaaattcactttatttaccctctgaagaaaaggccatgttggttatatgaagcccacaaacata

SEQ ID NO: 836864 - DNA, 576 bp, Homo sapiens
aaaaacaaaatgacccactcggcgcggtggctcacgcccgtaatcccaccgctttgggaggccgaggcgggtgcatcacttgaggtcaggagtttcagaccagcctacccaacatggcggaaccccgtctctactaaaaatgcaaaaattagcccagcgtggtggcgcgtgcccttagtcccagctactcaggaggctgaggcaaggagaatggcttgaacccgggaggcggaggttgcagtgatctaagatagcgccaccgcactccagcctgggtgacagagtgagtatctgtctcaaaaaaaaaattatctgtagatctgtttctggcctctgttctactctttttgcctatttgtttatactgatgtccaaactacactatcttggttactgttgctttcctccaaattttggtatctggtatagaaagtacactccttwtgtttttctctgtggccattcttgactcatccctcatctcatagagaaagctgtatttttttttctgtaggtttcatttaggtatactctaccaaattcatgagcggatgatattaattaaatatcttttct

SEQ ID NO: 836865 - DNA, 279 bp, Homo sapiens
tggtgtatttttcatatgcctgcattgtttaataatttattttggaatttacatatgtagacataatgttactggcatttaattttttctcttaatgctcttacaagttttgataatgagttcacactagtctgacaaaatcaattgtgaactgaccgtacttstcctccttaggagaatttatgtacaatagatataatttcttttttaaacattcagttgaatttgctagaaaagatatctggacctagggtgcttgttctgggaaagtaatctgct

SEQ ID NO: 836866 - DNA, 604 bp, Homo sapiens
gcccagattgtagtgtagtgatgccatcatagattactgcagcctttacttcttggcctcaagcaatcctcccaactcagcctttcaagtagttgggacyacaggcacatgccccatgactgtttaattttttttatttgtagagtcagagactcactctgttgttcaggctagtcttccactcctggcttcaagtgatcctcttgcttttgcctaggaaagtgttgggattaaggtatgagccacagtgtctggacagatattggatattttctaactaattccctgtattagtctggcttcttcagagaaatgaaatgaagggttgagagagagagagagaaagaaagagagagagaaattataaggaataagattgtgtggatcatgtgattatggaagttgagaagccccatgatttgcagttaacacggttttcagacacagggaaacgtatggtatagtttcaacctgagtctgaagcaggaaagctgattgtgtatgtgtataaggcccagtctgagtctcaaactaaagacaggagaagactgaggtcctactaaaagacagtcacatagagagagagagagagaggcaatcttcc

SEQ ID NO: 836867 - DNA, 623 bp, Homo sapiens
tcctcttctacttaaaataatttttttcttaatatctccagtgtctccccttccatggtctgcaccacttcacaaaaagtcagaagcagcagccattgcaacatccatayacacatacaaactttgagtagttgtcaaagtaatgtgccatatatagtaccatatatatttgttaaccacttaacatgtgcaaaatagtagtactcctttatattttttatctttgcttgtcattaatgaagttttttttaatcctgtgcctctcacataatattttcctataagctttgtgattttatttgcacaagtttgcataaaaatttttcaggaatgcatatgtctgtaaccgaagaactgtctacacttacaacactctcattatgcaaactcatgggtcttttcagtttttgaaaataattgttagttttttatttaaataatagtcattttatgttgttttgttaattttcttcagagatgtctgttaaacatattcagaaaatgaaaattaaatgacttaaattaaatcacctttaaaatgcataggaacatcaaatacaaacagaagaaaataattaaaacaaccatcatatagtaagtaatattgacaattttttataatt

SEQ ID NO: 836868 - DNA, 560 bp, Homo sapiens
attgaatgtgaaaaccttaagagaagaaaacattatgaataatggactgttttctggcttgtrcagtatgaatagagaacacaggagaaagaaggagttgggagtatgacagcaagatgataaatttagttttgaacatgttgaatataaaggaactatggaacattcaagtactgcaggcagttgaatagaccggtttgtttgggatgaagacagtgttgggagttatcaatatatagatggtagccagagcaagaagaataaatcagattgatcatagaaagtgtgtgggtttaaaaggaaagggttaagattaaaatcccaaagaacagaaacatttaagggatggatgatattacaatttacaaaggaaactgagatagtcaagggcagataggtcaagtgctgacaaggacagaaacttctattagatttagtactgtgaagctcttaggtgatcttttaatgacagtttctgataaaaggtgagagaaaaaaatccagatgccagttcattgaagcaagagtgggaagagaatgtctggttgtatagtggacta

SEQ ID NO: 836869 - DNA, 512 bp, Homo sapiens
cagggggtgtttggagacgtaaagaattttttgttgatgtggagaaagcccacacatttgatgtcagaagtgaagtgttgggagagtatagaaaaatattgatttttcctcttttaataacagatttccaaartgtgttcaccattttacgcacttaccagaaatgagagttccacttatgccacaactttaccaatactaggtattgtcaaactttttaattgtagtcattctggtggtggtataatggtaccgcattatggttttaatttacttttaattgactactaatgatgttgagacctttttcatgtgcttactggctatttctatatctttgtttgagaagtggctgtgcaagtcttttggccattattcatatttgattgtcttcttaatgagttgtaaaatttcttaatatattttgaattctcagaatgtatatgcaaatgttttctttcaatcttactgattttttaaaaaatatcttcaaagagcaaaagtttttattt

SEQ ID NO: 836870 - DNA, 619 bp, Homo sapiens
cccatatcattacaaatacttaagtatacatatttttatgacaatatatggttttattccatctttctaaacacatagactttcacactttacttgtcccattaggtgtgcattcgtatttcattgttttcatgactctgatagaattatcataatgatcgtttttgatgtaacaattatttttatacgacctttgtgagctatttattgtatcacaaatttgtcctgggtcttctcccagttcctctagttggcattttcagtttcctgaccatgctgtcactatggatactctcaaagaaagaggaaaaaaccagaaaatccatttcatgtaggtcaattcctccaagtctgtactattgtccacccttttccaataactaaatcaatgagtaaaatttacctgcttctattcactctctagtgcccttcagaaatttctgttttgtggttgtttatagattttaaaatggtttactgtaacttactcttccataggasaagaggaactcgggctaccccttcattctgctttctttttgtctttttgagcaggatgctgagcctatcatacattttaaaattttgaatgctattataatggagctgtggaagcttt

SEQ ID NO: 836871 - DNA, 610 bp, Homo sapiens
tccaggattccgcagcctgggataacaagtcatgccaagctctctctgctatatcctgaaattcaaaaccstgtgggtcagcccctgagggccatccagcctccgtctcctgacactaagttcacttcatgtctgtcacgacaaagaggtaatgtagcgttccttggagatctgaagggatgcagtgaacttaaggcctttcaagagcttaccaatcatcagcccttgttcatcctgagcagatgtgcggtggtattgtggtgaacctttactggacactgtgccaagtaactggagtggctttttgctctagtccaatcggctctcccttccacccttgcatttcatcaaacagaggaaggaaaaatacaacaccataaagcaagaggagccccttatagctctttcaatgctgacgtatatttagatgcaattgtagtcccacaaagagtaccagataaatttaaatcccaagatcaaatagctgcaggatttgggtcaatattttggtgggtgacagttaataaaaatgtagattggataaattgcatctattacaaccaacagcagtttattacctacactaaagatgctgttaaagaatagctga

SEQ ID NO: 836872 - DNA, 610 bp, Homo sapiens
tccaggattccgcagcctgggataacaagtcatgccaagctctctctgctatatcctgaaattcaaaaccgtgtgggtcagcccctgagggccatccagcctccgtctcctgacactaagttcacttcatgtctgtcacgacaaagaggtaatgtagcgttccttggagatctgaagggatgcagtgaacttaaggcctttcaagagcttaccaatcatcagcccttgttcatcctgagcagatgtgcggtggtattgtggtgaacctttactggacactgtgccaagtaactggagtggctttttgctctagtccaatcggctctcccttccacccttgcatttcatcaaacagaggaaggaaaaatacaacaccataaagcaagaggagccccttatagctctttcaatgctgacgtatatttagatgcaattgtagtcccacaaagagtaccagataaatttaaatcccaagatcaaatagctgcaggatttgggtcratattttggtgggtgacagttaataaaaatgtagattggataaattgcatctattacaaccaacagcagtttattacctacactaaagatgctgttaaagaatagctga

SEQ ID NO: 836873 - DNA, 620 bp, Homo sapiens
aaagaatgaaatcacagtgatttgaaggtaagaacaaaaaatacgattcttagaaaatctcaaacaatatggattctaaataaattgaaactatacatttagcasaaactaaatataaggtcagcttaagtattgtatttctgtgtaaatattgtatttctataataagcaattagaaaatgaaattttaaactatttataacgtaaagcaccaagtaactgatactaacaaagatgtgcatattctataagcagaaaactacaaaacacagtgaacatgaattaaagtctacatagagaaacttctttgactggaagactcaatgtcaacagaacttcacttaatatgaaaagttctgcacctattgatcaaaacatttgatgcaactctaatgaaaataccagaaggtagtttgcctgtttgtttgtttatttattgtcattggcatactgactctaaaattcatatgtgggctcaaagggtcaagagtaactaaaataaccttatatgacaataacaaaatcaaagggtttatggtaccaaatgtcaagacttataatattggtagaatcattaaaaccactgagcattgattgagcattaggtaaacagacagata

SEQ ID NO: 836874 - DNA, 624 bp, Homo sapiens
ggcaagaaaagaacagggctggaatgagttgaaggaatcgtgtcctcacacttacctccaacaagaactcaggaaatatgtagggttagttggatgccactgcttatggactgacttatatgcactacacagtaaactgttacatcaaaaacttgtccaggggaagcctgaccgcttcctgtggacttctgaggaagttgatctagttgaagagctgaaagagtcataaccacctctgttttagccttaccttcccttgggaagccattccacctttttgtcaatgtgaacaatggagtagctttggaagtgattactcaagaataggggggtcatcaaccagcctgcggacttactttcaaatgtcttagacccagttacttgtggatggcctcagtattgcggttacaacagtattggtcaaagaaagtagaaagtttacctttcaaggaaaattgacagtaagcacgtttcaccaagttacaactatcttaaaccagaaagcagggagrtggctcacagacacaagaatcttaaaatataacgctatgtttttagaaaaagatgatttaacattaaccactgataatgagcttaaccaagcaggtttcataaagggggatc

SEQ ID NO: 836875 - DNA, 566 bp, Homo sapiens
ttactcatccaataacttattcatatatatkcatagcatgtgtgtatcatatatattcatatatacagcatttctaatgtttcaagcactgtgttggccctgaaaagcacaatagacgtgttttacatgtctagagctgactgtccaattcagtactagctgctattcatttgtggctgagtacttgaaatgtagccagtctgaatagagatgtgttgtgagtacaaaatatacaccagacagatttaggagactttgtaccccccaaaaaagcaaaacctctcagtaataattttcatattgatttcatgtttaaatgataatattttgcatacattcagttaaataaaatatgctattatacttaacttcacttgtttcttttcactttttaatgtggctgctagaaaatttaaagctatatatgtggctctcattacatttctattgcatagcactggcataaagaaaactgacgataaactagaaaataaaaaataaatataaaatttattttgtatagaaaaattattctgaatttgatgatcagaaagccagatagagta

SEQ ID NO: 836876 - DNA, 617 bp, Homo sapiens
tatctggaaaatatgcaagaaatagggtatcttaaatgatacccatttaatggtagttacttaaatgataactctgtggcttggagtctcaggctacaagtgagtgggctttggaaaatggaataggaagccaaatgtgctggctggggcagtaatagtgagttttttcctccttctcttcctccttcctttcttccttcttctctttcttttcttcctccttttcttctttctatgtgtgtgtgtgtgtgtggtgttttatttatttatttatttatttatttatttatttactttggttacatgaccttgcatgcattgaattggagatcacacgatctctgttcatgtaatgtcccttattttctgggatagggcaaatatttctgggacaggggaaatattaaaagcccacagccagggacctggatctttctgactcaagagtatccctgacaaggattcacaaaggtgaggtcttgctgtggttcatatcctttaaaattacctacaaatatctgaggaaaatctaraagagctactgggatggcatcttattaagtaatacctctgctttataaagacacatcatctaatcaatacaaataaggcatttg

SEQ ID NO: 836877 - DNA, 651 bp, Homo sapiens
ctgactttgtgctccacccacctcagcctcccaaagtgctgggattacaggcatgagccactgtgcccrgccaggttaatttttgtataagagtgtaaggaagaggtccagtttcaattttctgtatatagctataagcaccatttattaattggaaatcccttccccattgcttgttctgtcaggtttgtcaacgatcagatggttgtaggtgtgtggtcttatttctgagttctgtattctggtccactggtctacatatttgttttggtaccaataccatgctgtttgggttcctgtagccttgtagtatagtctgaagtcaggtagcatgatgcctccatctttgttctttttgcttagtatcatcttagctattcaggctcttttttggttccatgtgaattttaatatagtattttctaaatctgtgaagaatgtcaatggtagtttaatgggaatagcattgaatctataaattattttgggcagtatggccattttcacaatactgattcttcaaatacatgagcatggaatgtttttccatttgtttgtgtcctctctgatttttttgacctgtggtttgtagttctctttgaagaggtgcttcacttgccttgttagctttattcctaggtattttactgt

SEQ ID NO: 836878 - DNA, 527 bp, Homo sapiens
cttttagtttataattttaaatatattacgtctcctgcctcataagtaccactggacaaggtcccttttatgtactcagcttctgtcagaggtaaatgtattttgaagtggaggacaaagataattgcacaattggcatggagaactaaggtaattatgaaagttccagatacaaagagagagagctcaatatgccagcagttctctaccaatccatcctagaggtcttctcttgggattgcctaaataatgcaggggatggttgcaagatacacaagtgttccagaagcgtgtaaacaaggtacagagaaaaggatgagataaaataagatgatataagatattaggaaagccttgttcagaagattgcctacagaggcaaaagggacagtttcattttgctgagggaaacagggtggtaagaacacttgtgggaagacccccacttaccctgatacagasagaagctgtaaaataacttaatgggagagcattaggctgagatagttcccatggcctgggttcct

SEQ ID NO: 836879 - DNA, 531 bp, Homo sapiens
cgcctgcgcagcggctgcggctggatccggggtacagtttcggggcgcctgtgacaaggggccgcgggtgtccccgggcmaagcccccaggaatcccgtattcaggacctccttgagccaacttccgccgatggacggggagcttcagggcgcctgctgggttctcaggactcctcttcagatgccattttggaccactccgggtgagaaaggaggggctcaccacatttgctgaggcaggcagggcctggctgcagcagagaatgatcccatggccctcaaggcctgctgtcagtggaaaattcactgaatcgtgagccctctgcctccctcctcctttgaaacagcagtgaactggcccgcttctgaaagccctggggctcctgcaagccgataccgctttccaggacacgtgcagacagggacggggcgaatgccaggtggtgacaatgcggtcacgcctggcactggcatataccagagcagatggcgtgaatgtatgtcaccggaggcatatggggcaagggagaa

SEQ ID NO: 836880 - DNA, 669 bp, Homo sapiens
aaagtgtacatgcatcctctgcatgacccagaaattccattcctagatatttaaccagataaaggaaaatacgttcacaaaagcttggaagcaaatgtccaaagcagctttatctataagtgccaaagactgaaaaagttgccatcagtccagcaacaagagaataattaaccacacaacagtagtcagtaataaaaaggaaaggaaataattgtttatacacatctagcaagggggaatctcaaaaacatcattctgaattaaattatatacacacaaaataattttcatttatatgacttttagaatacggaaaacaaatttttggtgatagaactgagataagtgtttacttcaaaaatgggggaaaaggattgtcagaaggcataaataatgatggaattattttattccagattgtattagtacaggataaatagtgcatgtgtttgtgaaactgatgagacaatacccttaatttctatgtagttcactatatgtaagttctatttcaaattttaacaatatttcaggccaaatataagtgtttaagtaattgtttyggttgttaaactgtctctgaagtttgaaagattaacttgtgttttatacttcatttgtcttaagtgtgtatttttggcttttctatcatgatgtatttttaagaca

SEQ ID NO: 836881 - DNA, 638 bp, Homo sapiens
tccttcccagttagttcagcctatgcccaggaatgaacaaggaaagcttaaaggttagacacaagatggagtcaattargtctaatctctttcactgttataatctcaccagttataatttttgcaaatgtggtttcatgtcttcttgcataacttgttttagtagttattctacgtattataacatgtttgtaactgagcactgtttattaaaatgttgtcatttcacaagttctaacaaattgtggaagcattacatccctttacattcccttagcctctccattttataatataaatattataaatatataaaatatattaataactaccttaaatcattttttattcaaccaacaaaaatttagaaagctgaaaagaaaaagaaaaatcctacctcacctcacttaagcatatttttgtttactatgttttttcttctatcttgatattctgattcctttttttctttttttaatgttgaaataatttttagtcattatttttgaagaggtctgatgacaaaaaaaaaaaaaataaattactcgtggggccgggcacggtggctcatgcctgtcatcccagcactttgggaagccaaggcgggtggatcatgaggtcaggaattcgagaccagc

SEQ ID NO: 836882 - DNA, 657 bp, Homo sapiens
aatagcagagacatggaatcatcctaaatgcccatcagtgaaagactggataaataaaatgtggtacatatatacaacggaatactatgcagccatacaaaaagaacaagattatttcctttgcagggacatgaagctggaggccattatctttaccaaacagaggaacagaaaaccaaatattgcatgttctcacttataagtgggaactaaataatgagaacacatggacacacaggataacaacacacactggagcctgccggagagtggagcatgggaagaggaagagaatcagaagaaatatctaatgggtgctaggcttaatacctgggtaatgaaataatctgtacaataaatccccatgataaaagtttacctatgtaacaaacctacacatgtaccattgaacttaaaatgattttttaaaaaagaaagatagctgcagaccaatatctcaggaatggatatgcaaacatccttaaagaatattaacaaataggatttagcaacatatagaaagaattatatatcctwacaaagtgggttttttacaggaatacaaagctggtaaacattttacaaaattaatgcaatctacatattaacaagctaacaagaaaaaaataattacaccaatctacacagaaatgccat

SEQ ID NO: 836883 - DNA, 516 bp, Homo sapiens
tgtaaaatgaatatgttcactagttttaaaacaattgaayagatatgaggaaaccatgtgattccaaaatattaaagtcatataaaatggatattgttttctaggaaagtcatctgacaaaggacagattcctagtaataaaaaccattcgagaaattattgaaattctacagacaagcaatgattaggacatgaaatggaacagtagttgtaggaatgaaaagtaatagaatgtttaatattgtaatatgaaaatgtagcattttttttatttccagtgtatttaagcatttccaaatatacaaaactacagtgactctgagatgcctagaacaggaactgtgttgtcataagactatttattttaatatagaccatagaatttttaaacccaactcatcacagtgacagttctaaaatccccttgggcttcaaaactgttaaaaatgtttcccctgtcctgattctattccatgaatctatatattgcagtttctttttacagcctaattagag

SEQ ID NO: 836884 - DNA, 534 bp, Homo sapiens
aaaatgtttcccctgtcctgattctattccatgaatctatatattgcagtttctttttacagcctaattagagaagtaagatttacaaaggcccagaagtcaaatcaatgcaaagagaacactgtaatttgtttcactgggtcatatgagtgagtcgtgatcaagagtgaaaaaattacggttgaaactgtttccagtgatagattagcacccagaggatggagactttagataagacactatactaaagtaagcaagtaagcaggttattgaacagtatataattaaggttggggactacaggtattgacaaatgaagacatgagccaagtagtttcccagaaattacagattagggctcatgatatttatttctctccagataatattatgatgctcaatttgtaggaggcatgcaatgtgttgttgctgactataaaattaatgctcttmcctcttctaaaaaaattccaaaagcttcaatgaggtatgagagtcatattatttaaaagttccacattttcctaatagttt

SEQ ID NO: 836885 - DNA, 600 bp, Homo sapiens
tttaatgagctattcagttgaactgttatttattcaataaatcacttaatcaacaattcattattgaatgtctacaataccttcaagaagacaccagctgatataggccattaaataatttaggaaataaaaaattaagtatgctagattttaataagagctgtgataaatatggatgagctcttgcataagaacctgtagtcctgattgaatagaggatagcaagaatttttctatagaaatctatagaaaatgttgatatctccctctcacatctctcctttctctttttccacctctgtattattccattttcaaagtactataaagcactgcatgagactgggtaattcataaaggaaagagctctcattgactcacagttcagcatggctgagaggcctcaggaaacttacaatcatggcagaaggcaaagaggaagaaagtcatcttcttaataagacagcaggaaagagaagtgccaagtgaagtggggaagagccccttataaaaccataaaatctcattagaaattactcactrtcatgagaacagcatgagtgaaactgccccatgattcaattacctccacctgttctc

SEQ ID NO: 836886 - DNA, 587 bp, Homo sapiens
tatttattctcttgattgctgagtaataccccactgcatgaatacagcataatatgttcacccrtcttctcttcatggaaatttgctttcaaccccagtttttttttctattatgaataaagctgttatgagcctttttgtagatattctttcagtttttttgagcaagaaaaaatagatagtataattgcttggccataaggtaggtttattttcaatgtataaaaaaattgtccagagtttttcaaagtaattttatagtcaacttccttgaacattatatgagagttccagttgatccacatctttgttggtacttgttattctcaatctgttaaatggagtcattctcctggtgtgtatagctattttattttagtataaatgtgcattttttaaatgataaatgatgctgaggacaatttggatcaatcatttggatatcctcacttatgtagagagcctgttctcatgtaataattcctcaattctataactaagatttgcatacatttatcatatttaaaaaataatatgatatgtttacttgttaatcttagtttgtcagggatggtagtaaggctggc

SEQ ID NO: 836887 - DNA, 511 bp, Homo sapiens
agaaatatgggattatgtaaaatggccaaacctaagaataattggatttcctgaggaaaaagagaaagcraaaatttggaaaacttatctaagagaataatggatgaaacgtccctggccttgctagagatttagatacccacatacaagaagcagaaagaactcctgggagatttattgcaaaaagaacatcacaaagccctgtagtcatcaggctatctaaagtcaacatgaaggaaataattctaagagctgtggggcaaaagtatcaggtaatctataaaggacaaatctctcagactaacaccagacttctcagaagaaactttacaagccagaagggattatgtgtagcctccttaaacagtataactattagccaaaaattttcatccagcaaaattaactttcataaatgatagagaaatatacttagttttggacaaacaaatgctgagggactttgttactacaagaccagccctataagaaatactaaaaggagttctaa

SEQ ID NO: 836888 - DNA, 515 bp, Homo sapiens
cagtcactcctcagggatccttccaagggcatgattcctccagaatgtcctgcctgatctgcaagtgtcagacccggggttgaggacagggcccctgacagtgcctccagcaatgagcaggaacacagcctggtgtggagagttttagtcagtgattccaactcacacttacccacacaccacactccaaccccagcaatgtgtatatgtacacacacatacatgcatacatgacggttacccactttgatcctggtgactccatgggatatacagtaaggcagaaatcagagggaagagcagaattaaggggagtgaaaatcttaagaacaaaatgcaaatttaggcagaaaatcaagggggaagaggagtggtctggacaccaaatgccggctggatggcacctgctctacacacactgtcactaaytatccaagaagcctcgtggggtagaagaaattcctctcaatttacagatgacagaaatgtagttcagaaaactgactttactaatg

SEQ ID NO: 836889 - DNA, 578 bp, Homo sapiens
cccctatatttgtgaattcttcatccatggattcaaaaaagtgtggattaaaaatattttaaaagcacaattaaaaatracaataaaaattatacaataaaaataacacaaaaacaatttatattagcatttacattgtgttagctattgtaagtaatctagacatcatttaaagtatatgggaggctgtgagtaggttacatgtaaatactacaccattttatataagggacttaagcatttgtaggttttggtatttgagggagtcctggaaccaatcctttatgaatatcaagggacgactatactgaaatcttaacataaaatatcttgacttacataacttattttgttttcaaccacaggacattattccttaaattctctcttaaaggagaaaaacctttctttatctgagcctggccttcctgacagttcagacaacatcacttgtgggctgcttgtggctctactactcacaggatttcagttagagctacaagaccttagcaataagttagggtctgttgcatatttctgggtagacaaccaagacccagttatttataaattttaat

SEQ ID NO: 836890 - DNA, 578 bp, Homo sapiens
cccctatatttgtgaattcttcatccatggattcaaaaaagtgtggattaaaaatattttaaaagcacaattaaaaatgacaataaaaattatacaataaaaataacacaaaaacaatttatattagcatttacattgtgttagctattgtaagtaatctagacatcatttaaagtatatgggaggctgtgagtaggttacatgtaaatactacaccattttatataagggacttaagcatttgtaggttttggtatttgagggagtcctggaaccaatcctttatgaatatcaagggacgactatactgaaatcttaacataaaatatcttgacttacataacttattttgttttcaaccacaggacattattccttaaattctctcttaaaggagaaaaacctttctttatctgagcctggccttcctgacagttcagacaacatcacttgtggrctgcttgtggctctactactcacaggatttcagttagagctacaagaccttagcaataagttagggtctgttgcatatttctgggtagacaaccaagacccagttatttataaattttaat

SEQ ID NO: 836891 - DNA, 601 bp, Homo sapiens
ttttaaagatactatcaaactgcactctaaagaatttgaatcaatttagaccccagacaaaaagttacattcctaatacagtattttatcaacatttttgtagtagtcaatctgatatataaaaaaaaaaaattgagttttattttccatatatctcataatgaggaggctgagccacttttattatttgtttgaaagcaatttgcaactctatttctgtgaactgcctgtttgtcatttgttcatttttgttagcttttcatttgtcttctttatatgaaaggtattaaaattttatattaaaattatcttttcaaaacttatcatttgtcttcactgcatttttgtcatgcagttttatttttgaggcagggtctctttctgttgcccatgctggagtgcagtggcatgataatggctcactgcagccttgacctcccaggctcaatcaattgtcctacctcagcctcctgagcagctggcactacaggtgggtgccaccatgcctggctaatttttaaatttttttagaggtggggtatcgccatgtttcccargctgctctcaaactcctgggctaaaacaatctgcccacccctgc

SEQ ID NO: 836892 - DNA, 594 bp, Homo sapiens
ctgaattatgaattaatttgatatagcattgtttgatattttcatcgaattgcttgaaagggttatgtcttctttggttgaatcagaaacagggtaaagcccaatatttatttttaaagttacatcagtgcgattctgttttaggaaactttggaagttagtttgacaaatgatttttgatcaagtattagtttccaacctcacaaatgaaataactcttgctctgtacttgcaagccatatactacattagaaatagtcacattgtttttactctgtagtgggcataaagaagaatgtaacaacctttcctaaaataaaattttaaaaactgtttaatttgctgttcaatttaatgagatgtacctaagatgcctaactccaagttgttattattatcttttttataagataacctttttctcaattttttgctctttgcaagagctaagtacaatctgaataaacaatattaaataacaacagaaaaccattaactttttccatgagacatttcaggaatgcaagaaytcattttcgatcatttgccaacgtaaggctatctgatccttggaagctttctctgttaattgaa

SEQ ID NO: 836893 - DNA, 577 bp, Homo sapiens
caagtattggtggaggatgtggagaaagtagaactctcatatttgcaagtggacatgaaattgtaaagccactttggaaaacagtttgrcagttaataatggagttactaaatatttcagctaatttcactcatagctagagaactgaaaacatgtccacactaaaacttgtacatggaggatcacagcagtgttatttataatagcccagagtgaaagcaacctaaatgtccattgactgattaaacaatacctaaaatgtgatatatccacacaatagaatactactcagccataaaatggaattaagtacttatatgtgctacaacatggatgaaccttgaaaacatgccaagtgtaaaaaaaaaaacagacataaaggcctattgtatgttttcatttacatgaaaagtgtagattaggcaaatccacagatagtagtggttttcagggactgtggggaagaggagatggaaattgctgctaatgggtatgggtgttctttctggtatgatgaaaattctgggtttaggtagcagtgatggttgcacaactttgagaatatacttaaaaccac

SEQ ID NO: 836894 - DNA, 611 bp, Homo sapiens
gctttgtgactgcctgggctgaactcaccaggcttctaagaagtctcccagttaatcaacaaaccccagaattcrtaagtgtaaaacatgaggtgattgttccttcaggcaaaacatccagtgaatgagatccctgggcccaccccaccacttttatcctggaagaagcttcagtggggacagaggcaggggatgggtacagtaactctgtcagaggttctctctggtgtaagactggaaaggcaggggttaacccggctttgtcctggttgatggattctggaatcataatccattagctttgcctgcatggagagaggccaggcgaaagcattcagatttgtctttgttctgtgcttttgccatgcctgccaggcacagaggggctgtggacacgtaacccccaccccccacaccatgaccaagagacaatgaaatactcttgggggctatcttgattgctattgatcccaaagccctctcccatgggggaaataagcagtttcagctcttggttattcaggctatgaaacagatcatcctaaaaacatcactccaggggcttgtacctgcctaattctgctgggccctggcattttaaacaagactaa

SEQ ID NO: 836895 - DNA, 590 bp, Homo sapiens
tattgggggagaatatttgaacaaatgattttctccaaaagtgcaaaggtaatttaatagagaaaggatggttatttcaacagatggtattgaaacaattagatagtcatttgcaaaaatgaactaagactcgtactttggaacacataacaaaattaataaaaataaattatagacaatgttaaaacctaaaactataaaatttgtagaagaaaacataagacaaaatcattgtcactttgggttaggagaaaagttggcaacctacccatggccaatgggacaaatcttaccctctacctgtatttctattatgtatgaactaagaatctttttttagatctttaagtgattagtggaatggaaaaagtatactacttcattacatgaaaattatgtaaaattcaaattttaattattagaacatagccatactcattcatttaaatatatttttgtgattgctttcacacyacaactacagagatgattagttgaggcagacggtattagtctgttttcacactgctataaagaactacctaagactgggtaatttataaagaaaagaggtttaactgactcacatt

SEQ ID NO: 836896 - DNA, 614 bp, Homo sapiens
atatatttcatcaaagtgtgctaaaaatacattctataaatccttgaaatagatctatttactgtgctgctttaattcttttttaaccrtctgtcacttttgttttgtgagtttatttgtgtaaatataattattattttttaaacataagaaaaatttcagttgagtagcttatctctccacccttaccccttctagaattaatgtctacattgcaaaagaaatatctccttaagatgttttgtgaaactatgaattaaataaagaaagctatcaggaaatttatctccaccaaagttaatgagacataagtttatcgttgagattgttgtgcttatatttcatctttacttatttagctagaatttccagtttctacatacttacatttcaggtcaaacagaacctcaaaaatgtttttggcccaattcacactttgagaaatccaagctaattcccaattatagaatctcactctcctaaacttcttggcatttaatttctctagaataagcagataagcacaagttgagtgtaaacaatttattattgtactgggcctcattttgcttgccagaagatggagtggatgagaaatgtacccctttggaatg

SEQ ID NO: 836897 - DNA, 636 bp, Homo sapiens
ccatgctcttttattttttttatttttattttcttttaatatatctactgtctttttttwaattattatactttaagttttagggtacatgtgcacattgtgcaggttagttacatatgtatacatgtgccatgctggtgcgctgcacccactaactcatcatccagcattaggcatatctcccagtggtatccctcccccctccccccacccaacaacagtccccagagtgtgatgttccccttcctgtgtccatgtgatcccattgttcaattcccaccgataagtgagaatatcaaccattgtggaagtcagtgtggcgattcctcagggatctagaactagaaataccatttgacccagccatcccattactgggtatatacccaaaggactataaatcatgctgctataaagacacatgcacacgtatgtttattgtggcattattcacaatagcaaagacttggagccaacccaaatgtccaacaatggattaagaaaatgtggcacatatacaccatggaatactatgcagccataaaaaatgctgagttcaagtcctttgtagggacatggatgaaattggaaatcatcattctcagtaaactatcacaagaacaagaagttcttgtt

SEQ ID NO: 836898 - DNA, 512 bp, Homo sapiens
aaattaatttactagtaatttttaccttttaagtgtggcttctagaaaacatatacctgtgtggtttgcattacatttcaattgggcagcattgcttacagttatctccagcctctgtgtcaaatgtacaccgtactccagttacagcaaactttaggtcatcttgaacataccattgtgttttattttcattcctctgtgtttttgcactggccctcatatcttctgtttttcaagaagccctgctaattcttcattacctaactcaaaagctaatatcttaatgaaaactctgatttgttccaaggtagaaattttcagagctcctctgacccttatgcatttctataattcagcacctgtcacaactgtcactctttctacatgcttcttccctgtcgagatgttgaagataaggtattgtttwcattagcttttcattcacaggctttagcacacagcaaatgtttggtagacatttgttgaatgaattattaattattactttaaat

SEQ ID NO: 836899 - DNA, 460 bp, Homo sapiens
atgaaactgagcttaacttcatatgcacgatgctactgcagatctattattagatctattatttgtagaatatgtactttgaattacttttcccagatccatgtatgcatgctctgagctgcttcattctctttcctgcttctaatatgagtctaaaggacatattggcaaaagacctacattatgagtagcattatgataaggagaattttttttaattcaaagctaactggcccttgtgtagatctatggccttggctacatgagaacagtctctagccagcttagcatactgcttcaggctacaattatttatgtctttcttgcagaaaattcctcaatttccattttaaatgttctaaatttcataaggttattttaataggttttcygccttattcctcgcacagactttcaaccaggatagctaaaattatttaacctccacttttagcctcat

SEQ ID NO: 836900 - DNA, 642 bp, Homo sapiens
ctcatttgtcaatattgtagtcactagcatttaattcagtttagttcagtataaggacaaattgtaccataacaatttaatccccagctttaaacagactttttactcaggaccttagttctattcctttctgaatgaaatttccttactggttacatgtctataaaaaatgataataatattaaattataagaattcttattttggctcctattgtaccctatactgataaaagtagaaggatgattgggacttgattatttattactatgaaaaggctaattttgggattatgactttttatgaatggaggtgtaaagatatccagctttattatctttgcataacaatgtatgtgtgtatatctgtaagtatatgcatacatgtatgcaggaatgttaattgttgtattacacttctattgatgacgtaggggttctatatttaattttcttggggactcaaggtatccaaacggtaatttaaaaaatacagcaacagtctggggagccaaagagtaaatcatgcattctttaacacatgggaaggcccaagctgagwtgttagggtgcctcatgagggaaatgacttagagaattttcaggtggtgttgtaacaacacttttatagctatgtaggctc

SEQ ID NO: 836901 - DNA, 314 bp, Homo sapiens
atagtgcttagcaacatgtgagtattcgggaaaaggtcagtgtacaagggaagcatcatttgccatggttgaaaacaaaggttttggaattaaacaagatttcaatcctgtagccaaaatagcatgtcacacagcataggtactgaataagtatctgttgaatgaatgaataaattcataagtgaatgagaaatcctggccctgcccattattcctaggttgtctccaagcccttgaaattgcagctctctccacctaaaacaatcttccccagatatttgcctagttctrtcacttctctaggtctctgttca

SEQ ID NO: 836902 - DNA, 642 bp, Homo sapiens
aataacaaacaaaaacaaagccaacttttaaaattgacatctgaaaagtatcaatttctttttatcccacttccccatattcttttttttttaaccagtgccagcttaagggattcttatgatctcacattatcccacttgggatggttgaggctggaggtagctaccatgttaatgaccctatttggcactgatatcactgttttggatctctgccatgtttaccattacagataaggtttgttcagcttctaacaggacaatatctggcaaataatgggttagttatattacttcagaatttggaggtggttatacactacttcaaaggcattagtgtgctaaattcccatttccatgatctcttgtctttttatttagggacccaagatggctacagcagcttttaacaagacattcttagatgatgagagttctaaaccgtaaggctttaggggttttaaagaactttatttttacattttttttttttatcagaaagaaactatttccaagaaatctcaagcatgtttgttacaggacagtttggacttcagggttatcatgtaaaaaggcagacgtgccaatcccaatagtcttattcctggaccaagtctcawtcccttttattttgcttctttt

SEQ ID NO: 836903 - DNA, 337 bp, Homo sapiens
gtatacatgatatacatgatatatatatcataatatatgatatatcatggacatatcatgacacatatgatatatcataacatgatatatcatgtacacatcatggcatatgtgatatatcatgatatatgacacatacgtgatatatcatgatatatgacatatatgtgatatatcatgatatatgataatgtcatgatatgtgcatatgtacatgctctatattgcctatcatgatatatgatatataatgtatatatacacatatgatatatatcatgtatatcatgtayatatacatgatatacatgatatatcatatatcatgatatatatc

SEQ ID NO: 836904 - DNA, 505 bp, Homo sapiens
tctgtcaattttatttatcttttcaaagcaccaactatttgcttcattaatctttmatttttttcagttcaatttcatttacttttgctcggattactattaattcttttcttctactaatttgagttttgattttttcttgcttttctagttctttaaggttcattgttaagttgtttattggaaatttttctacttttttgatgtaggtgattattgccataaattttgcttttagcattgctttagctgtatcccacacgttttgttatgttttgtttccattgcatttatttcaattttttttcaatttattttttaatttctttattgtttcactggctgttcaggagcatattttctaatctccctgtgtttggatggtttccaaatgtcctcttgttactgattttagttttacttcatcgtagtctgggaggaatgatgtgatttatttatttcttcagtttgagttttttaagacttgtttcatggcctaacataa

SEQ ID NO: 836905 - DNA, 695 bp, Homo sapiens
attaatccaatcaattttttatgcatcaaatatttagtaaggacctttccatgccaggcattgtgccaggccatggaaagacagcagtggtcaagactcagatgagatccttgcattacactgtgacagaaggcagttatctgaggttctcctccctaaaataaagtgaaaaaaatgaccaaataatgtaacccaatattgtcaagatgaattctactgcaaagcctaacaaaggagtgccaacagcatgttatatagctgagctcttgttccataataatgtctccaattaattttctccaatagatgaattcaaaagtaactaatgtcaagataccatctcatgccaattagaatggcgatcattagaaggtcatgaaacaatagatgctggagaggatgtggagaaataggaaagcttttacactgttggtgggagtgtaaattagttcaaccattggggaagacagtgtggcatttcctcaaggatctagaaccagaaataccatttgacccagaaatctcattactgagtatatacccaagggactataaatcattctactctaaagacacatrcatatgtatgtttattgtggcactgttcacaatagcaaagacttggaaccaacccaaatgcccatcaatggtagactggataaagaaaatgtggcacatatacaccatggaatact

SEQ ID NO: 836906 - DNA, 632 bp, Homo sapiens
tgggaaagtgcttcacattgcttacccaaaacttttccaatatactgagtccccagtgaggagagacctaagtggcattatagtttgaagtagaagtgccatgatacaacttttgttctaaagttattactgatggatcaaaacctgttaaatgacttgagttgtgactatgagcaatatatgtaccgtgtgtcacagggaacatttcctatttgcctctcttattgtcactttttcatttcccaacagaagctttcactatgtccttttaaaaagataccttttaaagaagaggacatgctgccacctattgaaacaacgcaaatacatacagacacccagttctaagaacatcaggaccttgtcaccccgtacccggcgaaaagcaaacaatgtaaattctaaaaaaaattctcaactttttctatcctggactttacaaagatttccgctacctaaatcagttctaaaaggagcctcagggccaggaaaatcatttcttcttggacccacagaacttaagtgtgaagaacaggactgtttgaaacatgctgtgacatacctttcgggatggacctgctcacacakaaacagcagagaagggagctcgcaggatcctgaaactggcagaa

SEQ ID NO: 836907 - DNA, 600 bp, Homo sapiens
actccgattccttgcccattgtctttktgtgtgcataaaggctcgtggaatcttttgttgttatgttagaactattgtagtcatttgtactagttgaaatcagccataactatgaatgcattccttatgctttctctgtgtaaaaataaaatcaaaccaagatcctacttaatttccagttactcttagggtctgtgtgtgtgcccacacaagtgtcaatggaagcagagcctgagagcaggcattccaggtgtatttgtttacctactgctacctaaggaagacacttggtaacttggttaatatgacaaaccaggaaaatattatgtagactttgcagatggtaaaatttaggatgcagttaatcaagatttctctaattcttataggctttgatctgcagggcaaatatagcagatcttcctgagactgctttgggataattgaggtggtcatagtagtgttggtgcaggacagttctctaggcagccttggactggcccagttctctccctttttcacttgcagttctcaataataactgcagaatgtgctgggaatgcaccatcctgagataagggaggagctggccggaacagc

SEQ ID NO: 836908 - DNA, 625 bp, Homo sapiens
agccagcgccggagcggccagcaaaactgacagctgacctttacgaggacgcacttcgcatctccaagacacactgaaggactcctctctccttcctgagctgggctcagcattagacagctctggctcaacgctgcttggtgacaaagatccaggaaccactggctgtcttaatggaagtgcaggagggggcttcctcagggaccccagaaccacccaactggctggagcatcccgtcctccggttctcaccgtgtggcaaacaaaaccagtcgcgttggcgggggctgggcgtggaggcacaggcctgctcaccactgctgctggggtggggtctcctgctcacggacagcccagggaggggccctggagtttcaggcaggagaaatggttccaattgaaaacagcagatcaatgtgggagtggtgaggactctgcaactgggtgaaaaagcagctggagcagatggcgtttggcactgttaggtccccatgtggccgtcagcaccgggacatcggagccacggataattcgggaaggtctggtctgcagagcagcggccccaatcgtccccagcagcgcgatgtctgcggccggcggatccrggctcacctttcatcctagg

SEQ ID NO: 836909 - DNA, 591 bp, Homo sapiens
tcccagctacacctgaggccaaggcaggaaggatcacttgaggccaggagattgagaacactctgggcaacatagcaagatcccatctcaactttttaaaaggcattttatttttaccaaagatggtgttgctgataaacctaggcaaggatgatctattggataagtggtactgagacaattcattattcagatgagaacagtggaataggaaccctacctcacaccatacagaaaagacacttttagagggatgaaagatgtaaacatgaaataaattaaaaagttgaaaactttgagaatctataaaagaataacttttgaactttggggtaaggttctgaaggcacataaagtacaaatcataaaaaaaagattgatgaacttgactacattaaaaattaagttgcagccgggcaaggtggcttatgcctgtaatcccaacattttgggaggccgaggtgggaggagcacctgagtccgggagttcaagaccagcttgggcaayatggtgaaaccccatctctacaaaaaatacaaacaattagctgggcatggtgaagtgtgcctgtagtcccagttactcaggag

SEQ ID NO: 836910 - DNA, 558 bp, Homo sapiens
gtttagacacacaaatatttaccgttatgttctaattacctttagcattcagtatacagaaatatactgtagaggtatgtaacctaggagcaataggctatgccatataacctargtgtgtagtaaactataccatctaggtttgtgtaagtcactctaggatgttccaacaatgacaaattgcctaatcatggatttctcaaaacatatcaccatcattaacgatgcatgactgtatatgttttttgagtgattatatctgtgtgtgtgcgtgtgcatgtgcgtgtgcatgtatgtgtgttttaagagataaggtctcctctgttacccaggctggagtgcagtagtgtgatcatagctcactgcagccttgaacttctggcctgtcttgccctcccaaagtgcttggattacaggcatgaaccactgcacccagccacatctttgttttgattgcctgctagactcttgactccatgaaatcatttatttataaatccatgaaatggatttgttttgtctattgcaacatatccagcgcctaatcaaatacctaac

SEQ ID NO: 836911 - DNA, 566 bp, Homo sapiens
gggcggataacctgagatcaggagttcaaagccagcctggcccacatggtgaaaccccatctctactaaaaatacaaaaattagccaggcatggtggcgcacacctgyaattccagctcctcaggaggctgaggcaggagaatctcttgaacccgggaggcagaggttgcacggagccgagatcgcgctaccacactccagcctgggagacagagcgagactctgcctcaaaaaaagaaaaaaaaaactagctatacatggtggggcacgactgtagtcccagctacttcagagggtgaggcgagaggatcatatgagccaggaggtcgacgctgcagtgagctatgatcgtgccactgcactccagcctgggccacagagtgagaccctgtctcaaaaaataataaaatactgacgactgggctccacacccagagatttcagtttattcggtctggggtaaagcctggatattggcatgcttagaagtttctttattattattatttttttagcatttaaaaaatgggcagagacagtgagaccttatttccacaaaaaaataa

SEQ ID NO: 836912 - DNA, 600 bp, Homo sapiens
cagctcctggaggcggctctgccctttttggcctcctgctccctgagcgtctggtgtccctgaggggtgagaggccagagtgaggggggacagatcagcacagcgcatcccgtaggagccagggtcccatcggggtttcagagaagccacggccgagaggtctgcatgggaccccttccccgtgacagggagggaacgggctcagggcatcattggactgtcccagaactgcccggtggacatgtcagggccaggatggaacccaggtctgtgcagccgcggactctggccttggaccctgccttgtggagtgacttcccccatcacctgcagggctcaggagcactggccactcccagccagggccactgtggggcgtggggagacccaggtgggggcaggcccccggcacatgtgtctgggagtgggagagggtcccagctaggggctgcactgtggagtcagcggcagtcacagcccaccctgccctgctacgttcacctcccaccgtaccccygctccagagaggggttcaaggctggtcagttgccttgaaaaccgagggaaggtgtcctgcctgtcatcgagctgtgatgtcct

SEQ ID NO: 836913 - DNA, 540 bp, Homo sapiens
aaacagggaaataataattaaccatctagaacaccactgattcatttaaaaaattctccccctcccctgtcattacacctgtacagggagaacaggtcacattgaggccatctggcagcactgcctgagggttatggtccaggcaaaccagggagagcaaagaactccagagggagcatggatcatcttctgcttgaggtcaaatttggggaagttataggaaacatattgcactgaaccctgtcttcaaatccacgtttaaatgcctcctgaatacttctcattttcattttgaagatgctacagcaatagagactctactgaagatgtggtgtagaggatttactccttggtaatcttccaaaataatggatgctagttcatgattattctattttttccataaatgtgcatttctatgtttattccctatctgtcaccacactggatgcaatcagatttgtcatcttttgagaaaatkatttttgaaatagttttatgtgaggtcaaggaatgaaatgaattatttttgtagtggag

SEQ ID NO: 836914 - DNA, 372 bp, Homo sapiens
tacactgtacggttcgtctgcctcaggtatccacatgaataactcgctcatttcctctaagtctcatttcaggtatcgctttgtcaatgagtattactataagcattgtgtttcagattgcaacctccctscccaacatccctgattcctattacccttctgaatgtttttcatagcacataatgctttctataggcaatgtattatgtattatgtttcttattacttatgacagttatattattgtctgcttccccccagtgctccaggagagcaggaacttttgtctgttttgtttactgctgcagcctaaggccatagaagaatgtgtggcaaatagtaggtgttcaataaatattgattattttgatg

SEQ ID NO: 836915 - DNA, 479 bp, Homo sapiens
ttaaagtgtagaacttgtggtcatcaacacctttctaaggaggtgacacgtaaaccactggagagcttcccttcagggaaaacagcaggcaccaggtttctgagtgaggaagtgcttagttccttgtgagaaatgacagaagcccagactgagttggttaattttattaaatgaggatggagagataagcaatggccaggacctacagggctttcttattgttttttaatcactttagttcctatgaattggaatgggacgatggtgtctggaggggaagtatgagaagcagataaaagtttgtggcaatagttcaggagagataacagtttcttggatgagggtgatggcagtagcaatggataaatgtggatagatttttagatawacattggagtagaatcagcgggagttgctgatagactggcaaataccattataacagcactaatgccttatacttaattcaattgcttata

SEQ ID NO: 836916 - DNA, 484 bp, Homo sapiens
aatcttgtcagtgataaggcatagaaaacacttcaagatctattgaaatcgttgttcccaaaatcagcctgctggttttatttggttttagggaaaactatacrtttcataaacgatagatctgtccctgacatcaaacagaagggacaaaattttgaaaactggctctaagctactgttattaattgtccattgctatatagcaaactatcccaaaacttactggcttaagcaatgataaatgttatctcatacagttatgtggcttagaactttgggaactgcatagctagttattccgtctcagggaataactagatcttgcagtcaagatgttggccagggctgtggttatctaggggtttgactagagctcgataatccacttctaaattggttcactcacagggctggcatgctggtgctggctgttgacagatttatggtcctcactctacagacctttccctaagactgagaatct

SEQ ID NO: 836917 - DNA, 536 bp, Homo sapiens
agtgtcaatgttttcaataaagagaaggtgattttcaccctgcccttcacttctagtttttcctaattattctatatgactttattgaaagcttcacttcaaaatcaatctctccccttctctagctatctttcccaataaggataattgtgaggaagttcccatagctacgtaacaccctctaattcccaagactttgtgaatgtttctgactattaattttgaagacatcccagaaatagagtttaagtttgattataaaaaaacaataacatcttggctatgactatatttaaatatttagcattatttaaaattaattttctgcaaaaaattcttggagggaaatgagaacaagagtttatttaagaagtagtattttattatttttttctacagatcgacttactaacactatggttctccrtagaaataaataaaattcacatatataaaaaactgtagagaatattaaatatgccaaataaagaattcctttaagcatatatatatacacacatatatataatatatat

SEQ ID NO: 836918 - DNA, 508 bp, Homo sapiens
aaattgtagtaaaataaattgtagrtaagttgtagtaagtcttgtaaacatctctttcaagtgtgtgtgtaggtggaggaatttggtgacacatgttactgaggagataggtaaggagtgacatccttgaatagggtacagtagataatatcaaagccaaaagtaaagaacaaattagatgaaaacattgaagttagtttattctttgcaatgggaagaatgggttctactcaggcagtcttttagtgtgagtgtgagtataaaaaattaccaactgtaaatgatgatacagagttttatataagtggaaaatggaaataatgcaaagtagtcgccccaagaaaaaagctaacagctttttaggaaatgtgagattaaagctgtcatctaagttgagatttttgtttgtcaacatgtggaatgggtttgcagataggttcaactgtcatggagatttttaggcaagatagctggaaagggaggaaaagaatatgagaagaggaatgag

SEQ ID NO: 836919 - DNA, 508 bp, Homo sapiens
aaattgtagtaaaataaattgtagataagttgtagtaagtcttgtaaacatctctttcaagtgtgtgtgtaggtggaggaatttggtgacacatgttactgaggagataggtaaggagtgacatccttgaatagggtacagtagataatatcaaagccaaaagtaaagaacaaattagatgaaaacattgaagttagtttattctttgcaatgggaagaatgggttctactcaggcagtcttttagtgtgagtgtgagtataaaaaattaccaactgtaaatgatgatacagagttttatataagtggaaaatggaaataatgcaaagtagtcgccccaagaaaaaagctaacagctttttaggaaatgtgagattaaagctgtcatctaagttgagatttttgtttgtcaacatgtggaaygggtttgcagataggttcaactgtcatggagatttttaggcaagatagctggaaagggaggaaaagaatatgagaagaggaatgag

SEQ ID NO: 836920 - DNA, 621 bp, Homo sapiens
aaggtattttaaataaaattacaaatgtaaagtgatttttttgtaaacaaaaaagatctagcctaagacatggaactggaagctgtcattctcagcaaactaacacaagaagagaaaaccaaacaccccatgtcctcacttataagtgggagctgaatgatgagaacacatggacaggttgggggaacaacacgcagtggggcttgttgggggattgcggggaagaagagcatcaggaaaaatagttaattgatgctgggcttaatacgtgggtgatgggctgatttgtgcagcaaacgaccatgatacatgtttacctatgcaacaaacctgcacatcatgcacagttagtcgatttacatttggagtatctattgtatttaattgatttatttttctatgcttgcaccaacccttataattttgattgctgtataatgatataaagtagggtacatcctccaaaaacttccaaatttccagggttttttgttttgtgtttaactatagtcaccatgctgcamaatagttatcttgaacttatttcctctcacctaactataattttgtatcctttgaccaacatctcctcaacccccggttccaaactcccaccttcaa

SEQ ID NO: 836921 - DNA, 558 bp, Homo sapiens
aactgtttttttctttcatctttttttctgtaaacctaaaacttagtaaaaactgaagcatcttattttttaaaattatctaaatacattaataaaaagtgagagattagcaaagtagatttcaaaatatcctaatcataagctgtttataagaaacctactttacatttaataaaataggtaaattgaaattaaatgcatgaaaaagacataatatgcaaatattaacaaaataatgcaggaatggctatattaatatctgatggagagacttcagagtaaggaaaattactaaaggacaagaagatattacatatttttgagaagccagctactatgaagacgcaatgatcctaaatgtatataaaccacagaatttttaaatacatggagcaaatcagagatactgaagaagaatagacaatctacaattatagttggggattccaaccttctcactagctgacaraattactagtcagaaaattcgcatagatatagaaaaatatgaactacacagttcaccaacaggatccaattgatattcatatatagatt

SEQ ID NO: 836922 - DNA, 481 bp, Homo sapiens
aagtgagagattagcaaagtagatttcaaaatatcctaatcataagctgtttataagaaacctactttacatttaataaaataggtaaattgaaattaaatgcatgaaaaagacataatatgcaaatattaacaaaataatgcaggaatggctatattaatatctgatggagagacttcagagtaaggaaaattactaaaggacaagaagatattacatatttttgagaagccagctactatgaagacgcaatgatcctaaatgtatataaaccacagaatttttaaatacatggagcaaatcagagatactgaagaagaatagacaatctacaattatagttggggattccaaccttctcactagctgacagaattactagtcagaaaattmgcatagatatagaaaaatatgaactacacagttcaccaacaggatccaattgatattcatatatagatttatcacataaaggaaactc

SEQ ID NO: 836923 - DNA, 590 bp, Homo sapiens
ctgatatcctttcttccacttgatcgattcagctattgatacttgtgtaggcttcacgaagttctcatgctgtgtttttcagctccatcaggtcatttatgttcttctctaaactkgctgttctagtaagcaatgcatctaaccttttatcaaggttctcagcttccttgcatagggttagaacatgctcctttagcttggaggagtttattacccaccttctgaagcctacttctgtcaattcatcaaacccattctctgttcagttttcttctcttgctgttgaggagttgtgatcctttggaggagaagaggtgttctgggttttggaatcttcagcttttttgcactggtttctccccatctttatggatttatctacctttggtctttgaagtcactgaccttctgctggggtctctgagtgggcatctttttatttgatgttgatactattcctttctgtttgttagttttccttctaacaggcccctctgctgcaggtctgtgggagtttgctggaggtccactccagaccctgttttcctgggtatcaccggcagaggctggagaacagcaaagattgctgc

SEQ ID NO: 836924 - DNA, 670 bp, Homo sapiens
attagataaatggggtaaatgggatgagcctgagattctgcatttctgatacacttccaggtcatattgatgctgctggtccgagaaccactatttgactagcaagggactgtgagtgtgagggcgggggttggtagttgaagagagtgcaaatggaaggacagcatgctggtactttgagaaggaaccagcagagagagaaaagtagaagatacagaaggaagaggataacaaaagaatcattgctggctcaggttctttaatgtagaagaaatacagagcgcaagtggaaagacttgtcctagatctcaagaatatgtcagcttctctttttctgagactcttttgaaggtaggagaaggtgcccctttatctttgtttttgctgagttcatttctgacaggttttctacaagctattctttaaagtttattttcttctcccacttctcccccagtgccctttattcagaaatctgtgtcctggccccattgtttcttttttcaactgcctttgggttttcattcttgaatttctttccttgctgcttcaactcttgtctaagaagtcgtcctcmcctcttgccttgattatagataaggaaatgaggaaaataagttatctaaaaggttaaatatatagtaaatggaatggggttcctatagaattc

SEQ ID NO: 836925 - DNA, 493 bp, Homo sapiens
ataatacatacatttatagccatatcatttgtaagggtacagaaatggaccttaagtacagaaaaagcataaagtaaaaatgatatattatactttcaggaaatgggcccctaaagtttagaccaatagctgtttgcattctacatccagcaggctgatcatttataatacctgacaaatacaaaaggatattatttgtggtactctatttatcgatcactagattgtgatgggactcaattttaaaaatgaatatacattaactaaaggttatttattttgtaaatctaattcatgtcagagattggtttaaagcctataattgattagcttaattacaggtaaaagctttctgaagtaactaatggaaataatgttctgctttaaagaaatcatatttcattttgttggtctataccaratgtacagtggtcttcagataattcaatatctatgaggaaggacaatggaattttttattcaatgggtagta

SEQ ID NO: 836926 - DNA, 618 bp, Homo sapiens
gcatcctgcacatgcacgcccaaagttgaaataaaagttaaaataatcctccaaataatattgtattatatacatttatgtttcacttaggaatatrtttcagttttaaaacattttgtttatacaatacaattttataaaacctttccctatgtaccaagttaatttttagatgatatacatatttatggtagatgtgagtgaaagctttgtatttgtatgcttcttagttattattgctagtttttgaaaaatcttgaatatatttctattagtcttaatacacattaattgtattcccttggcttatttatatagtaaataacatttgcaaagataatttttaataaaatgttgaaacgtttccatgttctgttatttcagctaaaaaataactacaataaaaacagtgacccatgtgtcccaagcactcttctaagagccagaaagacagctctaaaatatcacctctgctattataaagtttatagtcttactttataccatatttatttctattttgatagttctgatttattcttttattctttaatatattgttatatattacttttcaaaggatgagcttcagtatttataatgtctttttttctgtta

SEQ ID NO: 836927 - DNA, 535 bp, Homo sapiens
taaaagagattgtaaaattgtcaccaatagttgatgactcatgaacaaggtgtggaaatttatcaaagtatttatccaaataatgctaaatgacctggatcctgaaaacacactcaacataacatattttgaaaaagagccaatatttaatatgaatctgctatgactttggaggaccactgcacagaattatctcctaggacagagtacaaaattgctccccaaaatgccaagattattcggtcactactcaaaaagaatgtaaaactttattctgagcattttgattgaataaaatacgaaaatgtgaacacttttatgttttttcaataagagagatgcagaaagaaaaaggtatttagtcttgtgtcctatcctttctttttaggatagtagattaaatatttgagacgggtagaagggagagtcattgttttaatacatttgtttcacagtgacaagrtttgtcttgagactggaaattagggagaaaatattactagtggatcttgtaaaagactaagcgtcagcacta

SEQ ID NO: 836928 - DNA, 390 bp, Homo sapiens
gttgctataaagaatacctgagtctgggttatttataaagaasagaggtttatttggctcacagtttgcaggtggtataataaaaacagtgccagtgtctgcttttggtgagaacctcaggaagctttcaatcatggtgaaggcaaagagggagcagacatcacatggtgaaagagggaggaagagacaagagaaggaggtgccagagtatttttaaccttcagatttcatgggaaccaacagaatgagaattcactcattactgtgaggatagtaacaagctattcatgaggcatccgccctcatgacccaaacacctccctccaggccccacctccaatttgggggatcaaatttcaacatgagatttagaggggacaaatatccaag

SEQ ID NO: 836929 - DNA, 390 bp, Homo sapiens
gttgctataaagaatacctgagtctgggttatttataaagaacagaggtttatttggctcacagtttgcaggtggtataataaaaacagtgccagtgtctgcttttggtgagaacctcaggaagctttcaatcatggtgaaggcaaagagggagcagacatcacatggtgaaagagggaggaagagacaagagaaggaggtgccagagtatttttaaccttcagatttcatgggaaccaacagaatgagaattcactcattactgtgaggatagtaacaagctattcatgaggcatccgccctcatgacccaaacacctccctccaggccccacctccaatttrggggatcaaatttcaacatgagatttagaggggacaaatatccaag

SEQ ID NO: 836930 - DNA, 633 bp, Homo sapiens
aaatagataaaacattactaatttaaggttctcctataatgtcaaatacacagtgtcccaggaaagcagagattacagtgtgtagggaaatattccccagccagaatgaatgcagtatttmatatacagtcaggaaataaagagctgctggcccttggtagctaacctagagacctctgggtgctgagctagaaaagatgaagtttgattttgacttcattggataaacagaatgtcatccacacatccaattccacccacattgaacccctggcatggttaatgattataatcttcacatttaatcacgagaactcagtgacaggcaaacaaaggttagctaaactgacagttcagactgtttcaacggaagagaactccacaagttttatttttaaatgtgcatgtccaattccaacaacactcttccaaaatgcagctgaattatgtacaaagcatagttactggaaagagctcatcttctatctctcatgtgataggaattatctggaaatttgctaggttactttcaaaggtccatttttccagtgctcctttcctggttgaattaagttgggggtttttaaatatggaataaagatctggataaaaaggagattcttttaactaaaa

SEQ ID NO: 836931 - DNA, 608 bp, Homo sapiens
aaaatttaaaagtgtaataaagcatttgacattttggtatctgtttttaagyattaagagagcaaggccataatgtaaacatgaaaacaaagaagtagaaaaagaactcacctaaaacgtttttgcttggctataaaatttataattgcataagaatgtgtctattggcaatcagagggaactgagagaaatgtctccgtagaatacaccttatataggagcaagaatttttttccacaaaaaaaagttgtggttgttttgtttttataattgtaaaggttaattcaatttttcaagctggagctcataccaggtagtacatgggtagactaaatttctttcttcactcaatttgtcttcatgaattgagcttgtgaattggacctgcattcacattggagtaaactctggctatgtgaacagaaataaaatctttacagttttatcaaggaaaaaataaagcacaactctgtatgtttgttttttttactttgttaccttttccaaaaaataatactaataacctgtattcattcattttatgctgctgataaaaacgtgcccaaaactgggtactaaaagaggtttaattggacttatggttccac

SEQ ID NO: 836932 - DNA, 586 bp, Homo sapiens
ataacttattttcctctgggtagttacccagaagcaagattgctggatcaaatggtagttctacttttggttatttaaggaatctccatactgtttttcacagtagttgcactaggtttcttgtttctttgtttttggttttgttgtttttgttttgagcctcactctgttgcccaggctagagtgcagtagcatgatcttggcttactgcaacctctgcctcctgggttcaagtgattttcctgcctcagcttcctgagtagctgggattacagacacccatcaccacgcctggctaatttttgtatttttggtagagatgaggttttgccatattggccaggctagtctcgaactcctgacctcaagtgatctgcccatcttagcctcccacagtgctgggattgcaggcatgagccaccgtgcctgcctgtggttgtacttgtttacattcccatcagcagtgtagaagtgctccctttccacaccatccatccaacatcmattttttttttgattgtggccattctcacaggagtaaagtggtatctcattgtggttttaactttcgttttcctgataattt

SEQ ID NO: 836933 - DNA, 522 bp, Homo sapiens
ctggtactttaaaatatatattttaacaagaaaatatctggccgtgtgcggtggctcacgcctgtaatcccagcactttgggaggccgagtggggcaratcccgaggtcagcagatcgagaccatcctggctaacacggttaaaccctgtctccactaaaaatacaaaaaaaaaattaaaattagctgggcctggtggcaggtgcctgtagtcctagctactcgggaggctgaggcaggagaatggcgtaaacccgggaggcagagcttgcagtgagccaagatcgcgccactgaactccacctgggcaagactccttctaaagaaaaaaaaaaatccatgaggcaatggattatagtatggtaaatatcgaaagaacacttcattttcaaaattactgatattttgaaaataactagaatagaaagtttccctaggatgaaggtttgggatcagtagaaaattatctgagaagtattgagtcattacacatcccagtccctgaacaaagacctgcaaagta

SEQ ID NO: 836934 - DNA, 601 bp, Homo sapiens
tatatgtatttcaacatttytcagttttgatttctagtatagtgaatatcaatatatatggcccatttaaacaaaagaactttagaatccttggtaactgttcaaggtttaattaagtcctgacagcaaaaggattggtttcaacaatctgtatcttaagtgttgagtttagaccattcaatgtaattgttgatacacttataattatttgtatcatactgttgttttctgtttttctgtctttatttttctgcctctgttgatttcttctttttatttgaattaattttattttagaacttcattttaatttttggttgagttttttgttttaattatatctgttttgggggaaattcctggtggctgctctagagatttaaacatatatttttaacttttcactatatacttaaaagtttatatttttccattttcatggtcttcctttattcctgaagttaagtttctttcatgaatcattttccttcagtctcaaatacctcttttagcatttcttttagagaagatctgctagtgaaagttgcttagcaattttccttcatttgacaataactttcaaatttatttctagagaata

SEQ ID NO: 836935 - DNA, 359 bp, Homo sapiens
catgctctgcacggcctctggcaactacccttccacattctrtttccatgagtttcactatttcaaatcgttcatataaatcaagtcatacagggtctgtttttgtgcaactggctttttggtttaaaattttaaagtacatttagaagtcatcatactctctgtttgtttttgtgacattttaaatgaaagttatattttgagaaattggtcaagttcaaattgtcactttttagcataaaattattcataatattttttatcattttaatgactaaagtgtctataataaaatttttcctttctgacagattttatttctattttttctatctatccttatatattttatatatata

SEQ ID NO: 836936 - DNA, 618 bp, Homo sapiens
acaaacccaaaacagtgtgtagagatgaagttgaacccaagaaggaaagaagwaggacaaatagagattccaatccaatgaagtccaagcccaaaaaaaaaaaaaaaacatgtctaggtccaaataactttaaggggttaaggaggtaggggaggagagcacaagaagagccaaaaaagaaaagcataggcgatatctggaagcactgatagattacatggtgaaaaaagatcaaatggcaagttttcaacttacagaaactaatagggtataagctctgataattaattcctaccagaatacaagagacaatgtaaaaatagattaaaatacgtgagagctttggaaatataggagaataaattaaacaaatggattcaaacactgtaaaagtggacaaggtatggtaaagtggttgtgattgctttagaaaataaaattctacccattgcttagatcaagagaggcttcccatcacacctcctcataaatggatcagtttctctcatgttataaggaattttccactcttaaaattgttcagagccaagagagctacgtctcattgttcttacagatttttttcaagccacaagctatatgttctataaagctcta

SEQ ID NO: 836937 - DNA, 410 bp, Homo sapiens
tggagtcttacaccatctcttccttcactaacatttgcgtagttttatctcacacatcctaaactggatcacactatactcaatgtacaaataagcattaraatgtatgaaagtgggcaagacgcggtggctaaacttgtaatcccagcactttgggaggccgaggcgggcgagtcacctgacctcaggagttccagaccagcctgaccaacatggctaaaccctgtctctactaaaatacaaaaatagccaggcttggtggcacgcgcctgtaatcctagctactcagggggctgaggcaggagaatggcttgaacctgggagccgagattgcaccactgcattccagcctgggcgacagagcgagactccgtctccgccgccccaccaaaaaaatgtatgagtgtata

SEQ ID NO: 836938 - DNA, 580 bp, Homo sapiens
ttgtgccggggcgcacggggcggagactcagagagggaagccacccttggcgactgcggccgcggccgaaggggcgccgcctgtgcccggggaggcctgggcgcggggctttgggagggctccaggcggctgtgggatccgcgacacgttggctccgggctaattttcccagtggaggctggggtgggctcctgggcggtggcgcgcggcccccgggggtcccacgtggcgcccagcccacgtgcggggtacgtctttgatcccggaactggcagcttcacgtgatgcgcgcctgcctgacagcccttcctccccgcgagtctccgggagccgggccgatgggttccgctcggacgtcccaggggcacagggggcgaatctcccttcctggtgaggtcccttgccttggctctagaggctgtggacttggagtgacaacgacgctcgggccgggcgccasggtcccgcagacctgtcgctatcatggcctggaaacccacacgagagaaaaagtgtcatgtgttgttttgaatctagcatggtaggaatacaaaggtttttaaatctttgatagattcaa

SEQ ID NO: 836939 - DNA, 516 bp, Homo sapiens
aaacacaaaaataaataaatgggacctaattaaacaaaaaaaacttccacaagaccaaagaaataatcaccagagtaaacacacaacctatagaatgggaggaaatatttgcaaamtatgcctctgacaaaggactaatatccagaatctaaaaggaactcaaacaagtcagcaagaaaaaatcaaataatcccattaaacagtgggcaaatgacatgaacagatatttcttaaaaagaagatatacaaatggtcaacacacatgaaagaaatgctgaacatcactaatcatcaggaaaatgcaaattaaaacctcagcgagataccaccttgccctaaccagaatagctattattaaaagtgaaaaaacaatagatgttggtgtggatgtggtgaaacgggaacgcttatatgctgctggtgggaatgtaaattcgtacaacctctatggaaaacagtctggagattcctcaaagaaattaaaatccaatccagcaatttcactaccgagtatct

SEQ ID NO: 836940 - DNA, 516 bp, Homo sapiens
aaacacaaaaataaataaatgggacctaattaaacaaaaaaaacttccacaagaccaaagaaataatcaccagagtaaacacacaacctatagaatgggaggaaatatttgcaaaatatgcctctgacaaaggactaatatccagaatctaaaaggaactcaaacaagtcagcaagaaaaaatcaaataatcccattaaacagtgggcaaatgacatgaacagatatttcttaaaaagaagatatacaaatggtcaacacacatgaaagaaatgctgaacatcactaatcatcaggaaaatgcaaattaaaacctcagcgagataccaccttgccctaaccagaatagctattattaaaagtgaaaaaacaatagatgttggtgtggatgtggtgaaacgggaacgcttatatgctgytggtgggaatgtaaattcgtacaacctctatggaaaacagtctggagattcctcaaagaaattaaaatccaatccagcaatttcactaccgagtatct

SEQ ID NO: 836941 - DNA, 520 bp, Homo sapiens
ttctgcagattgtacaggaagcatgttgccaatgtcagcctttggtgatgtcctcacgaagtttacaatcatgatcgaaggtgaagggggagyaggcatatcacctggtgagagagggaacaacagagatgctaggctactttaaatgaccagctcttgcctgaactaatagagtgagaactcattattatggggaaggcaccaacccattcatgatgtatccacccccatggcccagacaccttccagcagaccccacctccaacattggggatcatatttcaacatgagatgtggaggcgaaacacacatccaaaccatatcacaattctcccataagagaatagaccatgattcaagattcagtgattcaagatactcttgcattcattctagttgactgttgtttatgagttataattcatataaaatgcatccttttaaaatatacaattcagtgctctttagcatattcccaaagttgttaaaactataattttagaagatttcaccatttcca

SEQ ID NO: 836942 - DNA, 565 bp, Homo sapiens
gtttcatctccaatggatatttttggtgcctttgttgaaaatgagttggctacaaatgcatggatttatttttgtgattatttctatgatgttcattctgtttctttgtttataacaataacatgctgttttggttattatagccttgtgatgtattttgaggttagataatgtgatatctccaggttattttttcctcttcaagattgcttttttcctacaggattgctctttcttgttttcatacaagttttaagattgtttttctatgtctgtgaaaaatgacattgggattttgatagggattgcattgaatctgtatattgattaagtagtatggtcattttaactatgtgaattcttccaatccatgagcacatgatatctttccacttgtttttgtcctcttcaattttgttcattgaagttttgtagttttccttccagaggtctttcacctccttggttaaatttattgctaggtattgttttgtagctgttrtaaatgtgactgtcttttttatttctttatcatctagttcattgttggtgtatagaaatgtta

SEQ ID NO: 836943 - DNA, 540 bp, Homo sapiens
tacatttttagatttataaaatgctgtcataaatgccagcttatttgattctcagaataaacctctgaggtgagcagggttattttttccattttctagatgagtgtacagactcagaagtctggtgacttctccaggatcactcacccaggaagaggcagaggtgagactctaagccctaactttttttttctcccaatatatcatgcgtacccccatggtctgagacagaaaatatgacacacactataaaaacagatcactatcaccccactgcatcattgtctccattcttatttaatacctgaataaaactgagaaaaagttcacttataacaatcccaactgcataaacccggtctgcagcagggcttctggccctcagaaacaggaaataaagtcatgcctaaatgaagttgccttttgcaagtggactcctttgttgcccacactgctggtaccwcattctcagtgatttgtatcccacctaacttgagagttaccacttgccttctctctgccctttgcaatggattttca

SEQ ID NO: 836944 - DNA, 516 bp, Homo sapiens
atttggtatccatcggaaggccttttatcgcttgttagtaatgatacagatttgttgtagaggcaagcaattctttcagtrtttaagcctttgcaattttcattatttttttaaaaaaatgatttttttttttgcccttttgctccccttcctaacaaaggaaattgttaggaactatattactaatgtaatttagtcaaggggttgtcaaggagttccattaggatttggattgaaaagggatttctaggataaagcaccgttttgctgtagatatgatcttctggaaaggatggggccgggcagcctcgtgaagtttgcattcgtgaactttgggttcccgtaatcctacggcatgccttatcgaggacagcctaggagcgaattggcagtaggttagaaagcatgattagaagagggaaagctgaaatggccttcatgtcggctgttttcctccacaggatactgggtgattcctgtcctaaccagatactgattacttaaagcttagcccga

SEQ ID NO: 836945 - DNA, 589 bp, Homo sapiens
tggaaatttataaattgcctgaaaaggaatttaaaataatgacctgaaggaaattatgaattgtggatgggggaagggaaagtctagaatatttgtatgtgaccaaagttaagttgttatcagcttaaaatattctaagttctttttacataagccccagaataaccacaaagaaaaaaattacagcagatacacaaatcaaaaagagaaatgaatcaaagcttatcactatggaaaaccaccaagtcacaaagggaaacaataaaagtagaagaaagaaacaaagtatctagaaaacagttaacaaaatggcaggagtaagttcttacctgtcagtaataatcttgaatggaaatagattaaattttccaattaaaagatatagagtggccaaatgggggaaagaaaaaaacgcaagactcacctatatgacgtctataagaaactcacttcacatgtaaagacatatagactgaaagtgaagggatgaaaaattgatatcacwtgcaaatggaaactaaaagagaccaggagtagcttcacttataccagataaaatagacttcaaatcaaaaatcacaaaaaagca

SEQ ID NO: 836946 - DNA, 622 bp, Homo sapiens
aataaagagcagaacattgcaaattgtttcgcaaatttcatattaatgcttgttccaccttctcaccatatttttgtttggttttttggttttaggaaagtttgtgttgtaaataatagcttcaaaaattctatgataattaaggaaaattttaaatatccaaggtcactaaaagtcagagaagactataagcatgtgtatttgagccacatggttccagattgtcaaactaaataaggaccagattttagagctacttacttggaataggcagattaaattacaggattggaaaaaatttagaaaatattatttacttttgtcttgctcagagtaaatattatgctcaaaggtaaatatgctgagtaactctcagggtgagtttagctatcagatatgtcctcttatttgaaatttcttcaaaatggtttgtcacaatttgtttaatgtccttagggctctaaaaattttgctttaatgtattcaagataatttttaatattagcattcgagtagtttgtaaagtgtcaaattgcrtaggctaacatcaatactcagaattcccttctctgtatgtttttaaataattgttattatttaattttgatagggtttgggggaa

SEQ ID NO: 836947 - DNA, 570 bp, Homo sapiens
acctgattgaaaaatcaataaaaataagcatacctgtgtgcctttaaagtwtgtattaagggaataaatgactagaaaaatagcagactgaagagacacattcaacatgtttattattatcaattaataaatcatggagttaacttataatagtatgaagcctgtgggtgaagtgggtacagatatctgattttaatattttactttttccttacaagagaatttatatgtgattctttgcttaactataatgatatacatataataatttatcattgcttttcatttcagtgactgctttgtattaaacaaaattttaagaataaaattcagaagaacaataaacaaaatatttgcctaaggtgcttaatttaatttgccaatatttatgagacagccatgctgaattacctttgtttgacactttcacattcacatttatatgtcaccagagtgattcatgttttcttttcctcaaagaactctacttacccgtttgattcctttcttcattaattacaaaagtgtttattgaacactatgaaaatataaaattctcaaaattattat

SEQ ID NO: 836948 - DNA, 567 bp, Homo sapiens
agagaaataaaaatgtgcatccacacaaaaacttgtatgtgaatgctcatagaagattactcataatagctgatatggtttggctctgtgtcccttctcaaatctcatgtcgaattgtaatcccacaggtcaggagagggacctggtgggaggtaattagatcatgggagcagattttccccatgctgttctcatgatagtgagtgagttctcatgagagctgatggtttaaaagtgtggcactccccaccttaactttttcctgccaccatgtaagacatgccttacttcccttttgctttccgccatgattgtaagtttcctgaggcctccccagccatgtggtactgtgagtcaattaaacctcttttctttataaattacccagtctcaggtggttatttttagcagtgtgaaaatggactaatactatagccaaaacctgaaaaaaatccaaatgtccatcaactggtgaatggataaataaagtgtggtatatccatacgagggaatattattcagcaayaaaaagaatgaagtacagataacccctggtttacaagtttt

SEQ ID NO: 836949 - DNA, 646 bp, Homo sapiens
gcgatacattggacattcttttttttttttttgagacagagtctcactctgtcgcccaggctggaatgcagtggtgtgatcactgctcactgcaacctccacctcccaggttcaagcgattctcctgcctcagcctcctgagtagctgggattacaggcgcatgccatcacacctggctaatttttgtatttttagtagagacagggtttcaagaccaggctggtcttgaacccctgacctcgtgatccgcctgcctcagcctcccaaagtgctgagattacagccgtgagccaccgtgccctgtctggacattctgataatgttaagccaaacttgattttttggaataaatcctttaatcatgatgcattttaaaaaatgtaatgctttaattgatttactaatgtttaagttttttaaaatctagataagttagccagtgtttttttcctctttaaaaagtctttgttgctgggaggagccaagatggctgaataggaacagctctggtctacagctcccaacgtgagcgacacagaagacgggtgatttctgcatttccaactgaggtgccaggttyatctcactggggtgtgccagacagtgggtgcaggacagtgggtgcagcgcactgtgcatgagctg

SEQ ID NO: 836950 - DNA, 611 bp, Homo sapiens
atataaattgtcatttttataggaatatttttataagaagttaaacctttacttagaaattatacatgagggccgggcgcagtggctcacgcctataatcccagcactttgggaggccaaggtgggcagatgacttgaggtcaggagttcgagaccagcctggccaacgtggcgaaaccccgtctgtacgaaaagtaaaaacaaaatagctgggcgtggtggcgggcacctgtagtcccagctactcaggaggctgaggtgggagaaccacttgaacccgggaggcggaggttggagtgagccgagatcgcaccactgcattccagcctgaacaacaaaagcgagactctctctctctctctatacacacacacacacacacacacacacacatatatatatacacattatgtatacacacacatatatatacacatacacacacacacacacacacacacacacatatatatatatttagccaaagtagtatttattgagccaaagtaaatttcctagtaatttcaactttctttagggccacatagaagaaacaatttcccatctatatatatakagagagagagagagtctcactctaaaaaaaaagt

SEQ ID NO: 836951 - DNA, 553 bp, Homo sapiens
cttttgggagtacaatattttgtagaataactaaagaatagcacttatttctgaattaacgatttgggtaaattttggtctgccaatatttatacttattgcatattaaatayaaatgtttatatttaatgtttattaaataagttatctttaaacagaaaaaaacacataaagcaaggttatgtattgatgggttctaaaaatgttgtgaccagaaactccccaaaaactaacaggaatattcattattaaattgaataagctcatgctctttcttctactattcattaccttcaggtgccagcattcacacatgcccagtgatttaacactctcaaatattacacacttaagtatttggcaattgtggaaataaatggcacaagtacttattacatgttaggcaccatgcaccatgtttcatttattcctcacaacataattcatcaagttagatatgattagtctcatttcaatatgagaaaagtgagtctcggagagtttaaataacttttccagtgtcaaaaaaatctagtaatttgggacacatatt

SEQ ID NO: 836952 - DNA, 461 bp, Homo sapiens
acttcaatgttaaaatttaatgagcacagcaggyaaagcagaaaactttaatgtttcttaaaatttctttactatacttattcagttgataaaatattaaatgctttaaggatatggaagccaaaaataatatttggtaaaaccaatcatgcatgatccctatgagtctttgttaaattaaggctatttcagttcatagagaacaaaaaaagtgtccattcaaacaatttgaaaaggcagttagttttttcctaatctctaagggttaagaataattttgattgttctatttgttttctgaagaaaatctaagccaattaaataattaagtccctagatgaaatgcaaaaataggtacatcctttggtgatatttcaaagtaacaggtatctttcagtgtagccaaatttgaagagaggctcattattcactgtaataaaacaaataatgcttttgttcca

SEQ ID NO: 836953 - DNA, 615 bp, Homo sapiens
gcagtgtcaagaaatttagggcaccagaaattattaaaataatccttcaggtttatacctggggatccacccttacaaaaacaaaacaaacaaacaaaaatccacagtggtaaagaaaatattttgagtaattttctttatattgctcacagcacaagtgaagcatatcaccactttttaaaaaaaaggtaattctataaagtctgcagtttattcttccattacgaactgctgtgtaatttggtgtatttaaaaagaatagcccagggactgaaatattttaatttgcctctctaatgagaggttctttgcagttcttctaagaacgcttgttttcccaagcttccttctcccacattctctcccacatacacatgctacaaaactgtgtattacatttctgcttggttaaaatattacgtgtcagagatgaagtcagctttacataccaacacacacatacacaggcacgtatatccaggacaaagcccctaaccctaaatttgctttattttgtaaaagaaaatcactstcatactgggaaataagaaaattggctatggacacttgtcatatatgcttgataatttcacagccttttgttctacattgctt

SEQ ID NO: 836954 - DNA, 589 bp, Homo sapiens
acagtgtcaatgctatataaatagttgttacactctatttttaaattttgtatttttgattgttatgttttatttttaaaaatatttttgatccatggttggttgaatctgcaaatgcagattccaccaatacaaaggcccaactccatgagcctcattttttatgctgggaaaccaaggtgtcagaaggtgaaaagctggcatgcttttaaaccattagtcatcaggtccctaagatgttgatatgccaccatttttattaatcctgaaacttcttttcttggataattagccctagactaagcatgtccacaggccatcaaattcagtacagggactacccatgtaaggtaagagtaaggtacactgaatgtaacacagttggaagtggtatgaaatggagtgtgcttatgtccactaaagaaaaccaaaatcaaattattaaagagaaaacacaggtagrccaaagtaagcatcccatttattggtagaattgggtccataagcagtcaatttgcaacttcataagcaaaattgaaatttaaaataagtcctaagcagaataagtcgaagataatttttttaaatc

SEQ ID NO: 836955 - DNA, 524 bp, Homo sapiens
aattctttgggtaaacaaatcattgctatgaaaacactgcttcccataatttagtatttagtaatcacctactaattaaataaatgctagaatattgcgaagcttaagtccttatttttcttaaaactgtaagcatgcttatatttacaattttaccaactgcatattttttcctttattctaagagaaaaagagaagtgagatgcattgagacagtctggagaaattaatgcacagagttaacctgtattatccaacccaaaagttttctcctggaaaatcagtttgagttactgtatggtttttgttttttgttttttttcctcagggagtgtccatgaaatagccctttaaccccattcttttcttgaggaatggcagttacatttctttgttttgttctttcttatatagggggcccataaattgtgtcctgtgackgtgtttggtttcctcatgggtagagatcaagtcttgccttctgtgtgactgctcccctcccagcactttgcatgcagtagacg

SEQ ID NO: 836956 - DNA, 631 bp, Homo sapiens
tactttctagagcatattagaaatactttgcactcctaccaatttctataaatggatcttgaaactgaatgcaggaaaaatgatcccttgaaactagagaagggtatgggcttgtgaccaatataagctttaaagagagaaaacatgcgtctaataggatttagtcttctgatttttcctagctgcttttaattttatcagctgttttatagcagttttatgttattatattctccctatattttttattatcttttttcaaaaagagttgttgctgattctcgtaatttaaatgtgttatcatttttgatgattagaagaaacataacacaaaacatgtttttatttatattttcaaattttcttatatcactagatttacgaaaatacatctttcaaaaaagccattcatttattcattctttatttatttaccaatcaagaatccagagtacctattatgtgcacagctttaagtacattggggaatgaaaagatgaatagttttcaagcaaaatctttattgctgatatattttaagaattatatacctaatgagaaacataagacatgtattttttgtcttataaggttttttcttttaaaaaatmcattatagatcaccttaaaa

SEQ ID NO: 836957 - DNA, 538 bp, Homo sapiens
atttggtaataattattggagaagtggataaatacttttttccagatgataattttatggcagaaaatttctctcagtggctactgctatcttgaatattttatattttagtgctcaaaattcacgattttggtacatcatagcgtgcaacatagtaatcatcacaaatcaccaattgtttaagagtgggcactttaattgctcattaattccctaattaattgacacaagccaatgttaatgttatttaaagattagtatcagtcctaggggtttatttgggcttgccctggggaattaattaggcagatagctcaaattatgttttctctccaactttctcaggcaccagttaggctgctgactgacactttgttctctcatccagtgtacgtcgggcaggggaagaatctaactaacacacagagtaccccacttcagagccaccatactcttctcacaccaccmacagttccttgtcatccacttcatgaagtcaaatctctactctgtggatttcaaggcctgatctgtcttg

SEQ ID NO: 836958 - DNA, 681 bp, Homo sapiens
gtgaaagagtcctcagcagagcttcccttctaacacaaagcagcccaggaaaacatttcttgtctaacaaagagcagcctgaaaaatcaagctgcaaacatagataagcaagctggaagcttgcaygggggaatgccggcagctgtgccaatagaaaagggctacgtgggggccaggtgtgtccaacatggaggctccatcttccctttttttgttaccaggtgtacagtaaaggaatgggcaacatggcacagctgaggcaggggacccacctgcatagtaagagattagggtgggggctgccagagattcgagccctgtgcaaatggcacttctggtctaaccagtttttcacactctatgcaaatggcacatttggtccaaccagtttttcatgccctatgtaaaccagacactgcctcctcaccagctgatctataaaaccccctgtgtttcaccatggatccggcaacccacttctccaggacccctctctgcagcagagagctgttctttcttttgccaattaaacttccacttttaacttcactcttcatatctccatgtccttgttctccacggccatgagaccacaaactctgggtgatactctaacattcaggtcgtttcaatatacccactttgcctcttttaaaagagaaaaatcagtagcccccgaaa

SEQ ID NO: 836959 - DNA, 376 bp, Homo sapiens
ttcaaatgtgctctccacaagattctgacacccagcctggttgggggaatcactgagggggtgtcatctctgttcttcctccccaggaactttcggatcactgttcaaggactgaggcccatcygctccataagggattgtaaccgagtggcccagacttgaaacacattttacagtttttcctttcccttccttcttcatctcagaatgtagcctggaaatacactttaagacttcacttccctcctttccaccaggcactcggatgtgctattctccctcctccaagtatgcacttacttagaaattctaggggcttgttttgaaacaaaccagtcccgagacccagctgctgcttaaatggagttatggacaa

SEQ ID NO: 836960 - DNA, 604 bp, Homo sapiens
aaactgaatggtccagagagttyggatccatctaagtgaaggaacaaaaataatatttgatgtgtttaatcattgtttaaataagtggtcaaatttttacccagagagaccttttttcccaataaattctttagtggaacccaaatgcatataaaacagatgaagcctggagttatgtctgcatgcatccctcttctctgctccttgccctcccaactttccaagtctagatgtcacggaacccagagctggacagagctgtcaggggctgtacgtcactgcaccatcaatacccatacagcatctggcacatcaagagtgcccagttgttgcctgtgaaattacacagaacttagcattatagaaacctgtgcataagatgtgctaggtggaaattcctggagttcctatttaaaaaaattgatccaaatgagatccatgtctttcaagtatatgttttttggcaacatttaaaagggtttatgaggcttactttgggaatgtcaggctaatataattataagggtcgtaatccactttaaggcaaatgcagcttttagggtgacaggggacaaagtcacctgttggataggaaggaagaatg

SEQ ID NO: 836961 - DNA, 511 bp, Homo sapiens
agggaatgcttatacaccgttggtgggaatgtaaattagtacaatctttatgaaaaacagtacggagattccttaaaaatctgaaagtagatctaccatttgatctagcaatcttactacccaaaggaaaataagtcattatatgaaaaagacacttacacatgcatgtttatagcagcacaatttacaattgcaaagatatagagccaacctaaatgcccattgactgagtggataaagaaaatgtggtatatatacacatttggaatatataccacggggaatgctactcagccataaaaggaacaaaataatatcttttgcagaaacttggatggagctggaggccattattcttttttttttgaaattatactttaagttttagggtacacgtgcacaatgtgcaggtttgttacacaggtgtacgtgtgccatgatggtttgctgcactcatcaactcrtcatttacatgaggtatttctcctaatgctatccctcccccagcccc

SEQ ID NO: 836962 - DNA, 572 bp, Homo sapiens
ttctgagtcggaacccaccttctccaaatataactatgctctgatttctagcaccatcgattagttttgcctgttcttgaacctcctgtacacacagcttgttttcttgtgtctgacttcttttgttcaatggtatgtctgtgagatcaaaatgtgttgatgtatgtcagcaggtcagcagtttgttctttttccttgtgtagtattttattgcatgaatgatgattgttttaataataaataataataaattttttattttgctttttagagaaaaggcttttcctaactctagaatattatttagtcaaggatatgtttggttttaaatgttttcctatcttacatgggtctctaaaacataaggaaaacaagagcccatgtttctttttctccttaaaaacacgatttttaaaaatacacaaatgaaaattaatgaactgttagttgagttcctttccacagagttggggggaagttggtcttccagggtkttgctctgtagggcccccctgaatgttaccttggattatgggagtagcagggggcttccagagtagagggctcccttt

SEQ ID NO: 836963 - DNA, 605 bp, Homo sapiens
gtaggcaatgtcagctaatgatggaaagcaaagcaagttgaaggagcagaaagggatgaaagtgtgctgggtagggttgtcaatggtagcctctctgaggaggaacaytggggcagagccctctatggagtaagtgagtgaaccatggagaggtctaggaatcagcaggagccaacccctggtgggaacagattggacatggcagaaaaccagcagcacagctcatgtggccagagtcagtgagggtggcaggtggcagccacagatgggggaggggagggggacagagactggatcacttaaggccccctgggctaggaaaggagttaagaatttatgccaggaaaatattaaaaacatatcagtgccttttttttttgttctgagatgtgcccaacatcatcaattatttgtaatacacagaattcactcctgacaaggaaatgggtagaacatatgagaataagtagtttaatccacaaaacacagccgggatgatggatttcaaattgttgccagctcttcaggcagaatgggtaagaaataaagagagaatgtatgtaagatcacagtccagcagcacacttttcatgctcaaggctcaa

SEQ ID NO: 836964 - DNA, 619 bp, Homo sapiens
tgggatcaaaataagagctgggagaagtttatgagaagattaattaaattcttgatttgggaatgaccctgaagaatgagtttkatttcccatgtgcttcaaaattgacctctcagtgtttctgcaggtgagacacattctggaagcatcaggtattggcaataaccctgacttcatgggcatcactcaaactgcagcagcagcatttctctctagcttgtctttgagggcaaagtgtgatgtttccaagagagtgataaaaaaaaaaaaggcccgaggctgggatttcactctttcttcctctcgccattcaaccttggctagtgactgctagatacaaagtaatcaataaatgtgaattgatgggaatttaaagttgcagacgtgtggcacagcagtgaaagcacaggctctggaaacagaaggtccagatttgcatcctggttctgtcgcttaatcaccatgtgcccatgaaccagtttctgacctttctttgcttcatttttctcatccatagatgaagataggaacactactcaccacatacaatggatgtgaagttaagtaagttactgcagtcatagaagaggtaccacctgcaatgatgacttcacctatc

SEQ ID NO: 836965 - DNA, 610 bp, Homo sapiens
tgcaagtggctcacttcctccctgcctttttgtctctgctcaaacatcagtttatcagaaaaaactcccctagttactytatatagaattgcacttcctttattctctatcctcttactcagccttacttttcttcatattgattatcacccagtatattaaaactctgcttattgtttactctcaaaagaatgtaaactttttgagggcaaagacttgatctattttgttcactgctgttttcccagtgcctgaaacgttaccagacacaaagtatgtgctcaataaaatgtattttgatgaggattcatactttggtttcttctgtgtgaaatggagataatatgactctctttcacactgggacttatctgttacaatgttagattgtacttcagactgcctgccaggcccttgggccatcttcaataagtcagctcagggaaggctggtgtccactattgacctaagcaagccaatgacagcctacacctgaagcagagagcagaaatgttgagattatcgactgccccttggctttggtaagaggaataaaaaatggctatgttgttttagaaaatatcaccttgaaagctccatgatgatgtac

SEQ ID NO: 836966 - DNA, 529 bp, Homo sapiens
aaattaataagtaataagattaagaaaggcttaaagtcccaaggagattcagtagaattcagaattgacaggaaaagaaaaacacaggaaaaagcaggaagagacatgactggccctgaggaagtccaytggtaggaccttgggttgctggtgtccccaacagtctcttccttttttgagacagggtctcaccgtgtcacccaggctggagtatagtggcacaatcacagctcagtgcagcattgacctcccagagctcaagcagtcctcctacctcaatctcctgagtagctggtactacatgtgtgtgctgccactcctggctgatttgtctcttctgatgccaaagctttacctaattatgtttcctttatgggcagaatgtttcccgcttgacatttctgtaggaaaaacagcaatagggatccgggagaatgctgggcaggccccttgctcagaccagcttccccatcatttcatcatcaaatgcatctccagattcctagagacctttgacagattgggcccc

SEQ ID NO: 836967 - DNA, 529 bp, Homo sapiens
aaattaataagtaataagattaagaaaggcttaaagtcccaaggagattcagtagaattcagaattgacaggaaaagaaaaacacaggaaaaagcaggaagagacatgactggccctgaggaagtccactggtaggaccttgggttgctggtgtccccaacagtctcttccttttttgagacagggtctcaccgtgtcacccaggctggagtatagtggcacaatcacagctcagtgcagcattgacctcccagagctcaagcagtcctcctacctcaatctcctgagtagctggtactacatgtgtgtgctgccactcctggctgatttgtctcttctgatgccaaagctttacctaattatgtttcctttatgggcagaatgtttcccgcttgacatttctgtaggaaaaacagcaatagggatcygggagaatgctgggcaggccccttgctcagaccagcttccccatcatttcatcatcaaatgcatctccagattcctagagacctttgacagattgggcccc

SEQ ID NO: 836968 - DNA, 530 bp, Homo sapiens
taatgatacacttatactccatagtcctcttgggtggggccatatgacttgctttgaatagtgggttgagaaccaaagggacagatgtttcttccaggccaagtataattgctgacttcatgcacttytctcttttccactgcacagtgaccagcaactgctgagatggtagctgcttcgtcaggtacatgagtcctcagttgacccacatggatatattgttgtttctgtttctacagcaaaacctagccttccctgacatccaaatctccaaaggacaagttgtatgtgaaaatggtgagcagtacaatttaactagaacatgctaggccatgaggagctagaggagataaaatcagaaagagaactggaggtcagataatacaaacccttgaaatccagactagtctagaagatatattgcaggaggaaggtactacagatggaaaaaaacaattaggttggtaagcccaaagaaatgtgtcaggaaagaaacaaaaaacaaaaaaattctcagttaatatcagata

SEQ ID NO: 836969 - DNA, 530 bp, Homo sapiens
taatgatacacttatactccatagtcctcttgggtggggccatatgacttgctttgaatagtgggttgagaaccaaagggacagatgtttcttccaggccaagtataattgctgacttcatgcacttctytcttttccactgcacagtgaccagcaactgctgagatggtagctgcttcgtcaggtacatgagtcctcagttgacccacatggatatattgttgtttctgtttctacagcaaaacctagccttccctgacatccaaatctccaaaggacaagttgtatgtgaaaatggtgagcagtacaatttaactagaacatgctaggccatgaggagctagaggagataaaatcagaaagagaactggaggtcagataatacaaacccttgaaatccagactagtctagaagatatattgcaggaggaaggtactacagatggaaaaaaacaattaggttggtaagcccaaagaaatgtgtcaggaaagaaacaaaaaacaaaaaaattctcagttaatatcagata

SEQ ID NO: 836970 - DNA, 648 bp, Homo sapiens
aaactcaaaggctcaggaggatccagaaaccaagactcttgggacatggaatttggcaatgccctggtcaaaaccatccagagggagaaatctttacaaagatctcctaagactgcaaatggcaaaatgtttcccagtctccagcatccctttcccagcactcaagggaagacaagaggtgttagtgagtatctgatccagggctgcatctcctgtgaaatcttgtgatttataagatccagcaaaggctttagtcaggctaggaagaaattctgaaacaggggattccctgctggaaagcctgtatgccagcacaattaggaaagacttcaggaagaacaaaggaagccatggtgcaaaggtgtggctgacccaaacatttcagcttgaggagtcttggctgctggtgggaacgagaagcaatggcgttggctgctccaggtccacatgtaattgatctatctacatatatatttacattttttgcttttttaaagaaacttttcggataattttttttttcttttagacagaatctggctctgtcacccaggctggagtgcagtggcgtgatcttggctcactgcaacctcygcctgccaggttcacacccttctcctgcctcagcctcccgagtagctgggacta

SEQ ID NO: 836971 - DNA, 525 bp, Homo sapiens
atggaccgcacacattatctgcttacattcagctcttcagaaaccttgctaaggctattgctacggtaatcaaatattgtttgtgcgtgcatgcgygcgtgcgtgtgtgtgtgtgtgtgtgtgtatgtctgtatgtgtctgtgtctgggtaagaaaatgcagagggaagtgaaagagaaccttagcttcgagtgttcagtttgacaacctttatattttacaaaatttatagttttgtggtatctctaagaaaataaataaaatttatttccaaattttggatctagttaacatcctttcatggtggcagcttctttcatatatattttctcactatttttacaaccatcatgtgaaattaaggagatatcatttctccccagttttcagaggagcacataggcttgaagataagtgatgaagcttactacacctgggagttgaacctgtgttctctaatccttgccagattctccccactcactccaaaagttgagtaggtcagcattctaggatgcccatttt

SEQ ID NO: 836972 - DNA, 666 bp, Homo sapiens
agcaaaaaaccttttattagaagtcattaaatgaatttttactttcagggggaagttgctgaagttatatttgtaggtgctaacccgaagaattcagtacaaaaccaggtaggtatcaatgattttcttttacaaatgtaaatccactttttagccattcattcatttaaatatccctctagaggttaataacataaagacaaaatgttccaacttgttttccatcttattttgtaggtacgggaaaatattcaataggtagttaatgtggattgagtctgggtaaaagcacacaggaaacataattggcttcacttaggaccaagtatagcataatgcatgtatgactgcattgtctgtcaagaagatgttaagttgaatacaatcccatatatataattacgcgccacatacaatgatgtttcagtcaaagatgaactgcatttatgacattggtcccatgagattataatactctacttttactgtaccttttctatgtttaggtatgtttagatacacaaatacttaccattgtgttacaattgcctacaacattcaatacagtaacgggctgtacaaatttgtagcctaggagccacgggctrtaccatatagcctaggtgtgtaggaggttacaccatctaagtttgtgtaagtctaagt

SEQ ID NO: 836973 - DNA, 650 bp, Homo sapiens
caaaagaagtctcttaataaattcaattccatgggtttgtctatggacagggttatagccctgaagacagaaggatgacactaagtggtactggaaactgggagtcraggtaagtttttggttatagaaagtgtattttattattagagcaaatggcaaatacattcaaggacattgatgttataggggaagagtctcaagggggaaaaatgctaatacaagtataaaaccaaattgctatttatgaaggtaaagtttggtgctgcctcactgtcaactctttccttatactctaactatagtcttgataaagtactcaatattccctctacatggaatagtctatttgcccagtacacaaacacaaacacacactaatacacacatacatgcacacaccattgcctttcttctagctaatttctacatatcttttaagtcttagcttatatgttatttcttccaggaaacttactgaaacatccccaagaccatattaggtgccctctctaattccctgaacaataacaatatgggtcactctgtacagtaattacctgttcatccgtttgctttgttcgttaaacgctaagttccttttggcagggaatagctttgccttcattattgtttcattcttaggatttagc

SEQ ID NO: 836974 - DNA, 592 bp, Homo sapiens
tagagaatacagaggtcatgaatggtggggcacacagggctcaagacatccttagaccacaaactcgacttcagggaaaactgggttcactcctccaggggctcyctgacccaggctgcccgccgaccagggtgctgccgcttttcctcagctccctggctcctactcaggtcatccaggagccccagcagaaggcccgcttgaccataggctccctggggcccacaggggcctcccagggccctcttgcccggatgctggcgtttttcaggcatcaggtcttcctctctctcttcctcctcctcctcttcttcccagctcctttgagccttgggatctgccagccttctgcctgggtgctgccgcttcgggacagcatatgcaagccagggggagcgccggccaggatgctgccgcttgtgctgggttacatcgactgaccatgaagcctcatcttctcgtcggccagggtgctgccgtttgtggggtcccacagcccccccttcttcctcttcctcttcttcaactccctcttcctcctcctcctctcttttgcctggatgctgacgtttggagagccagtcagattgaa

SEQ ID NO: 836975 - DNA, 589 bp, Homo sapiens
cacagcccccccttcttcctcttcctcttcttcaactccctcttcctcctcctcctctcttttgcctggatgctgacgtttggagagccagtcagattgaaagatctgggacgctgrggaaggaaagaggtcagtgaggggcccctgacccatgtaataggcaggcgcctgagtgcccactcctgcttttctcccaggcagggtacatttcctgcagctcccactcagaggcatggtcttgcacctgcccctcaggcctcacagatacacacattcacacaatagtcaaaggcattgcctctgggttccaatcccagctctggcgctccctagttgtctgaccataagcgactcaattgatctctgggagcctcagttttcttctgtgtaaaatcgtaataacagtacctaactaagaggttgttaggaagatcaaacagtgtgataaggtgtttgaagtgcttggaatagtgtctggcacagaagtgcctagacagtagtaattcaaactgtcacacacaaagaaactctctccctagcacacagaagcttccccacccagggcctgctctctgtgaaatattcccag

SEQ ID NO: 836976 - DNA, 380 bp, Homo sapiens
atgactaagccaggaatctgattctaacgctaaaatcctaacttcaacgctaaaattctatttctagcgttgagattgggattcgaactcccaggttctcasgccgacgccctgaatacccagctctgtccggcggcacccaggcagggggtgccgcggagctcccaccccgcgctgcggactctggcgacctgagtgcccagcagcgagagcctccgatgtgcccgcgccgtgcctcccgtcgggtccccggcctgcgctcggggaggacccgggggtgcgagcacagcgcccgcctgtgcaccggccctgttctccaggaagctctcagagaaccgaaggtgagggcgggccgagagggctccctttccagtgctccc

SEQ ID NO: 836977 - DNA, 645 bp, Homo sapiens
ctgggggttcaagaccagcctgggcagcatactgagacctgtctctacgaaaatttaaaactttttttgagatggagtcttgctctgttgcccaggctggagtgcagtagtgcgatctcagctcactgcaagctctgcctcccgggttcacgccattctcctgcgtcagcctcccgagtagctgggactacaggcgcccactaccatgccaggctaattattctttttgtatttttagtagagacagggtttcactgtgttagccaggatggtctcgatctcctgacctcgtgatccacctgcctcagcctcccaaagtgcaaggattacaggcgtgagccatcgtgcctggccctaaaactttttaattaaaaaaaaaaaaaagaggaagaaatgggaatcatgatccccaccatgtgggctgctgtgagggctgaatgggacaatgacatcaagtgccaagtgaagggtttcacaggcagggaacccaacgcctgttggttctctaaaaccaaaaagagaaggaagttcattaacaacataatggactatattttacamataagaatgtctagcggtccaaaagggactatcccagaacaagaagtcgcttgttgcatcacagcccatgaagcaaaggtcaag

SEQ ID NO: 836978 - DNA, 645 bp, Homo sapiens
ctgggggttcaagaccagcctgggcagcatactgagacctgtctctacgaaaatttaaaactttttttgagatggagtcttgctctgttgcccaggctggagtgcagtagtgcgatctcagctcactgcaagctctgcctcccgggttcacgccattctcctgcgtcagcctcccgagtagctgggactacaggcgcccactaccatgccaggctaattattctttttgtatttttagtagagacagggtttcactgtgttagccaggatggtctcgatctcctgacctcgtgatccacctgcctcagcctcccaaagtgcaaggattacaggcgtgagccatcgtgcctggccctaaaactttttaattaaaaaaaaaaaaaagaggaagaaatgggaatcatgatccccaccatgtgggctgctgtgagggctgaatgggacaatgacatcaagtgccaagtgaagggtttcacaggcagggaacccaacgcctgttggttctctaaaaccaaaaagagaaggaagttcattaacaacataatggactatattttacaaataagaatgtctrgcggtccaaaagggactatcccagaacaagaagtcgcttgttgcatcacagcccatgaagcaaaggtcaag

SEQ ID NO: 836979 - DNA, 427 bp, Homo sapiens
cagttttaccccatgctgttctcatgatagtgagttctcatgagatctgattttatgtgacaatttttcctgctcacactcttgcctgctgccatgtaagacatgcctgcttccccttccactatgactgtaagattcctgaggcctccccagccacatggaactgtaagccgattaaacttatttccttcaaaaaattacccagtctcagatattctttatagtagtgtgaaaacagactaatacactgtccaatcattagctgaccactaagttaaccaagcagagactttagtaaaacatggcaaagaatacagactttacagaattagtccaggaaagacattaaacaaacagaggcagcaacaacaatgaayagcaacaacaacaaaccctggggagggagacatctgatttccagaatttt

SEQ ID NO: 836980 - DNA, 617 bp, Homo sapiens
caccacgcccagctaatttttgtatttttagtagagacagggtttcgccatgttggccaggctggtctcgaactcctgacctcaggtgatccgcctgcctgggcctcccaaagtgctgggattagaggtgtgagccactgcaccccgccagcaaatcattcttgattgtgatgatgcatttatctccaatttcccccccaaccttatttgttactgttctccccagtgcacccacaatccatccatgcaggtttatttacttccccaagcttcctgtttttactcctatttgtacctattctccaagacaaaaaaagaaaaaagagagaaacctaggattttaaaactgtttcagccttccttccttcatgaagatttctccaacagcaactcccatggctctgtgtatactcagtacttttaaatagtaggtctgttttagcacttgagctaaattgttatgtttgtattaattcttcaatttggaggcatggtcaatgcttgctattccttaggattgtttatatcagtgttcctgtgtaagactggcttataatttttattattcytaatatttgtttggttttggtattaagatcctagtgttctcatagaat

SEQ ID NO: 836981 - DNA, 548 bp, Homo sapiens
atagaagtgaaaccttagccatgtttttcagattttaaaaacatctcccatttatgctttctccttcactgcaggtcatttgaaatggtttcgaaggtaacacatactttatgctttgctacactgaaaatttattcaacagttctattcttaaagttatttctttcttgtgcttctattttataaggagcaacatttttccaaccacctactaagggaatttgtgatttagcaacatcttttaccaaccagtcattcacactcaaaacaaatctttctcttgacctcctggttttataacacattactaacccagtaataggaaatccaagagttaaaacaaaaataagaaaaatataatcaagttcagtagacatttatgactttgaagaatgctggccaggcatagtggctcawgcccataatcccagcactttgggatgctgaggcaggaggatcacttgagcccagaagttcaagaccagtctgtgcaacatagcaagacctcaatctctactaaaaaaaaaaaaaaaaaaaaaaaaaggggg

SEQ ID NO: 836982 - DNA, 577 bp, Homo sapiens
atttctgagtggcaaagtgttcaagaygtgacctgtctgcttctaacacccaatgttcatatgcatgagcaaagaaatgatgtaaaactggaacttacatttaaaggggaagcagagcataaaagtttgaaaaatttgcagcccagccatgtgttagaaaagaaaagcccgtttttcagaggagaaactcaagtgggctgcagaaattcacataagtaaaaaggagataagtgctaatatccaagacaatgggaaaggcctcaatggcatttcagaaacctttccagcagtactgcccatcacaggcccaaaggactaggagacaagaatggtttcatgggccaggcccagggtctcactgcactgtgcagcatcagggtcctggatactccagctccatccgtggctcaaaggggcccaggtagagcttgggccactgattcagagggtgccatcaataagcattggcagcttccacgtggagataagactgcaggtgcacagagtgtaagagttaaggcttgggagcctccacctaaatttcagaggactgtactgaaaagcctggatgtccaga

SEQ ID NO: 836983 - DNA, 577 bp, Homo sapiens
atttctgagtggcaaagtgttcaagacgtgacctgtctgcttctaacacccaatgttcatatgcatgagcaaagaaatgatgtaaaactggaacttacatttaaaggggaagcagagcataaaagtttgaaaaatttgcagcccagccatgtgttagaaaagaaaagcccgtttttcagaggagaaactcaagtgggctgcagaaattcacataagtaaaaaggagataagtgctaatatccaagacaatgggaaaggcctcaatggcatttcagaaacctttccagcagtactgcccatcacaggcccaaaggactaggagacaagaatggtttcatgggccaggcccagggtctcactgcactgtgcagcatcagggtcctggatactccagctccatccgtggctcaaaggggcccaggtagagcttgggccactgattcagagggtgccatcaataagcattggcagcttccamgtggagataagactgcaggtgcacagagtgtaagagttaaggcttgggagcctccacctaaatttcagaggactgtactgaaaagcctggatgtccaga

SEQ ID NO: 836984 - DNA, 526 bp, Homo sapiens
cattcacctgggccactggggacaatcttctgaactcaaactcctggccaacattcccagacagccttaatagtctccttagatcttccccaagtctatccttgccaaaaagccayattaatcttagacctttttgcaagactcacagcaagcctgggcttagaccatcctctagtgccacgatgactgtagtgatcacaggctgaaggaacaaaaagttagtcagcttagaattactgaaaggctttctgaagaacggcaggtacaaacaaaaccagactgtgaagactaaaataaatacctaatccttcaatgtaaagacattgtcagacatcagcaagtgtcaggaacattcaaggaaaatataacactacaaagtggacaaaataaggtgccagagactgaccctaaagtgatggagatatgtgatcattcaagcaaataattcaaaatagttgtttcaggaacctcagcaaacttcaagaaaacacagaatcaattaagaaatctgtcagaggaatttaac

SEQ ID NO: 836985 - DNA, 526 bp, Homo sapiens
taaataatgtacagcagggatcctcaacccttggtactggtccatggcccatttggaattgggccacacagcaagaggtgagtggtaggcgagtgagcattacctcctgagcttcacctcctgtcagatcagtggtggcattagattcttatgagcatgaaccctattgcgaactgggcatgcgagggatctaggttgtatgctctttatgagaatctaatgcctgatgatctggggtggagcagtttcacctaaaatcatccccatccctggtccatggaaaaattgccttccacaaaaccagtccctgatgccaaaaaggtttgggaatgctgctgtaggacacaaaaagtagagttataaattaagaataccatagtgctggattttacattcactcatgtagttacatttatcagagccctttgtctcttcacacagttttgagttattaccagtgtcctttcatttcarcctgaaggtctaccttagtatttctttcaagacatgtctagtggtaacagac

SEQ ID NO: 836986 - DNA, 464 bp, Homo sapiens
actggtttgcaaggcccttcaggatcactgacctgaaattcttgactctctgaaagttgcctttaggttttgttcacttgtgatcctaagtattggtcttcaagctgaatttcattaaatactgacacttgaaactacaggaaacatctttcctttgacaagtctttgagaaggactcgacaacacttgcaaatactcatttcccaacacatttttaagataaagaatcaccacaactgccaccaccacaccatcaccatcaccatcaccaccctgcaaagcaggcaccagagaagcgaaactgagggaatcatcccctcagaaatcatactatatggtaatcaaatagcaaagaaaggatcaaaagaaaaaaatgaacatggaaatcttaaaatttaatattgtttrtcatcagcaggctaaaccatcggcctaggtttaaaaggcaagaaagcacagaacaa

SEQ ID NO: 836987 - DNA, 587 bp, Homo sapiens
taacagtattacaagtaatacaaacactaaaactacagaaaaggtgaagttactaggcaactttcttacatttctgtcagaaccaaagcaatagtgaagagtgttgtataaaaacaaaagcttatgagaacatatggttgcatccttttaactttaatttaaacatttgtatgcatacacacagcacatgcatgtgtgtgtttgtgttatgtgtgcataaagactgaagctctcaagggaagatgagggaatgaagagagggaaaagcatagggaactgagatggtgtctaatactaccaaacaaaaataagcagtagcattcttattagcattaatattgaacaaacatttgctaaacacatcaacaagatttgtcattagagttctctgtcacataacagtgatagaaaagcaataaataatgaagccctcatgatgtaaaaactgaaacttgtccatttttcatgagacttttatgagagttaagtaaaattaggttaaaatacaataaggaaatttgttataaaaaataacttatttcatasgctattatctccacaaaaatcagaactccttttcctaacca

SEQ ID NO: 836988 - DNA, 542 bp, Homo sapiens
gccctgaaaatagaatccatgttttcgtttgatgagcacctttatgatctggcccctctcctactcacctctcctctccatctcttgacctcccataacactctatattccaggcccactgaatcaatctcagttccctaaactagtcgctattcctctagccactaatttggaactagtatactgtgtccgacatgccagaatcttaagtagctaactcctatttgttatatgtgtctcaaattcaatccttttttcatctataagttctctctatctcgtttcttcccaaggcatttacttccttatcactgcctcatcaatataaggtgaggcaaatctcatttgtatgtgttcgcattatagtcctaacttctgctagagcataatacattgcacctgtcagtcacgcccaagctcattcacagtaggaactatttaatgttacsgtggaatcgtttcctagcaaggtgcctgaattttaggagtcctttgataatatgcttggaagtgaacattcttttgcacctacaataccagca

SEQ ID NO: 836989 - DNA, 623 bp, Homo sapiens
tatacacatttaccatgaatatatgtttatatatacatatacacatataaacatatatacatacacataatttttctaaagtagaatcacatgatatgtgctgttttataagctgcattttcaaaagtatgaggcattactatattttaaatgttcaagaaattttacacagatcctcagcatcaatttccaaggctacatacaattctaacatttgggtttactacattttacctaactattcccatactgatagatatttaagacatcagtgctaggtaatttagaaatctcattcttcccgcttatgaacagcactgaaatcagcattcttttgtatatatcttttctcatatgtgcagttatttccttgggaggtatcaaagtgggattcttaaaggtatacccaacttaaggctattggtttatattactaattatcttatgtttcataaagtcattttaatataaatatatcatttaaatttttgtctttawcataaccctgctgtgagactgtttgggaagtgttaaaataacctcacttttcactaaagggaacagtggctcagaaaagtataacctcttctcccacatacctctggtatgcgcattgtaaaaat

SEQ ID NO: 836990 - DNA, 632 bp, Homo sapiens
gtggtaaggtgtatgggggggtggtttaggttagattactgagagctttatttattgagggcaaataggtgctaagagccgtatatcccttaactgattcaattttctaggaagtaagtgatattattttcttcatatttaaaagtttttatatttgcccaaagtcatagaattagtagagatcacacagggatttgaaaccacaacccatgttcttaacccatatactttatcttatatataaaatataatttttatacattatctaatatataaaaaacctaatgccagttgatcattctgacacatgataagcatttgattaaatgaccctccaatactcttatgaacttgtgccttgaacaataatttgtttgacaatggctttgggatcctcactttcaaacatgcatgttaataataatgactcttctacccaaccaagggccaaatgaggtaatatctaaagaagtggatcatagatgattccatagttgttagagagcattcttgctatcaattcaagatgagtctgggttttgtgaatatgagagaatccaatcaaatggattctgctcatgaaatacacactccagttgcacagaagtgwtgcattttagaataatgttcct

SEQ ID NO: 836991 - DNA, 646 bp, Homo sapiens
tagggatggtagtgttttgtggaaacactaggttagagcaaagtactatttgaggaggttatagggatggtagtgttttgtggaaacactaggttagagcaaagtgaaaaagagtaaaaaatagaggagatttgttggaacacagtgaaacgattttagatcaggagatggggtcagaaaaaaggattaaatatttattttggagagataaaaatcatataagcaatttagaagtacagtggaagagaggctaatgagttaacctgagtaaaagggaatgagcagacacttgacactgtaaaaaatggctctacagacactgagaagcagctgttctttattgctcctgaagacagaacaaagggaaaaggctattttagttgtatgcgagtgtcataggaaacagacgcaagagaatttttcctttttttgtctctggaacatttcaagaataaggctgttttctttccagagtttacacataatgatataaattggatgacttgtttagattgtgtatttcctgtggtacctttggtaaagattgaaatgaccatgtcagattaatgtcttaacaaacatatgtcatattgcttaagcttgatctcagtggcaaattaaawacagcttaaattgatgagttttt

SEQ ID NO: 836992 - DNA, 623 bp, Homo sapiens
ctcccagagcccaggccccaaccaatgtttgaaggaaaacttcactgctcacaaacttctgccttccaggatggccaaccacccaggaagccctgacattcaggaaggccccacctcctattgcsaaaaggacaaggcatccgaattcaagctgacagtagcatctttttcacattttgaaacatctggtataaaaaaacaccaagagggaactgcgcacagaactgaaggtgctgggctctggaactaccaggcccacctctgtgttccgttcacattagcaaagagaaactagactccttcatcctttgttcatgcccacctcagctctagcccgcctggcgtaatgatttggttctttgggaaccaaaagaatatccagattcgtagcagcccaaatctatattaagaacaagaagcatttccttaaagaaacacattgccaagatttcacttcacaatgaaaacggcctttactttactttgccaatcaatttagttgttcattgtcttaaatccttccactttggaaaggagttttgctttccatttacattaccaaataccacattaaagagactctcaaacactgtgttctcaaagtggaaatcaaggcactctct

SEQ ID NO: 836993 - DNA, 586 bp, Homo sapiens
ataactacagtgctggaatttgagcagctcagaatgagtctaaatgtttcaattgrttctgaactgaccatagaggagttggtagtttgtggaagtactctaggctctgagcagtcagtgagataggtgtgatgtatgtgtggttgtcttgactcaggtccaagctgccctccctagactccttgagggacagtgacactaaagaaatttgcaagcagaaggcctgagtttccagtttcctctctgacattcactgagagggaattctgcactctcatagtagttagttatggcccggtcatttgtaaatttggccaaatactacctcctcatgttctatgtgcttctttttttcttttcttttctttttttcttttttttttttttttttgagacagagtctctctctgtcgcccggctcgattgcggtgccgtgatctcagctcactgcaacctctgactccctggttcaagttattctcctgcctcagcctcccaagtagctgggattacaggcacgcaccaccatgcccagctaatttttgtatttttagtagagacagggtttcaccatgttggccaggat

SEQ ID NO: 836994 - DNA, 607 bp, Homo sapiens
ggggacctaacctgtccattcacactgtgactttgtcacatgtatttccatcttcagtcaatccatgctttgtcttatagcctttctcagaaggaatataaaacaccagtgatcatcatcttggtgggttattaattgtgtttaagattccagaagattgtctctgaattccttcagccggatgcatttacatttacattacaagaaatgtatctcccactcatcaaattttatatgaaggtgccggatgagtctttgcctttgattaagaatttttttaaatagaacatttagtgagccagaaacatttggtaacatcattttctgaggatttaaaaacacttcaacataaaatcaaacgcagatgtataatttgagagttcatgaatcattagttatgtacatttataattacgctaaacctaaatatttgaaaagccacattagtttctggctattgcagctaattctcgggtaaagaatttgaatggcrttctagtattgcattttacctagactacactgttacagaattgtgtgtaggattagttgattttttttcaatttagaatttccactcatgggaaaaatactcaatatgaaatat

SEQ ID NO: 836995 - DNA, 555 bp, Homo sapiens
acattgtactttccatctctatgaatttgactgctcgaggtacctcatatgagtggaatcttaccatatttataattttgtgactggcttattttacttaggataatgtcctcaagttctatctatgttgtagaatgtgtcagaatttccttcctttttaaggctgaatagtgtttcattgtacgtatatgccacattttgcatagccattcactcattgatagacattcacgttctttctagtttttgactattatgaataatgctgccagaaacatgggtgtacctcattctgtcttgaatccactctgatcaggttttcatccccatgactcctctaagactactcttaccaaggtcccaaatatccttgatgtcactaaatccatttaatgtttcttagtcttcatattgtcacagaatttttagggtgttgcttttctggccagaaacctctgtggccagtgacacctttgcccgagttctgctcaggcccgctggactcattctgyccactcagcctggcaggtttcctttgactcatggtaccagcct

SEQ ID NO: 836996 - DNA, 520 bp, Homo sapiens
ggaggggagacagagtcctgcttggggcatctggcaacctcagtcaagtcacagcaggggtgcccaagggccagctttctgcagctgctggaggggtgtcctacaggagttgggccctcctctygctggccattcccccatgcctcccattggcaagatctagcagggagccaggtgagaaaggagcctgggaaacatccttcacacagtcttagcatcagagcagaagcccgtggcttcctttgctttccctcttccttgttggcctttattatcagttgtattcacttatctgactataaaacagggtaatattagtgagagaggaatctgttactgataaagaacaaggaaaggaatccattaatcccttttgattatcatacagattattccccagtgattattagaaaatacttttatcttaatgaggaaaaatctcaatttatttttaaaatcctggaaaatggaatgccgggtaatattcttatttaacttttgacattttttaaaaagtcat

SEQ ID NO: 836997 - DNA, 595 bp, Homo sapiens
agagtgagatggggccgggtgcggtcgctcatgtctgtaatcctagcactttcagaggctgaggtggacagatcacctgaggtcaggagttcgagaccagcctggccaacgtggtaaaactccgtctctactaaaaatacaaaaattagccaggcatggtggtgcgtgcctgtactcctagctacccaggaggctgagggaggagaattactggaacccgggaggcggaggctgcagtgagccgaggtcgcgccactgtactccagcctgggagacagagtaagactctgtctcaagaaaaaaaaaaaatgaaagaaagaatgagatgggaggggtcccagtgcttggttgtcctgttgtcctgggctgatttttgcctatgctaatgcgcaatacagtggagttcagaggagtaaattgattcagtgtaaaaatcttaccagctgttcttagccttatgtctggacartgtaaataaaacaatactgtatggatctttgctcttttttaaataacatgaatcttcagtttttctcttaaactaatattttatcttgtactttatatgacatcttgtctgggagttggggtcagg

SEQ ID NO: 836998 - DNA, 527 bp, Homo sapiens; identical to SEQ ID NO: 833557

SEQ ID NO: 836999 - DNA, 603 bp, Homo sapiens
gctgttagcctgaggtgggaggagagaggctcaaggtgtcactttttggctgctcatccattttctagaggaggcccctgttaaagaacaagggttccctgggaggagccatcaccctagagcctgtgccagagcctagtgtagactgattcgtgggtaagtgggcagcaggccacgggggacctggcagatgggctctgagagggagaagggggctggagcccgagattctccgggacagtggatctcagccctcgacatgcatcagaattgcccaggaagcccagtccccggaggtgtggttgggcccaggtactgggagtttctcttgaaagctccctggagagttgaacgtgcaggagggttgagatccccgccctgggtgatgaccagggcgtgatgtggggaactaggacaatgttggggcattgagctctgaccatgggagtgtgaggagctctgggaggccaggaatactgttttatcacccagaaacctctggcttggagcagaytcctcaccaggcattagatggaccagagtgcagatggatttgtctcctggtgtcagaatttgaaaggtctgcaacctgacatgtagaca

SEQ ID NO: 837000 - DNA, 627 bp, Homo sapiens
gcgtattgctgtgcttgctctgtgtgcgtgtgtgtgtgcacgcgtgcgtgaatcattgccaaggaattgacacatcacacaasgtaatactgccaaagaatctactcaggcatatattgtgggttaagctaaatccttcagtataccagataagctcattaatgcctgagaagagcgggataagaagataattttttctttttctttctttcttttttttttttttttttttggagacagggtctcgctctgtctcccaggctggagtgcagtggcgcgatcatagctcactgcagcctcgacctcctgagctcaagtgatcctccaacctcagcctcctgagtagctgggactacaagtgtacaccaccatacctggctagtttttgatttttttgtagagacagggtcttgctatgtggctcaggttagaaagagaaatttctaaaatgtcttttccttttctcctttcttgaccttgtaacttttcccttctctctctgcatcctccttacacccctgattttcacgagcttttctaggtcttcaaagtgttcttttatcccttttaaatttttctcctaaatttatcttataaaatatccagaagtcatatttctgattgtac

SEQ ID NO: 837001 - DNA, 597 bp, Homo sapiens
tccaggagcaagacagattggcacagctctttattaagcacgtaagtgtctcccatcacctcctccccaactccttcactaggctcatttatattcattttaaaatcctggccaggcacagtggctcacacctgtaattccaacactttaggaggccaaggtgggagggtggcttgaccccaggaattgagaccagcctgggcaacatagtgaggcccccatctctacgaagaatttaaaaattaaccaaggctggtggcacatgcctatagtcctagccacttgggggggcggaggcaggaggatcgcttgagcctgggaggtcaagactgcagtgagccatgatggccccaccctgcactccagcctgggtgacagagcaagaccctgtctcagaaaaaaaagtaaataaaatttcttctcttctgctcttccttgactgaccttctttctcagccctctctaagtttttttgtttttttgaccaccttggcgatttggaaagtggctcttgcccaccacatttatatccttgatattcagctgccttggtgcrtccccaagtgcgcctttgtcctttgtccacgtggaggccag

SEQ ID NO: 837002 - DNA, 583 bp, Homo sapiens
catgatctttagtagcgcatagtatttctttaattcccagtggtacacaaagctattgagtgtcatagacagaaagtcaaccaagtcttcttgaggaatggatcctccaaactcktatggtacaagagctgcattaggatccctgcttcaccaccatcctgggagagcagcctcgctcaaatatccagatgataacttctcatttgaaacatttgctaaccccttctctagactcaattgtacaattcaagagggtatatatggagaatcagtattatggtgtcagtacagctgttaccaagtccactaattgtaaaatgagcctattgccatgttaactgcgcaaacacaggacaagaccacattttcactgagattctttctgtagacaacgtgtcctggtgatcatttatctcccaatctttaatttgacccttagcatagtaaacaaggattgttttggctgagtacagatggcaagagttaaaggaacattagttagttctgccctacttcaataaaattattaagcatggatcccccatcggaggaaaatgaatgatgtgttttaacaaaaagtgct

SEQ ID NO: 837003 - DNA, 580 bp, Homo sapiens
ttagtctagaggtcaagaaattttctgtaaagggccagatagtaaatatgtccacatatgggttccgtggcaattactcaactctgctatttttgtgcataagcagacatagatacgacaaaacaaagagcatggctatgttctgataaaacttcatttatggacgctaaaatttaaattttatatatttttctttgctttttctcttttttttttttttgagatggagtttcattcttgtttcccaggctggagtacaatggcatgatctctgctcaccgcaacctccgcctcctgggttcaagcgattctccagcctcagcctcccaagcagctcggattacaggcatggccaccacacctgactaattttgtatttttagtagagacggggtttctccattttggtaaagctggtttcgaattcccgatctcaggtaatctgcctgcctcggcctcccaaagtgctgggattacaggtgtaagccaccacgctgggctaaattttatataattttcatgtgctagaaaatactattcttttttwaatttttttcaaacatataaaaatgtaaaaatc

SEQ ID NO: 837004 - DNA, 529 bp, Homo sapiens
gttgtgaaaattaatgagagattactgttgttggtaaatattatataaactggaaaacttatacaaaataaagtattttttcatcatatttattattattactattattaaagtagagtctgcctctgttgcccyagctggagtgcagtggtgtaaactcagccctctgcaacttctgcctcctgagctcaatcaaccctcccacctccacctcctgaggtcaagctatcttcccacctcagtctcttgagtagttgggactacaggcatgcaccaccaggccagagtagtttttgtaaattttttttttctttttcagagacagggtttcttcatgttgctcaggctgttgtgaactcctggactcaagcgatccacccgacttcacctccccagggtgctggattataggcatgaatcaccatccccagccatactttggccaaaactcaaggttttatcaatcctcaagcctctaaaatttgataaatacttccttttgggaaaatcctcataatacttctattca

SEQ ID NO: 837005 - DNA, 616 bp, Homo sapiens
tatttaacgacatctatgttttatttcaactcacttcaacgtgaattttttattgaatggttactctgcacttagattcaaaattaatgtcttctttattttcctcataggattctgttcatagatttagttgaatgtttatacaataatactttgtactagtattggaaattttctattcctgggaaaaattataaattatttggggataaggaatttttaaaatctcttaaactgtccattattgtactttgaaaataacatagaatgaaaaatggattcgatgttatttgaaaaatcatatatatacagtcagtgagtctgccagaaaagatattcaaagatattcaaagaatttataattcaaactaggacatttgtgagagttaaaaaggcagctattagtaaatatgccaaatcaagaatagtaaacagagatgatttgggcaaacagagacacttggtcactctacttataactttcatatccaccccatagatgtactgtaatttactagtaatttcttcactgctragcattaagaatgttttaaatttttgagaatgtatcctacagcaaataaaaataccttatcagatatggtgaaatacagtg

SEQ ID NO: 837006 - DNA, 644 bp, Homo sapiens
atagttttctgagaagcactgatgtaaaatagaaaactcaggctgattcgctcaggtgtttgtgagaaagactgaataacattatacataaggtacctagtacagagccatacgaaaggattggaacttggttttgaaggatgcaatgatccactgaagaacattaagctaggagtgacatcatcaggtttgcatttttcaagggtaacgaacagttatgaagcaaatctgaggaaggtggaattgaggagtttaaagacaaaaggatgggtttagagaccatttcaatagcctggaaattacgagaaccaatttaaatcaatggcagtggaatgtggaatacaggggaaagatacaaggtatgcttaggagatagagtcgaaacatttagtaaatgactgagtttgaattgagaaaggttgtaggaaaagagaaatcaaggataacacactggttgttaacttggaagacttggtgcttgatgcttgggtgaattattatgctataaacagatgcaaaaagtttgaagaaacttagaggataggacaggtactagattaaaataatgagtttcattttgaatatrtgaagttttagtaaaattccataaaattaaattaagtaaaattttacttccataaaag

SEQ ID NO: 837007 - DNA, 593 bp, Homo sapiens
aagggtctgcacccttttgcataacctctacttaaacggccctctccttaaactgggcggtagcttgacattgtaaatttgtaattaaacttgcttatactataattctgacrtctcaaaagtttatttccaacaatggactactggagatatgataaaacaaccctacgattaggttgtatctggtttccctcatattgtaaagtaggtgttgagattcttccatgattacctgcaaagggcctagagaaacagcagcccttcaaacagatcatctttatctagtttgtatttatatcaatgctgtttttcatcctctcctttcctcttctctttcctcttctcctcctttcttctcctcctttcttctgttctctcctttcctcatgcctttccagatgggactcactaagaccatcaacctattcccacatgttttttcctgttcctgatagggcaaacaagctgtggccaatcagcaccaataccagggacagctcctttccctagggcttccccgtcaggttaggttcccaattgtgatttttattgcaaggctgacatttgtagctagaagattcttcaatctccca

SEQ ID NO: 837008 - DNA, 593 bp, Homo sapiens
aagggtctgcacccttttgcataacctctacttaaacggccctctccttaaactgggcggtagcttgacattgtaaatttgtaattaaacttgcttatactataattctgacgtctcaaaagtttatttccaacaatggactactggagatatgataaaacaaccctacgattaggttgtatctggtttccctcatattgtaaagtaggtgttgagattcttccatgattacctgcaaagggcctagagaaacagcagcccttcaaacagatcatctttatctagtttgtatttatatcaatgctgtttttcatcctctcctttcctcttctctttcctcttctcctcctttcttctcctcctttcttctgttctctcctttcctcatgcctttccagatgggactcactaagaccatcaacctattcccacatgttttttcctgttcctgatagggcaaacaagctgtggccaatcagcaccaataccagggacagctcctttccctagggcttccccrtcaggttaggttcccaattgtgatttttattgcaaggctgacatttgtagctagaagattcttcaatctccca

SEQ ID NO: 837009 - DNA, 575 bp, Homo sapiens
tggccataagcatgttttgtatatttttatgaactttctatttgagttttttttatttatttctttggaaaacaattaggcaagtgagaaacattaagaaattggtttccactcatttattgagctattttctcctcacatagcataatttgaataaaccacaaattaattttctatcaatggtgccaaaatgtctttgagcattttaggattctcggagtggctatttgaaactttatttatttttcagcatattgctgaaataaaaataaaaatctcagcatattgttatatttgaaagaagctccattctgtcttcatttaggaatttctgtgttgttttccccaaaacaaaacaacagctgtgtctaggcaacatacaaaattatcagggaaagttgatttgaaatattgaaaaagataaggtaggagcatcagcaaagaatcctatgaaaaartgtaaattcataaaaaggaaaatttcatgaagttttataggttatacaggttatatagtttattataggttaactaaacatattaacttcaatctctgtgtaaataagactgagtca

SEQ ID NO: 837010 - DNA, 580 bp, Homo sapiens
tcccatgtggctgccttagctgccctcccagacaccagctgacatgggggcctctttcagtccttgtgaaagagcagcaactgtgtggactggacccattcccatccctgtacctagcttctcttcaacaaaagggactgtttatgcacccatggacaaaagctacctacgaccccataagttatgcccagctgcccacaaaaaggagagaaatacacctttatgtccactggaacaatgtctctggaattcagctcaagaaacattcttggtgaaaagttcagttctaacaagatcatgtctacaaggtaccctctggatagatgcccataggtttccacctgatgccaaattccaaacagcttcccatgtttccctgccgtacaccctaagttgcttttcttgggtatccacttggctttgctctccttcctcccctcttgacccttacactggcaytaaggaatacaaaagctgaggaaggcctggaggagaaagggaagttgagtcagaatgccttcatgagcttgggggcagaactggggcctttactttcactaaaagccactgatgatgccca

SEQ ID NO: 837011 - DNA, 569 bp, Homo sapiens
tgtcctgctgctggtgatgccaaccttgatcactgggtcaaggtgttggcctccagatctctacattataaaggtatyttccccctactttgtaataagtatgatctgtgaaatgatactcgaagtgtcaagatgatactctgagacgaccgtgtgcatgtagtgcccaacatgtttcacccaatggttttagcatccagtgatgatttttgcccaaattaattgttccactggggttgcaaaacggtgactttctaattatgtcatttcttctctgtgtatcagcaggcattcttttgtaaagaagagctgtcttcctgtcccccactctcaccctttattaacatttatacgaacttgtttttgtaatttttaactgaattgtgattacccattaccatcactattttttagaatacttaaattgtcccaaatttggccagggagcatactttcttgtgtccttttaatgtgacctccattgagcacttccttgttttctggaccaaaaaaaatccccaattactttttactttccttgatccagatcttgaatcaaacatttctcc

SEQ ID NO: 837012 - DNA, 624 bp, Homo sapiens
cgaggtggttccctctccactgcccaagtgggcctgccaggcctcctgagcccaggttcctttccagttgggtaagaagaagagcatttctttaaaataatcatagctatgcctttttgtgcatacagytgaagactctctattgtaactgtccgtggagactttaggattagcagttccttgcttgttttcctactaatctgatggtactaatattctggcttgagtctgtaatcggtgtttgcaatgtctttttcctgtggtggttgtcaagccccataaaactcacaatttttcttttctcaaggattcaggacaagctataccgcttgtagtcgagagctgcatccgttacatcaatttatatggtaagctggatcttgggccagtgttttcagcaatctgcagagcaggtgctaggctgttctgataggaaatgagattctaatttgtcctggaagacttcccgtcacagctctgctttggagggggaaagtactgcacacagcagctgctcttctgagtgctgcttttgagcctgtgtgttgagggatggagatcatggtgagaggatccaagacctatgaaaactggagagtagaaagggcatggacaagagaactc

SEQ ID NO: 837013 - DNA, 613 bp, Homo sapiens; identical to SEQ ID NO: 820223

SEQ ID NO: 837014 - DNA, 509 bp, Homo sapiens
tcttgaagttacatagaaaatagaggcttggaccttggcaaaaaaaggtttatgggagtgggaggagaggaggcctggctagtagaggctagtagagtgttatgtagatgaaaccatacaggtagcagccatcagagagggtagatgggaaatgtttctttcagacttttaaaggtctttcagactttcagttaatcttagaccccacaggggaagacctggctgcactaatgcagattgtctacaaatgcaaatttcccctgcaaagaaagctctgcagggctacttctttctgctggctcactgacagccatcgcaaaatatggcaaagaatatattttggggtaaaatatttttatttctttcaagggtacagataaascaagattagctataattactgcagttggggaacatacatggggattttaaatactattctgcttccttttgtgtgtctctaagattctccataagaaaaagtcttaaaaatgaagtcatatattgaa

SEQ ID NO: 837015 - DNA, 509 bp, Homo sapiens
tcttgaagttacatagaaaatagaggcttggaccttggcaaaaaaaggtttatgggagtgggaggagaggaggcctggctagtagaggctagtagagtgttatgtagatgaaaccatacaggtagcagccatcagagagggtagatgggaaatgtttctttcagacttttaaaggtctttcagactttcagttaatcttagaccccacaggggaagacctggctgcactaatgcagattgtctacaaatgcaaatttcccctgcaaagaaagctctgcagggctacttctttctgctggctcactgacagccatcgcaaaatatggcaaagaatatattttggggtaaaatatttttatttctttcaagggtacagataaaccaagattagctataattactgcagttggggaacakacatggggattttaaatactattctgcttccttttgtgtgtctctaagattctccataagaaaaagtcttaaaaatgaagtcatatattgaa

SEQ ID NO: 837016 - DNA, 509 bp, Homo sapiens
tcttgaagttacatagaaaatagaggcttggaccttggcaaaaaaaggtttatgggagtgggaggagaggaggcctggctagtagaggctagtagagtgttatgtagatgaaaccatacaggtagcagccatcagagagggtagatgggaaatgtttctttcagacttttaaaggtctttcagactttcagttaatcttagaccccacaggggaagacctggctgcactaatgcagattgtctacaaatgcaaatttcccctgcaaagaaagctctgcagggctacttctttctgctggctcactgacagccatcgcaaaatatggcaaagaatatattttggggtaaaatatttttatttctttcaagggtacagataaaccaagattagctataattactgcagttggggaacatacatggggattttaaatactrttctgcttccttttgtgtgtctctaagattctccataagaaaaagtcttaaaaatgaagtcatatattgaa

SEQ ID NO: 837017 - DNA, 393 bp, Homo sapiens
ttcttaaagtacaagggtgttgttatgcctctgaaagcaaacataaactaggctatctcttatagagaagttgggaattacaaaatgcaatgcttgcgccaataggrtatgagctctggcccataatgtatataaaactctagggatggtcacagaaatcatgacttggcctggattgcttgtgtctatttcaatccttaggaattatcaatacctagatttaaaatgactagataggacataaagaaaaagatacaactttgaaagaaagagacaaaattaaatagcctatgatgattgctgggacagtgttgttcagctattaatataaattattattaatatttactgaattactttaacatatactacctatatcttcctttatttagc

SEQ ID NO: 837018 - DNA, 393 bp, Homo sapiens
ttcttaaagtacaagggtgttgttatgcctctgaaagcaaacataaactaggctatctcttatagagaagttgggaattacaaaatgcaatgcttgcgccaataggatatgagctctggcccataatgtatataaaactctagggatggtcacagaaatcatgacttggcctggattgcttgtgtctatttcaatccttaggaattatcaatacctagatttaaaatgactagataggacataaagaaaaagatacaactttgaaagaaagagacaaaattaaatagcctatgatgattgctgggacagtgttgttcagctattaatataaattattattaatrtttactgaattactttaacatatactacctatatcttcctttatttagc

SEQ ID NO: 837019 - DNA, 497 bp, Homo sapiens
actgagtccctggaaagaagggggtgtctgttgaaggagcagtggaggaaatctgtggtggggcagttagggaagagagtgaagcatgaasaagctctgtccccatcagtaccctacacagcagtttcttgcccaagtagagctggaatacagggtgggcagtgcaggggagggagcgaagagtcagtctggtaggaggcactcgccgaggttgtaatcctgagacatcacttatgggtgctcacccatggagagatgggttttcttatcttgcacattggcaatgaccttgctaggctcttaggtctggagacaatagatagtttcacttgaccggagatagcatgctattttttattaatttgtgcttttatttttctttccctgctctctcaggggtaactatggattgaaaaaaaaaaagaagaaaatctggtacttctttacagaaatatatggttggaatggaaaatcagaataattaaatactagtgaaa

SEQ ID NO: 837020 - DNA, 469 bp, Homo sapiens
aaaattgcattgaatgtcaaatttagttttcctaattaataaaaaatatataaactaaaaaaaattctaggcaaattaataagatctcagctgcaaagactcttccctgcccagcaacagcaaaaagatattaaaggtgcccaaacacaaaagaccaaaaaaaaccctttgctcacactttatcttaataaagctaagtaattcatatgatgctagctaccagaaggtgtctgggcagcagtaaaggctcaactaggtcagaagacaatctgtgcaaacagcagaagagaaagcagtatcatgcttataaaaagatagaagatataagtgttcaagccaagaaaaagagtaattttttcccatctctgaaggasgaaaatgagaacagatgcccccctccaatggaattgaatcagagatgtccagctaaacaatagctcctcctccctcatcactgccatctttgagg

SEQ ID NO: 837021 - DNA, 602 bp, Homo sapiens
gaaatgtactatactaaaccttttagtaatgaaatgcatagcttgcttaatattttccaccaacagagcagaaagttcctatcccagttatcwcaaattcattaacaatggcaactggtttaataaagccttactgtagatatttttactgtactgttcttatcttgtctcatgggtatgtaatctgtttttctaagcaaatgtaaagccttcagtatgtgtcttttatgtgagtctgagcttctcctggacaaaaagttgtatctctcatttctttttttttccaaagtataaattcatattttgtaggaaatgtagtttacaaaacagtatcaatcgctacccccaatccagatgacccactttcctccgaagggggacgtttaggtcctattccactgggcaagggtaaaatgattcagtagtcttccaggttaacagtaaattcttctcccaaggctggggccgtcaaggcacagtctgtatgaggctcaccctgtctgaccctaggctggggctgcttgctcggtaggcaggaattggggtgggggtgggggctcagggaagggtctgcaccctgagacttctgcttacaggagggt

SEQ ID NO: 837022 - DNA, 635 bp, Homo sapiens
caagtgtttcttattaattgaaaccaccaccaccatcactactgtagtatcaacagaatyccgcatttgaacacctctatctactcttcctattactactggcagatttcttgaaagtcatatcaatgtgctgtccccatttccttgcctcccactcattcctcttctccctccagcctgacttccattccataatgccatcaaacagttcctgttaggtgataaaaaaaacttcatgttttaaaatacattcgaataactattttatcttcttagaaactttataattgatggctattccttttatgtaatatgtttccaggttttcgtgacccaattcactcctgattctacttttgcctctttaattgctctttattatcctctgaagactcacctttctccatccgtcaccatggactctgctgaagtgccacatggcttttcttgcttgattttctcttcctagaggatttctttcactcccagaattttagttaacactcacactcagatgactctgtatcttcagcttaaacctctctcctagatctgaaattgtatatccagtttacctaacgtcttctgtatgtcacaacttcatgcctaactcaacatctataagattaaatgca

SEQ ID NO: 837023 - DNA, 613 bp, Homo sapiens
tgagatggacgcatctagggagataaaaatcaggcagggctaagattgttgtgggtcaccgcctgccctcataatctatgggtatactaattttcagktcaattttagtaaaaatgaatatgtattttttttcccatccaaatttaaagacttcttaaattctaccctcatatccctctggggaagctttggacctcaggctgagaactcttaggctgagcagcaagcgctgtctagaagttatgtctcctgtaattacaaaactgacagcttttttagttgaaataaaaacactgaactaatttgtgggtaaatagactttcaatcgtgtgtgctggctctgcctggaactgcccttcccaggagagtggggagtgtgccacttgagtcaggggagactttgcagaggcaactggcctccacagggaccgctcaggatggtggtgatgttgaaaataattagcaagctacatccacagcattaattagtttctgggaggcagctgtgggataggaaactgctattttgatcgtcccaattcagagctctgctgtgaaggtttctaaaggaatatatttttccctgtcccaggcactagtaatcttttcctgg

SEQ ID NO: 837024 - DNA, 573 bp, Homo sapiens
ggttcaagcaattctcctgcctcagcctcctgagtagctggaattacaggcccctgccaccatgcctggctaatttttgtatttttaatagagatggggtttcrccgtgttggccaggctggtctcgaactcttgacctcaaatgatctgcccaccttggcctcccaaagtgctgggattacaggtgtgagccaccgcacctggcctgttacccatattcgtatgtcaacttgagcatctttaagaagacatctctgagtaaggagtgtatatagagtagagaaaatagcttaatgagtcacctctagaatcctatcgagggctaagatttccagctggtcctctccaggaaaaaggggtggggtgcaactgggattcctgtcaccaaggaatgctgatgccttttattattatgctataccagacatgtgttcaggagtcctgattcttatgtatttctagttcaattgtcattgtgactttggacctgttattgatcccggtattaatttcttcttttacctttccacatacccagctttcgccacagaacacagcctgtgtgttcatttg

SEQ ID NO: 837025 - DNA, 573 bp, Homo sapiens
gtgaatctcctgcctcaacctctcaagtagctgggattgtgccaatatgtccagctaatkttttttctttttttttttttttagtagggatggggtttcaccatgtgggtcaggctggtcttgaattcctgacctcaccaaagtgctgggattacaggagtgagccattgcacccagcctgttttcttactttcagaacaaccgttgacgataacatcacgagccttgtctgctttcttcaatgcaggggagtaactccaggccagattgaagtcataagggccgagacgggagctgtcttcattgtggcactcagtctacgtcctaaaactttagccacgctcgtcttttaaaacattagaaacaaaaccaagagcttccctttgtattttacactagaggattagatctatacgtcccgggagacctttgagtgcttccttcattttaatgaaaaatcagctttattcttgcttttgatgaaaaaaagatggatccttctcaaataattggaagccgacttcctaaaaaatatttttaaagtagatccagttggcatctgggagacgctga

SEQ ID NO: 837026 - DNA, 573 bp, Homo sapiens
gtgaatctcctgcctcaacctctcaagtagctgggattgtgccaatatgtccagctaatgttttttctttttttttttttttagtagggatggggtttcaccatgtgggtcaggctggtcttgaattcctgacctcaccaaagtgctgggattacaggagtgagccattgcacccagcctgttttcttactttcagaacaaccgttgacgataacatcacgagccttgtctgctttcttcaatgcaggggagtaactccaggccagattgaagtcataagggccgagacgggagctgtcttcattgtggcactcagtctacgtcctaaaactttagccacgctcgtcttttaaaacattagaaacaaaaccaagagcttccctttgtattttacactagaggattagatctatacgtcccgggagacctttgagtgcttccttcattttaatgaaaawtcagctttattcttgcttttgatgaaaaaaagatggatccttctcaaataattggaagccgacttcctaaaaaatatttttaaagtagatccagttggcatctgggagacgctga

SEQ ID NO: 837027 - DNA, 653 bp, Homo sapiens
gaaaatcctggccaccatacgaagggaagcagaagcctggtcaggggtcccgtgtcataaccactgggatcggggacaccagtgctcatcctgttacartgtaactcattttcttttacaccatagtcacatatttttgtgtccctttccttcatgtgatagctttgttatgccacataaaatacaacttctgggctgggtttggtggctcatgcctgtaatcccagcactttgggaggccgaggtggggggaatcacgaggtcaggagttcgagaccagcctgaccaacatggtgaaaccccgtctctactaaaaatacaaaaattagccaggtgtggtgatgagtgcctgtagtcccagctactcaggaggctgaagcagaagaatcacttgaacccaggaggcggacgttgcagtgagccgacatcatgccactgcactccagcctggaagacagagtgagactctgtctaaaaaaaaaagaaagaaagaaaatacaacttctgggagctgaggaaatacaaggtggaggaggaatgagtcctggagcgacacagccttgcaaaccgtctctgattgacattccctaactttatcctttatatgacgtcaagagtaatgctgagaatagagtgcaatcctcaacacagta

SEQ ID NO: 837028 - DNA, 543 bp, Homo sapiens
ctttcccccaaattcagtttctgctcattacctttatcttgccttagaaatctattcttaaaagcagtaactatgcaagttactaaagataattctgtccctcaaacgatattgtggacttgcgaatcaaggcagaaggtcaaaaatattatactactatatatatatttttattgcagtaagattattgttatggccatattgttcggattgttgcctgtcctaaagaaaataatacattataatgataaatatataaatataatataaatacgtacatacaggtagcgattgctaaatagatattttgtactatttgctgtagtgaagggatcacaaaacagaaggaagccaatttgtatgttctccaattctaatgatgtgactttagacatttgaaaaatgcctctctgggccttatttaccttatcaataaagggattagatttgttcacrtgagagtgttggaaagcattctctttgaacaccagccctatggggtattctcaacataaagaatgacattgtcttctccatttgggc

SEQ ID NO: 837029 - DNA, 326 bp, Homo sapiens
aggccttctcccagcaaaaggtgagtgccccttgcttttgccttgcccatccttygttgcctgccttaactctgtccacactgcataagtaattccttaattaaactctcttcttgtatgtgtgcaaagagccacctaaattttggttgcattttttcccaaaatctattgaatatctttaatcaaggtattcaatgaataaagaaccaaaatatttaagcttttaatcaaatgtaataattgaaataaagtctgcagatggaagtcattaaaacattggtacaaacacaagagacaaaccaaacaaaatacatgatgagaactca

SEQ ID NO: 837030 - DNA, 326 bp, Homo sapiens
aggccttctcccagcaaaaggtgagtgccccttgcttttgccttgcccatccttcgttgyctgccttaactctgtccacactgcataagtaattccttaattaaactctcttcttgtatgtgtgcaaagagccacctaaattttggttgcattttttcccaaaatctattgaatatctttaatcaaggtattcaatgaataaagaaccaaaatatttaagcttttaatcaaatgtaataattgaaataaagtctgcagatggaagtcattaaaacattggtacaaacacaagagacaaaccaaacaaaatacatgatgagaactca

SEQ ID NO: 837031 - DNA, 610 bp, Homo sapiens
agctgtaacactcaccgcgagggtctgcggcttcattcttgaagtcagaccaagaacccaccaattccggacacagtaggatgtacacacactttgtgcgtgtgtgtgtgtgtgttcagccttccaggatcatttaggaatttttattccttaattgacattcaaatcttgatggtagaggtgaggagaggcccagggagcttgggagaggccacgttgtttgtgcagttggaagactctgggcaggaaaggagcaccacatccaagtcagagaacacgggaacaagaagggccgtccatgtgcttctgattcagccccatcgttttaactgagacctagaaaactaagtacttgtcctactccagtgctgcctccccagtcatccatggccagactaaattactctatctttcctttgggctgcaaagtcgttttatttataacacacctctcttgttttataagtagccatgaaggggtytgttttacccactagattagggattggtacattacaggtcgaatccggcccactgcatgttttgtaaataaagttttattggaacacagatatgctcatttgttcgtgtattgtgcatggccactttt

SEQ ID NO: 837032 - DNA, 567 bp, Homo sapiens
aatattcatttctgccacttctattcaacactgtattggaggttctagccagggtaattaggtatgaaaaagaaataaaagtcataaagaatagaaagaaagaagtagtactatcttgatttgtacattacatactcttacacaaagaaaatcctaagaaattcactaaaaacctattagaactaataaactagttcatcaaatctgcaggataatagatcaatatttttaaaaatcaattctatttctatacactaacaaagaacaatacaaaaatgaaattcaaaatttccatttacaataacatcaaaaagattaagaaaaataggaataaatttaacaagggaattgcaaaacttatactctgaaaactacaaaacattatggggaaaaaaaccctaaacattaccttaataaatggaaagatatcctatattcatggattgsaacacaatattgttaagctgacaatcctccccaaatgaatctacagattcaattaaatccctaccaaaatcccagctgggctttttgcagaaattgataagctaatactaaaattcatat

SEQ ID NO: 837033 - DNA, 608 bp, Homo sapiens
acccggggttagagctggtaagacctgtcagcctggtctttgaatgatttagaggagagggttcccttttctgtggttaactgaaaccacttgacttgaaccatcatacactttaggtcttttttttttttaaatataatagtagttcccctatcctaactagtacacaaaatacccaagaagtagtctatttaacttatatgctaaatatgtttagtattcgttttttgaccttttacatgctatttttctaaacctacagacttacacaactttacatggtcaatatttttaatgacttttgggttttgtgttatgcatacagagactctctctagcctaagattatttttaaagtcatctgtgtatctttctggaacttttaaggtgtacgttttacgtttaaatttttgcttcatctgtaattttgttttagtataaggtgtgaaatgggtttccagcttagttctttcccaaccccaatggttaagcagttttcccattttatttattgagtaatttatttattrctgatttgaattatacctttatggtatacccaattccaatatgcatttgggtttatatctggactctctcttgtaaat

SEQ ID NO: 837034 - DNA, 539 bp, Homo sapiens
aaaatagttgagaaagagatgtgagggcctaggaatagcttgaagatccccaacattggacaggcaggtggaggggatgcacctataaaggcaagtcagagagtaggagggagctgagaagcctgcatcgtggaaggcaagagaaatgcaaggggaagtgggttgttgctgagagttaaataaagtgagagactaaaaatgcacgctgcatttagtaacaaggaagtcactggtgaaagagccatgtcattgcagagacaggcttgcaattcccaaaggagagactgggagagttgagtaggggatacaagaatggacatggggagccatgttgtttggctttgaagaggagagggaaaggctattgctataaggaaaagtgggattgaggaaaatcaattaaagatgattaaagttattgtctttttcattttmacagctttattgaggtataactaacattctataagatgtacatgtttaaagtgtaacaacttgaaaagctttgctatatgaatatacccataaaaccatcacta

SEQ ID NO: 837035 - DNA, 554 bp, Homo sapiens
tcagattaggaatcctcaaggtcagagacaagttccctcctccctccggatcccctcctcatccscaggtggctgcagtcactggggtgctggatgagtccagtgaccatacatcctgccctacatcctgcctggacagcctgggaagtgttttgatgactgatcaacccagagagcacgaggggagagcaagaggaggagaaaggatgctgctgctcctgactgaacgtgattgaggtgccccaggaaactaccttgctatgcaaagtatggtccccaacctgcggcattggaaccttcattttaacaagatccccagatcctgaagcactgccttagagtataacccagggcctccagggacctactcttccaggacaagcaatgataatgacaatgattatttattgagcacctactttgtgccaggcatgacactaggcctcttataaacattatcttattttatgctttggcaacctagcgaggcaggcgttattacctgcttttcagaaacaaagagagcaggtcagacagggtaactaccttgacca

SEQ ID NO: 837036 - DNA, 562 bp, Homo sapiens
cacactttcacaagctgcgcagattacgtttcctaggactgtgtccatccatctgcctcactggatgctgatccactctggtgtgtttcccagtcagtcactcagcaaagtgcaaccgagagccaaycatgtgcccggtactttccaagatgccaggataaaacggcaataatatgggattcctgtgcttgaggtttttacagcctgaaaaacaatgacctctgcatttcctactcagcaccgcgtgccatcaacatccaaggtatggggattttctgtagctgcctatcaaactctctcagctaccaccagtgcttctttctgctatatctgatgccttgttttgttactttcagaaacaccaaaggatggccgcaattgagggactcttctcaatagcatgttcttgtgcttcttcatttaggacacatctcccatgctgggaagtacaagacaaatacgaggagttgggcaagtgtcgcactaagttctgcccctggctgggcagcccactgacttctaagagataatgaaatttatgtatttatttatttatttatat

SEQ ID NO: 837037 - DNA, 562 bp, Homo sapiens
cacactttcacaagctgcgcagattacgtttcctaggactgtgtccatccatctgcctcactggatgctgatccactctggtgtgtttcccagtcagtcactcagcaaagtgcaaccgagagccaaccatgtgcccggtactttccaagatgccaggataaaacggcaataatatgggattcctgtgcttgaggtttttacagcctgaaaaacaatgacctctgcatttcctactcagcaccgcgtgccatcaacatccaaggtatggggattttctgtagctgcctatcaaactctctcagctaccaccagtgcttctttctgctatatctgatgccttgttttgttactttcagaaacaccaaaggatggccgcaattgagggactcttctcaatagcatgttcttgtgcttcttcatttaggacacatctcccatgctgggaagyacaagacaaatacgaggagttgggcaagtgtcgcactaagttctgcccctggctgggcagcccactgacttctaagagataatgaaatttatgtatttatttatttatttatat

SEQ ID NO: 837038 - DNA, 632 bp, Homo sapiens
ttcgtcccagctatctggatccttgtttaaattttactcacttacatctgtgctgtggacacaggtaatatgaagcasatgtacttttctcaaaaaaaaaaaaaaaaatctaaggaacacagagctgttgtatcagaggctgcaacgtcttcccagcacgtgggcattcgcagacaaagctatccctgctgacctgctgtgggaaagacatgcactctgatttcaccactgacccggccgcactcttttgtccagtatataacgcctccctaagcatctcctttccttgcaaacaaaaaaaccctggaggaaaactttcaaagccacagtttcttctcagttgcaacccttccttccttccttcttcccaagaaggtctgactgggcttgcaagctggccccaccctgggctgggcctccacacaggcattgtgcgatcctctgccattctgtgtagacggaatacctgcgaactgctgccaacacaggaaggttggcgcctctctggagggaggcctggggagtatccatcgcccaggcgactgcagataagcagctaaggggctagggttctccacacctccatgtgggttccagagcctttctcttgtacttcttttactgtttttgat

SEQ ID NO: 837039 - DNA, 529 bp, Homo sapiens
gcttctccccaagacctccttccaggatccaatccaggatcatacatgacccttagttgtgatttctctcrttttattttatttgagacagagtttcactattctcccccaggctggagttcagtggtgagatctcggctcactgcaccctctgcctcccaggttcaagcgatgcttctgcctcagcctcccgagtagctgggattacaggcatccgccaccacacccagctaatttttgtatttttagtagaggtggggtttcaccatattggccaggctggtttcgaactcctgacctcaggtgatcacccacctcagcctcccaaagtgctgggattataggcctgagccactgcacctggccagttgtgacaatctctttagtctcttttaatctggaatagtcccttggcctttctttgtcttttatgaccttgactgttttgtttttttttttttaaagaacacatgttggttattttgtagaatgtcctcaggttttcttatttttgtttttttgtatttta

SEQ ID NO: 837040 - DNA, 567 bp, Homo sapiens
caaagattactcatacattaatggtgggaatgtggatattacagactttggggcaaactattrgcaacatctactttaaatttttttttaaatgttaactacgtcctccaacccagcaattctgtacttcagaatataccccttagaaataaaaccaccaccatgtaaaaaatatgaagagatatatgaactataccactgtttttagtgccaaataaactggaaacatgatgaatgcccatcaacaagagcataggcaggagaataatgggtggtttattatgccatgggagattatgcagccatttgaaagagtgaatatcagttgacttgcagagattttcataaggtattttttttatggaaaaaagcaaggtataagaaatgataggcactgtgtttccatcatataaatcaatgaccagtgtccatattattttgtgtgtcaatatctatataagattacatgggcaaagagaaaaaccaaaaaggttatattccaagttatttacatttgaataggaatatatattgaaagagagagaaaaaagagggtggaaccaaaca

SEQ ID NO: 837041 - DNA, 551 bp, Homo sapiens
gattcattctgtctcattggcaaawtcaacctcttaagagaaaaatggattgtactccctttgcctggaatgacagtgccaggttttgtagaaagatggaactgaatctaatcctaactctcttataaaatgggatttagaataataggcccaatacctgtattgccgcttatggctgtcttgagaattaaatgaacacaagcactcagcatgctgcctggcatatattaagtagctcaaatattcttagttccatcttccctactacctaccatcaaatgttcatctacagatataagaggcctagctcaaatgtcattgcctctgtgttgttcttgctcctctgccgtgctctgtatgtctttcttataaggggtctcattccattatcaaccagtcacttgtgcatctgtattacactcacctttaggctgctcaggtgcaggaaacactttatctgtcctttgttcagcaactagcagtcaattacacattgtaagaattctaaagtgtgcaaaattaaaatgccttttggtgataaaacaagctcc

SEQ ID NO: 837042 - DNA, 583 bp, Homo sapiens
agctcctctgacatcatgtctgggggctcttttataccacaagatgctgcagggaacatgaacagrtagcagattaggaggctagttgctttcaatcataaaaacagtgaatttaggaacaggaagaagctttcagatgacctaatactgtggttttagattgtgtccaggggtctagtaggcggtggagggagccaagcaggaggcgggatcagcttttatcaattaaattcatcagattttaatttgatgaaattaaaaagaaaaagaaagttggaaaaacctaatctagttcaactaactgtctcatttccccaagaaggatattgaggcccagaagggttaagtaacttatccaaatcagagctaagactagcatagcactcagtcctcagtcacctgcatatttgataagcatgtcataaatgtcctcattctccaaatattttcctttgattacctcaagcaagtcacttacatgtaataatcaaatcattgaagagaaattagctctggtgtgagtctcttctgatgacaccatgtgaccttggaatagtcgattgatctctggaccctcagcttt

SEQ ID NO: 837043 - DNA, 583 bp, Homo sapiens
atgagaccagcctgggcaacacagcaagaccttgtctctacaaaaaactaaaaccaagaaaaggcagctgagcatggtggtgtacccctgtagtcccagctactcaggaggctgaggtgggaggattgcttgagcccaggagttggaggctgcaatgagctatgatcatgccacagaactccagccagggtgacagagaaaaatgctgtctcaaaaaaacaaaaaaaagatgaaaaagcaaaaacagacacctgttgagaagttagtggctcacccttttggaatataagcaatatttattaaaaatttaaatgtttatattatttgaaccaccacattctttttctgggtgttaaacctattaaaataggtttacaaatagaaacacacacacacacagagggagagacagacaagagacagagaaaggagagagaattgagtgtagcactgtttaggataaaaaaacagaataaacatctatcaacaggaggattagataaattgttattatayaacaaagtacaatacagacattgaaaagaataagaaattttaaacaaatacaatatattaagaaaaa

SEQ ID NO: 837044 - DNA, 611 bp, Homo sapiens
tcatgtttccactcagctacaaggacccctccttttatggaaaggaagaataaaacatctctgcagctcactgtggcttcaggtacaatcgctaataattactgagcccttcacagctattagacttgtgccagacccccacctctttctctcccttcaccttagagacaaccctgtgatcttccttttttaggaatgaagaaagtagcttgggggtcataaggctgatcagaggtagagttggcatctgcacccatatccctagactccaaagccatgctttgccactgggctgtagggcttgacaggaagctgtgagacagaagctatctttgcttcagtgacagctcttgtgtttcctagaggttccaacagacttcaaaggaaatactttagagggcttcagctcctgtgttcttcccctttaaggagtcagttgaggacaacacgagaaatgaaacatgagactggaagcatgagtkgttggataacaagaaaaataaaaatatggtacctgggctgtggtttttttgtgctttgcagcaatctccttaatcttgggatcctccagcagggaagggtcctcaggtttggccctaggggcagaaaga

SEQ ID NO: 837045 - DNA, 491 bp, Homo sapiens
aagggtcctcaggtttggccctasgggcagaaagatgctgatgtgaataatcaccatggctaccgtgtacagaaggacaccactccaatgagggtctcaagactgatcatcagagcctctccatctgggagacaggcaggaggacctggaagcttgggtcctttccccgggctctgaagcctcagcattttgcaagcctggttcacccttgggtggctgaactggaaatattcccagagggtcaagcatgtcgcccttgttgttgttgttgttgtttaattcccattttttcccactgccatcccatttgtgtgtaccaaacgtgttaccttacacacatttttctttccagtaacttatggacccataccgacatttaccaattataaaataatgtttttaagattatcaagagaaagacccaccacttggaagcctcaccaaggtctatccggagagcccagggggctgtaggccgtaacggtgatgcc

SEQ ID NO: 837046 - DNA, 369 bp, Homo sapiens
aattcaaacatcttttaaaacaaaacttatcaaattgatgtccaactttaaaaaaaattcaatmtgagccagaaaagatttgaagagaaaaatgagaaagaatttgctataccaaaatttaaaacaggctataaaataataaaatttacacaatagtctggttttggtgaatatcagacaaatatcaatgaaatgggataaaggtgaagaaatatatttatatatttgaatttaattaataataaaaattacattttacatcagtgtgtaaaataaagactagtcagtcacaattgtttgataacctatctatttgaagaaaaataaagttagactgttattttattttcaaaaacttaactctccatg

SEQ ID NO: 837047 - DNA, 608 bp, Homo sapiens
aaccacagatactttgtggcaattttatgtaaaggacaaaattcaaagttgtgaawttttttttgagtggaatatatgacagatgttctcaatcttggctgcacattggaatcacctggggaattttttaaacttacgagtgcctggattctatccccaagatcttactaaattggttctgggtatggcctggtctcaggatttagaaaagttgtccagatgcttttaatttgcacatagggttggcaacactggaaaaattcagggcttaacttgagggtagctttatggtgaagcctacacacccaggatgaagtcacgttgacctgggtttgatttcacaggcccacacatatgaactgtgtgatttttagaaattcatgtttctttcctcagcttcaagtttccttgtctgtacaccgaggttaataatacttcctctggttttatagatatgcacaataatctcttagcaatgcatacatgttccttagcatagtggttggcgtattgtgaccatctcaataaactttagttttttttttttttagaataaaggcagatcatgggttaatttattttcatcaaattatgagacatgtagaaaa

SEQ ID NO: 837048 - DNA, 505 bp, Homo sapiens
cattacagacttaaatctaagacctcaaactatggaactactaaaagaaaacaytggggaagctctccagtatattggtctgggcaaaaatgtgttgagcaatatcccacaggcataggcaaccaaaacaaacatgaacaaatgggaccacatcatgtaaaaaagtttatgcacagcaaaggacacaatcagcaaagtgaagagacaacccacacaatgggagaaaatacttgcaaattatccatctaacaagggattaataaccaaaatatataagaagttcaaacaactcaataggaaaaaaatctaataatccattttaaaaatgggcaaaagatctgaatagacatttcttaaaagaaaatatacaaatggtaagcagacattaggtgctcaatatcattgatcatcagagaaatgcaaatcaaaactgcaatgggatatcatttcaccccaatcaaaatggattttatcctaaggacaggcaataaaaaatacttaggag

SEQ ID NO: 837049 - DNA, 616 bp, Homo sapiens
taaaaaagcttcgcacagagagacactcaaaaacactacagatgtgtcatactacaattacaaaaacaagttcaagtaactcacagyaagacagaaaaaaatcagatatgcgaaaaaaacagaacaatcagaaaacaataaatacaatgacagacttaagtctcaacacattaaagagaaaagcaaaaactatgaacgacgttacagacataaatttagcaacttaggtgaaatagaccaattcttacaaaacacagactattataactcccctagtataaaatgatcattttaatggccataagagctattaatgaaattaaatatttaatttaaaattccccaaaacagaaacatctaggccaaagtgatttcactgcagaactctaccaaatattaaaagaagatttaacatcaattatacaccatctccaaaaaataagagaggaggaacatattcaatttgttttattcagttagcattactaataccaaaactaggcaaagatagtgcctaaaacaaacaaacaaaacacaaaaacaaaagctggggaccaatatccctcataaatatagatgcaaacatcattaacaaaatattagcaaataaaattta

SEQ ID NO: 837050 - DNA, 537 bp, Homo sapiens
tgaattcctcccctgaaaacggccttttcttttctaccacatggccaggcaaattttctaaacttttacattctgcttcctttttaaatataagttccacttttaggtcatttctttgctcacacatatgagcatatgctgttagaagcagccaggccaaattcttgaatgctttgctgctaagaaatttctcccaccagataacctgaatcatcactctcaagctcaaagttccacaaacccctagagcaggggcacaatgccaccagtctctttgctaaagtatagcaaaagtgacctttattccagttcccaataagttcctcatttccatctgagacctcttcagcctggacttcactgtttatatcactatcaacattttggtcacaactatttaacaagtmtctaggaagttccaaactttccctcatcttcctgtcttcttctgggccccccaaaactattccaacctcttctcattacccatttccaaagtcacttccacattttcaggtaactttatagcagtaccac

SEQ ID NO: 837051 - DNA, 550 bp, Homo sapiens
ttctcattacccatttccaaagtcacttccacattttcaggtaactttatagcagtaccacatttttggtgccaattttctgtattagtccattctcacactgctataaagaaatacctgagactaggtaatttataaagaaaagaggtttaattggcatgcaggtctacaggctttacaagaagcatggctgaggaggcctcaaaaaatctacaatcatggcagaagtctaagggaaagcaggcatatcttacatggccagagcagaagaaagacagcagggaaggtgctacacacttttaaacaaccagatctcatgagaactctatcacaagaacagcaccaaagcaggaaatctgcccccatggtccaatcacctttgaattataattggagattataattcaacatgagatttgggtggagacacagattcgaaccatatcaaccactttgttaatcactgtcccttcacccygagggcccagcacagtaactgacactgcttagtcactgtctgttgaataaatgaattaatataaaagactcc

SEQ ID NO: 837052 - DNA, 574 bp, Homo sapiens
tagctttgacatgaacgtgtatatcagaaaagtagagaaataccactataatcatgtttaatcttttaaagctgtgattgagaagtggcatttgggcaggatttaaacttggctttgtctgtggcaaatattaagcccactccagttctctcctagccttatttttttctcattagttagatgtcacataggaaatgaaattattataaacatatttaacttgtttaaataactttaaaaacataacttataatcggtgggtttcaaaattcaataaatcctctcacttattagttacagaatatagttgcatttaacctaataaacttaaagacatggctttaaggaatattctttcttggcaagaattaaattggcttggctaatttacattgttttaaatttagagagaattgtgtactgactcatgattacaatacataaaacatttccatgaaatggtctgaattaacctcctcgctatttatataaacagcayataacattgcatgcactgcagtctactagatgggaattttttaaatcagtaaattatacttgtaatataatctct

SEQ ID NO: 837053 - DNA, 511 bp, Homo sapiens
gccacacgtccttgaaaccagccctggatgcacattcacacgtagccctgagcctcagggtgggcctgcacatsgaaagaccgaccgttcatgctgcagaccagtaggaagatgcagcaagtggaacacttcctcctattgtcaactgctaaggcactaacaataaactagaaacattgcctttggccaaattgaaactggctttagttcagaattaaatcaagctaagattaactgaagttgtctcatcctaatttctacctagacacgaattctaatgctttcagtctcagaataaaatgatatacgaatatagtaaatatcattctacctatttaggaaaacactataaaactgacaaaaaaaagtcactaacctccgaaggaattttatgactttagccaaaatgaataaccaaaatacctgtaagattgaagctaaggcctaagtgatttaaggcccaattagtaaagtgactacatcagttatcaagattttattataattagtg

SEQ ID NO: 837054 - DNA, 632 bp, Homo sapiens
  misc_feature 326, 331, 332, 496, 497, 498, 499, 501, 503, 506, 520, 608: n = A,T,C or G
ctactcctaatcctctattaacataaatgttttatgctgaatgtgtggtaacccacaacaaaatctcattttctagattcagaaatgttaaaacaaaaatgatcaacaccgcccccccgccaaaaaaaaaatcctcaccatggaatatagttccagaaatgactaacagtattaagaaataaacacaggtgttctgagacacagcacttaaccctcagccacatttgcctcctgctactttcagcctactaacctcacccatgaattgacaatatgtaaaaacccaatctgtcctttcacgttgtataaagtactttagtgctaangtatnnaaaacatttaagtaattaatgcgtttctgctgtcacaatgcagcaattttgccagaatgtatgtgggagaatgtagatggattaaacacatttatatctccaagaaaattgagcagctatgtcaaaataaacaagcactttttttggtttttctttttttgggnnnncncnaantattagaccccccncaaactaaactgtctgtctgagtatgagacagattaggggtgtttatttatacctaattccaattagaatatataggattstcatttntaaaataagtatgattcagtgtga

SEQ ID NO: 837055 - DNA, 662 bp, Homo sapiens
caaaagagcagttacgtgtgtgtgtgtgtgtgtgtgtgtgtgcacgtgcacatgctaggcatttcaattctcagctttataatctctaaattataccttgtcactgttatctcattaggcrtacataattaatcttttcaaggaataattccagaagacagagttataatatttcacatcactctaactattgctttatactctctcataacatgaggacttattcctattgaacttttaataagttatatcttctgtatttgtagatataagtgaaaaatctacagcactcatagagagggatacattatgtaagggctatcagaagtaaggacatctactactaattaataccaagggtattcatgtctatatctttctaaaaagtgaagtttcttaaaattataaatgtaattaaaatgcaatgtataaaatagatttaacaagtcaagtcaattatttaagcatttccatggccaataagaaaataatattgataacgtagcacgtaacactgatgtctcttaaaaaatgtaggaaatattttcacttgaaaaatgtaggaaggttacatgaatacaagagttaaaagatctgatatttcatagtcagatcctaatatttgaagtcattattacttttctctttttttgtttcacatg

SEQ ID NO: 837056 - DNA, 602 bp, Homo sapiens
tccctttcatctcaaatgcagctctgataacagtaccgcttgaagggtactcaggaagtaaataaaagtgaacatcctgctatgagctggaaagcacaggcagaatcctscaccaccctgccagcctaactgtactgcccaaagacaaaggaatctttcctgttacaggtacgtgcaacccacaccaggtaaaatgcattcactaaggctgtttggtctttccttgacacatcactgccattacagactgattcttccaaacagacatttcatgaaggcccttagtaaatataggcttgacatagtagctggcaaagttatgaacaaaatgtattttattctgagacagaacctattttaaatagctcattgacctctataatcatagtgtttggtcaaaaaccatcaaaaccaccacatagagccaaataagatgcttccatttatatgaagtaatttcttctcacagtgcagaaaagagtggtgatgttcacacctatgcacaattctactaaataatcaagttcctaatcattgtgaagactgcacctcagaatcataatcagttgatttggagtttaatttacttttaaagtattaga

SEQ ID NO: 837057 - DNA, 622 bp, Homo sapiens
ggctaggttgcagagaaaatggaatgcttatacactgctggtgggagtataaattagtgcagccactatggagagcagtttggatatttttcaaagaacagggttgaactaccatttgacacagtaatctcattactgggtatatactcaaaggaaaataaattactgtactgaaaatacaggtatccatatgctcatcgtagcactattcacaatagcaaagacatgaaaccaactcaggtgctcatcagtggaggattaaagaaaatgcgatacatatgcaccatagaaaataatgaaattatgttatttgcagcaacattgaatagagctggaggtgattatcctaagtaaactaatgcacaagctgaaaaccaaataccacatgctctcacttataagtgggaggtaaacattgggtacacatggacataaagatgggaacaatagacattggagaatacaacaggggaagggaagagggagacaagggctgaaaaactacctattgggtactatgatcacttcctgggtgacaggttgaattgtactccaaaccccagcatcacacaatatacctttgtaacaagcctgcacrtgtacccaagaatctaagatatat

SEQ ID NO: 837058 - DNA, 633 bp, Homo sapiens
agccatcatgtgaggctgagcaaagtagttgtctgtgccaagggagaaaagaaagctattgtgacccaaggaaaggtgttggagtccaaggagggtgagaaaggcatgcctgaagaacaagggatggtagcatggctagcatgttagagtccctgcatggttaagagagcttctacatggtgacatggcccagctacacgatgaaaagtgtccctgctttatggcagcctgaaggaggtagtggtgagggatctgagctcagactaagtgaggagagagtctgcatgtgtacacacatgcacacatacgcacacacatttcataacttttattccactgagtgaacctagaagcagccaaaactcaattgcaatgaatatgtccagtgtcagatctcagtttctaaataccaaggtctacaaacaggaaccagatatacttgaagaaattatagattccagaaccagaacaataagagcagcaaaagaccacactggtttatcttataccaaaaagtaagaaagtgttcaaaatgtaataggaacatgttgtagagtgcaaaattcaggttgacaggcccctactggccaaaatctagaayatttgaccaccataataaattattatagtgtg

SEQ ID NO: 837059 - DNA, 243 bp, Homo sapiens
tttaattcttggtaaaaatacaatcacatgaacaataaatatattaaaaatctagaagagtcaaaaatgacaaaaatgccsctgtatgagcaaataatcttgtggttacattgtggctatatttaaattcagtaagaggagagctacaaacatttgactgtgtactttggacaacttaattacattctttctgtttacaatatttagtgactgtgctgatgtttgtcaagcttgtaatgatac

SEQ ID NO: 837060 - DNA, 494 bp, Homo sapiens
atggcaattgttagatgacatccaggaggtagcatctcacaactctcagaaactttggttttgtgtcaggcagaacaagattaaatgactcatctgccatctattaaccatttttgatatgtcaatttacttaatatctccaagtccttaccttttcttatacaaatgataagaattttttcacatctgaccactctaaaatttaaacatagtatatttgagggtttactatacactagaaacaacattgcataattttattgaacatgatggggttaattgtggtaatagaaatggctataattttgtcagcaatgatttcccagagggtaactgagagtagttttttgagggtgttccagattacctcttgtcttagtctgagttctctgagaatcaaatactgagactggatttaatgtaccaatattttattaagaaaatcatgrtggtctgaataattatgcacccccccaccaccaaattcatatgtt

SEQ ID NO: 837061 - DNA, 577 bp, Homo sapiens
tgggaactaagccctgaggatgcaaaggcataagaatgatacagtggattttgaggactcgggggaaagagtgggagggggatgagggataaaatactatacatcgggtacagtgtacactgctcgggtgataggtgcaccagaatctcagaaatcaccatgaaagaacttattcatgtaaccaaacaccacctgttcccccaaaaacctattgaaataataaataaataaataaataaataaataaataaatattttaaaaataaccaccattaaaataattacaacataaaaactttgtgtattgcaactttcacttgcatcattactttgcctttcatttagtcatgcctgtggcattgttggcattgttgctaatggaaatgctcacgtgtatataagatctagacaaagaagctgtctggggtttttttggatctactcatgcctttttctatataaaaatgtatttatagataagatttagaacagaagggaagtatgtaaaatcacaactcacaagcactcagcactgttgataggatattcaygtctgaatagggttaagacaggctcc

SEQ ID NO: 837062 - DNA, 601 bp, Homo sapiens
aggaaatgaacactgatacattgccattatctaattaatctacaggccttattcaaattttggcagtagtcccactaatttcctttttggggaaaaagtttttttcttttggtctaggatccaattcaggattatatgttgtgtttagatgtcatgtctctttagctgtctttaatctgtaatagttactccatctttctgtgtctttcataatcttgatgttttggagagtacagtattggtcagttattttgtagaatgcccctcaatttaggtttgtctgagcttgcctcacaattagaatatcacagaagtgctgtccttctcatagtatatcctctcagaaagtatatgacatctatttttcccattattagtgttaccacttttttggtttgtttttgttttttgagatggggtcttactgtgtcgcctgggctgcagtatagtgccccattcatagctcactgtracttcaaattcctgggctcaagggatcctcctgcttcagcctcctgagtcgctaggactacaggcacttgtcaacatgcctgactaatgtattttattttattttgatttctgttgagagtctcgctgt

SEQ ID NO: 837063 - DNA, 601 bp, Homo sapiens
aggaaatgaacactgatacattgccattatctaattaatctacaggccttattcaaattttggcagtagtcccactaatttcctttttggggaaaaagtttttttcttttggtctaggatccaattcaggattatatgttgtgtttagatgtcatgtctctttagctgtctttaatctgtaatagttactccatctttctgtgtctttcataatcttgatgttttggagagtacagtattggtcagttattttgtagaatgcccctcaatttaggtttgtctgagcttgcctcacaattagaatatcacagaagtgctgtccttctcatagtatatcctctcagaaagtatatgacatctatttttcccattattagtgttaccacttttttggtttgtttttgttttttgagatggggtcttactgtgtcgcctgggctgcagtatagtgccccattcatagctcactgtgacttcmaattcctgggctcaagggatcctcctgcttcagcctcctgagtcgctaggactacaggcacttgtcaacatgcctgactaatgtattttattttattttgatttctgttgagagtctcgctgt

SEQ ID NO: 837064 - DNA, 599 bp, Homo sapiens
gctggacacagtataaagagagaaacatttaaaaaaaatagttattaaaaaagctccatatgcctcttgcttaatttaaaataatttaaaaactccmacagcaaaataaatcacttactcatgaagaattcctttagctcattttcatcaatatcatgtggcaagttaccaacaaaaagttgatgactatctggatagcgaattattctacggttgtcagagtcattctgttccatatctcctctgcctgagaatagaaatagagcagatactaaagtttacaatatcataaaaactacttcaaaggagtgaatgtaaaaatcacttaatattgatattcctgttttagtttaataagactaggtgagcttcttgaaaaagaggcaaaagtacttattactagtaggttagaaaacagcatgacactaaaatgtaaagtgaggacaatgactaggttgctaaaatagcttcttctagatctactggattatacaaaaatcaaatattagtactacaggtattcctccttaaccaaactgttgccatcacccaggaaccaagcagatttcagatagtgaggtatagcttactaaatattt

SEQ ID NO: 837065 - DNA, 630 bp, Homo sapiens
ttacactaccctctgctccagtttttagttgagatttcaaaggtcatgctccaaaaaaagcactttattgtgatattctgagtcaaaattaaagtgaaaaattgtgactagtctcataggaactcytaagggagcaaggctttgtcttcttttaaacacagtatgtttgagggaacttcaaaggttgtagaataaaaattaattttgaaatcacataaaattcttatctctaccctaagtaatctgaagagttttctacttctactcaaaagtcctataattgttggaaaattaaggctacaatgcaatttaaggtaatttggaaacaaatacgttcatataactgaggggaaaaatgatggtgctgaagtggttttcgtgattttctcgtttatcctcacacagtatatggtagcatgttgttatagtgagcaggtgggcaggtaaagaaatgataccagttaagtaatacattttccagttgtcattctgctgttgccaataattacttgattttttcttaaagaagcctatttaacattttgagtttggggattacaatcatgtacttaaagttaaaactcattttagtcaagtaacaggaaagaagcattatgattaaattatgct

SEQ ID NO: 837066 - DNA, 658 bp, Homo sapiens
tcaacaaaactagttcctagatttataactgattaaaggtcagtaacttattgagacatttggaggcaaatcagaacaaygagcataagtacactgaacataagtccacaatactaatttaaaggcattttaatgaaaaatgacttttattgtattgtagatttagaattattattactaaaatacagctaaagtatttctatggtgtataaaggattactgaactagtttgcccacctttggtgccactatcatgaatgtaataaataaatacagtctccttaaccctactttatctgttagtaaaaatacccagtgggattctatagaagtatagaatatatagaaaggataaagtgaaaatgactacatccataatctgtaatgaaaatgatttattacttgttattcatggtcacctataaaaaccaaataatcagagtaacatttattaagtactcacaatatgccaatcattgttgcaagcactttctaggcattatctcattaacgtgtagcaataatcttaataatgctggtgttatacccattttgcagaggagataaaggaagttaaacaatgctatataatttgcataacttctctgaggcacagaagataaataatactgtccgatatctgtgcttatttgtcccc

SEQ ID NO: 837067 - DNA, 543 bp, Homo sapiens
cctgtaatctcagctactggtgaggctgaagcaggagaatcgcttgaacctgggaggtggaggttgtagtgaacaaagatcaggycacagcactccagcctgggcaatggggcgagactctgtctcaaaaaaaaaaaaaaaaaagctactcattcaaggtcaaattaaaaaattacagaacctgagaaattatgaattaataaaaacatgtaagccacaaaattactcaattttgctagatctgggtaacataaaataaaaatattacctctggattttcacttaagtatatttgtttagatatgttgtttattgtacagatccactgcaagaggaaaaaatagaaaaatataattttttttctacaaagcttctcttgtaaaggcaaatgttcaatactcaactgcaacagatgtttcattagaagtaatatatttatcttccttataagaaaacatttcataacagatgtttcattagaagtaatatatttatcttccttataagaaaacatttcataaggagggtgcatatatataaata

SEQ ID NO: 837068 - DNA, 615 bp, Homo sapiens
agaggagttgaaatattggaagtcagcagtcaggcaccttcccgagcgcccagggcgctcagagtggacatggttggggaggcctttgggacaggtgcggttcccggagcgcaggcgcacacatgcacccaccggcgaacgcggtgaccctcgccccaccccatcccctccggcgggcaactgggtcgggtcaggaggggcaaacccgctagggagacactccatatacggcccggcccgcgttacctgggaccgggccaacccgctccttctttggtcaacgcaggggacccgggcgggggcccaggccgcgaaccggccgagggagggggctctagtgcccaacacccaaatatggctcgagaagggcagcgacattcctgcggggtggcgcggagggaatgcccgcgggctatataaaacctgagcagagggacaagcggccaccgcagcggacagcgccaagtgaagcctcgcttcccycccgcggcgaccagggcccgagccgagagtagcagttgtagctacccgcccaggtagggcaggagttgggaggggacagggggacagggcactaccgaggggaacctgaaggactccggggcagaacccagt

SEQ ID NO: 837069 - DNA, 615 bp, Homo sapiens
agaggagttgaaatattggaagtcagcagtcaggcaccttcccgagcgcccagggcgctcagagtggacatggttggggaggcctttgggacaggtgcggttcccggagcgcaggcgcacacatgcacccaccggcgaacgcggtgaccctcgccccaccccatcccctccggcgggcaactgggtcgggtcaggaggggcaaacccgctagggagacactccatatacggcccggcccgcgttacctgggaccgggccaacccgctccttctttggtcaacgcaggggacccgggcgggggcccaggccgcgaaccggccgagggagggggctctagtgcccaacacccaaatatggctcgagaagggcagcgacattcctgcggggtggcgcggagggaatgcccgcgggctatataaaacctgagcagagggacaagcggccaccgcagcggacagcgccaagtgaagcctcgcttccctyccgcggcgaccagggcccgagccgagagtagcagttgtagctacccgcccaggtagggcaggagttgggaggggacagggggacagggcactaccgaggggaacctgaaggactccggggcagaacccagt

SEQ ID NO: 837070 - DNA, 617 bp, Homo sapiens; identical to SEQ ID NO: 822323

SEQ ID NO: 837071 - DNA, 615 bp, Homo sapiens
tgctgcttacagcaactggagaatttataatgtggtgcagcctggctgttcctgtagcctgaccacctgggtttgcatcctggctcagctgtatsactctggacaaattacataatctccttgtggctcacttatatcatctgaaaaacacaaatgataatattacctatagaatggctacaaagatttaaggggctaaaatgttagcaataactcgttattacggttatggttatagtgttcagttatccagtttggaacgatttatcactgaaaattaatactcatgcaagtagtaaacgaatgtaatgaccatgataaggagacggacggtggtgatagtatcggttttataattctgacaatttttctggaacattccaacatttgatcaacagtatacttctgttaggtcaaaatagtaggctaccatggttactttaaaattgcatctttgccttaaaaatgttttcacatagaaattccacttcttagaattgagcctgtgaaaataattgtaggtatgaacacagcaatcttaaaggatattggtcagagtattagaaacaccctatgtgtccagtaaattgtagtgcatgcataccgtggacagac

SEQ ID NO: 837072 - DNA, 615 bp, Homo sapiens
tgctgcttacagcaactggagaatttataatgtggtgcagcctggctgttcctgtagcctgaccacctgggtttgcatcctggctcagctgtatcactctggacaaattacataatctccttgtggctcacttatatcatctgaaaaacacaaatgataatattacctatagaatggctacaaagatttaaggggctaaaatgttagcaataactcgttattacggttatggttatagtgttcagttatccagtttggaacgatttatcactgaaaattaatactcatgcaagtagtaaacgaatgtaatgaccatgataaggagacggacggtggtgatagtatcggttttataattctgacaatttttctggaacattccaacatttgatcaacagtatacttctgttaggtcaaaatagtaggctaccatggttactttaaaattgcatctttgccttaaaaatgttttcacatagaaatkccacttcttagaattgagcctgtgaaaataattgtaggtatgaacacagcaatcttaaaggatattggtcagagtattagaaacaccctatgtgtccagtaaattgtagtgcatgcataccgtggacagac

SEQ ID NO: 837073 - DNA, 572 bp, Homo sapiens
gcctcctaacagtttccctacctcccatttctagtcccacaacctgccacctacaataccaccaaccttgtcatattgcccctaggttcagagattttagtccaagggtgctccagctaaggccgacatgacagccacagtctctttcaactcctctcccaccacacacacatatacacagaatcaacgagcttctaatatttagttttcattcatgccagggttcgggcctggtccctgggggcgcagaccccagtcctgccctgttcctccagaatcctgagctttaagcaccatttcctgttgccccagggagctgacccatggcccctgacatatactgaacttgcagacacactgggatttggctctgaatttgctaggaggcccagatcatgagagggctgtggatgcaaacaggaagcgtccctgtgggcccccagaaataactgtcagaggcatgactggcrggggagatgggcaagggtcctgccattatgaagtgggttccaagagtcagcagagttgaggcattaaagttttcaggacattatttggggctgttggctgcc

SEQ ID NO: 837074 - DNA, 605 bp, Homo sapiens
agctgaaacaatctttttttccctttctctagagaggcatgtgaacactcaccacacttcctaagctagttctctttggctaaacctcaagctcttgggaaagaggtggataaccagagttggccaagccaggtgctgtgtgtgggtggtttctggggcagcactggctgcagttagcagtgtccccacacaaagatggaaccacctcaagacaaggtgtcctgtgctgtccccacagccttgcttgtctgtgcagacccagcactcaagatgtcccccaacccacccctgggtgaactcccctgtgctcctgtttggccctccaccataacacacttctcttggcagaagagaaggaaactaggagttgctgagcaatctgtgtcttcccttagcccagggccctttgcttccagcagttggctctccttgttctcagtcttcttatcctagttactagagctttcttatgcatcttaatttttcttytctggttccttgaagctggagctggtattcaagaagagttccctgccctctaaagcagggaacagtcagtgagagcagtcagtctcactgtggaagttaggtccaagcagggggaa

SEQ ID NO: 837075 - DNA, 582 bp, Homo sapiens
actacttggtaaataacgaaatgcaggcagaaataaagatgttctttgaaaccagtgagaacaaagatacaacgtaccagaatctctatgacacatttaaagsagtctttagagggaaatttatagcactaaatccccacaagaaaaagcaggaaaaatctaaaatcgatctaacctcaaaattaaaagaactagagaagcaagagcaaacaaattcaaaagctcgcagaagacaagaaataactaaggtcagagcagagctgaaggagatagagacatgaaaaacagtccaaaaaaaaacaatgaatccaggagctggtcttttgaaaaaaatcaacaaaataggtagactgctagccagaagaataaagaagaaaagggaaaagaatcaaatagatgcaataaaaaatgatatgggggatatcaccactgatcccacagaaataaaaactaccatcagagaatactataaacacctctatgcaaataaactagaaaatctagaagaaatggataaattcctggacacatacaccctcccaagactaaaccaggaagaaatcaaatccttaaatagacaaa

SEQ ID NO: 837076 - DNA, 516 bp, Homo sapiens
cttatttcttgtaaatggttacaaaagaaatataattttggagatgaagcaagaagaagtagtagatatgaatcagccaccccattgagccactccagatgatagccaatgtctcaggccttgatcctcttatggagtcaagagaaacattcagctggaatagtctcttgttaggtgatccaacattttttctcaaatctggctttaattaatcatatttagagttacttcgtgcaaggtaaggaaacgcatttaattgttgttccaaatgtatactttttttcttcgttattgcatatttcaatgcaatagtgaatggaagcaaacagacacatttagcttaccaaaatacaaactcagaagtcagagattttccctttaaattatagaaaatgcaattttagttttacattattttgttcatactggtctttggatgatcttactgaatcaccagataattatttataattatcwgtcatgcattatttataaataaaagaaaacaatattctc

SEQ ID NO: 837077 - DNA, 624 bp, Homo sapiens
gattataaatcattctactataaggacacatgcacacgttatgtttattgctgcactatttacgatagcaaagacttggaaccaacccaaatgtccatcaatgataggttggatgaagaaaatgtggcacatatacaccatggaatactatgcagccataaaaaagaatgagttcggccaggcttggtggctcacacctgtaatcccagcactttgggaggctgaggcaggcagatcacgaggtcaggaggtcgagaccatcctggctaacacagtgaaaccccgtctctactaaaaatacaaaaaattagctgggcgtggtggtgggcgcctgtagtcccagctactcgggaggctgaggcaggagaatggcgtgaacctgggaggtggagcttgcagtgagcctagatagtgccactgcactccagcctgggcgaaagagcgagactctgtctcaaaaaaaaaaaaaaaaagaatgagttcatgtcctttgcaggaacattgttgaagctggaaaccatcatcctcagcaaactaacacaggaacagaaaacmaaataccgcatgttctcatttacaagtggaagtacaacaatgagaacacgtggacacagggaggggaac

SEQ ID NO: 837078 - DNA, 543 bp, Homo sapiens
aaataaaaagttgttttatatgccatcttgtagaacgctgtcttccaactgtaaaaacaaacacttacaatgataagtgcttggccacggataaaggtataggcagcattaatcttacactcatgctagatcctcatggtattatggtgttcattttaatggttttttttttttttttttttactttttaacaacaaggtgcatatggcagtgtacacaaagaataattgaataagtagtaagatcaaaaggagagttagataattaaagcgacaactgttgctgagttatattaggaatgctttcaaatgccctcaattcctccacagctgagctcaaaatattataagtaatatcgatgttggatttgaaaaacaatgtgaaaatgtcttactccaaaaatgtgtatttcactaratttcacttgtctgatatgccttcttttaatgtgtttattcacatttattaaatattagtgtatgtgaaagtagggtgacagatgaggaatacaaatttgaacttctgtatttttcagtatttcct

SEQ ID NO: 837079 - DNA, 646 bp, Homo sapiens; identical to SEQ ID NO: 828098

SEQ ID NO: 837080 - DNA, 582 bp, Homo sapiens
ttcaattctataaatttttcagtaatgttccctctggacccaggcagtatctgcatacccacttatcatgtttctctcaccttgaaatacactcggtaatgttttcttggagtcctttttattcctgagcttgtggacaagtctgtatgtacgtccacagaatcctctatggccttgaatgcagaatgaaatttgatttagtgtctttagtcatgtctacataagcctagctttaaaggtttaaagcaagaaattctcctgtgttctacaacacaagcaaacacaaatgccttggatttcagctgcattagaaattgttcagcccagaaatgcttaagacaacaaatatctgtttccttaggatcaaaactttgtttcagccaaacattcctaggaaatcctgaaattgcattgcaaggcaacgatggcctgcaaacgaatgttgcctgagcctgcataagtggtcttgagattgtgactgccatgttggccacctgtagggcagtattggagaggcsactcctgacctctgctgtttttataatttattcctccctttcttttgtgttcacttgctaaggc

SEQ ID NO: 837081 - DNA, 726 bp, Homo sapiens
tacatttaaaaaggatcttgaatcttttattataattgagccttttctattgtgaatatagattttatccatccagctaccaaaatagtgtatgtcagaatcaaaacatattaggactgaaagtttatttagaaagcacttacattttatgaaagaggcattttatgagagacgaggacataggggcttggagaagttattgccctcctgaaggcacaggcaaggaggggttcctccagcctactgctccctggtcgctgttgcagacactctcatggttctgtgtgcccatagagcagtattccgaagttttctaagaaagtgagggggaaattttacaggcgtgaggaccctacatttttaaaaaactgactgagactaagagtaaagggaatacctgaagtgttgaaaaaaaatttgtgaagacatctgccagactactgctttcttttaggcccagtagttgaacaagtttaagaggccagtgcagcagagtggaggtggctgcgctgagatggtctcctctgtccacatttaccagggcaaaggatataagagtcttctgggaccagatgacagccatgttgaggagaggggaaaaaagagccaaatgagatggactggagcagtttcaagtcctgtcctagaggaccttccacacagggtctctgtttggktggatagctagagaaccaggatccaaggactgagtgacaactacaggaa

SEQ ID NO: 837082 - DNA, 554 bp, Homo sapiens
ccaccgcgcctggtcatacatctttagatgttgggtcatcttaatatgaggttcaccagcaatgtggtcgcatcatgttagggggcagggcacaaaactagcctagctgtgccggggcctcccacccactgcctgaggcctgcagggcccacccgctgcctggcaggagtgaagcagaagagtcctctttccatggactctaccatcccagccctttaaggttccagcccagcaggcctggaattccggccctggtgacctaagctgctgctcagccaagccaggcaggagaggacagatccagctgtgggagccaggaagctcaaagctggaatttaaacagctgcctgagacctggggtccccactgcgtgggcctcctccccgtggtgacatggcccagctggcctgccttccacctggggagcttatgttggacactgggccaggagctcagatccctcmgtccttaggccatacctggtgtctccagctctctcatgtacacaggctgagtctgcaggattggacgttcaggacaagatgggatggcac

SEQ ID NO: 837083 - DNA, 576 bp, Homo sapiens
ggctgcagcagaggctgtctttacggtaggggcagaggctgcacacgctgatcctcagcttttaattaatccacccctccctggccccttcccaggaaaggtcagagatggattctgcagaatgaggacaggactcggtgtgcgtcaagccaggctctccaaatgcctttcagaagaccttgcccaagaccccattaaattttgcttggagcatggcctccatcactgtgcaggtcttcatgcctacctggccatgacagggtcaggacatgaccttgaaagtgtggcaagaaaacgaaagccacgctggcctccatcccaggagaagacctttggtgtgagcaggggagggtcatcttcagagttggcctcagaggcagtgcagggcactcttgctctgcggtgcctgagcttggctcagttgagcacaggtccaaggcggctgtggacacaggatcaagtctgacacaggccttgaccctgattcacctcacccctgcttggctcccaggggaatgcgctgytgacctcagactgggaacttttttttttttttttgagttggagtctcactct

SEQ ID NO: 837084 - DNA, 607 bp, Homo sapiens
tctcagcatttggatttgaagctctgtgtctgacacagatccatcaatgctgcaccggtgctagttttccatcartagacatcgttttaatgttactaaaatattactagaatcccactcattcattcagcagatacttgttgaagtcctactgtttgccagacattattctgggcacttggggtttatctgtgagcatgttaggaataacgctcaaaatcctaaggaaactgaacactcaaacaaaggattcttagcaaagcaattgtacttctgcgcagaggggtacctccttggccagttgccatgagagcacacctgaacaaaggggcacgagagcctttattcctgatgcaagtcctgcccctgtaccctttccccactggccggggtcatacaatctaaactaatcccagttgactgaacatttgatttttttttagatagggtgggcatgtaaaagaaagtggagaggaaggggaaggggtgtctgtaatgagctagaaagttagtcctctttccaaataaggaaaggaatgtgagctggtactgataacgcttggtactgtggcatgcctgggcatttaacaaaggcaaggaggaaaaa

SEQ ID NO: 837085 - DNA, 609 bp, Homo sapiens
atgtagctccaaaagctgaattctcattttttaaacacttcatgataatgtgaaaaaacaactttttatggcccgatcatggctgccctgttggatgtagatgctttgctgatccctcagtcacaagccccatgaaatacttatgaaatgtgtgaaaggcttctgtggtagcccacaggaccagggacagcgtgggtgtgaagagcatcaggaggagagcctatcagtcactcaccactgtggctgctgggggctgatggcaggacccttggtgggcagcgaggtggcaggggccctgccaccaacctgcaccacccctgaccccagggccaggctcacccttgggaggccctgggctaaaacagtggtggtacctcccaccccaacgtgtccctatttacgacatcataaagtaaatagaaaagtccagcagagtgctgcttttaccaacaataactgctttatacttttaaaaaatcacatgggcgccccctcattttggtgccacygtcttgcaaaggcctagacttgtgctttttcccatgaccagccacccttctcccaacctcggaggacatcctcctccttcagtccctcctgccacactct

SEQ ID NO: 837086 - DNA, 609 bp, Homo sapiens
atgtagctccaaaagctgaattctcattttttaaacacttcatgataatgtgaaaaaacaactttttatggcccgatcatggctgccctgttggatgtagatgctttgctgatccctcagtcacaagccccatgaaatacttatgaaatgtgtgaaaggcttctgtggtagcccacaggaccagggacagcgtgggtgtgaagagcatcaggaggagagcctatcagtcactcaccactgtggctgctgggggctgatggcaggacccttggtgggcagcgaggtggcaggggccctgccaccaacctgcaccacccctgaccccagggccaggctcacccttgggaggccctgggctaaaacagtggtggtacctcccaccccaacgtgtccctatttacgacatcataaagtaaatagaaaagtccagcagagtgctgcttttaccaacaataactgctttatacttttaaaaaatcacatgggcgccccctcattttggtgccaccgtcttgcaaaggcctagacttgtgctttttcccaygaccagccacccttctcccaacctcggaggacatcctcctccttcagtccctcctgccacactct

SEQ ID NO: 837087 - DNA, 620 bp, Homo sapiens
acagggagctctgactgcccagagccacacagtggcacgtcttggagttggaatgaaaacccatgtttggctgattccaggtcctctctcaccayctcgccaccgtatcgcaggcctccctgggtcccacagggactgaccccagggttcacagtaggcacacagtggatgcttttcagtgggtggttgagaagggggacaaaaggctggatggccccctcttctgtccctcttctgaccctgaattgttgggttctgacatcactctaagaaaagtcagctacctggactcagccccacagtgcccagcagctcaggcccctggtgacctctgcagcaaccccccaccacctcccacctcaaagccagcaccccacccaacaggactctcagcaactctgctgccgtggatcagtcctctgggccttcaccacactgttgcctctgctgggttactttttctctcatgtcttctactgatccctggggttcctccttcgggtctcaatttagtcgttgctacctctgaggagccaaccctgagccccctggagacttctctgggttttctttttttctttttttttaaaatagcaaacacttaaaaatttttattttaa

SEQ ID NO: 837088 - DNA, 620 bp, Homo sapiens
acagggagctctgactgcccagagccacacagtggcacgtcttggagttggaatgaaaacccatgtttggctgattccaggtcctctctcaccacctcgccaccgtatcgcaggcctccctgggtcccacagggactgaccccagggttcacagtaggcacacagtggatgcttttcagtgggtggttgagaagggggacaaaaggctggatggccccctcttctgtccctcttctgaccctgaattgttgggttctgacatcactctaagaaaagtcagctacctggactcagccccacagtgcccagcagctcaggcccctggtgacctctgcagcaaccccccaccacctcccacctcaaagccagcaccccacccaacaggactctcagcaactctgctgccgtggatcagtcctctgggccttcaccacactgttgcctctgctgggttactttttctctcatgtcttctactgatccctggggttcctccttcgggtctcaatttagtcgttgctayctctgaggagccaaccctgagccccctggagacttctctgggttttctttttttctttttttttaaaatagcaaacacttaaaaatttttattttaa

SEQ ID NO: 837089 - DNA, 620 bp, Homo sapiens
acagggagctctgactgcccagagccacacagtggcacgtcttggagttggaatgaaaacccatgtttggctgattccaggtcctctctcaccacctcgccaccgtatcgcaggcctccctgggtcccacagggactgaccccagggttcacagtaggcacacagtggatgcttttcagtgggtggttgagaagggggacaaaaggctggatggccccctcttctgtccctcttctgaccctgaattgttgggttctgacatcactctaagaaaagtcagctacctggactcagccccacagtgcccagcagctcaggcccctggtgacctctgcagcaaccccccaccacctcccacctcaaagccagcaccccacccaacaggactctcagcaactctgctgccgtggatcagtcctctgggccttcaccacactgttgcctctgctgggttactttttctctcatgtcttctactgatccctggggttcctccttcgggtctcaatttagtcgttgctacctctgaggagccawccctgagccccctggagacttctctgggttttctttttttctttttttttaaaatagcaaacacttaaaaatttttattttaa

SEQ ID NO: 837090 - DNA, 620 bp, Homo sapiens
acagggagctctgactgcccagagccacacagtggcacgtcttggagttggaatgaaaacccatgtttggctgattccaggtcctctctcaccacctcgccaccgtatcgcaggcctccctgggtcccacagggactgaccccagggttcacagtaggcacacagtggatgcttttcagtgggtggttgagaagggggacaaaaggctggatggccccctcttctgtccctcttctgaccctgaattgttgggttctgacatcactctaagaaaagtcagctacctggactcagccccacagtgcccagcagctcaggcccctggtgacctctgcagcaaccccccaccacctcccacctcaaagccagcaccccacccaacaggactctcagcaactctgctgccgtggatcagtcctctgggccttcaccacactgttgcctctgctgggttactttttctctcatgtcttctactgatccctggggttcctccttcgggtctcaatttagtcgttgctacctctgaggagccaaccctgagccccctgragacttctctgggttttctttttttctttttttttaaaatagcaaacacttaaaaatttttattttaa

SEQ ID NO: 837091 - DNA, 480 bp, Homo sapiens
tacattgatgcctgcatatttaagaagatggccacttgattcagctttttaatgtgttatgcagtggtgttaaaatattactgcttaataccagagctgaatcactaccctgagcattctttctgttctgaggatggcttatatttgatagcagaacctaaatagtgcattagagctaaatctcttccatgctgttgttttcctgtctggggaagacttatcatgaccatgaaaacacaatgctgcaccagaacttaaacccaaagccgtaataatttccgggttggggaaggcttaagaaataactagaacttagttacttacctgatagttgtttctgggtcagagaaaggctctgtatgatcacctgggwtatttgtaaaatctgaccaaagattctagccttcccctggattgtgcctcctgtactactgtagtgctggctagcccccccatcaatgtgaattccctgttgatagg

SEQ ID NO: 837092 - DNA, 507 bp, Homo sapiens
cttaagctggttggctaaagattgggcccagaagaagggaacccagaagaccaacatgccagcaaaagggtattttaccagtctggcttttggcctttctctccctgtgcaaagtgataaaaggcctcagaatttttgagctatccttactcctccccttgtttcattttgatacatgttttctaataacctagtttgtctgttcttgccttcagggcatcaaactccaaacaataatgcaagcagagtctctgacaatggccctttctgctgggggaactcttagataggcctgtgagtgagctctgaccaccatttcccaaaaacagcaccccttgtcagcaggaagcagtaaagattgatcttccttatgctctttcaaatagcattcagatgtacttctttacaagggggaaagagacagccaggtaggaggtggtccccagagaatctccaaagagcttgaacactgagaaraatgttcactggggtggaacctcagcaagt

SEQ ID NO: 837093 - DNA, 616 bp, Homo sapiens
gcacagatcatcccattacccaggtattaagcctagaatccattagctattctttctgatcctctccctcctcgcatcccctgacctccaaaagtccccactgtgtgtttttaccccccatgtatccatatcttctcattatttagctatcacatataagttaggacatgtggtatttggttatctgtttctgcattattttgctatgaataacagcctccaactccaaccatgtccctgcaaaggatatgatctcattcttttttagggatgcatagtattccaaggagaatatgtaccacattttctttgtccagtctgtcattgatgggcatttaggttgagtccatgtctttgctattgtgaatattgccacaacgaacatatgcatgcatgtgtctttataatagaacaatttatgttactttgggtatacacctagtaatgggattgctgggaaaaattatatttctgcctctaggtctttcaggaatcaccacactgtctttcacaatggttgaacaaatttaaactctcaccaacagtgtaaaastgttcctttttctccacaatctcaccagcatctgttgtttttgacttattaaaaatagccatt

SEQ ID NO: 837094 - DNA, 632 bp, Homo sapiens
gagtttgacccagccaggctctaatcatcctccaaatgagccttaggggaacatcagagtttcttccatgatttgagaacactgagtcagtctctcactccatctcaccatgcagtttcctcaggttattgcaggggggagctgaagattcatctcccaaagtttctatctagatgtaggacaaacttcccctgctattagttttcccacatcttctctaacttatctcgccatctcagacttcagtccaaaaagggagactaagacacaagtggctcaactcttctttcaatcttatctcctatatctctgcctattcacccaggaggacaagagtcaagttttcctcttctttctgtatgaccagaggagctccctacactgtaacttcttcttagacctactcctcgtcttttcctaagaacataatgttagacaaggtgtagggatagagaaactggcatgattaaggaaccaaattgcaagaacacttgaaagcattttcctcatatttgcatttcartaagtaggtattggtcaagcctgtttgggaagagttccaggtttcagaaccaaataactgttaaataaaattcatagaaagccattgattgatttggacagagctctgc

SEQ ID NO: 837095 - DNA, 419 bp, Homo sapiens
attttttttcagttttaaacttttattgtagtacaaaataagattttttacatcagtttgatcccgataagatcatcttgaaactggagatggtcccattcacctcagctcactgactccaygctcaggcttgctgtggagctcatgccttttaacccaaacactacatattccctcattaaccgtgcactcaacatttgtgcaagattcaaaactgattgttaggcatgcataaataaagcagacaaagtctctaatcatcataaagcttagagtcttgcggggcagactaacacagaacataatgacataggaaaaaaaacactaaaagcactgtgaaagaacacgataacctagctgtggtaaagggaggagtaacactcaagtttctaaaacaatgtcaagaaaactgaaataag

SEQ ID NO: 837096 - DNA, 419 bp, Homo sapiens
attttttttcagttttaaacttttattgtagtacaaaataagattttttacatcagtttgatcccgataagatcatcttgaaactggagatggtcccattcacctcagctcactgactccacgctcaggcttgctgtggagctcatgccttttaacccaaacactacatattccctcattaaccgtgcactcaacatttgtgcaagattcaaaactgattgttaggcatgcataaataaagcagacaaagtctctaatcatcataaagcttagagtcttgcggggcagactaacacagmacataatgacataggaaaaaaaacactaaaagcactgtgaaagaacacgataacctagctgtggtaaagggaggagtaacactcaagtttctaaaacaatgtcaagaaaactgaaataag

SEQ ID NO: 837097 - DNA, 538 bp, Homo sapiens
aaagctatatataccacgtacactaataataaaaaattgccaacatgaatctccaagctttagttttttaaattgtcagatgggtgcataggtgaaggagacaagaaacactggccaggggagactctcaagatactggaaccctcgtctcagttctgtcttaataaaatttttgcttttgagttaattgtttcatgcctatatgctgtctatggtaccctcttagtataagaagtctagacataaaaaacctctacaattcaattaatatgtgtgtgtgtgtgtgtgtgtgtgtgtgtgtgtgtgtgttcacagattatagagattcacagctgacaaaaaataacttctgggagataattttctagtgggaaagaaacatcaacaattcattacaaaccaataaggtcactgtcaagataagtgtgtggggacctccaaggaagctctctattttactaaagtccagagagtctgtcccrggaaggcttccagactgcagctcattggtttattcagccagtgtgtactgaatgct

SEQ ID NO: 837098 - DNA, 507 bp, Homo sapiens
tagatgtatttagcatccaatggagataattctaagaagtgaagtatttgtggtcttgtttctacaggtttttttttttttacatgactctcattaatggkgccttttttcctgtttataagttaaagcggctcgttttacccaaaattttgtatatgaaaaatatttcagccctgggttgaaatcatttgactccaaagaaagctttcttttgttatttcagacatcagggagcaccaccacacctggaaaatgttaaatgaaattcttggcttgctgttttgtatgacacagtagtgtaaacttaaattgtaaattcatgggaggttcagcttgtggttagggattcttaagaaagtgtatttattttttcttaaccaagtgccaaattcaaaaccagcgaatttgcttgttatcttattttttgtggcaagattatttattttgtggttctatatttatgtagggggttttctgtcctctctgaacacctttcacaaaagaatc

SEQ ID NO: 837099 - DNA, 507 bp, Homo sapiens
tagatgtatttagcatccaatggagataattctaagaagtgaagtatttgtggtcttgtttctacaggtttttttttttttacatgactctcattaatggggccttttttcctgtttataagttaragcggctcgttttacccaaaattttgtatatgaaaaatatttcagccctgggttgaaatcatttgactccaaagaaagctttcttttgttatttcagacatcagggagcaccaccacacctggaaaatgttaaatgaaattcttggcttgctgttttgtatgacacagtagtgtaaacttaaattgtaaattcatgggaggttcagcttgtggttagggattcttaagaaagtgtatttattttttcttaaccaagtgccaaattcaaaaccagcgaatttgcttgttatcttattttttgtggcaagattatttattttgtggttctatatttatgtagggggttttctgtcctctctgaacacctttcacaaaagaatc

SEQ ID NO: 837100 - DNA, 636 bp, Homo sapiens
gcaaaccaaattcaatggcacattaaaaagatcatataccagaaatccctgatgaacctagatgcaaaaatccttaacaaatactagcaaaccaaatccaacagcacattaaaacagcacatatatcacaatcmagtaaaatttatccctaggatgcaacaatggctcaacatacacaaatcaataaatgtgatataccacattaacaacctgaaagacaaaaatcatataattctttcatagatgcaaaaatgaagcatttgacgaaattcaacatcctttcatggtaaaaatgctcaacaaattaggtatagatgataataaaggccttaaatgacaaactcacagctaatattatactcaacagtgaaaagctgagagcttatcctttagaaacaagagaaagatgcccactcttgctgcttctattctatttttataagggtgtgctatttagtgtattgtggctctgacataaggatggacagaatggcaatgccagagacagacccagtactatatggaaagatggtgagctgtgtcaattagagggaaaaaatggtcctggggcaactaattacccatctgaggaaatcatcagtttgaaacccactctcaatccaaaacaattccaga

SEQ ID NO: 837101 - DNA, 645 bp, Homo sapiens
  misc_feature 625, 626, 627, 628, 629, 630, 631, 632, 633, 634, 635, 636,637, 638, 639, 640, 641, 642, 643, 644, 645: n = A,T,C or G
gagataatctacttatgcttggctcgtaatgagtgggcatctccaggcataagtgaaaacagaactaaacacagttacaagtcaaatgtggggctttacaggtgatgttcatattattttttccagtccaaaaggattaagactgttctctttaaaatttcatattcaagtgagactagtgtcctcccggttacgatgaccttaactattggagtgaggaaaagaaagggagggtgtccatttccatttctcatggccataaattcgaatgattgactcaagttgttgaggtgactccatttccctgagtactaaagaaggcagcaagtggaaacacctctttgcttgcaagtttacagccctcgagtccaagtttttcaccctctaaacccaaactatgctatagccatatgtgaccccttagcttatgtaatcagggagaggtccagccctttatcactctcatgtgccccaaaatcacttccattctctttccggctcctgtaaaatactctgtacacatcaaaaccacctaataacaaatcgatgcaacccaagacactytgtggaagggcatcgtctcctatttctctatggatcccaccaaacagcaaaacatttctcnnnnnnnnnnnnnnnnnnnnn

SEQ ID NO: 837102 - DNA, 529 bp, Homo sapiens
aaaaaaaagaaggttgttaacaaacattgtgtttcttcaaaaattatggttagattacacttgccrtattctccagaatctaagaatgacctatatttggttggcaaaatgtgagcagaaggaacctgtgacctctcttatagaagttttaacataaaatgcacaatataccatgtcccttttttctgccttgataattatggaagtgcacttcaagaagaagtgtccctcaacttgcattcctaagtgactatggtaaaaaaagccccctgcccaacacatagggcttgtaccatgtgcaacaaataaacatttgttgtattaagccacagagctctggaggttacttgttacagccctataatctagagcatccagactgatgcacagactaatatgcattaacataggaaaatagtcatcacgtgattgtttaatcaaagctagcatgatcaccattatgttgagatctcaagtcagttgagtaacatactcaaagctgataaaacacaatttgctctttcagcta

SEQ ID NO: 837103 - DNA, 502 bp, Homo sapiens
ggaagtcaatttggcagtttcttaacaaaactaaacatagccttaccatatgatctagcaatcacgctccatggtatttatccaaatgaactgaaaacttacatgcacacaaaaacctgcaaatagctgtttataataggtttattcataattgccaaaacttgcaaacaaccaaaatgtccttcagtaggtgaataggtaaataaactatggtacatccacacatggagtattattcagtgctaagaagaaacgagctaccaagccatgaaaagatatggaggaaacttaaatgcatattactaactgaaaaagccaatctgaaaaggctacacactatttttctaaccatatgacattcctggaaaggacaacaccataaaaayaatgaaaagatcagtggttgccaggggttggggaaagagagaaataaatacagctcaaacgacttttagagcagagaaaatattctgactttataatggtagatacatgccagtgt

SEQ ID NO: 837104 - DNA, 502 bp, Homo sapiens
ggaagtcaatttggcagtttcttaacaaaactaaacatagccttaccatatgatctagcaatcacgctccatggtatttatccaaatgaactgaaaacttacatgcacacaaaaacctgcaaatagctgtttataataggtttattcataattgccaaaacttgcaaacaaccaaaatgtccttcagtaggtgaataggtaaataaactatggtacatccacacatggagtattattcagtgctaagaagaaacgagctaccaagccatgaaaagatatggaggaaacttaaatgcatattactaactgaaaaagccaatctgaaaaggctacacactatttttctaaccatatgacattcctggaaaggacaacaccataaaaacaatgaaaagatcagtgrttgccaggggttggggaaagagagaaataaatacagctcaaacgacttttagagcagagaaaatattctgactttataatggtagatacatgccagtgt

SEQ ID NO: 837105 - DNA, 630 bp, Homo sapiens
attatgagccaatatgaattaaagaatacagtcaattttttgacacccccgccccactatcccaagcaaatggacaaaatttaatgtgtaaacctcttagacaatgagataacaagctcacgtatttggagaaaaaggaaattattcagcaaatcagtggctattacggaggctgtcaagggttctttagccagggagctcagaccagcaacactagcatcacctggaggcttggaaggcacacacatccatagcgcaccccatacctgctgaatcagagtctttgtagcagggcccgggagtgtgcccttggcaagatctccaagtaatgatgcacactaaagttttagcagcactctactgcagcaatggttctcaaattttagtgtccatcagaatcacctggaggattgttagaacagattgctgggcttcacctccagagtttgtggtgcatggatttggaggagggccagaaaagtctgcatttctcacagccttccaggtgaygatgatgccattcaagatccataattggaaatagttgtacgtacccatccagagataaatgtattggtttatttttttctttgcagatgaatccttaaatagggattttttttaaattaa

SEQ ID NO: 837106 - DNA, 598 bp, Homo sapiens
ggagtgggggtgcctcaatgcctctgctgaccaacatctatcaactgagtaaagaaggctcttaattactycataaggatgttctcaataggcagtaaaacaagcatagatacttcattcaaacttgggggaggggggctcaagagaggaggaatagcaagagctctctagtgtcacctgaacagaaagaaggttacacttaattgacagtacccacaaacccaaaaggttccaacatcttgaagaagtaggatcaaagaaaagtaggtagataaacatctacctattctctgtacaaataatttgatcactgagctaagattttggcatcttacaatactacataagaataaaaactagaggcctcctagaaaatgttttgcattccatatttggtaaaatctttttaaataatgaaggtcataagtataaagttacctatgattatacctgctccaagaaaatgcaagtcctcgtccttacattaccactgaaatgtatgatcaattcttaaaaggaatttgagtgctgaaaagaagttgtccaaaagtttttttttggctttccctttccctattcattatgcagaaaatactct

SEQ ID NO: 837107 - DNA, 617 bp, Homo sapiens
agcctgttgacttaaaggtagaaggatcccaaagtggccaggtgtcaatcttaacttccagtttaatgggatcgttgttgtttctcctggtggcagcattcctccctctggaactaagacctctaggccagtagaatgtaatgtcgtgggaacaagaatggggctgatagtgagtggtgccacttccaagtccactccttgattcctggacccatgaatcctggctatgggagaaacagtactatattttggacactgattcagagcgtacgtggccttctggagaactttgccccaggcctgcaaagtattgtcacctagttggcattgtaattgtgacttcagaaggccattccaccgttctatcaatccagctgcttcaggatgatggggaacatggtacagtgaattccatgagcatgagcacactgccgcacttctttagccatgaagagagtgctttggtcagaggcaatgctgtgtggaataccatgacggtggataaggcattctgygagtccacagatggtagtcttggcagaaagattgcatgcaggataggcaaacccatgtccagagtatgtgtctattccagtgaggacaagcgtctgcccttt

SEQ ID NO: 837108 - DNA, 617 bp, Homo sapiens
ggtaccagatgtgttaatttgctcaagcaatgaaaccacatctggtacagcagctgaaattggagtcaccacttgattaagcttatgataatccactgtcattctccaagatctatccctatctgccactgacatttcaagcacctttggatctgctgggtcatatggcccaagtggcagagcagcttgcacaacagcctggaactgttgcagagccttcttctgttctggaccccactcaaaactggcaggcttttgggtcactcaataaatgcgccagagtaaggcacccaaatgaggaacgtgttgcctccaaaatccaaatagacccactaggcatgtgcctctttcttggttgtaggagggaccaaacgcagcaacttatcctttaccttagaaggaatatctctacaggccccacaccattggacccccagacattttcctgacgtagaagttactttaattttagtcagatttatttcccatgctctgtcatgcaaatgtctcaccaataagtccagtgtatttactacttcttgctcactggatccaatcagcataatatcatcaatgtaayggaccagtgtgatatctcatggaagagagaagcgatc

SEQ ID NO: 837109 - DNA, 428 bp, Homo sapiens
aaacggatgtcagtagacaagccaggaagacctccagttatgtatrtattttctcattttggagagttttgcggagcttggaagcagggccctatttttagtgtctattgtgtgaggctatggcagggatgtgtgaagctgcagttttcttctgacaatgattccattttaaatagggaaagaaggtaatgagggcaaaaataataaccattttcagggctcaaaattcagggtgtttgaaacagagttttctaaaatgccagcctagtggaagaaccatttttccttcctgcctttcatctgagagcctcctaacagatgccttgctctggggggagggccgatgtggcctccccgcctttctccctgtgcccgcttagggcccagctgtctggtttccactatttagcacggaaggagagagagga

SEQ ID NO: 837110 - DNA, 499 bp, Homo sapiens
ttttgtatatgatgtgtagtagggatccagcttatccccaccacataaatgttcagttttagcaccatttaataaaaaacttcctttccctattacattgcttttctgttgttaaaaatcagttgaccatacatgcgtttgtctatatctggattatattttgcttcatttgtctatttgtcaatttatatgttactatcataccatttcaattctgtagctttatagtaagtcttcaaatcaagtagtatataccctccaacttatttttaaaattgttctccctattttaggtccttttgatttccatatgaattatagacttggttcatcaatttctaccaaacaaaaacaaaaccaaaaaattgctgggttagggagaratgacatctcaataatcttgaactttccaatccatgaacatattatctccatttatttagatattctttaatttctctcagtaatgttttgaggctttcagtgtggagctcttgtg

SEQ ID NO: 837111 - DNA, 575 bp, Homo sapiens
actacaggcgtcctgcctcagccttctgagtagctgggactacaggcgcccgccacaacgcctggctaatttttttttttttttgtatgtttagtagagatggggtttccactgtgttagccaggatggtctcgatctcctgacctcgtgatccgcccacctcggcctcccaaagtgctggcattgcaggcgtgagccaccgtgcctggccaattttttgtatttttattagagacggggtttcaccgcgttagccaggatggtctcaatctcctgccctcgtgatccgcccgcctcggcctcccaaagtgctgggattataggcgtgagccaccgcgctgggctgagaatagttattttcagaacatacagagcacttacgaaaatggcctacatgctgagccatggggcagatctcaccaaatttcaaagtctccacactacggctgtggttcttcacattttgcaagtgatggactyctttgaaaatcccagtctaataaattaaggttgcccagacttagcactgttgacttttggggttaaatagttctttgtgtggggctgtcctgtac

SEQ ID NO: 837112 - DNA, 514 bp, Homo sapiens
gtgccatcaaattcccgccgcgccattcaaactagccaaccccctttcagaagtgtctataaagtcaagccctgtctttgttcayggctcagcttttggattttaatccactgtgcctgagtgcagtcaataaatcctcctgttccacctatcggtctctctgttctcctgattcccacaacagtagtaggggactgcgttcacactttcccctggtctttcatggtatgaataatagacggcattttttttttttttttttttttttgcctatagtcgcaggctcagtctcagtgattgtatgctggggtcagctgtttttgtttttatgacaccttgttttcttgtttactggcctgggacagatgtctgtagtcacttgtttccttgggaggcaaatttcagtctctgtgggggaggtctcccatgttagctgggggggggacttggcaggcagagctcagggatctaggcttccctgctttgtaaattgcttaatgggccccaaggccta

SEQ ID NO: 837113 - DNA, 643 bp, Homo sapiens
cttgtccaggtcactttgcatctgctgctgggccaggtccttctagtggagcaccttgtcccgcagctgctcctccagctgggcctgcagcagggcctgcttctccagggctgccttggcccggctctytgccagccacaggcccgtgctcagtcccaggcccgcctcctggacagctcgtgatgtccgggccagctcccctcccagctgcagcaggtcctttgggagagagcacaggatggggatgggatggggctcgctcccaactacaaattaaaactacgctgaggccaggcgtggtggctcacacctataatcccagcattttgggaggccgaggcgggcagatcacctgaggtcaggcatttgagaccagcctgggcaacatggtgaaaccccgtctctactaaaaatacaaaaaattagccaggcgtggtggcgcactcctgtagtcccagctacttgggtggctgaggtgggaggatcacttgagcctgggagttcaagcctaagtgagttgtgattgtgccactgcactccagcctgggcaacagagagagactgtctcaaaaaaaaaagaaagaaaaagtattttaagtccataatacaggttaaatcctttcctttcctgaatgaactgtac

SEQ ID NO: 837114 - DNA, 640 bp, Homo sapiens
gtcttcaactccttctaggttgctgtgagtgccattattttgtttctttttatggctgagtagtattccatgggatatatataccacactttctttattcactcattgattgatgggaagttaggctggttccatatttttgtaattgcaaattgtgctgctataaacgtgtgtgcaagagtctttttcatataatgacttctttccctctgggtaggtacccaggaatgggattgctggataaaatgatggatctacttttagttctttaaggaatctccatgctgtttttcatagtggtgtactagtttacattcccaccagcagtgtaaaagtgttctattttcaccacatccacagcaacagctataatttttttagattttgattaaggccattcttgcaagagtaaagtggtatcgcattgtggttttgatatgcatttgcctgatcattagtgatgtcaagcattttttcatttttttttgccatttgtatgtcttcttttgagaattgtctattcatgtccctagcccagttttwaataggattgtttgtttttttcttgctgatttgagttccttatagattccagatattagttctttgttggatgcataatttaccaagattttctccc

SEQ ID NO: 837115 - DNA, 505 bp, Homo sapiens
tgttaaattgatcccatcttctgctaggctccatacatactgatttgatcacacttgtttccttcactagcttataggatttctgagagcagggaccaagccttattcatctctgcatccccactgttagcacaattcctggaacattgtaggtgttcattaagtcgcttaattgctgataagattaataatacttatagttaacttttgagtgttcagaaactctatgtttaacgtcctatatttctcctcattttccaggtgagagagctgaggcactgagatgttaaatatcatgcctaatctcatccagccaataactggcaaaacaacaatacaaactgggtgatcaggctccagaaccttcattcttaactactacacagagtggtacacaggaatgaatgagtgatctcataaaagggctatatacctatgaaactattaaasaagaactgaagttgatttagaaatctggtttattcacacaaaaattgattaagta

SEQ ID NO: 837116 - DNA, 611 bp, Homo sapiens
taaccatgtcaacaatgtacaacggaactgtcgataagtcccctccatatcctggtctaattaaaccctttctcacaaatgccagcaatcaataaaaaattatttcttattcaaygtggacttcagttttaattactagcagtacaacacgctgtgattctgagagcatctgatctgcttgaatatacttcttaccaagtctaaaagaatgacatgatgacatagtgtcttctttcctttcctcacctgtagcactgttgttggactgaggccttagaaggcccctgggagcagctgatgcatacagctttatgagttcttacagaaaaagaacaaaaggaagttagcagacaaggtgagaatgagttaacttccattcattttttaacaccttataccccttagagcaaaaataggtgagtttggaaatgctttaaaggccttaagcgacttaagcaacaaaacacaatgcctatcccttcatggacaaattagccacaaggtacataccacaaaggtacagaaatgttactctttgatgctatttgcttacaaagaagatcaagaatcttcctgtctaaaaatgttcaagcactgaaagaaatacatat

SEQ ID NO: 837117 - DNA, 620 bp, Homo sapiens
ggtcaaaatgttcaagtctcacagtaaataaaggcacttgtattacagctatygttataaaaatctgtaacacttcaagagaccattatggagctattaaaaagattttgcattcagttttcaagatgacttaggcagaatgccaccactatagtaattactttatttatcactatgtaaacggatttttttttttttgaggcagtctctctctgttgctcaggctggagtgcaatgacacagtcttggctcactatgacctccgcatcccaggttcaagccattctcctgccctcagcctcccaagtggctgggattacagatgtgcaccaccatgcccagctagtttttgcattttttttttttttaagtagagacaggagtttcaccatgttggccaggatggtctcaaattcctgacctcaggtgatccactcaccgtggcctcccaaagtgctgggattacaggcgtgagccaccgcgcccagtcagatgctcaatttaaaaagagaaacacaattcatttaaaaagagaaaaatggtgttctcacacaataaccaagcaaaatgtggcagcaaaggcagtggctctgtctgcaaatactggtcatcttgaatta

SEQ ID NO: 837118 - DNA, 623 bp, Homo sapiens
gtttcaccataagtagtagtctattaaattaacagttgctagagaagaagctgcatctatatatgcagttctcttcttgtcaagcagtatattttcacgatagcaatgaaaaaattccatcctcaccagccgctgaaacatagtaatactgcagaaattcctgtgaactatgcgtttgctgcttccttttgtttgtttgttttcagagcagatgggcttgtttgctttttgcttaaacattaatcaaaaatcaatttatggctatgtaagtggcattagataattctcattctgactacagtaaataatatctatttgttcatgttagataagtctgggcggcagtggaatgtaaaatagaattacatgagatatgacatatggctatgtgttttataaattaatgcttttatgcatgtgggaggagaagtaatttagcttactgacaaaaagaaaagcaaaggaaattccagagaaagaacaggataccaagtctaaataaatttggaagacaaagagaatatcatartttagttcaatcttttaaacaaattgtcacaatttatacgttgggataagagaaccatgagaaaaggtatattctaagtcctgaacatctttct

SEQ ID NO: 837119 - DNA, 613 bp, Homo sapiens
gggtagcaaaatttagattttaatacttataggaggtgtgttaattggccccagggccgcaggctttakcgttcagaggactttagccccaaaggttttgtggaacttttccagagtcctcaccagtacattgggaataaatggaatgcctttggaagtactttgaagattgaattcgatagtgttggtaaagcagtctagcctgctgtgattgtgctattgatgcaaatattctctagcctgtattatttttccttggagctcaggaagtgatccccacccacctcaagcagtaaaggaaagagaggcaggagggtctgaccatgtgaggtgccccaataaagcatctgtattgtaaatcaggaatgtaggtattgggtttccttaaaacaaagcacacctacgtgaccactagctggagcacaatgtgggctcggtctgctgaaagagtcagttggttgcggctgtctaatccaattatggatggtcccagcgctcagcctttcagctgctgcccctcccctgcagactctgcctctctcaccctcccttttagggcttggtctgtggctaccccagaaatcacgtgcactcctaggcttcagcgagtaca

SEQ ID NO: 837120 - DNA, 494 bp, Homo sapiens
ctgtttgtgaccacttaggtgtgtaatgtgtgacttgtggactgtgtcagaggaagattttccaaccaaaagtacccattggtatcacagatgaaaagtccttataccatctgaaaaaaagtagaaggtggggagaagcttgaaaacctaaggaggccattaggaaaggctgtatattttctgattccgtttaaaattttaagttggtgaaaatactatgtgatcgaaggatgaacatattttagtaaatagagttatagtgctacaatgagataaatttcacaggtaaatgtgacgtagctaatgcataatcattctttgtgttgcatggcaattctgtacaaatggaaggtagcatgtttaacgtycctgttatttcacataaatacagactgagagtttcagtggtctggtttgaaagggaagaaatagaagaaggaaggagagaagttggcagaggagcaatctgctctaatatcctccagtacacaatc

SEQ ID NO: 837121 - DNA, 631 bp, Homo sapiens
ccccgtccccacaatatcttagggcgaagaaaagcaggtttgagaaaagctttttttcatcatgtatttgtaatagctggagcctgctgagatgatgaggtrgagtggagggagaaagagaccttgaggaggtgtggagggggaaggggtggaaagttctgtcgtcttctgtgcctctctctctctcttgctcagggtctccagtcagccctctgggtttgtgcccttcgtgctgcactgacaggtcaaagccgactcaggcctttgatgtctgctctaggagcaaaagtgattcctggtcccgcagccgttcccactgccttgtgtatgaaggtctgctgctctgaggtggatggtggctctaggcaggctgtttccgctgggtgcggttgttgctgcaggtttttctatatagcttggtcatgctcctgtatctagattaaaatcctatgacagatgggcctgcttatatctaaacttattcagagagtcttatgataggcaacaggttaccctttaccggggtaaaacatggtttattctacagtttggtcccgttgtaaggccaggagatagagtctcactagtttgccccggctgaactcaaactgctggactcaagggatccttc

SEQ ID NO: 837122 - DNA, 606 bp, Homo sapiens
attcaaattttagtaaacatttagtwttggcaacatattatgtgctaaatactagtttttaaaatgagaattattatgttttcttaaaaacatcttttgaatatttttaggatgtaattttcatgaggggcaaaaatgggtggtatagcatggtaattgttatcctccacaggttcagcaaaatctataaagatcctaatctatcctagtacataactatggatcaagtatttgtaatttttttctaaaccaaaactgcatgttatttaacccatacttggaataacagattctattttgttaaactgtaagctaaagtattatttgtttcaatagtaaacaaaaggattattttatgttatagaaattttatctttttttagatgtcaaacatcacattgataaaattatactgaaatttggataacatattttgtttgctgtattatataaccacaaagatttaaaaacttgatcaaatctaagtttaagataatgtaatacggattaagtatgcactttagagatagtataggttttgaatattgctctcaccctttactagctgtgattttgagcaactactcacacataatctgtacattg

SEQ ID NO: 837123 - DNA, 641 bp, Homo sapiens
gaaggtttatcaagggaggaatttgggatcaacccctattgaagagaaagaatggaagcagaattggccagagggaaaaattagataatgatacagtctcagtgaaggtctcatatgacaccaaaagaaaatacaatgttagaatagccttttagaattatcctatggaagtcattggatggtagcttccttgagattagaccatcactttgggagcagcatctctcttcagccaagataattacagagaatgtggacagttgagggctctctgctgacattctcaactttggtcctgaaaatggatgtggatggcacatcacagtgttgagtattgtccactctctgtgtatctcactaactccaccacagttttcgaaactcaaacttgtaagaggaagtttagcagaaggaatgaggaaaatgtctttagggcatgtgagaggtcatcacggttatctctaagctaaatggctaagcctaggagtcaattaatctggaaattaagattaccacctggacactttgggctcctgctacctttaagtcaacaggctaagaagagagttacagtgttggctggggtgattgacrtggactatcaagatgaaatcagtgtacaaatccacaatggtggtaag

SEQ ID NO: 837124 - DNA, 560 bp, Homo sapiens
cacagcccctataagaattaaggattccaaggacaaaataactgtggtaggatgtgctattgcgggtggcttgcatatgtgtaaactttctgtgatagacaaaggctggtactctttctgttttcaactactgaattttttaccagaccattatgatactaacaaaaagatatgaattaccaggaacatcttttctaactggtttcataaatattttgtgccagtggcttgtgctcacagcagggaagctgaaatgactgagaagtggaagattttgctattccctgacaactgttgtattcatcttccagtgaaattttcatcaaaaataatgtttatgctggtacttctccagacaatgtgacttcggtcattcaaccatgtgaccagggtatccttagatccatgaagagaaatagaacatgctaccagcagtgaacagaagcaagggtgtggaagattttcaaaaggagtttagcatgaagsatactattgtcaacacatggaacacagttgactaaagatatatttactcgtgcctatcacaacctctggcctat

SEQ ID NO: 837125 - DNA, 514 bp, Homo sapiens
ggaggatcccttgaacccaggagtcagagcgcagcctgggtaatataacaagccacaactagaaaagaaatttgattctcaatgtgggagtgttgagaggtagggcctagtagaagctgtttgtatcamgacggcaaatccctcatgaatagcttggtggttgttctcaccacagtgagtgatttcttgctcttgtgagacttgattacttatgatggaaatagattagttcttgtgagggttagtgactaaaaaagctgggatgcccttcagattttgccttttcacacttgtccacatcctctttgaccttatttgttatgttataacacatcatgaaagcccttcccagaagccagagccatgcccttgaatttcccagcttgcagaaccatgagctaaatacatctcctttctttataaattaccgaggctcacgtattctgttatagcaacacaaaactaagatagaaaattggtactaacaattgatcattgttatataggtatataa

SEQ ID NO: 837126 - DNA, 703 bp, Homo sapiens
gattccatttatatgaaaatgaatctgtgatttaaaaatcagactagtattaggttggtgcaaaagtaattgcggtttttgccttttttttttttttttttaaatagttgctttggggtttatggatggagtggcatggtagaggttagctgaagggggcatgaaataactttttgggggtgctagagtgttgtaaatcttacagtgggggagggacaggagtgcaggcatttgacaaaacacattgaattgtgaaatttaagatttttgaatttctttgtatgtaaattacctgccaataaaaacatgacgaatagagcagttatgagcatttgtgtgtagctttttgtgcaaacttaaattataatttctctgataaaagcccaggaatgtgattgttgagtaatatggtaagtgcatgttttttgagaaactgtcaatctatttttgggagtggctgtgtgtatcatgttatattcccacaagcaagggatgagaaatttggtttctctgcatccttgctagcatttggttttatcattatatttttatttcaactgctcaaataagtgtgcagtgatttctcatgatctcaatttgcatttccccaaaggctaatgatgttaartatatttccacatgctgatttgactcggccatgaaatgtctcttcatgtctattgcccaatttcttattagattt

SEQ ID NO: 837127 - DNA, 436 bp, Homo sapiens
ttgatagcagatttactttgtttttctctggcaagaatgaggattccaaacaatttgtttccttgggttctagatggaagtgcctggagcctgcagacagggtctctccaccccagctgctggtccaacctgcctcgcagggcgtgacatggctgttgtcctcactgccttgtactctgcctcaccagtcccagtgagtacagtgaaccagtgcctcctccattcctgtcttcccccttcccacgtgcccactcagttgaggtcattttctgcacaaacgttgtgctgtgtgtattttcttatgacatgcatgggaggtaacctacgggctacctggactagcctgcyggaccaggctgtgaaggctgaattaagcttcatagagccgattgtgtggagtcaaggatttgggttgtcattaccccatgaagccagg

SEQ ID NO: 837128 - DNA, 602 bp, Homo sapiens
ttcactttccccctccatcaaagaatatccctttttttgagacagggtgtcactctgtcgcccaggcaggaatgcagtggtgcaatctcagctcactgtagcctccacctcctggactcaagcaatcctcccaccttagcctcccaaatagttggggctataggcatgagccactgcacctggcctaagagtattcctcctcccaatacctactgacttgttgaaatttcactcatgctctaagctaaccagaggcatgccactggttttacagagccttcctctgagttgcaatgatttccttcctttagtaatttgttagctccagaccctgtcactccttgcctcctgctggtatcgtagttacacatgttcccgtggccttctgtaggcactgactgcatactcatgcagggcatggttaagttatagttatcttgctcactctataattatgctaactatagggcctaccrtcccaaatcagagcgtgtggtctgagatgtcttcctgtacatgcaccaggatcaagtgggtaaaatactggatactggcagtcttcaggaatatcccggaacaggatcctgaagatgcaatagaaa

SEQ ID NO: 837129 - DNA, 602 bp, Homo sapiens
ttcactttccccctccatcaaagaatatccctttttttgagacagggtgtcactctgtcgcccaggcaggaatgcagtggtgcaatctcagctcactgtagcctccacctcctggactcaagcaatcctcccaccttagcctcccaaatagttggggctataggcatgagccactgcacctggcctaagagtattcctcctcccaatacctactgacttgttgaaatttcactcatgctctaagctaaccagaggcatgccactggttttacagagccttcctctgagttgcaatgatttccttcctttagtaatttgttagctccagaccctgtcactccttgcctcctgctggtatcgtagttacacatgttcccgtggccttctgtaggcactgactgcatactcatgcagggcatggttaagttatagttatcttgctcactctataattatgctaactatagggcctaccatcycaaatcagagcgtgtggtctgagatgtcttcctgtacatgcaccaggatcaagtgggtaaaatactggatactggcagtcttcaggaatatcccggaacaggatcctgaagatgcaatagaaa

SEQ ID NO: 837130 - DNA, 602 bp, Homo sapiens
ttcactttccccctccatcaaagaatatccctttttttgagacagggtgtcactctgtcgcccaggcaggaatgcagtggtgcaatctcagctcactgtagcctccacctcctggactcaagcaatcctcccaccttagcctcccaaatagttggggctataggcatgagccactgcacctggcctaagagtattcctcctcccaatacctactgacttgttgaaatttcactcatgctctaagctaaccagaggcatgccactggttttacagagccttcctctgagttgcaatgatttccttcctttagtaatttgttagctccagaccctgtcactccttgcctcctgctggtatcgtagttacacatgttcccgtggccttctgtaggcactgactgcatactcatgcagggcatggttaagttatagttatcttgctcactctataattatgctaactatagggcctaccatcccaaatcagagcgtgtggtctgagatgtcttcctgtacatgcaccaggatcaagtgggtaaaatactggatacyggcagtcttcaggaatatcccggaacaggatcctgaagatgcaatagaaa

SEQ ID NO: 837131 - DNA, 415 bp, Homo sapiens
aaaaaaggaggggtgggctttaaaatatctttgagggctaatattccatgattttcactaggaacyactttgccaatttggcctttcaggataacagatttgattgttttagtgctcacctattctatttgaactataaaatcctaggaggcagggtaatcgtttgtgttaggagagccccaggagggtgcttagtcaatattatcctgatttcgaccccatctgtgcacctaaatcttccccattctaattcttctttcccgaagttatgatgaaagcctgttaaagtacaagttcagaaatgtaaatttttaaagttgtcaagccagcaggtgaaagaaactatgactgaatgacttacagctttaaagagctataaaagacctttatttggaggcactcacaaccccctcat

SEQ ID NO: 837132 - DNA, 610 bp, Homo sapiens
tcctgcagagcttttcccaaatcatagcaactcttgatccaatgcactccaccttgacccagatttctgctctatggaaaccagggagaaaggtagaggggaggagagaggcgatgatgaacctggtcatggcatttgacagcccctcccctcccccacagcatctatttccactctgcccctccaggacagtcttattcacagcattctgtttcaggggaagaaccattttcttcaaaatcctgatttaagagccttcagagtcagggacacagggctcagtggaaggcaaggatgatatttgggctcaaaatgggagttacaagggaacgttgggaagaatgatgcttccttgcatcagcctgcttcccttgctctctgcctggaacaccagaaatcgggatgttcttcctacgcagggggatggaaaattcacccttggagggactgtaaattctcaagagaaaacaccttcagacattgacattttcccaaargaaaaatcatctttctgctgctttatcattttccgaaggcaaccactcaacacgttctacccatgcttacaggacagccaattttaaggcccctatcttagttaaatatgaac

SEQ ID NO: 837133 - DNA, 613 bp, Homo sapiens
ccatcagcatattgtttttagcacatactagaatctggattccatttttatccattggcctgttggcctctcccatctaaatagataaccatatgttgttgttgttgtcgtttttcatggcctgaggaactttctacaatgtctccaaaatggtagatgttccaaatatattcatgcaattaaactacatttgttgattagttcatttaataaatatttattaagctcttactatgtctaggtgccaagaactgttctacagagttgaaatagagcagtgaacaaattagacaaatttactggcttcatggatttaacattctagtggtgagcagaataaaaataaataaataaataattgtgatataatattaagactgcccttaagaaatctgaaatagaacaaggagagcaagacaagggctgctcacctattttaggtgagattgtcaggaaaggcctctttgaggaggtgacatttgagcagagatctgaatatagtgagggacccagccatgtagccagctgtagtgatagaatactaagtgcaaaggtcctgagccaygggcatctttggcaagctttaggaacaaggaagtcaatatggcagatc

SEQ ID NO: 837134 - DNA, 600 bp, Homo sapiens
aaggagctgggctgactgggagatccaacatgcaaatccagtgtacggatccaacaacgtgcatgaactggaacggcttgccctcaccmgctaaatgcaacactttcctctctgtgtcggctggggcttctgttctgattagtctgatccatcttttgggggatgtcacttacccttcaagtcctcagaaacttgaaaggctgggctactctgagtaagagagtccctaagtctgaattttcaggaagcttcaatactctggcagtggacaccacactagatgctccaggcagcagcaaggccctcctaggcctcccagtcagccagggtaggagcataagacatagtcaccagctccattcatttcctattccaacccacaaattctcctgctattgccaggtcagagaggtaattatctcaacattaatgactacagtcagaacattagactgagtctcaaatcaccagaccctcctgactccaaccagcccctggctattggttaacttttgaggtagaaggatgctttcactctactactctatttattcattcaacaaaaatgtatcaagcatctaccaagctgctccaggtact

SEQ ID NO: 837135 - DNA, 600 bp, Homo sapiens
aaggagctgggctgactgggagatccaacatgcaaatccagtgtacggatccaacaacgtgcatgaactggaacggcttgccctcacccgctaaatgcaacacttycctctctgtgtcggctggggcttctgttctgattagtctgatccatcttttgggggatgtcacttacccttcaagtcctcagaaacttgaaaggctgggctactctgagtaagagagtccctaagtctgaattttcaggaagcttcaatactctggcagtggacaccacactagatgctccaggcagcagcaaggccctcctaggcctcccagtcagccagggtaggagcataagacatagtcaccagctccattcatttcctattccaacccacaaattctcctgctattgccaggtcagagaggtaattatctcaacattaatgactacagtcagaacattagactgagtctcaaatcaccagaccctcctgactccaaccagcccctggctattggttaacttttgaggtagaaggatgctttcactctactactctatttattcattcaacaaaaatgtatcaagcatctaccaagctgctccaggtact

SEQ ID NO: 837136 - DNA, 663 bp, Homo sapiens
aaagaagaactaatatccataatctacaaagaactcaaatagatcagcaagaaaaaaggaaataatccccatcaaaaagtgggcaaaagatatgaatagacaattctcagaagaagatatasaaatggccaacaaacatgaaaaaatgctcaatatcactaattaacaggggaaatgcaaataaaaaacacaatgagatagcaccttactcctgcaaggatggccaaaatttaaaaataaaaaaaattgatgttgacatgaatgtggtgaaagggaacacttttacactactggtgggaatgtaaactcgtacaaccactatggaaaacagcatggagattccttaaagaattaaaagtagatctaccatttgatccagtaatcccactactgggtatttacccagaggaaaagacatcattacaagaaaaagacacttgcacacacatgtttatagagcacaattcacaattgcaaaaatatagaaacagcctaaatgcccatcaaccaatgagtggataaagaaaatgtgatacacacacacacacacacacacacacacacacacacacacacatatatatatatatatatatatatatatatatatatatatatatatatatatattatggaatactactcacccataaaaaagaacaa

SEQ ID NO: 837137 - DNA, 663 bp, Homo sapiens
aaagaagaactaatatccataatctacaaagaactcaaatagatcagcaagaaaaaaggaaataatccccatcaaaaagtgggcaaaagatatgaatagacaattctcagaagaagatatagaaatggccaacaaacatgaaaaaatgctcaatatcactaattaacaggggaaatgcaaataaaaaacacaatgagatagcaccttactcctgcaaggatggccaaaatttaaaaataaaaaaaattgatgttgacatgaatgtggtgaaagggaacacttttacactactggtgggaatgtaaactcgtacaaccactatggaaaacagcatggagattccttaaagaattaaaagtagatctaccatttgatccagtaatcccactactgggtatttacccagaggaaaagacatcattacaagaaaaagacacttgcacacacatgtttatagagcacaattcacaattgcaaaaatatagaaacagcctaaatgcccatcaaccaatgagtggataaagaaaatgtgatacacacacacacacacacacacacacacacacacacacacayatatatatatatatatatatatatatatatatatatatatatatatatatatattatggaatactactcacccataaaaaagaacaa

SEQ ID NO: 837138 - DNA, 330 bp, Homo sapiens
taggtgattctaatgtgcagccttgagccatattctttgagaaacattgcggtaaacarttgctttttttttaatcataaaaatgtgttttctttaagaaatgtgaaaaacatagagaggtagatttaaaaacatttgacgtgtgcagcagccttgagctaagtgccatacactactgcagtttgctgttttttgttttttttgttttgttttgttttgttttttaagatggagtctcactctgtcgcccaggttggagtgcagtggtgcgatctcggctcactgcaacctctgccgtcccagttcaagtgattctcttgcctcagcctc

SEQ ID NO: 837139 - DNA, 330 bp, Homo sapiens
taggtgattctaatgtgcagccttgagccatattctttgagaaacattgcggtaaacaattgctttttttttaatcataaaaatgtgttttctttaagaaatgtgaaaaacataragaggtagatttaaaaacatttgacgtgtgcagcagccttgagctaagtgccatacactactgcagtttgctgttttttgttttttttgttttgttttgttttgttttttaagatggagtctcactctgtcgcccaggttggagtgcagtggtgcgatctcggctcactgcaacctctgccgtcccagttcaagtgattctcttgcctcagcctc

SEQ ID NO: 837140 - DNA, 643 bp, Homo sapiens
cttttgctatttgagccgagcatctcccagtctaccttatttagtcacgattttggatatagatatgytgttggttctcttcttcactcaaggtcctaacattttgctgggtgacttcagtacctacttgtctattttataacctggcatattggttcatatttgttattccacctgcttatgtctattattcttcatttctattcatcttcagcctcttgttcccaaaattacacttcggtatgcttcacttccagaagcagttctgaaggccagaagtccaaatccagtttctctaagctgatagtcaaggtgttaacagggctagtttccttctaaaagctttagaagagaatcctttttcttgcatttgccagcttctagatgccacctaaatccttggcttgtgatcccttctccatcttcaaagtcagcagtgtagcaggaatttgactataaataataaatttcaggctttgagaactgaggtgcagagtagatctccatccaggtctcaggctggccactggtttgtgcacacgtgggactaatcagaataacaatgaaaatgctcaacaatcttgaacagacaatggaaccaaggtcacaaaaggcagattagaacttgcatcccaagtgtaac

SEQ ID NO: 837141 - DNA, 597 bp, Homo sapiens
tgttcctttttatggctgagtagtattccctggtgtgtgtgtgtgtttgtgtgtgtgtatgtatataaaccacgttttcttcatccactctatctgactgatgggyatttaggctggttctatatttttgcaattgcaagttgtgctgctataaacatgtgtgtgcaggtatctttttcatataatcacttattttcctctaggtagatattcccctatttctatgcacagtctgtgtccctgtcttggacctccagctctcattgagggcttcagctgctgagaacattttccatgtgtatgtggatatgtatctgtgtatgtctctgcacgcgcatgtgttgttgtgtctttatgtctatgtgagtgtgtatgtgcatacgtatgtgtataggcatgtcctacagcactttgttcatgaccaattggttccagcatgtgccttgaatgactgagcaatgactggatttctctggttcggacattggcacttccaaaagttagataaagtagtttgtgccaagccatctctgtggaaaggatgatctctagaaacagcggaaggagaaaatgtctctatgagattgagtacaacag

SEQ ID NO: 837142 - DNA, 529 bp, Homo sapiens
aaaattcaacccaagatgaattaaatacctcaaggtaagacctgaaactgtaaaactagtagaagaaaaaataggtgaaacacttcaagacrtcgtcctagacaaagattttatggttaaaatcttaaaagcataggaaataaaaacaaaaatagacaaaagggactgtactaaactaactaaactaaaaagcttctgtacagcaaagtaaacaactgacagagtgaaaagatagcctgttgaataggagaaaaattttgcaaactattcacctgacaaatgactaatatgcagaatatataagcaactcaaacaacagttaaaaaaaacaataaaagggggacataggacataatagacatttctcaaaagaagtcctacaaatggccaacagtatatgaaaaaatattcaaccccagaatcaccagggaaatacaaagcaaaacaacaatgagatatcaccttaccctagttaaaatggctattgttaaatagatgggtaaaaaacagatgctgatgaggatgcaga

SEQ ID NO: 837143 - DNA, 589 bp, Homo sapiens
aggaaagaatcttcagagatgtgaggcaaaagcaccaggtaacctgtaatggaaaacctatcagattaccagcagatttcttagcagaaaccttacaagctagaagggattggggcactatcctccgcctcttcaaacacaacaattatcaagccaagaattttgtattcagcaaaactaagcatcatatatgaaggcaagatagtcttttttagaaaaacaaatgctgagagaatttgccactaccaagccaccactacaagaactgctaaaaggacctctaaatcttgaaaagaatcccagaaacacatcaaaatggcctcttcaaattatcaatcaaacaggacctataaaacaaaaatacaacttaaaaagcaaaaacaaaaaacaaaaatccaaggtacacaggcaacaaatagcatgatcaatgcaatggtaccacatatctcaatacgaactstgaatgtaaatggcctagaggctccacttaaaagatacagaattgcagaatggataagaatttaccaaccaactatcttttgccttcaagagactcacttaacacataagagctacataaacttaaagg

SEQ ID NO: 837144 - DNA, 493 bp, Homo sapiens
tttgtaacctactccctgttcatacactccctccccttttaaagtccttaataaaaacctgctggttttgyggctcaggggacatcacggacctactgatatgtgatgtcacccccggagacccagctgtaaaattcctctctttgtactcattctctttatttctcagaccggctgacaattagggaaaatagaaaggacctacactgaaatactgggggctggttccccctgatagaaaagtagctccctacttttcattttttctgtctctggggttttcattcaacttaaaatttttataccaaaaattctttaaaaaatatatctaaggataatgacttccagctccatttatgtccctgcaaaggacatgatctcattctatcctcagcaaactaacgtaggaacagaaaatcaaacactgcatcttctcacttataagtgggaactgaatgaacacacgaacacagggaggggaacaacacacact

SEQ ID NO: 837145 - DNA, 437 bp, Homo sapiens
tataaatataacaccttaatgctcctgcctttcttgcatatcttacctgttctggttggctggtrgattctgttggtatacactttgtattcagaggaagacaagacaacttgcaagggtaggaggaatttctttttctgtcgtggataattaattaggctataggtttgcatcaatagccctctgttgcttccctcctctctctctcatgcatgtgtacacacacaccaacacacatacatttacaccaacccttctccacatacacactctgcctgtcatttaattctacaacccatcttgccaatcctctttgaaactcagtgcaagccctataatttgatctttctcttttcttttaggaactccaatgtcatttcatttctagaactttccttctaatctgctccactgacttttggaatttcctgagctca

SEQ ID NO: 837146 - DNA, 622 bp, Homo sapiens
tcctgcctgtgtggctgtctaggactttgcaaaatacctttgggtgtgttttctcatgttattctgggagcacagtgaaaggagaagggcagagctttcagtcctcattttaaacataagaaaacctcagttttgaagacatgaatgacctctgcagtgggtcacatagctaggtaagtccttaaagttggacgaaatcctgctgttttctgattcctggcctggccctctttcttcttcaccagtgtttcccaaacttcagtcatcctaggcaaccatcttattttaccatgcctggctaccacttgttaatatttttaggtatttttaatatattcactttcttacccaaattaaaaatatctaagaactttctatcattatcataagtagaaaattagcacttctttcccagtggaagataactgactataagtacattaaaacaaagcaatattatgaaattctagctaaataagttgctttcatgttgccaagtcaaagactctgaagcctaggcctackttattattattattatgaaaaaaagttggcaaatgatagagatatgttaagtatatgctagcatgaactggagactctccatgagaatgttaaatgc

SEQ ID NO: 837147 - DNA, 580 bp, Homo sapiens
atttttgaaagtgtagcattttctttataaattaatacaatttggggtcaccattacagtttacttttgggagctgtgaagtagctatgacggaattttttttcaatatcgaactatgaactttattttaaattttctgaagattaaatggagtggttttgaaagtagaattgtactgattttttccttgtatctatttcttccattgcactggagttgaattagtttataagcaataacataatgtaaaattcatccagtgtttcagaatcctatttttacagagtctaaagccatagttgtttgattggggaagggaagtagcactatttgattctgccaagccgtaattacaccagtattccaagttcttgacatccatatttttaaaaacaatagctttattgagatgtaattcacataccatacaatttacccatttaaattaaataattttgtgacttttagtatacccacagttgtgcaaccatcatcactatttaattttggagcaatttcattatcctaaaagcaaacyccatacccattaacagtcacttccactatctttctccccaac

SEQ ID NO: 837148 - DNA, 631 bp, Homo sapiens
tattatggtgatcatgatcagtggtgatctttgacgttatttgttactactttaattgttttggggtgccatgaaccragcacatgtaagatggcaaacttaatcgataaatgttatgtgttttttgactgttccacccaccagctattccgcaatctcagacctccctattctgagtcaaaacaacactggaattaggccagtttaacgctacaatgatctccaagtgttcaagtgaaaagaagcactgcatgtctctcactttaaatcaaaagttagaaagtattaagcttagtgaagaaggcatgttcaaagtccagacaggctgaaaactaggtctctggcccaaatagttagccaagttgtgaatgcaaaggaaaagttcttgaaggaaatttaaagtgctactacagtgaacacatgaatgataagaaagcaagaaggccttatttctgacatagagaaaataaatatcaaaccagccacaacattcccttaagccaaagcctaatccagagcaaggttctaattctcttcaattctgtgaaggctgagagaagcaaggaagctacaaaagaaaagttgaagctagcagaagttggttaatgaggcataaggaaaaaagccatct

SEQ ID NO: 837149 - DNA, 529 bp, Homo sapiens
cttagcagtaaataccctccggaaagatctcagaggaagaaattagtgccctttgacagaatcgccaccktccattgctcccaccctttcggctccaaagctcctgctctttcattcagcctcagacaagcactcacttctcaggaagtattccctgagacattatggaggcgcccaggctcccacctcgattccattataatatttgattaagtttgtgtttttgtttagtttgtgttatctcctcgttatcttgtaggctcacttagggcgtggctcaaggcttttaacaacctttctgctgtcatagttgtcccccaacaagccgttgttgagtaaatgagttaatgctctgggtgaaggaggaaagccctcactaggaagagacttgtgccacccggggcaagaacatcagagatccagtgacagcccagcgacctccgggatcaattgcaatgggagggtaagagagacagccaatcagcaacagcctcttcaaaagccatacaaaaatacggacaggtttcct

SEQ ID NO: 837150 - DNA, 588 bp, Homo sapiens
aaccttaatgataattgacttttctctcaagtgtacacacacasaaagaattatgcttctgtgttaaacttatccaaagaatcaactgttacattttgtctgattgttcacaacttaatataaaacacatctactttattatgtgtctttttctcaaattttgactagcctaattattactgtttgttcttgagcacactaatacaattttgtcacttttccaccttataatttactctcaatagtataattagaagtgcatcttgaagaatgagtaagttttttttttaacgttaaatctttggaaaggacaacccagaccatggagaaggcatattcaaaagcaaagaggcttgaggaaaattcaaataattagaagaatcatgtctgatatgctcacccacaacaaatggctgatagtacttaaaatatgacccaaaatagaaaatgttaatcaaatagctataatggtatgctgttaacaagtatctcatttaataaaggattgaaatcatgttacccacatcaatcctaacttgcactaaattctttcttcttgcctcagatattaaaaccacaaccccgtca

SEQ ID NO: 837151 - DNA, 647 bp, Homo sapiens
cataactacttgctccaggaagttyttgcacaagaggcaaggttgcacatcatcaataactttactgtttcttttagaaaattattggaaaccattttttgggcagttttctcatctaggcaatcaagtgtctaattaaaatgatagtttgcacttcagtataaacagtttacttaaaatcacaaaatcggctttttaaaacttgtcacagaacacttttctcacaatcctaaaatattgtcttacaccttgtcaaaaacaaacccgtttctttcctttaaaccacttgatctcagaccccaaatccctataagtaaccttaactattttctctcttttaacatagtactaaaatatctcaagatggtgttctcacttgcttcagcaagttaaataaacagcttttctgattgatggggttctccagtagtttacacgaggaagtcagtatcaacaataaagacagagaaatatgctgagaagacatagcatactttggtcatgtgtctgagcctttccaatagactggatgggagatagaaagatagagttatcagtaaaaagatgatcatagatgaagaagatgaagaagaaaatagacaaaacaatgaaacaatgtaaccttctggtgaaaacatgttgctgaa

SEQ ID NO: 837152 - DNA, 608 bp, Homo sapiens
tgacacaaccaagacccctaaacattcctttcaaatcttgacwcttaaatggtgacctgatgaaatgcttgcaactgcaacatagaaacaccagccaccccatgctgcctcacatacacttcttacttggggagtgagagaagattggcctccagatctggaatccagaatgtacagctggggtctgggccaaatatcctcaaaaatggaacaagatctgaaaataccatcccattctctgaacaggcagacacaatataagaaagaaatgaatcaagccatctgtgctttgttattttttttccaaattttccaaataggtaagtcagtcctcaatctctgttgatgagaatttggataatttggaattctatttgaagaattttgaaaaaaaatacagcacagatggttctacaaaagaagtcctagttaaacaagattgagaaggaagaaagggagagataagaggtggctcatttcactaaatactttgtatttgcagcaagatgtcgatctggaggtttctattgaaatgtaaaattactaaatattggatgtcaaaacagggtctaatacagacaacagtctagataaatcaaagtaaatac

SEQ ID NO: 837153 - DNA, 608 bp, Homo sapiens
tgacacaaccaagacccctaaacattcctttcaaatcttgactyttaaatggtgacctgatgaaatgcttgcaactgcaacatagaaacaccagccaccccatgctgcctcacatacacttcttacttggggagtgagagaagattggcctccagatctggaatccagaatgtacagctggggtctgggccaaatatcctcaaaaatggaacaagatctgaaaataccatcccattctctgaacaggcagacacaatataagaaagaaatgaatcaagccatctgtgctttgttattttttttccaaattttccaaataggtaagtcagtcctcaatctctgttgatgagaatttggataatttggaattctatttgaagaattttgaaaaaaaatacagcacagatggttctacaaaagaagtcctagttaaacaagattgagaaggaagaaagggagagataagaggtggctcatttcactaaatactttgtatttgcagcaagatgtcgatctggaggtttctattgaaatgtaaaattactaaatattggatgtcaaaacagggtctaatacagacaacagtctagataaatcaaagtaaatac

SEQ ID NO: 837154 - DNA, 608 bp, Homo sapiens
tgacacaaccaagacccctaaacattcctttcaaatcttgactcttaaatggtgacctgatgaaatgcttgcaactgcaacatagaaacaccagccaccccatgctgcctcacatacacttcttacttggggagygagagaagattggcctccagatctggaatccagaatgtacagctggggtctgggccaaatatcctcaaaaatggaacaagatctgaaaataccatcccattctctgaacaggcagacacaatataagaaagaaatgaatcaagccatctgtgctttgttattttttttccaaattttccaaataggtaagtcagtcctcaatctctgttgatgagaatttggataatttggaattctatttgaagaattttgaaaaaaaatacagcacagatggttctacaaaagaagtcctagttaaacaagattgagaaggaagaaagggagagataagaggtggctcatttcactaaatactttgtatttgcagcaagatgtcgatctggaggtttctattgaaatgtaaaattactaaatattggatgtcaaaacagggtctaatacagacaacagtctagataaatcaaagtaaatac

SEQ ID NO: 837155 - DNA, 585 bp, Homo sapiens
atataatccaacaataatactactgggtatatatcccccaaattgaaatgtttcccaaaaaatatatttgcactcccatgtttatttaagcattattcacaataaccaagatatagaaacaacctaagggtgaatgaatgaatgaaaaaaatttttaagtgtgatgtgcgtgtgtatgtatatgtattcgactatttttaaaagaacaggaaattcagtcatttgcagcaacacagacaaatctagaaaacatgttaagtgaaataagccagacatagaaagacgaatactgtatgatctcactcatacgtgaaatcttaaaaagttgaacttatagaagcaaggaatagaatggtggttatcactggctgttggggaagggtgagaggagaaagaggagaagttgatcaatttgttcaaccttacagttagatagaaataaggtctgagattctattgcacagtagagtggctatagttaatrttctattatgtctttcaagatgcctggcagagaagatttttaatgtttttaccacaaaggaataataaatgtttgaggtgatgaagaatacgctaattacc

SEQ ID NO: 837156 - DNA, 551 bp, Homo sapiens
ctatggtgtccaggtaggtctggaacccttggcctcaagtgatccttctaccttggccacccaaagtgctgggattataggcatgaaccatggtgcccaatcaggtcatttctttttagtgctaaataatattccattgtctggatgtaccacagtttatttatccattcacctactgaaggacatcttagtttcttctaagttttggtaactaagaataaggctgctgtaaacatcatgtgcagggtttctttgtgtggaaataagttttcaactcctttgaataaataacaaggagtgcaatttttggatcatatggtaagactatgtttagttctgtagaaaaccaccaaactctctcccaaagtggtcataccattttgcattcccaccagcaatgaatgagagcttctgtgctccacatcttcaccagcatttggtgctgtcactgttccagatttcagccaattttacattatcwttgtcttgatttgcattttcttgatgacatatgatctagaccatctttttatgtggttatttgccagcta

SEQ ID NO: 837157 - DNA, 567 bp, Homo sapiens
ggcccctggagcgtaagggaaggaaaggggtcattggcgtgctgcaacctggactgggagagcaaagcctacaggttgaagtcccagctcgaccacaaagtatcatgtattattattattattattattttatttatttatttttgagacacagtctcactctgttgcccaggatggagtgcaatggcgcgatctcggctcactgcaacctctgcctcccgggttcaagagattctcctgcctcagcctcctgagtagctgggattacaggcatgcgccaccacgtccggttaattttgtatttttagtagagacggggtttctccatgttggtcaggctgggctcgaactcccgacctcaggtgatccacccgcctcggcctcccaaagtactgggattacaggtgtgagccaccgtgcccggctcatgtgttattattatatgtatttgattgttatgaggacaatgaccttgaaaaatcctttctctctgtctcaggttccttatttgtatcataraggaagttggatgagatgagagccagctttctattattctttggtttg

SEQ ID NO: 837158 - DNA, 561 bp, Homo sapiens
gtttgcttgatctttgaggttgctaatctgttcattattgtgttcatgcaaaaaaaaaaacaaacagatttttcttaaaaactgaaaatcagcaawatttacaagagcgttctcttgagtatatattgggtcacagattcctaagtgttgctgtgaacatatttttaccttcatttttttttcctgtgatttggaagggacagtactggttaaatgttttaaccaaccatcttgaatctggaatctgctgattgctatctagtatgtgtcaggttccatgttaatcactggataaacaatgcaggcgtagagacctcaatcaaatagaacatcatgaacattgcaaacactaaagcattttcttctgaggcacacagaaaaaggtgagagaaagtggagagagaggtgatctgaacagcaaattggggtctctcattctgtatactttcttaaggtgtttggattttattatgtacacagtaggtagctgaaaaggggttaaattttgtgtttatctgttttagatagagatggcatcttgctatgttaaccgggctggtc

SEQ ID NO: 837159 - DNA, 557 bp, Homo sapiens
tctactggaactatttagaacaatatgcataggagggarctacaacaaattataaagaggattatctctgtgtgctgggattagagggatttttattattttgtattattctcttccttgtaaatttaccatttcaagtattttagggtgataaaatttattagttttataattagaaaaatttatactttttttgtcttcataccaagatattatattgtgggtcgttggttttatctgcactaggtcagacgtttgctgaattcagttctgagcttttgaaccaaaagcagatcttcagaacaagaaacaagataataaaagagaaacatgaagaaactgaagatgattggagaaatatgaatcaagatgattagacctagcagagggctggctggatggcatttatgttgacaatggactcctacacagaggatgatcatggtctaggacataatagtcattcaatcatcatttcttaaatgattttttaaaacaagtgaatgaatgaccaattatataccttccctgagccaataaaatatattaaaagtata

SEQ ID NO: 837160 - DNA, 633 bp, Homo sapiens
gaaaatttgttcagcttggtgtttaaaaaaagcaaatggccagtccttagtttctgcttcctcaacagtttatgactttgcaggagttatttcaatgacttctcttggtaactgccaagccatctcctgcatttgatttagtttctaggagacattttctagaaaaagaagagaatgcttgcaacaaagatggcaaatagaattactgaatgtaaccctttccctgtaggaatcttgatgggagtaagcaaatgtttgattggtttcaccaacctgggtcaagttgctatgtgggtgactctcacctggagatctggtgtgagagactgaatactgaagtcttgagagcatggtgggaatgaagggctgagacaagggcaccaaactcagaagaacttaaagcaatgtcaggagctgagatgtggaacctggaagctaaggagagcatgacagtttgggctgaagtccaggtggtcagacagaaattcagtgtgcatgtagttatgggcattctaaggttaggttggattcatttataggacttttgggtgagcytaagacacaagattcacattggctaaacccacttactatatcttaggataacaaattttatcctttacataaagatag

SEQ ID NO: 837161 - DNA, 266 bp, Homo sapiens; identical to SEQ ID NO: 820273

SEQ ID NO: 837162 - DNA, 601 bp, Homo sapiens
gatgatcacaaatttctgtgagtgatctctttcaaaaatgaagctgatcaaaattttacaactgacaaatatgatcaatagccaacacaaactttagagtaataaaatctgaaacagttgcacttcagcctcttaaaaacaaagacatgactgaaatatttgcaagccaacaggcaccaatggcatggcttcaaacacggttcagtaatagtgccattttcctcactcccacagcaatgagtgggtggcttaagaccagagcagagtaaatctctgggctattacgctgggagtaaattaaaaagtatttataatgtcactcatttgctacctccacacttgtgtaacattttcatcatattgcagtatgctgctttgaaatgctttgtatatttccaggagctatgcttagtgccatcagccaaagctgtttgaggacagggactgtgtcaaatccaatggaaacctcttaatttcattaracctttctcctgtattgatattgcttccatttattcttcttagcgctctctttgcactttgctccttgactagaaacattcaataaataattattgaccacccactatgtgggatttaa

SEQ ID NO: 837163 - DNA, 527 bp, Homo sapiens
ttctaatgaaactgattgtgtgtttttccacaaggccagactctcctttcctatgatcaaataattaaaggcaatgaattaatggaagaagcttgccgaccccttccagtgaccattggaatcccaagacttcattccagtcctttttcttcctcaatcatcaagcccatcacttttttcttcttacgtcttgtggatttgtctctgctctcaatctctgtttctagatataaatttaaacattcatcatctttgctgtagtatattcgtttattttataaacgctgataacactatgttccagacattcttttaagtgctttacagctttacaaatattagtttatttaaaacctcttaacagctacatgaggcagatactatattatcattcccatttataattgagaaactgagacagaggcttaaagtaactttcctaaattcatacayctggtaagtgatagagaaaggatttgaaaccaggcagtctaactgcagaatccatgctttaggcactgttttag

SEQ ID NO: 837164 - DNA, 556 bp, Homo sapiens
acaaagcataactaattgcccatttttccttttccagaacctgaaatcatttgaaagagttgtatcaaacttcctttgcctttctgctcaaaatcattacctctttttagaatcayacattccctaccaagacctggactcttgccattcacagaagaccaacatagctttctatttagtaatttagtcttgttattggaccactttttaatttaaaacatttaaagttcaactatgtccctttatctcagaattactaggaaatgcagaactaaaattattcatatggccaaccccttctatgcagagaaaaaaatttaaaagtaaaaataatgttgcatgaaggaaaaatgctttcccagataaacaaaagttgagagatttcatcaacaccagacctgtcctacaaacaatgctaaaggaaatatttcaatctgaaagaaaacaatgttaatgagcaataaaaacatcatctgagggtacaaaactccctggtatagtaagtacacaacaaaacccagaatactatagtactgtaattgtggtatataaattt

SEQ ID NO: 837165 - DNA, 640 bp, Homo sapiens
tgtgtaagtataaatagatagatttattataaggaatttggctcatgtgattatggaggtgggccaatggttttgtttcagtctgagtccaatggcctgagaaccaggagcactgatgttgtcattcctgtctgagctggcgggctcaagacctaggaatggctgatgtttcactttaagtccaaatacatggaaaacctgatatctcagctgaaaggcagccaggcaggaaagaattctctctgactgggggagaatcagcctttgtgtttgaggcccacccacattagggaagacagtctgctttactcagtctactgatttgaatgctaatctcatccagaaacacccttatagaaatactcaaaataatatttgaccaaatatctgggctccccatggcccagtcaggagaatacataacattaaacatcacaatggcatatttatccattctcctgttgatgggcatttgcttatttccagggttttgctgctataacattccagtacytgaatcctagaaaatatctaggatcacaattgctttagcagaaggtatgtgaacattaaacttaataagctaatggcagtatttcagcattttctactttgattacttttatattggccatcattt

SEQ ID NO: 837166 - DNA, 630 bp, Homo sapiens
tttgattttatgtgttaattttttatatggtataaaatgagttaaccttcattcttttttatacggatatctagttttcctwgctctatctcttagaatgactatcctttcttcattcaatagtcttcgaaccattgttcaaaatcttttgaccatttacacaaacgtttattttgtggttttcttttctatttaattggccaaaatgtctactgttatgacagtaccatattgttttgattgctatagcttttaaataggttttaaagttgagaagcatgggtcctccatcttgatccttccttttgaaaattgttttttctgtaagggtttgcttgagattccaaatacattctaggattctttttctatttctgctaaagcaccattgtggttttgatagagattgtattgaactgtagaaagctttggatgatattgttatattatcaatataaagtcttccaatccataaatatgaaatttgtctccatttatttatgtcttctgagaattctttcagtaaagttttatagttttcagtgtgcaattcttttgccacttttcttatgcttatcattctttttgattttattgtaagtacatttttttctttattttctttttgat

SEQ ID NO: 837167 - DNA, 573 bp, Homo sapiens
tttacacatatttgtcaattatttttgtctttyactgatttctatcttaattccattctagtcatcaaatatatcttggatgattttaatatttttaaattgattgagacatgttttgaatcttaatatatggtttatttaggagaataatcaatgtggacttctgaaagatatgttgtctgttgttgcatgaagtgcttttcttatgtctgctaggtctactttgtttttagtatttttcagtcctcattttaaaatttatattgtgtctagatgtctaaccattacttaaggtagtgtagtaacgtctccagttattacggcatcactgtctagtaataaccttaatcctgtcagtttacttcccagattatgcgctcattgtttataaacaatgtttataattgttatatcctctggatgaattgaactttatatcaatatataaggcctttctttgtctcctgcaacagtttcgacttaaagtccagtttattattagtttagccacctcaactttcttttgtttaatatttgtgtagcatatcattcttcatcttttcttttgtatct

SEQ ID NO: 837168 - DNA, 601 bp, Homo sapiens
tctatattctgtgtatctcacactgaagaaaatattgtcaattttgctttctgktgctttttaaaactgtgaaaacaatttgtaaacggaatatatatgttttttgaatgtatctctttcccatccatccctattcccatcctatagactctggcagacgggctggaggttctggttaagaatcagtgttcagcttttaaccatatagcatgattccagttgtttgctggatcttaaggtatttttaaaggtcttgttagttattttaaatgtatcttataatttcgaactatcaccatattactggaatgaactccacatgacatgatgtggtattcttttaatatttttttaatgtagcatgagatttaagggtttcattttaaagaaatttcctgtagatcctttcagtatgtaacaaatcaaaaacttcttaacaaaatggtttcaagaaaagtgatttaaatacttgattggctatttagagtcaatatttgatcaattagaagtaaaaggaaaggcagaaactgtaaaattgtaggtgaaaaaagaaatctaaattaccaaaagctgagctacatacatttctatgtattaaata

SEQ ID NO: 837169 - DNA, 229 bp, Homo sapiens
tttatctttttctcatgtaagagtctagttggtctgggattgcaaggcagctgtacttcataaggttgttcaaggatctagattccttccgtttaattactctgtcatcccctgggacattgtccttcttctcagtgattgaagctaggtttctagcccacctgcattkcagcttgtgataaaagggaaagagaagaaatgtgtagtaagggggttttctgttaagcat

SEQ ID NO: 837170 - DNA, 614 bp, Homo sapiens
ctctcctctccctgggacagagcacctgggggaaggrgcagctgtgggtgcagcttcagcagacttaaacgttcatgcctgccagctctaaagagagcagcagatctcccagcacagtgctcaagctctgctaagggacaggctgcctcctcaactgggtccctgacccccgtgcctcctgactgggagacacctcccagcaggagtcgacagacaccttatacagaggagctccggatggcatctggtgggtgcctgtctggaacaaagcttccagaggaaggagcaggcagcaatctttgctgttctgcagcctctgctggtgatacccaggcaaatagagtctggagtggacctccagcaaactccaccagacctgcagcagaggggtctgactgttagaaggaaaactaacaaatagaaaggaatagcatcaagatcagcaaaaaggatgtccacacagaaaccccattcgaaggggttcagagaagaacataaatgacctgacggagctgaaaaacacagcatgagaacttcgtgaagcattcacaagtatcaatagctgaattgatcaattggaagacaggatatcggagattgaagatcaacttaat

SEQ ID NO: 837171 - DNA, 614 bp, Homo sapiens
ctctcctctccctgggacagagcacctgggggaaggggcagctgtgggtgcagcttcagcagacttaaacgttcatgcctgccagctctaaagagagcagcagatctcccagcacagtgctcaagctctgctaagggacaggctgcctcctcaactgggtccctgacccccgtgcctcctgactgggagacacctcccagcaggagtcgacagacaccttatacagaggagctccggatggcatctggtgggtgcctgtctggaacaaagcttccagaggaaggagcaggcagcaatctttgctgttctgcagcctctgctggtgatacccaggcaaatagagtctggagtggacctccagcaaactccaccagacctgcagcagaggggtctgactgttagaaggaaaactaacaaatagaaaggaatagcatcaagatcagcaaaaaggatgtccacacagaaaccccattcgaaggggttcagagaagaacataaatgacctgacggagctgaaaaacacagcatgagaacttcgtgaagcattcacaagtatcaatagctgaattgatcaattggaagacaggatatcrgagattgaagatcaacttaat

SEQ ID NO: 837172 - DNA, 566 bp, Homo sapiens
gctttctaggaaaacaccgtgtgtggtttattcatattatccgttagccaacccttcattatcaagagaagcaaaggaactagagtgcataattcttttgtttgaaacgtaagcctaagaaaaatgtattcattgacaagctgtaaacagcagagaggaactacctggagtgaattcagcggttccggagtcttggttagcagccctgggtgtggggcacacacacacaagtaagcagctctgtcctgccatagtcccagttcactgtgacagatgatagtcacttaatagaaatgacaaaggtgacagccaatgttcctaaagcccataaccattgccaggttcttgctcgagagcttcctgcctgctctctcctggtttgagttccctctctggagaggaggttgagagcagaggtggttctctgaccaccaaagtccccagcttatgggactccatccctgaaaaacacccagcagaagggacccaaggtgatgttgctkcagagatggcaactcaggactcacaacttttcaagtctgggtaaatgagagacaaagcaagtc

SEQ ID NO: 837173 - DNA, 633 bp, Homo sapiens
ttatattttggcttgatttaagcttgattttataagtgctgtgttacactgtyaatgaaaattaaagtttctcttgatcttagttagacactctccaggtacctgtatcagagacgtagacaaatgtcacagtctagctcaaggaaagaaacaagaggtgatcaatagaaattcagtaattgataaaagaaagaaccccagagcccttaccatgtgccattcatgaatgccgcattgaacaggacagatcgacacttgccttcaccagctgtcagtctaattgcccccaaggaccttctaattttcttgacttgggcctccttgcaccctccatggtctctggcccacctcattgtccccattatagctctgcagcttctttcctttcctcctgcttctttcattcccggtctccctacatcacagtagggggttgacccatggaaaatctggtcataggaatctccaggaaggcagtgtcccaattaggggaaagagactgccttcactttaacacaagcccaggaaaaagttggcacattctgcgacaacgttctggttttctagtttgctcctagtttactgtccctgctacctcttctccaacttgtaaggaaatagcttcataaaatt

SEQ ID NO: 837174 - DNA, 615 bp, Homo sapiens
acgaacgcctaccttgtgctcacatgtaagccctggcaacttatctctgattaaagttgatatttctaaattacatgtttagcttttcaaaaaatacataaaattaactgtaatcttacaatayaaaatttctctgaaaatatccaactatgtactaactattacaaatatttattcctgattcactttttcctttcactgtattcaggaaagaaagttaataaaaatgtaatttaaaaagaatgattaagctggggacagtggtgtgtgcctgtagtcccagctggtcaggtgcctgaggtgggaggattgtttgagcccagttcaaggctgcagtgtgctataatcatgccattgcacaccagcacaggcaacatagcaagaccccatctctttaaaaaaaaaaaaaaaagattaaattattaacttctaaacttggcaatatggagaggtatagaatgcagcaatattttagcagcatgggctgcggattcaccactcaatgtgttaacagtactgtaaatttaatcagtcaaatcaggtggtgtgcattgtttttgaaagcttctacatcttatgtaagtgtgtacaataagaaatctgttagatttgact

SEQ ID NO: 837175 - DNA, 576 bp, Homo sapiens
ctggcctaaattaaattttgtcaagaaaagagagcctggagtaatggagtttaacgaccagttgacatcatggatttgtagttttctagggaggtttakcagggctgtcacaaggggcgtcattaattctccgcagtaagccccagacagttgcaaatttagcttattcttaaaggcttctggaagggaattccacgctaacctcccctatctcattcctacaacttagcatccctcactgggcagaagtcctaccccagggctaatcctagttcctcctgctgcacttaaagcccccttgctttgattgtcatccatggagctggatgttctcagcggccatcatctgacctctgtattttctagctcagaagcctccatagggaggggtaggcaacaatccacttgaggtacagatacgttctgagaggctcgggcttcccccatgtaatggccaaggcaagcgcggagcaagccgaaagcagcctcgggagtgagaggaggacaagcctattggagagggatctgctggctggtcactcggcgagcacacgactcagcatatcagtgccattg

SEQ ID NO: 837176 - DNA, 602 bp, Homo sapiens
gtggaaacccagctgacatgatttgtttcctcatttgaaaaatcaagatgattttagtacccactctgtagggctgttgtgaggatcaaagrctgtgatgtgtggaggtacttaacttagagcctggctcataataagtgcttgatacatgttagcttttatttgtgctgtataactcaagagagctaaagagctggggcttgaatctagggtttaaattctatcaaagtccttgttctatgcaatgttgctgtttctttctctcttagtttgagtctctgtatgtctgcttgtgtgtctttctttgtgtctatctctatgactcctgtactccatctctgcttatctgtctgtctctgttcttcactcctctctctctctctccctctctggctttcactctgtctgttcttcctttctctgttctctctctctgcttcctttcttcctaccagactgagagccccactgtcttctataggcccaagagcaggcaactctccacggtgctgacgaggtgtgtaggtcccagacttccatctctcattagggaacagaaatggatggcagtgattttcctccagcagccagtcagcagggac

SEQ ID NO: 837177 - DNA, 612 bp, Homo sapiens
aaacctacccatagttttcaatctgtaaccgttagaggcaagatttgaacctgtgtgtgtctggctccagggaatgtccttccccagcccatttctttatatatggaaaatggaaatagttgtccctgctctgccatttttgcagggtgttttttggaaggcccaaggaattaacagatatggagttgtttgggtttgagatagtgaaattttatgccaatgtaaaaagagtacattgaagattggtgtcttcctactggggtgtgaagtttgaggtagaaccaggattccttagtcctgctcaaaagcatttttactggactctggtggttctccttggataggtcttaggagtgggtagagcagcctcataaggatacagaaagtcacagcacgaggctgggcttgcctccttactctgcctgctcaacttctcccactgtaactcctttttaatgaacaatctcttgattgctttcctttcttacaatctcctttctttcaatctcttatcactttcttttcttcaayttccttggaatgtaggttagattccatgatccttcattggcagtatcctgaatttcttaccctctgaccttccatcacatt

SEQ ID NO: 837178 - DNA, 637 bp, Homo sapiens
ccctccaggatgccaaatctgataagtcctttagaggcctccaatcagattctgaccacacgccaccccttccagtaaccttgcagactccagggacaatcatctgctcctggggtcactctgttcattttccatagctgctgcaacaagttatcacagattaagtggcttaaaactacacaaacttattagcttatggttctgtaggtcagaaatttgacataagtctcactgggctaaaatcaaggacaggactatggacaggactatgttcctcctggaggctgcaggggagaatccatgtctttgcctcttctagcttctaaagggtacctgcattccctggctcacggccccttccactacctacaaagccagcagaggctggtagagtctttctcacaacccatcgctccaaccttctcttctacctcccctttctgtttttaagggcccttgggattgcattggtttcaccaagaacaatccagaataatttcttcttcttaagtcatctgattagcaaccttaattccacttgcaaccttaattcccctttgctgtrtaagctaacagattcagaggttctggggattaggttgtggacatcttgggagggacattattctccctgcca

SEQ ID NO: 837179 - DNA, 526 bp, Homo sapiens
gtttgtacataaaatgccacagcacagcartctgagctcttgctttctgtttaaataaaaaggcagatgcttcacacatgttttcatgaatttatataaaccatggaaggaaagaatgctgatattcaataggaaccctgtagcaacttgttacttgtaatttttaggtttactgtaagagcaaatgcagaaagcaaacctgcatctgtgctgacactgggttgggactaacccatgctcttttaagtgcctaagtagtgggtgaatggggcatctataaatagtgagttagtgtgtctgacagacctcagagactggagggattccttgggccagcattgtctcatgtggccacatgtggccagggaggaacacagctgaagggaaggaagtgcgctctcttttatccttctttccatatcaagaagagtagatccttgagtcagggagctagcctgctgaggagcgctagctctggagcatggtctactgggcagacctaaagtaggactgagaaaagctttgc

SEQ ID NO: 837180 - DNA, 444 bp, Homo sapiens
catactttgctgtaatcttaaatatataagttacttggcctacatgatttctattaagatrcagcttttataaactttcgagtatgaattagcatctggtggtgttttcgatgaatacttctgaaggctttgtgtgaggaagcctgttagggtaatggcaacctctctctcacaatagtcccttgtagaatactcctgtgtcatccctgttttatggatgagaaaaaaccaatttgtctaagatcaaatatttaacatgtgaaggagctagaatttttaaacagcttattgagatataatttacataccataaaattctcccttttaaagtgtgcaattcagtggtttttagtagattcaccaaattttgcagccattgccagtatctaattccagaacattttcatcaccccaaataaaaaccttatacccactagcagtcac

SEQ ID NO: 837181 - DNA, 630 bp, Homo sapiens
gatgaaggttgagactaaccaatagctaggcttcatgcaccagttagttatgaatacaaaggaaaaattcttgaagaaaattaaaagtgtcaccccagtaaatatacaaatgataagaaagtgaaacagccttattgctgatgtggagcaagttttatgggtattaatagaaaatcaaaccagccacaacattccataagccgaaacctaacccagagtgaggccctaactctctttaattctgcgaagactgagagagctgaagaagctgcaaaagaaaaggtggaagctagtagaggttggttaatgaagtttaaggaaagaaaccatctccataatatgaaaatgcaaggtgaagcagcaagtgctgatggagatgctgcagcaagttatccagaagatccagctaagatcatcgatgaaggtggctacactaaacagtagattttcaatatagacaaagcagccttctattggaagaaggtacaatctagaactttgctattgagagaggagaagtcgatgckgggcttcaaagcttcaaaggacaggctgactctcttgttagggaaagtcagtcactaatgcagctagtgactttaggttgaagccactgctcatttaccattc

SEQ ID NO: 837182 - DNA, 604 bp, Homo sapiens
tatggacatgagtacagaatgatgagtgagayaagtgataaataaagacaaagaaaataaaactcagttctctttctcgccttttcttattgttctgagcaaaatggggaaacacgttgatatccagagccttatggtgagataatcacatttttatgtgtgattctaataactttttaaaaattattttgaagagcaatgggaaaaacatttttattaacctttctttaagagcacatagaggaacagtatcaaccttgctgaatgtgatcacaataattaaaccttgatttcatgaaaaccatgaaatgcttaattcattagctaattaactgtattatttattcaacctaatttaatgggcatatactgggtgccaccttggtttccctaaagagactggaaactcattggcacaaaaagacataaagcaagcagaggtggatttactatggaaagaaagaaacagacttcagaatcattcatatacaaggctctcccaagcctccgaagagatcagcacagtgtcaatgtggccataattttcataatatttactaaagatactaaatcacttttcagtacacacattcttccctccatt

SEQ ID NO: 837183 - DNA, 587 bp, Homo sapiens
actgcaagctctgcctcccgggttcacgccattcttctgcctcagcctcccgagtagctgggactacaggcgcccrccaccacacccggctaattttttttatttttggtagagacagggttccaccatcttagccaggatggtctctatctccagacctcgtgatccgcccacctctgcctcccaaagtgctgggattacaggcatgagccactgcaccccgcctagctcaaaataattcttatttcaaagaggtgtattttggggtgacatattttggttttcttcactgcaatatgacaacctggaggacattatcttaaatgaaataagccaatcacagtgcttactggaataattccatttatgtgaggtatctaaaatagtcaaactcatagaagcaagaagtagagagtggttgtcaaaggctaaggggctggggaaataggaagttgccattcaactggtgtaaagtttcatttatacaaggtgaataacttctagagatctgtacgtcgtgcctattgtacacttaaaaatctgttaagaggccaggcgtggtggtttatcttataatcacagcactt

SEQ ID NO: 837184 - DNA, 691 bp, Homo sapiens
atgatgctatgtggaaaaaagatattaaaatcttacaaatgtttaacatttagcttaatttttacctcttgtttcacacaaggatttttttaaccatttcaacaagcattatttyatactacaattattgtagacactataggataatccaaattctgacagcagggaggaatagtagcacaaaggaaatgcagtggtagttctagatccaacattcattatagtttctctcttttaatataactttgagtacatagtctttcaagtccattttaatttctaatctgtgcctgtgcccataatcatttttacagtgctctagaatgaatacattttgaggaaagataatatcaagaagatgggtaagttatatgttaatctttaggaatttggtggtaaactttcataatcttaccaagaagtacacattgagtctctttttaaaatgtcttctaagtcctcacgtgttagatggtgtaataaaggtaaagagaagggttgtaactgaccacaagaaattttacatctaatattagataggaccacttaaagaaaatttcagaaaacttaaagccaggcaccattctcattcttgagtttaagatgtaaaagaccaagtttctgtaagtctggggatcataatgcaacagaaaggataatgatgttcaaaaatcaatagaaggatgccaat

SEQ ID NO: 837185 - DNA, 339 bp, Homo sapiens
cattcgctttcttagagcacttttgaaacactctttttgtagtatctggaagtggacatttggagctctttgatgcctttggtgaaaaaggaaatgtcttcccataaaaactagacagaagcattctcagaaacttgtttgtgatgtgtgtacccagcgaaaggagttgaacatttctattgatagagcagttttgaaacactctttttgtggaatctgcaagtggatatttggatagcttggaggttttcgttggaagcgggaattgaaataaaaggtagacagcagcattctcagaaatttctttstgatgtttgcattcaactcatagagttgaac

SEQ ID NO: 837186 - DNA, 609 bp, Homo sapiens
tcaaattattatgtgtctgttctgactggtctgggggatacctaaaggactaatgaaaggcttttttgtgtgtgttgctagratacagaacagataaggaatggacattattaagaaactctacaaggagacctaacaagccacagatgcttagggcaaaaattagagtttacacatatagtagatcaccttcagcacaggaagaaaagttggagtagagtatatggaaaactaagacattcaaaatcattcacgtacatgggagagtctagaaagtcacatgtatgcatacgttaagccacatgctgacaaatgtcataagaagaccctacacttttaccttcgctgatccctcccctcagtgcaggctctgtgcaagagtgaacttgaacttcactcagtgcaagagtgaacacacactttgtcccggctttaaagaacccagcacaaagccagtctgcatggcctagagacctattttgctggataatgattacttgtttttctttttgtttttgttgtatttgcctgtttgcttagttcctgacatacaagaaaatcagtcaaaacattatcttaacatttgttaaggaaacaaaaagacttggg

SEQ ID NO: 837187 - DNA, 471 bp, Homo sapiens
tcaaatgccactgaagtgtatacgtaaaaatagaaaaactggcaaattcaatattctgtatattttacctccacacacacacaaaaccaatggagaaaaagaaaattaatcaaaattaaaatttcagctaaagacgattagaaagaaataaaactaatgacaatttagatgactgagttatagctgcaattgttttcagtaaaagaaataatgctttattcagaatcattatgaacagtgttatgattagcaagtctttcctataaatgtaagttaataattttaaattagttttattttgtatgttctatgccacgttcaccaagtacacttaatattaaataaaatcatttaaatataatatctcattaatgttttgcaaatgaagaagaaatttctggcagacaagttcctcaaaattttcaccctctgtccaagtarggaaatgatactacaacattacttataata

SEQ ID NO: 837188 - DNA, 632 bp, Homo sapiens
gagataatggtggcttcatgagtgtatgtggagtgaatgagaaccaaagtgtaggatgcaaggcctggaaagtccccagaaatcccatctcagttaactaggaaactgagtcccagagtggaaccrtaaatgactcagtgcattacagttcattcacagcacagttaggactacaaaccagtcgtgcactttgtgtcttttcctcttttttcgtggaccttcccatgtgactcagctagtttttgaattaaaaaaaaaagcagtgctttaccaagtgatggatatataaagttcactacactattctctctacgttgatatgtttgaaaatgtcaatagtaatcaggtttataagaagcaacactttaaaactgttgtggcataggtgctaactcaaggccttccaaacagtttgggaaaggaaagaggtccagggcttcttggcactcacatccttacatggcactcaataatctgcatcttgactcagctgggctgtgtttggacctattgccacagtcatacacaatgccagattgttggactccatgacacttgccttggaagtgcacagaacctctctttggatcttctataaaatgggagtccatgcctatgacacaaagaatgtt

SEQ ID NO: 837189 - DNA, 632 bp, Homo sapiens
gagataatggtggcttcatgagtgtatgtggagtgaatgagaaccaaagtgtaggatgcaaggcctggaaagtccccagaaatcccatctcagttaactaggaaactgagtcccagagtggaaccataaatgactcagtgcattacagttcattcacagcacagttaggactacaaaccagtcgtgcactttgtgtcttttcctcttttttcgtggaccttcccatgtgactcagctagtttttgaattaaaaaaaaaagcagtgctttaccaagtgatggatatataaagttcactacactattctctctacgttgatatgtttgaaaatgtcaatagtaatcaggtttataagaagcaacactttaaaactgttgtggcataggtgctaactcaaggccttccaaacagtttgggaaaggaaagaggtccagggcttcttggcactcacatccttacatggcactcaataatctgcatcttgactcagctgggctgtgtttggacctattgccacagtcatacacaatgccagattgttggactccatgacacttgccttggaagtgcacagaacctctctttggatcttctrtaaaatgggagtccatgcctatgacacaaagaatgtt

SEQ ID NO: 837190 - DNA, 617 bp, Homo sapiens
ttgatattattcctaatattcagtgaaagagaggatattactccgaatatcacagggcattgtgatattgttcttaatcacctcccctatgatattttttcttaatatccagggaaggagaagatgctattactcccattattgcaagtgaaggatacacccatatgatattttttctaatatttcgggggggaaatgatattactcctaatatcgcattgtatgtacacacctctgtgatattgtttttaatatccaggggaagagagaatgatattactcccaatatcacagaaagtgtacacccccctgtgctattgtttgtaatatcgaggcagaagatgacattacacttaataaagtaaacacatagtgtattcacccccctgtgatgtgattcgtaatgtccagggaggagaagagggtgatattactccccatatcgcagagggtgttcactcccccaggatatggttcataatatccaaggggagagaggaaggtgatattactccccatatcgcggggtgtgtacaaccccctgtgatatggttcctagtatacgggggcrgggggaggagggtgatataactccccatgttgcgggggatgttcac

SEQ ID NO: 837191 - DNA, 609 bp, Homo sapiens
ttttctcttaaagaggaaaatcagcatttcagctaactgtctttatcctccaatattgaatggacttttctctaatcattgatttacttttatgtctcaccgtgcccacatttctcctctccttcttgctcatcctcctcctcacctgatgaagactgataacgtggtgctaaaaataccaagtttcattcacaaacccttcttcagaaaacttagatttgatttgcagtacaagggttttcttaatcattctgttctcagtcttaaacacattctattaatcattccattagtagtgatgcatcccactagcctctttcccttcaggacaaatccactgagcagacggtgggctttcctctgagactcattaaaggagaacagcatttaacgtctaaattgatttttaaatataaaataacacgaacactaaattaattccatacagggatgctctgtgcatagttggaaaaagattattgccaacaaaagtccagaaacgttgggacccatcaraggccaatcccagagttggttttctatagaagcaaacacattgtgtttagaattctaccctgaaatttaaaataaggctaacatttagttagc

SEQ ID NO: 837192 - DNA, 552 bp, Homo sapiens
ttgcacatagacacatgtgaataagtccagccattacaatgtaagtagatgtgatctgttttcasgtccacaaagtccttctgccatgtagcatccttctctccatgacctttttccttctagttgctggggtagaggtaagccaaaaaattacagtggaaatctcatgatgaaggtcacagagtttggatagtcctgaataattgtgaagacaggctgtctgacaaactcttcatccacattgtggtgttagatgaggaagaaataaacttttattgtgtttgagttattatgtctatatgctgtagcattgaagttgttctaatacagagattgaaaaggattccctaaggagatgacagtaagcagagatttgaagaatgactgggttgtcttgcttggctggatggtagagtccgtaggtgggaatctgtccagaaataactttttgaactttctagacttcagttattttcaaacataaacctcatagtcaagatcatctatttatcaataattgaacatgtctgtgcttgctatgtagccctcttt

SEQ ID NO: 837193 - DNA, 594 bp, Homo sapiens
aataaatatcactttcccctacaggcagcgatgtggccaggggctgaggatatggtaaatatcttctccgwctctgtctctgtctctctctctctctctcatcataatgcgaaaggacataatcataaaaacaatctctttctattattttcatgttatcataaagatttgttagcctcatcatttctatctatctccatcacttatttctatagagtaaatgtggcaaaacattaacagtttgtgaaaataagtgcagtgatatggctttaggtgtactcctataacattttatagttgaaaacttccgtaattataattttggtggcaagggacacatcagctcaggtcatttggataccctgaaatgtagtttgtacaagagaagcaggtttaaagatgaattatgttcctttcattgccaattcactgagtagtacgcagcgttatgtttacttccaatattgacaagctttttagcctgtttattttgttatttattttgagtttagttatgttctcatagatttatatattcaatttattttcatcaacttttgtcattttctggagggagacggaaaggagacatcc

SEQ ID NO: 837194 - DNA, 599 bp, Homo sapiens
ttacaagaattccattctcttccactcttgttaattccactccattccattccattccattcctttccattccaatcctttccattgcactccggttgattcctttccattgcattccatttcattcctttccattccattccgttccactcggtttgattccattcctttgcgttctatttcattgcattccattcctttcgggttgattccattccatttcatttcattccattccattatgtttaattctattcaattccattccactccattccattccactcggcttcattccattccatttcattccattccattccattgcatggcattccattccattccattccattccacttggattgattcccttccattccattccattccataccattccactcgggttgattccattccattccaatccattccattccattccattccattccattccattccattccattccattscattccattccattccaatccttcccatttcactcggtttgattccattccatttcattctattccattgcactccactggggttgattgcgttctatttcattccgttccattcca

SEQ ID NO: 837195 - DNA, 625 bp, Homo sapiens
  misc_feature 383: n = A,T,C or G
gaaccagtacgcatgtgtttgggggacagcacacccccgctctgatcctcggtttccgaatctgttaaaaaaaaaaggctccaggctggacaagcccmaggtcccctccttcccggttctgaagctcacaggtcgcgggtttgctgagaaggcacgtgctccccctggtggaaggaaacttgtatggcaacgctcccgccagggccccgcgatggtcaggctttctgccgtcttggaaacagacaccgacaagcaacagggttcccatagtgcccgggcacttcggacccgctgcgggaccttgggcaaactcttttagcctcagcaccttcctctgtgaaatggagccaacaacagcacatcacagagctaacagtataganaactggggcagcctcctcacccccgtctcttttctcgtggttagttatgccaacgattgttccagaatccaaactcacacagcagagagaggcagctcagcacacggaccttgcagccagttggccctgaattccagccctgccacttactagctgtgtgatcctgggcacgtgatttcaccgtctttcattgtggagttgtgaagattcataagctaactctcacacggtagtgagcgcag

SEQ ID NO: 837196 - DNA, 638 bp, Homo sapiens
agtggttctggccacacaaggtagcctctccagctgagggagcaacccaggctgtaggtaaggccacatgcgtgggctgggtagwcatcctggggctttgcggggtcctctccctggaggctgtgctggatgggctataatgtgttcctctaggtccccagccccatatggtgtcccccatcagtggagagcgtgcttccccaccagaaagcaaacagcaggctatccgacctgctcacgcccgctccccgtcacccaccagcacaccctcatccttcaacccctggcccctttgtcttacgcatcttttcatccccagagctgcacgcagtgtctgtgcagtcaacacactcattaactgcgcactgacccatcagatgcctgggagacgtgcttggcctgggagagcagcactgtccccagctgcagagagcatctctttcctcgcagagttcagagtccacctgcatctgaatggcagctttatctccatcagccccgtcattcaaggaacacccaagcgtgtgtcttctatagactgcaagtccagttcaggactgtcctaaaacagcatgccaggaacaacaggaaatggagatttgggatttggtgatcctgtcaactgatggctaccatct

SEQ ID NO: 837197 - DNA, 462 bp, Homo sapiens; identical to SEQ ID NO: 812903

SEQ ID NO: 837198 - DNA, 594 bp, Homo sapiens
accaaaagaaaatgtacgaagaaaagccatttggcttggaatcaggaattttggttttaacgtcyacctttgcttctttattggctagcattttattgataaactacataggttaaggataccttccctttttttctttttcactgtgtcattgaagagatagactgtagagccatttaagttgcagaagacagaggaggtggaaaataatacaggtaagaaagaactcattttatgagaaagataattattttaatttgtaattatattaagcttgaggcccctgtggagtgtttttgatgaagttggatatggtcatgtgactttcaaacaggaaataaagtttgggtattattaacatttagatgagagttgaggtctgggtatggatgtagtcactgaggtgggttcttttttggtgagaagaaaagagggctaaggctagcaccttagcttaagaagtgaggaaagcagaaaagccagtgaggaaggcttaccgagaacaggttccctgataggtggagaactgggaaagccttgtccagggagacatcaaaggaggaatgaattatgcctgctggatgcatctgagga

SEQ ID NO: 837199 - DNA, 681 bp, Homo sapiens
ctcttttttaatcaatatcacacaactaatgcctcccagaatgasactgagagcagcctctgtgctgatgtggcctgcaagttcattccaggaacaattcaccaccggagcttgtgaaaacaactacagtcaaataactccttgttccactaatgagctgctcctgaccctgtgaggaaatcttattcccattaatgtgagtgctgagtctgattaaatagaagccctgggtgtttcttctcaacgacactgggccagagcacgggcctccactgctgctagaaggaacacaaaattggtgaatcatgtaaccggaaactcccatttacccaaaattcagtacaaaaaccaggacattcaaacatcccaggtttaaccattctggccttaggataaaggagaaagtggcaatgtacaaaaacaagcaatctgaattaacaagctaagtaaatagctgaaacgttaccaaaaaatcatgctcttgaaaggaggcagaaacctgacgctgagctccagagcagctggggtgactcagacagtgtcagagacatgggttccaacctcccaccccaagggctgggctgctggcccagatgtgggaatcgcatcagctagaatgcttcaaagctaaaatcaaagaagcaacatctttatgtctttcattagtcaactacctgacta

SEQ ID NO: 837200 - DNA, 638 bp, Homo sapiens
tctgctgcaatgccaaatagttatataatctacaaccactccagagaaagtgtctaaagagcattgaacaaaatccaatgtgtaacagcttgaactagatgaagaaagagagggctattaatcttttttttttttgagacggagtcttgctctgtcacccaggctggagtacagtggtgtgatctcggctcactgcaacctccgtcacccgggttcatgcaattctcctgcctcagcctcccaagtagctgggattacaggcacgtgccaccacacccagctaattttgaattttttggtagaaatggggtttctacaaaaaaactccattttttagtagaccagtggccaggctggtcttgaactcctgacctcaagtattccatctgcctcagcctccaaagtgctgggattacaggtgtgagccacagtgtccagcagggctattaatctccataatctttagctcattttcaaaatatcaaaaaccatttcactttgtgaatatattaaaaattactaaattgtatactttaaatgaaacttaarttctttgtatactttaaaagaaatttaatttcttatatttaaaatacatcttaattaaaatattcaacatttatatataaataacacca

SEQ ID NO: 837201 - DNA, 597 bp, Homo sapiens
gtcctacagcttctttttttaaacctcatgaaccatcctctgctagcttccatctttttttcctcagttccctcacgtctcttagccttcctacaatggaagagagttaaggccttgctctggtttaggctttggcttaagagaatgttgtggctggtttcaccctttatccagaccactagaactttctctatatcagcaaaaaggccattttgctttcttatcattagggtgtccactagcgaagcacttttaatttcattcaagaacttttcctttgcattcacaacttgcttaacaggtgcaagaggcctagctttttagcctatcttggcttttgacataccttcctccctaagattaatcatttatagcttttgatttaaagtgagagatatgtgactcttcctttcacttgaatacttagaggccatggtagggttattaattggcctaatttcaatattgttktgtctccggaaatagggaggcctgaggagagggagagagatggaagaagggctggtcggtggagcagtcagaacacaatcgattaagtttgccatcttacatgggcatggttcatgatgccccaaa

SEQ ID NO: 837202 - DNA, 557 bp, Homo sapiens
  misc_feature 418: n = A,T,C or G
tacttaaaaataggctttttcttcacataaataaattgtataccatttaatgtgttttatttcaacagactaatagatcttttaacacttcttagtcctcaaaataaattattaaaaactttgtatttcatgtcatattatataaggaaatagaattttgaagaataattcatgctgttttaaatttttacattgtacattttaatagctaatcaactcttaagtatacatttgatggtaaatagatgctagctaatctagaatcatttgaaatattgattatctgatttatagtttggttgcaaggaaatctactgtaagcaaatcataatagatagcaaatcttagaacatgtagaaaaaaagaaattaaaaaaagcaaatcttagaacatgtagaaggaggaaattaaaaaatanatagcaaataacacaaattatgcatactatatrtggttattttcatacaactttgataacggtgaagaatcatacttattgaattttaaaatgatgatgtttaaaatcactctatgactaaagcacatgagaataaatg

SEQ ID NO: 837203 - DNA, 596 bp, Homo sapiens
gactacaagcgcgtgccaccacactcagctaattttgctttttgtatttttagtagagatggggtttcaccattttgcccaggctgctctygaactcctgacctcgtgatccacccacctgggccttcaaaattgctgggattacaggcgtgagccaccgcgcccggccaatgttattatcttcaaagaaaaattaggaatgtctttgttctccaaatattgggatatttgcacactcccaagtctgggtctgtttagtaaacattacgaatttgttcccttaactgtaaacatctagaggttaggaatgcctaactttctgagcacgcagcctagcaatctcagcctcattttcctagccctcatgccaaatagagtcgctctggttcaaacgtctctgacactatgtgaaaataaaccttggtccttataactgtagttctaattggtaatcttacttactaatgtcttaataataggttgccttggtaacaatattgtaattaatatttctgtctcctggaaaatataaattattatgcgttttcttggttaaggtggaagctctaaaattaattaaatgctttacacgtgcc

SEQ ID NO: 837204 - DNA, 612 bp, Homo sapiens
tgaggaaaatggggagatgttggttaaaggccacaaactttcaattataagatgaataaattccagaaatcaaatgagcagcatggtgacaatagggaataataaatactgtactgtatacttgaaatttgcaaagagagttgatcttaaatattctcaccacaaaacaaaaatggtaagtaggtgaggtgataaaattgttaactaacttgattatgataatcatttcacaatatatacatatatagtggctgggtgtggtagctcacgcctataatcccagcactttgggaggccgaggcaggcggatcacctgaggttgggagttcgagaccagcctgaccaacatggagaaaccccgtctctactaaaaatacaaaattagccgggtgtggtggtacatgcctgtaatcccagctactcgggaggctgaggcaggagaatcacttgaacccaggaggcggaggttcaggtgagctggagatggtgccattgcgctccagcctgagcaacaagagcaaaactctgtctcaaaatatatataygtatataacatcagcgtgttgtacaccataaatttacacaattttgtttgtcagtatacctcaataa

SEQ ID NO: 837205 - DNA, 474 bp, Homo sapiens
tgaactcctgggctcaagccatcctcccgcctcagcctctcaaggtactgggattagaggagtgggccaccatgactggccaggacagttcattgttatatggccctgttcacatagcaggggaggttggcttccttggttcccactctctaaatgccaatagactctctcccaaatttatgacaaataaaaagtcccctcctatatttccaaaatgcttcaccccacttcccagtcccatcaccctccacatccaagccaagaagccctggtttaaatgggaaggatgcaggcgggaaggagtcacaggagatgtgctgcctgctgggtggtttgagattgatggctgtggaaccagattcagagttaagaaacatgtcctgggctgggtgcggtggctcgtgcctrtaatcctagcactttgggaggctgtggcaggcagatcacgaggtcaggagttcgagaccagcctgg

SEQ ID NO: 837206 - DNA, 630 bp, Homo sapiens
ggcccctaaaaaaactacatggatcstgaacaattgatgtaaaccaggagttggcaaattttttctataaagagacagtaaatatttcaggttttatggcctatacaggctctgtcacaaaaatttaactctcccactacagtgtgaaagtagccacagacagtatacaagcaaattaacatggctgtgtgttccaataaaactttatttacaaaaaaaggcagcaaaagctataatttgctaatctgtgatgtaaactatcacaagcttgacccaatagtagcccaactggagccactatgtcagatatggtatctactagagcaaattaacacagcatcatatacgtggtctggggctattgatttggtgattgaattaatagaaagaatcattaacaattgcatttgtgtaagatggacattatttatttactatattcccccaggactatattaactctttgtactttatcatactacaaatcaaaaaatccgaaccatctggacatctcatattacactgatccatcacatggataatatgctgattgtattacatacacaagaagtagctatcacttagactttgtaagacatatgcactccataagttgggagataaagccag

SEQ ID NO: 837207 - DNA, 618 bp, Homo sapiens
aaactcattttaattagtctttctagaaaaggtgccaatytgaagaatttcttaaatgagtaaccacagcataggttataatgcataaaatattgaaataatccatgagtccacaaatacatttaaaaacatttaaaaattaggaacatcagaagatgacgttcttttatacaaatgagtgccaacaaataaatatagaaagaatgctagaaactgaaaagtcatcatcttgaaacatcataaaagtaattatttcagacaggattcattgatttatgctaataacattgtgtgaaagatcgggaacaaaatactctaacctaaaataactgcctctacagattacttgttagttacaaaaagaaaaaggtacatttacaaagtagaaattttgcagacatctccttaatcaagagatcaaaattactgtcaccaaatataggagaacctgagatcacatgcttcctgatatgtacacgcactgtgaaggatacaatatcacctatgcattattcctattgtaggtatttgacctgaacttaatcatgaagaagaaaacaactcttaactgagaggcattttgcaaagcctctgagatggatactttgaaaatagcaa

SEQ ID NO: 837208 - DNA, 601 bp, Homo sapiens
tctcctcaaattcaagtctactggaacctcagaatgatcatattttaaaattgggtcattacaaatataattacataagttgaggttatactgcactaggatgagccctaaatccaatgactgaagttcttataaggagaagagagaacacacagagatacagcagggaaaattcatgtgaaatagaagcagaaattgataaggttttgccacaagccaaggtatacttaggacaaaaggcataagacatagagaaaacaaaaagtaaaacggcagatgcaaatctaactatattactaatgaaattaaattagaatggattagacaatccaattgaaaggcaaaggttatcagaatggatttttttagaaagatccagctatatgttgtgtgcaggagacacaatttagatttgaagatgcaaatgggttaaaagtaaaagaatggaaaaaggtatgtcaaccttcaraaagctagagtagatatcctaatctcagacaacatagactttaaagtaatatatgttacctgatataaaaaattgtcattttatgttgaataaatgatcaatctatcaggagatataagttaacctatatag

SEQ ID NO: 837209 - DNA, 616 bp, Homo sapiens
acatgaagtataataattcaaaaaagaaagaaaacaaaaagaaatttgaacaaaattagaaaataagattgttgcaggaagtcagggaccctgaatggaaggacygttgaagccgcagcagaagaacagaaatcatgaagatttcatggacatttaatagttccccaaattaatacttttgcaatttcttacgcctgtctctcacgtttcttacatttatctctgaacataaattatgaagatttcatggacatttatcacttccccaatcaatactcttataatttcctatgcctgtctttactttaatctcttaatcccatcatcttcataagctgaggatgtatgtcgcctcaggaccgtgcgatgattgcattaactgtacaaattgtttgtaaagcatgtgtgtttgaacaatatgaaatctgggcaccctcaaaaagaataggataacagcgattttcaggggacaagggagataaccataagatctgactgcctacagggccgggcagaacagagtcatatttttcttcttgtagaaagcaaataggagaaatatcattgaattcttttcctagcaaggaataaccctggagaaggaatgcattcccag

SEQ ID NO: 837210 - DNA, 585 bp, Homo sapiens
cctgggcaacagagcgagattccgtctcaaaaaaaaaaaaaaatgcctgtggcaagtggttaacccttgtgtatatgaattttaacttccctattttatctgtttgataattaaggatttgcatggctggcgcggtggctcatgcctgtaatcccaatattttaggaggctgaggcaagccaattgcttgagatcaagaccagcctgagcctgggcaacatagcagaactctgtctctacaaaaagatacgagaaattagctgggtgtggtgtgtggcctgtggtcccagctactcagatggctgaggtgggaggatcgcttgagcctgggaggcagaggttgcagcgagacatgatcgtgccactgcacttcagcctggatgacagagcgagactgcatctcaaaaataaaaataaaaaggatttgcactgtggctgcacacccggaattctctgtagtaggaatatcttctgtttctctggttattttaacctggatgggtgactctgtggttggtacagacatgggtttttatttaagccctgctgctacttcactacctkatttttataagtcccttcatg

SEQ ID NO: 837211 - DNA, 477 bp, Homo sapiens
tgaaaaacacagcacgagaacttcgtgaagcatacacaagtatcaatagccraaccgatcaggtcgaagaaaggatatcagacactgaagatcaacttaacgaaataaagtgagaagagaagattagagaaaaaagaatgaaaaggaatgaacaaagcttccaaaaatatgggactatgtgaaaagaccaaacctacatttgattggtgtacctgaaagtaaaaaggagaatagaaccaagatggaaaacactcttcaggatattatccaggagtacttccccaacctagcaaggcaagtcaacattcaaattcaggaaatacagagaacaccaaaaagatactcctcgagaagaacaaccccaagatgcataattgttagattcatcaagattgaaatgaaggaaaaaatgttaagggcaaccagaaaggttggggtacccacaaaggccgaagtccatcagatgaacagtggatc

SEQ ID NO: 837212 - DNA, 592 bp, Homo sapiens
cagctctgaagagagcagcaaatcaccaagcacagcattcgagctctgctaagggtcagactgcytcctcaagtaggtccctgacagccgtatacactgactgggagacacctctcagtagaggccaaaagacacctcatacagcagaactctggctggcatctggcaggtgcccctctgggatgaagattccagaggaaataataggcagtaatatttgctgttctgcagcctccgtggtaatagccaggcaaaaggtctggagtggacctccagcagatgtgcagcagagggacctgactgttagaaggaaaactaaaaaacagaaatgaatagcacgtccactcagagaccacatccaaaggtcaccaacttcaaagaccaaaggtagataaatccacaaagatgtggagaaaccagcacaaaaagcctgaaaattccaaaaaccacaacgccacttctcccacaaaggatcacaactcctcgccagcaagggaacaaaactggacggagaatgagtttgacgaattcacagaagtaggcttcagaaggtgggtgacaacaaactcctccaagctaagagagcatgttc

SEQ ID NO: 837213 - DNA, 633 bp, Homo sapiens
agtgagaagacttacctcaattattttgcattaactttgcatccattgcctccttccccattacttgggaggtgcttamgtaccatgaagtcacacactctggtccttgaaactgtactgtctgcaagagggctgatgtgacagaggaggaagaggagtgatggagggggaggaaacatgaacattgtataactcaagattgaggtagtgtagtctcttgtatcctattctaagtaggctaactcttttcttctgggtatgtggtttaattcaataaactaaatgatttattaaaataagtaataaaaagtatttgagctttttcatttggtttggacttttgtgctctaggaactctgggatagtctgcctggtagtatctgtggaggctaccattgaatcaaggtaacttcccacgtgacatagttctctaatcagagttgtgctttcagaagattttggtagtgggggtgagcaactgctagtccaggcatgatctcaagggatgaatgagagatttgatggctgaaatatttctacaagacttaatagctctttgtagaaggttagaagaaagaggaaagagtgtgaagaattaaagatggtcattttaagaattagtgtcattgggtg

SEQ ID NO: 837214 - DNA, 633 bp, Homo sapiens
agtgagaagacttacctcaattattttgcattaactttgcatccattgcctccttccccattacttgggaggtgcttaagtaccatgaagtcacacactctggtccttgaaactgtactrtctgcaagagggctgatgtgacagaggaggaagaggagtgatggagggggaggaaacatgaacattgtataactcaagattgaggtagtgtagtctcttgtatcctattctaagtaggctaactcttttcttctgggtatgtggtttaattcaataaactaaatgatttattaaaataagtaataaaaagtatttgagctttttcatttggtttggacttttgtgctctaggaactctgggatagtctgcctggtagtatctgtggaggctaccattgaatcaaggtaacttcccacgtgacatagttctctaatcagagttgtgctttcagaagattttggtagtgggggtgagcaactgctagtccaggcatgatctcaagggatgaatgagagatttgatggctgaaatatttctacaagacttaatagctctttgtagaaggttagaagaaagaggaaagagtgtgaagaattaaagatggtcattttaagaattagtgtcattgggtg

SEQ ID NO: 837215 - DNA, 765 bp, Homo sapiens
agcggtgaaggcggctggaccagggtggctgctctggaggtgcacgggtgggtggaactccaaatgtattttgcaggatgagccaatacaatttgctgatggttgggggtggggcatgataaaaagagaggaatcaagaatgatccaaaagtttttttgcatgagcaactgttaggttagagttgcttttccagagacagaaagattacaacagaagcagtcggcaaatatttgagaacatactatgtgccgaggttacacctagaagcatggcaaccttgtcttggagcttggcaagagagacagacaagaaccactgaacaagtaggtagaggagaaaataccagctggtaagaagggccacttagagcaacagaacagggtgatgggagtctgcattttattcaaagagcagccaggaactgtgggagggtttgcagcagagacagaatctgctgtaccctttagaagaccactctggaatagactgttgggggcaagatgagacagggagacccgtggggaagctggtgaggaggctgccgaggcctgaaggtgggagatagtggcactgccgtcaaagacctctagcagacgaacaggggtaggaaaccgactcctgttctctgtgagaggcattttaggagcatagtggcatcactgtcccccttccaggggcttggacaggtgcctttgcccmgggagtctcaactccccagtctctgccacttcctcggtgactgtcgcatcctcacggatcccttc

SEQ ID NO: 837216 - DNA, 523 bp, Homo sapiens
tgctcgctcgctctgtctttgtctctctctctctctccctttagctctctctcgctctcgctgtcgttttctctctggccatgtgatctctgcacacacaggctccccttcaccttccaccatgagagggagcagcctgaggctcttaccagatgcagatgcccagtttgaactttctagacatcagaatcatgagccaaataaaccattttcctttctaaattacccaacctcagatactgctttatagcaacactaaatggactaagacactaagccaagatggaaacctaattctgtatgaccccaaaagccagggtcatacagggaggggagtggaaatgccccgactttcctctcctctctgatcttctaaaccacaccagaatctgaaggagagggaacctgcatggggcagtccatagagatctgccgcctggacacatacagggccaaaaatgggtctggagggcaaatggaggacatccccaaagccagrccagtcagcagctggagtctctta

SEQ ID NO: 837217 - DNA, 631 bp, Homo sapiens
gatgaaggttgagactaaccaatagctaggcttcatgcaccagttagttatgaatacaaaggaaaaattcttgaagaaaattaaaagtgtcaccccagtaaatatacaaatgataagaaagtgaaacagccttattgctgatgtggagcaagttttatgggtattaatagaaaatcaaaccagccacaacattccataagccgaaacctaacccagagtgaggccctaactctctttaattctgcgaagactgagagagctgaagaagctgcaaaagaaaaggtggaagctagtagaggttggttaatgaagtttaaggaaagaaaccatctccataatatgaaaatgcaaggtgaagcagcaagtgctgatggagatgctgcagcaagttatccagaagatccagctaagatcatcgatgaaggtggctacactaaacagtagattttcaatatagacaaagcagccttctattggaagaaggtacaatctagaactttgctattgagagaggagaagtcgatgckgggcttcaaagcttcaaaggacaggctgactctcttgttagggaaagtcagtcactaatgcagctagtgactttaggttgaagccactgctcatttaccattcg

SEQ ID NO: 837218 - DNA, 488 bp, Homo sapiens
ttgtatacttttatcattttgagaatattatgtaaagtaagttatacagtatgcaaccctttggaattgacatttttcacttaccgtaagtgtcttgggattcatccaagttgcttcatgcatcagttatgtgttcttttttattgctaagttgtattccatagtctggatgagctatagtttttaaccatttacctatgttttcagttaggggttattatacagcagttgtgaacactcatattttttatatgaagctacgtattcattacctaggataaatacccaagagtgcaattgctgggccatacgctaattaaatatttagttttgaaagaaactaccagctgggtgcggyggctcatgactgtgatcccagcactttgggaggccaaggagggcagatcatgaggtcaggagttcgagaccagcctggccaacataatgaaaccccgcctctactaaaagtacaaaaaattagccagcca

SEQ ID NO: 837219 - DNA, 581 bp, Homo sapiens
aagatggatatagcacaaatcactatgtacaatttctggaagagcgtaaaggtaatttaatattattatgaaaaatacctgtataatggaatcatttgtgctattatagcaggtctagaaatataaaataatgtgaagagaaagtgacctattgttgcaaccttacattacagagatattactatgccccagccaatcatttttcatctagctaaatttaaataataaattagaaataatatattcattcatagcaataaataaccataaaaaagatttcaaaactgaacatttgccaagtaaatttattaaaaaataggatatttctatgtatttatttgaattactatataattcagtggcttccccctttattctaaacatgtttcttttagggtgtataataggtgagatatgtgaggtacagttacaaagaagctatcttctccaaattttgttgtatttatttttttcttaatgttctttagaaaatttcartggataacctttataggaaatatacatatgttcaagaatgcaagcaaatgttttcatgctcatctatttatacaatatatttg

SEQ ID NO: 837220 - DNA, 555 bp, Homo sapiens
aatatatattctagggaagaggtggacgtttcttggcctcaaactccttgactttaacactgatctctccctctggtataaggcyacagaacctcttctcatcttgcttgcctcctggatccagacctctgatttattttggaccccaagcccactggaactctaatctcagccaactggccccattcccagatgcagcctggaatactttgcccttctgctgcttgggcataacctacattctgagcagaaattaatttatattacttcaattttgactttcttcttagcaagaggcttcttcatgagtcttatagtcttatgttccatgagaaggtaactaggtggatagatcaccagatttttgtttccaagttttaagaaagattatacatgatttgctcaatggataagttgcattggaactactgattttaacagtaggcttttaaagtaaagacattgtggctaaacaaactctaaggctgtgagacaaaagacctaggtttaatatctacattcactgcagattcaacacagagcagtaagagttaa

SEQ ID NO: 837221 - DNA, 453 bp, Homo sapiens
tcactatggtaatatattttttcttttcctgtacttgagaagttacctttagaaactaagtaaaggtctttacatttattgattgtaatatgtatattacttgtcttgccctttcatagtagtcttagaatattctcaaagtattaaaggattatatttactacttcccaagagctacagatcatctgaaaacctgataaacattctttctctagctttcttctagcccttgaaacaaaaaagttgaacagcacagcagcaccaaatccagagcccttcagtatcctctaaagatattctgcaaaactgacattgaccccacagtcaactgcccacatacgtggatgtttaattagctgacactctgcagtaatgagagacagtttggctatctatggtcaggaatggcaggttagkacaacttagaaaggatcctacataaaagtatacctg

SEQ ID NO: 837222 - DNA, 638 bp, Homo sapiens
atctaaaataccattcaaaaaatcatgaactaagtaaggcacacagacrtgaaaacctgggccagtggcagactggggtcccaggctgcagatggtggttactaattcgggccctggatagaagcttggaagaaaagcatctccttctctctgtggaggctgcctgactccatgtgggctagacagacttttctgttcccacagcccatggaagaaagtgcacagtgaggaggggaggacaatgagaaagggaagagagaatggggcagagtgggaggagggataagtcttttccccctctaaagccctttagccctctcaccacaatctgtaatgcccagagaacaattggcagcagcagtgcagagggagcatgcaaactttgccagttgctccttcttctccagtctctgtgattacagagttctggaagataactcttattgataagattcctaagaaacgaggcttgtttccagggcatgctttgctatgtggagaacagcctttccgttaacgtttatgtatatcttttctcattctgaatgtgcctaggacccctcctgcatactcccagcccagcccaccagcctttctcttgtgaagacacaatgttcttagggactcggggaccctaa

SEQ ID NO: 837223 - DNA, 532 bp, Homo sapiens
tcccccaaagtcctaactcatttcagcattaactcaaaggtccatagttcaaagtctcatctgagactaggcaaatmccttccacctatgagcctgtaaaatcaaaagcaaattagttatttcctagatataatgagggtacagacattgggtaaatattcccattccaaatgggataaattggccaaaatgaaggggctatagaccccatgacagtcagtcctaaacccagcggggaagtcaaatcttaaaggtctgaaatgatctcctttgacttcatgtctcatatccaggtcacacagatgtaagaggtgggttcctgtggtcttggacagctctgccactgtggctttgcaaggtacagccccacacctggctgctttcatgggctggccattgagtatctctggcttttccaggcacatggagcaagctgttggtagatctaccattctggggtctggaagatggtggccctcttctcatagctctactaggcagtgccccatggggactctgtgtgggggctccc

SEQ ID NO: 837224 - DNA, 603 bp, Homo sapiens
gtaccttggagagtagctcctrcaaatgaatacattgttatagactaaaaagtgcatcaatcataagtgtacaatttttataatctttcaatatggactcagtcatgtgaccaccataaacaagagcacctcagaagcctctttcatgcctcattaattttcttctaccgaatagaacacttttctgacttcctctacaatagattcatttttcctgaggaaatttctatgaatgcaggcatatttgtgacaccacagatgtagcagcagttctttaattgctgtattttattccactctatcaatgatccataaaatatttttacattctgctgttggtggacaattgaactgttttgagtgtctgcatataaaaataatattataatgaaagtcttttggtgtaaaaaattcccagtcatatctgttgggtatatacttaaatgtagaatggttgggtcatagataggtatctgtaaaaccaaactgtgctttattaatctacttatttttcttttaaatattaatgtataatttacacataacagagtgtacagatcttaagtatacacctcattgaattttcacatagcttcatacacg

SEQ ID NO: 837225 - DNA, 603 bp, Homo sapiens
gtaccttggagagtagctcctgcaaatgaatacattgttatagactaaaaagtgcatcaatcataagtgtacaatttttataatctttcaatatggactcagtcatgtgaccaccataaacaagagcacctcagaagcctctttcatgcctcattaattttcttctaccgaatagaacacttttctgacttcctctacaatagattcatttttcctgaggaaatttctatgaatgcaggcatatttgtgacaccacagatgtagcagcagttctttaattgctgtattttattccactctatcaatgatccataaaatatttttacattctgctgttggtggacaattgaactgttttgagtgtctgcatataaaaataatattataatgaaagtcttttggtgtaaaaaattcccagtcatatctgttgggtatatacttaaatgtagaatggttgggtcatagataggtatctgtaaaaccaaactgtgctttattaatctactyatttttcttttaaatattaatgtataatttacacataacagagtgtacagatcttaagtatacacctcattgaattttcacatagcttcatacacg

SEQ ID NO: 837226 - DNA, 599 bp, Homo sapiens
aaatgaaggagtttattttaaacctgctttaaaktatttcgtggttaaagtatttaaaaccttttcttctatttttaggaaaacaatgagaaagctaaacacaggtctaacttgttattcaactaaaaattattttaaaaatatttgagtactgacttctggcaccagccaagacaaagcatgctcaccaaggcctatttctctttctgactgaaattaaaactctggacataaaaagcaactatcaaggactcttaaaagtaaacaataacagatggattgaaggcaaaatcaaaataccaatagtgacctgtaacaggggtgggtttaatggctattttttttttttctaacccaggtgtgcaaaatttctactgtttttagctagagaaccaagaatgaagcctctgcaagatggagcatatgtagagtgttgggagcaggccccccaaaatctggccataaactggccataaataaaatctctgcagcactgtaacatgttcataatggccctaacacccatactggaaggttgtgggtttactggaatgagggcaaagaacacctggcctgcccggggtggaaaaccgcttaaa

SEQ ID NO: 837227 - DNA, 599 bp, Homo sapiens
aaatgaaggagtttattttaaacctgctttaaattatttcgtggttaaagtatttaaaaccttttcttctatttttaggaaaacaatgagaaagctaaacacaggtctaacttgttattcaactaaaaattattttaaaaatatttgagtactgacttctggcaccagccaagacaaagcatgctcaccaaggcctatttctctttctgactgaaattaaaactctggacataaaaagcaactatcaaggactcttaaaagtaaacaataacagatggattgaaggcaaaatcaaaataccaatagtgacctgtaacaggggtgggtttaatggctattttttttttttctaacccaggtgtgcaaaatttctactgtttttagctagagaaccaagaatgaagcctctgcaagatggagcatatgtagagtgttgggagcaggccccccaaaatctggccataaactggccataaataaaatctctgcagcactgtaacatgttcataatggccctaacacccatrctggaaggttgtgggtttactggaatgagggcaaagaacacctggcctgcccggggtggaaaaccgcttaaa

SEQ ID NO: 837228 - DNA, 599 bp, Homo sapiens
aaatgaaggagtttattttaaacctgctttaaattatttcgtggttaaagtatttaaaaccttttcttctatttttaggaaaacaatgagaaagctaaacacaggtctaacttgttattcaactaaaaattattttaaaaatatttgagtactgacttctggcaccagccaagacaaagcatgctcaccaaggcctatttctctttctgactgaaattaaaactctggacataaaaagcaactatcaaggactcttaaaagtaaacaataacagatggattgaaggcaaaatcaaaataccaatagtgacctgtaacaggggtgggtttaatggctattttttttttttctaacccaggtgtgcaaaatttctactgtttttagctagagaaccaagaatgaagcctctgcaagatggagcatatgtagagtgttgggagcaggccccccaaaatctggccataaactggccataaataaaatctctgcagcactgtaacatgttcataatggccctaacacccatactggaaggttgtgggtttactggaatgagggcaargaacacctggcctgcccggggtggaaaaccgcttaaa

SEQ ID NO: 837229 - DNA, 581 bp, Homo sapiens
cttcagctggtccctccgtttggggtccctgacttcctgcaacagaggtgggtggatcacctgaggtcaggagtttgagaccagcctggccaacatggtgaaacctcattttggggtgtggtggtgcatgcctgtaatcccagctactcggtatgctgaggcaggataatcactcgaaccggggaggcggaggttgcagtgagcccagattgcaacactatactccagcctgggtgacacagcaagactccattaccaataaggaaagaggaaaaaagaaagaaaaaaatctcttaatttctgatggttttcctgaccatatatgtgatgccaaagttgcttttttgttgtcacatctattggcatcaagtgctgaacttttcatggagtggcaattttttggtaataaagcaactttcaaaatgagtctaagtttatctttggaaaagtttgaaagaatcagtgaaggttcttttaaacagtacccatgttctacagatcagccattctctgtctctcaaattttcagtaaacctttccacataggatgtcagcacgattttawtacattaaatatatgt

SEQ ID NO: 837230 - DNA, 620 bp, Homo sapiens
actaagtacatatgcattaatgaaaagttaacatcaggaatttaattacccagatgatattacctttcacaacccccacactctgatgagtcacagatccccatttgtattttggtgtrgtgacagaggctttgacccgcactttatcaccaatcttgatgtgagaagaacttcttggtggaggatagcctacagatttcaataacaaatcattataatcagtattcatttatgggaattctgtctctaagaaaaagtaaaagcactaaacaaagaatgtgctcacctataagttccacatgaatgtacctaaaccagtagatgccccctttctgctgccagtcacactgcacattgagatcatgcaatccatctctgtccagcttgatgactttgccaacatcacatcaccttcgcacacttcttcgtatgttcggcagcatctaaccatcattcccacctagaattaaaatgaaattggagatccagtccatcatgtacacaggtgaaatgagccatgataagtagtattactctactcttaataaagaatttcaactgggcacggtggctcacatctgtaatcctagcactttgggaggctgaggtgggaggatcac

SEQ ID NO: 837231 - DNA, 431 bp, Homo sapiens
catttatgggaattctgtctctaagaaaaagtaaaagcactaaacaaagaatgtgctcacctataagttccacatgaatgtacctaaaccagtagatgccccctttctgctgccagtcacactgcacattgagatcatgcaatccatctctgtccagcttgatgactttgccaacatcacatcaccttcgcacacttcttcgtatgttcggcagcatctaaccatcattcccacctagaattaaaatgaaattggagatccagtccatcatgtacacaggtgaaatgagccatgataagtagtattactctactcttaataaakaatttcaactgggcacggtggctcacatctgtaatcctagcactttgggaggctgaggtgggaggatcacttgagctcaggtgtttgagacaaacctgggcaacatg

SEQ ID NO: 837232 - DNA, 566 bp, Homo sapiens
  misc_feature 391: n = A,T,C or G
tgtgtgctccagctccctgaccatctccctcgagkacaaaactggtgcaaagacttcatgggctggaggtgatatgaccattgttccccagaatcctcctaaggtctgctgattcttgggattttttttgggggggggtctcaaaatgctctcacattagtacgtgctttatgggatccttccaaccaaacataaccctgaacagaagtttagtgttgatatcctcatcaaaaaatatttatcctgtgccaagggagcttcagagccatgcagtgtttatcaaaaaatatttggttcctggtctccctggactccccccatacaaccccaatcccaccccaagacaacaccaccaccagacacacactgaatggggctctgagcaaagcangggagagggggtgagagtgagagacagagcatgatgatttcttgttttcccctctttctctttgttctcagataatttgggagctgttatattattgctgttggttttcatattttcacaaataggatgttgcctgcttgcattcagaggccctctcaacaaagggaagacagaa

SEQ ID NO: 837233 - DNA, 566 bp, Homo sapiens
  misc_feature 391: n = A,T,C or G
tgtgtgctccagctccctgaccatctccctcgaggacaaaactggtgcaaagacttcatgggctggaggtgatatgaccattgttccccagaatcctcctaaggtctgctgattcttgggattttttttgggsgggggtctcaaaatgctctcacattagtacgtgctttatgggatccttccaaccaaacataaccctgaacagaagtttagtgttgatatcctcatcaaaaaatatttatcctgtgccaagggagcttcagagccatgcagtgtttatcaaaaaatatttggttcctggtctccctggactccccccatacaaccccaatcccaccccaagacaacaccaccaccagacacacactgaatggggctctgagcaaagcangggagagggggtgagagtgagagacagagcatgatgatttcttgttttcccctctttctctttgttctcagataatttgggagctgttatattattgctgttggttttcatattttcacaaataggatgttgcctgcttgcattcagaggccctctcaacaaagggaagacagaa

SEQ ID NO: 837234 - DNA, 548 bp, Homo sapiens
agcactttgtgatgcaatgatccagctggtgtttgcagcagacacaggsttgaattcaataaacagtcgcttgcagatccaaagcctgtccagctacatgacaaaaccccagaagcaggggtgtttttgtgaggtttttttttttttttttttttttgtaaagagggggcaggaacatggaacacagggagggtctattgtctcaaaggaaaaaataacagtcccataagaaaagagagagagaggtaagacaagaaaccaggatggagaggagaaaagagactgctctattttgaagcactccatcttctcagctctctcccaaggcatgattctggagcatgagtgctctgctacttcccagggactgagctggcgttggtgagggacaggcaaaagccatcctaccatgggtccaggcctggcgtgcctcccctccccagtggcttccccacctctgtgttggggagctcactaattcacatggcactcctagaaaacctggaattgtctgaaagtttcttcttctatttattattatttattta

SEQ ID NO: 837235 - DNA, 548 bp, Homo sapiens
agcactttgtgatgcaatgatccagctggtgtttgcagcagacacaggcttgaattcaataaacagtcgcttgcagatccaaagcctgtccagctacatgacaaaaccccagaagcaggggtgtttttgtgaggtttttttttttttttttttttttgtaaagagggggcaggaacatggaacacagggagggtctattgtctcaaaggaaaaaataacagtcccataagaaaagagagagagaggtaagacaagaaaccaggatggagaggagaaaagagactgctctattttgaagcactccatcttctcagctctctcccaaggcatgattctggagcatgagtgctctgctacttcccagggactgagctggcgttggtgagggacaggcaaaagccatcctaccatgggtccaggcctggcgtgcctcccctccccagtggcttccccacctctgtgytggggagctcactaattcacatggcactcctagaaaacctggaattgtctgaaagtttcttcttctatttattattatttattta

SEQ ID NO: 837236 - DNA, 536 bp, Homo sapiens
tacttttaaaagaaaataaacacagatatcattgtgcagagatgggcaaccgagtccctcagcctcccttccycagctccccgactggctgctgtcccttatttcttatcgttggaaagttctctggctgaaaccaccaaccctgttgcttagcagttcatctgctcctgcctgttcccctcctgtccccaggaactcggggccatgtgttcccttggcccatatgctgacaagcatcctcccacccaacctgccaccaacccaggcaccagccagggccacctgctccatggctgcccctccctgacttcacaagagttgggggtggaaggggaatggagagaggtggagaaaaagacaaaagggctccagggccttctacagacctccttccccaatccctcctgtgttccttgcccctacttttaattgatctctgcttggaggatgcttcaggaaacaaaaacagccaaaagtggagctaggcaaagaaggacattgctgcagggagaatctaaactaccaatccttcattg

SEQ ID NO: 837237 - DNA, 586 bp, Homo sapiens
attgctgcttcttttggccctctgtgtgggcaggggttggggtgggggatgggagattagaaaccacactgccacttccatcaccttctacctccctctygttaggccaacaccatcttcttggagaggtcacgaaccacctgcaggacttgtgaggcagagggaggagcaaagacaatcatgggaagccagatggggaggttcagagccgatcaggctgtagccccaagaaagcctgaggggactggactggcaggggtcagccccgtgaacagcatggggaccaccaggatgcgtgggctaagctgctctgacttggcctccatccacacccatcccgagggcagggaggggtccaggacccagggcccaggggcaggtgctcccagcagggcagaatggagagatggagctttatgttcttcatgaaaccccaaaacgaggggtgctgtggagaagggagccttcagggcaaatgcaaagactggccttagctccctagatgccttggttggttgctggacaaggatttgcacatatacatgtatacatatgtatatacccactcatcatggctgtctttgtt

SEQ ID NO: 837238 - DNA, 586 bp, Homo sapiens
attgctgcttcttttggccctctgtgtgggcaggggttggggtgggggatgggagattagaaaccacactgccacttccatcaccttctacctccctctcgttaggccaacaccatcttcttggagaggtcacgaaccacctgcaggacttgtgaggcagagggaggagcaaagacaatcatgggaagccagatggggaggttcagagccgatcaggctgtagccccaagaaagcctgaggggactggactggcaggggtcagccccgtgaacagcatggggaccaccaggatgcgtgggctaagctgctctgacttggcctccatccacacccatcccgagggcagggaggggtccaggacccagggcccaggggcaggtgctcccagcagggcagaatggagagatggagctttatgttcttcatgaaaccccaaaacgaggggtgctgtggagaagggagccttcagggcaaatgcaaagactggccttagctccctagatgccttggttggttgctggacaaggatttgcacatayacatgtatacatatgtatatacccactcatcatggctgtctttgtt

SEQ ID NO: 837239 - DNA, 631 bp, Homo sapiens
gaacgtatgaatgtttggtgaatctgatgttctttgcactatgccacaaatstcagaaaagacacattttgttgctatcatagtttctccattttctatttgtatgacttaatcatgtcccattcaaatagtggaatgtacattgggaggggagacttagcccagatgtgtgtggagagtttgccttagtctcagtcactagtaagacttcacactccagagaccttaggttaagccagtgtcttatctgtgtaaattacaagtcagatatacaaagcactcaaagaggggtgcaagaagtcttgtctgatagtgttgaaggaacaaatgtaattgacattttgataggaatacatgtgttcccagaaagaaccattttgaagcaagctactgaatagagattgaactgagatgcaaataaataccactttcctcttcgacctctggagaagcttgatttattaaaatcacaggaaaacagaatgatgtgactcctggtgttagcatagacattgcagtaggatcatggaaggataagaaagtgggtttgttttaatacatattgccttatccctctgcaggcaagcctgtaggttgcccatgcataacaaagaaatgtttattgtatatt

SEQ ID NO: 837240 - DNA, 481 bp, Homo sapiens
aaaaatctttattattccactattgtaatattcagcagcagtgaatgagtgattctgcaaaaagcattcactacagcaaaattatctaataaattgtatttgttttccaacgagtcagctagtaagagcattagtgtggacatgaatttaattttctcatgagtccgtggcttcatcttgtcccagctgtttcattttcttctcatcaccaaatcattttattataataactctccatgccttacttttctatagccctgtataaatgcaagtactttggagacactttcatgctgagtagtggtttggaagtttacatttaaatctcaccttaaatgtacatttgtcagaggaaagaagatagaaaaaaaawtttgaaaaatatcattttacttaactatattatgtgacaagtaatttacaagggttgcaatgggggaaaatcatctttataaaagcagtcataatatctgtttagttc

SEQ ID NO: 837241 - DNA, 660 bp, Homo sapiens
agctttgaccatatacaaaagtaactcgagatgttttatttgttcaccctcatgattattcttctgttccttagggtcatgagttcttmagcatgagctaaacaaaactgtggatatttattagtctcactttttaattctttgctttatcatattaataatctatttaggatagattatacagaagtttttaacatgctttctgaacagcagggatactgaaggctgaaggtgcctggaaagttcaaataagatgccctaggagttctttactaaatttcaccaagttgatcataaaatatcagtatgattcagaggaaaaacataagagacaaatcatcacagttttgtgtgaaattgtgagagttgtttaacctctttcatcttcaattcctcatgagtaaaaatattatcaataatacctaccatgcaagtttgccatgaggacaaaacctagagttagtctcaggtacaccaagatggtagcaaaaaggccttttctcatgacacaaggtagcggacattttccccttaatttctcatccacatgcaactgttctaccttttattctttttagagtgaccacatgtcttttaggaaatatcaagaatatagtttcagttttaagattggggatcccaggtaagacaactgcagta

SEQ ID NO: 837242 - DNA, 601 bp, Homo sapiens
gagcagaacgagtgccaggaggtgtcgtcagagagggccagaaggggcagagccttgtaggtcaatataaggactcaggcttctaagaagagtgagactgggaagtactgaaggactcagagaagaagaggagggacacgatggaactcattgcttaagagagttctcggccgggcgcggtggctcacgcctgtagtcccagcactttgggaggctgaggcgggcggatcacaaggtcaggagatcgagaccatcctggctaacacggtgaaaccccatctctactaaaaatacaaaaaattagcagggcgtggcagcgtgtgcctgtagtcccagctgctggggaggctgaggcaggagaatggcgtgaacccgggaggtggaggttgcagtgagccgagattgtgccactgcactccagcctgggcgacagagtgagactccgtctcaaaaaaaaaaaaaaaaaaaaagggagttctctggcaactgtatggacaagagttgagggaggcaaagagagaagcagaaagtccagttaggggtggctgcrataatcccatggttgccaaaataagccactactggccaggcacagtggctc

SEQ ID NO: 837243 - DNA, 617 bp, Homo sapiens
acggagtctcgctttgttgcccaggctggagtgcagtggtgtaatctcggctcactgcaacctccgcctcccagcttcaagcaattcttctgcctcagcctcccaagtarctgggactacaggtgcgtgccactaccgccggctaatttttgtatttttagtagagatggggtttcaccatgttggccaggctcatctcgaactcctgacctcgtgatccacccgcctcagcctcccaaagtgctgggattacaggcgtgagccaccacgcccagccaggttttcattttttaagctgctttttcaagctctttaaggaatgatattgcatgagttgtattcttttttagaggtattacaaagaactgagagaaagtatacttatattttaaaatagtgcaaaactctttctgtcttacaattatcataggggtcttttggatccttttgtaagtcttcacatgatgggatcttagggatcttaattttcctgtgttttgaacgttttgctatttgttattccacataattatttcaatactattcatcatctactcccaaatatgccagatgagatgaaaatcataagaaaatggaagaatgataaagcctctggg

SEQ ID NO: 837244 - DNA, 515 bp, Homo sapiens
attcatgaaaattttcaatattccatttaagtcagacacactgaaatgtcaaccaaatttcataaaacatatttgaatgagatcaagcctttcttagctaagaattttatttcagcagtaaatttagaggaaaataagaaatgtgtgtactttgggccaaataacagtgttggccacttgggaacaattcagacaagtgctcttcatcattactcttaaagtagcaatagcaccacatccatttcctggcaccagccggcctgcttttcactgatatgaagtgcagaaggcattgaaacagttaagaagggtgaaataaatggaatacttatatgaagtacaattgttaataaaaagtagcatttgatattgtacaactatagataagatgacaagtgtgagataatatttttactttarttgacaataactttattcacaatatttctatttcaaataatttttttgcttttcatccaatattacctgagctcaataggaatcaataaaatgaa

SEQ ID NO: 837245 - DNA, 617 bp, Homo sapiens
gtcctgacgcctcctgttttcttttttaaaatttgcatamatttaagaggtacaattgcaattttgttacatggctatattgcctactggcgaagtgtgggattttagtgtatccatcactggaataatatatatggttcccagtaagtaattctgcatatgtgatgtattgatttgtgtatgttgaactatccttgcatctccgatataaaacccacttgatcacggtgtcttcttctgtctgtaaagttatcactaaggatcttcacaaccacttcctcttccattttaagagaactcagtccaagaattgcttcttcaaagaggctgtacctgattaatctaaagttacatccccaacatcatttcttctttgttattttgcttaaatttcttcagagtatttatgacgagatacatccattgtatttatattcttattgtatgtgtattacaggatggttgtgctgactctgctttatttactgttgcctttaccagtatttagaagagtgcctgggggctaaatggcagttagttttgtgttgaaagtttacatgaaatgaaaaatcactcttactttgttcaacaaaaacacaactacaaacattagatca

SEQ ID NO: 837246 - DNA, 589 bp, Homo sapiens
ggttaggttagctagataatcagtcaccaagttggtgaccaaaatagttaccgatgaaaaataacagactctttagagctagggctgtatcataaatttcaacttttcmtgtgttgctcaatacgcatagcatggctgattgtatgggagtcattgttaagaataataaaagtgtttagtccatttgatacaaatgtgtaatgtttaaaagtacatgaaaagatagataaaatatgcccatgacagctatattttaaaatatttaataatattgttttctgttcacaaaagtggagtttcctaattaaacatattctaaaaattattgcaaatcaataacttgaatatggcaaataatatcttgtttttgagtgcatgtctgtggtgcactgaatggcagagaagtcacttaggtgctctgattgtgggccagactggaatccaccctttaggatgttggggaaacatattcacaaatagaattccctaagagtgaggtcaggagaagctttttttctggtactgaaataaccataatgctctgcaggatcccagtgctggagaaaattattatactacaggaatctgg

SEQ ID NO: 837247 - DNA, 586 bp, Homo sapiens
agtccttatattcagtgtgatgggacaaacatagtcctactgctcaccccctgagtcactcaggaaattccaaagccaactgtctttacctaaactaagtctactgctaaagttgagatgaggtcagtttccacagatacacatggcatatggagcagtgctaggttcagtaaggaggaagacaatttgcagggtccactgctaactatatactttcttttaaaaagagaaaattttcagatactattatttaagacagagatttgaaacttttataaattgtccttaggttgtaaagataaagagagactattagagcaaatgttaattcatcaaagagcatgttaaaattgaggctccaccatttgaggcctttattttaagaagacagatgattcagaggcttactacaagataaaaacgaagacatttaatggttatctcttaaaaatatgggatgaaaaatgtytgagcccttatgcaaaaaaaaaaaaaaaagctggctttaaagtgaattttgagaacattccttctgcaaagcagatacttggtgctccacacatacttccccaataatccaagggta

SEQ ID NO: 837248 - DNA, 593 bp, Homo sapiens; identical to SEQ ID NO: 825169

SEQ ID NO: 837249 - DNA, 593 bp, Homo sapiens; identical to SEQ ID NO: 825170

SEQ ID NO: 837250 - DNA, 440 bp, Homo sapiens
ctctgtccccttacccatggaatatctcttgggacagcatctgtgttttgtgtgagcctggaccccaagaccaataccttggcagtgaccgggggtgaagakgacaaagccttcgtatggcggctcagcgatggggagctgctctttgagtgtgcaggtgagggggctggggtagaggcctgggagaggtcatattcttttgggagatcttaggaggctgacctgcagaggttgtgcatccaacagccacttagtgacatctcttttgtgccagctctgtgctgggccccagggacacggggcgaatactagtgtgttttgggcacagaggcaggaggcactaattggccaagggaatccaggaaaggccagagaaggccacattggtataggagcaggcgggcagaggtgtagagtggacagaagggggaaggcatagg

SEQ ID NO: 837251 - DNA, 440 bp, Homo sapiens
ctctgtccccttacccatggaatatctcttgggacagcatctgtgttttgtgtgagcctggaccccaagaccaataccttggcagtgaccgggggtgaagatgacaaagccttcgtatggcggctcagcgatggggagctgctctttgagtgtgcaggtgagggggctggggtagaggcctgggagaggtcatattcttttgggagatcttaggaggctgacctgcagaggttgtgcatccaacagccacttagtgacatctcttttgtgccagctctgtgctgggccccagggacacggggcgaatactagtgtgttttgggcacagaggcaggaggcactaattggccaagggaatccaggaaaggccagagaaggccacattggtataggagcaggcgggcagaggtgtaragtggacagaagggggaaggcatagg

SEQ ID NO: 837252 - DNA, 531 bp, Homo sapiens
tgagtgtgcatgtctttttcatataatgacttcttttcgtttgggtagataaccagtagcaggattactggattgaatggtagttctacttttagttatttaaggaatctccatactgttttccatagtagttgtactagtttatactcccaccagaaattaaagatgacacaaacaaatggaaacacatcccatgctcatggatgggtagaatcaatattgtgaaaataaccatactgcccaaagcaatctacagattcaatgcaattcccatcaaactaccatcgttcatcacagaactagaaaaaataatcttaaaatgcatatggaaccacaaaagcacccacatagccaaagcaagactaagcagaaagaacaaatttggaggcatcacattatttgacttcaaattatactacaaggctatacttaccaaaacagcatggtactggtattaaaatgggcacatagaccaatggaacagaatagagaacccagaaataaagygaaatacttacagacaactgatct

SEQ ID NO: 837253 - DNA, 575 bp, Homo sapiens
acttgcctatttgtcactaagcagccatctcagctatcagattgactgtggtagtattataaagcttgcattcaagttacccttagtttacttagcaatggccccaaagcacaatagtgatgctggccatttggatatgccaaagcaaatcagtaaagtgcttcctttaagtgaaaaggtgaaagttcttgacttggaaagaaaaaaacatggtttctgagagtgctataatctatggtaagaactaatcttctattcctgggattgtaaagaagaaaaaaaagttcatactagttttgctgtcacacttcaaactataaaaagttatggcatggtgcatggtaagtgcttagttaagttgagaaaggcattaaatttgcaggcagaagccatggatggaaacatgttctaactgacagaatgcaagttcagtacatctgtggtttcaggcatccaytaaggggtcttggaacatatcccctaaagataaggaggactactgtgtacatgttcaccaaagaatatacacaatatattgtctatggtagcactattagtattagcccaaaattaaa

SEQ ID NO: 837254 - DNA, 653 bp, Homo sapiens
tggcaaactacttatatcttcagtagaaatactaaaagatgaacctatcagaaataatgaagacaacgacttttcaagacatagacagtaaagtaagataaaaataggaamaacaaaaagttaaaaagaggggagatgaaattaaagtgtggagtttttattcattttctttttgcttgtttatttaagcaatcagtgttaagttgtcatcagtttaaaacaaagggttatgacatattatttgtaagcctcatgttaacttcaaatctaaaataatacaacataacacaaaaaataaagggcaaaaaattgaaacacaccgtcagagaaaatcaccttcactaacaggaagacaggaagaaaagaaggaagataagaccacagaacaaccaggaaacaacaaaaatggcagaagtaagtctttacttatcaataataacactgaatgaaaatggacagacttctccgctcaaaagaaatggagtggtgaaataaattaaaaacaacaacaacaacaacaataatcaacaatttcttgcctacaagaaacacactgcatccataaggacacacacagactgaaaacaaaggaatgggaaaagatttcatgcaaatggaaatcaaaaaagagtagaagtagctaaactgatatc

SEQ ID NO: 837255 - DNA, 562 bp, Homo sapiens
ataaaagaggaaaagggcaggtcaggtttgtcaggtttaacattaggaaaaatctgtatgaggatattttctgagaaaaagcagataagcattcatataaatgacagctgggaaataatgacagtacttttttatgtgtttgatcccttgtttcattcattagtttaaaaaacaatcatttatcatcaatgtgtgctggacactaagattagtcttgggggggtataaggggtttatatgaccttgggatcagtttttacagttttaagtttctatatacatgctgtttttaaaattaaacttcttttcaaagcatagaaaagaacacatagaaaatgcacaaataataagtaacagcttgagaaattataaaattaacagtctcatgtaaactacctaccagatcaagaaatgaaacagttctctgcagaagcccctcttgtttcctgccagctactgctattccaagtgtaaacattatcaaatttctaacaaagttttttatcttctaacagcaagrtataatattgcacgttttgagctttatataaatgacatccta

SEQ ID NO: 837256 - DNA, 545 bp, Homo sapiens
agcacatggtctcttgtgtytggcttcttccacttagcatgttttcagagttcatccatgttgtaccaggtatgagtgcttcaatcctttctattgccaactactattccatcgtatgaacagaccacattttgttgatccactcattagctgatggacatctggggtgtttcactttttgtctgttaaacataatgctgctctgaacattcacacacaagcttttgtacggacatatgttttcacttggcctttgcattctcaaagtgttttcacaacattctctctttcatgtattacatggctacttaattttccgatggagaaaagtgaggcttggggcagctaagtgactttctcacccactcaactaccctcagcaaaccacagtaaacccatagtgaagagccagtactcctttcataataccacactgcctatggttacggctccctctcctgtgaaataaatttcaagcgacagtgtgcagatgagggaaaacattttttaggtaaggaactccctaaatcattctcaatacgtta

SEQ ID NO: 837257 - DNA, 594 bp, Homo sapiens
ttaagtttgaaatgctatgtcaccaggaacgactttcttcaagatatgtggaatttaaaggacaggagttgtacacaaaaaaggaacacccatgttcaatgccctgagttagtagattgcagcagtcatacttgaagcaagaattctccttcgaaatgtaatgaaagtgttagcaatacccatttagaacccaaacagactaggtaatgagcaatatgttaattagacaagaaggggccaggaagaggaggtgcttacttagtaggaaagaagcccttgaatccaaaatacctgagtgtttgtgattcagctcaagaatcttaatactcccttaaatgtatatgcaagaatacatttagaatacttacagaatatgggaggtaaaagcagcataattaatagtaactatctcctcttttcagagctgctaccagagagaggcacttgcttttttgctatggtcctggaatgttaattttgagtatccatataaaataaatctttaatraaaagatttctttatatcatcatgaaggtcaagtgaaagtcaacaaatgataatccaatatactaatgaaatttctttattagtga

SEQ ID NO: 837258 - DNA, 475 bp, Homo sapiens
ccgtctcaaaaaaaaaaaaaaaaaaaaatatatatatatatatatatatatatatatatatatatatatatatatracatcatggtctaaaaggacttattccatctataggttttgaaacaagtcaaaagaccagttttcactaggaaaggtttgtatttcagttagtaaatataggtctggtgaggactgcagaaagagcttagccaaatattcacagaaggaaaataaatgtaaaaataaacttctaccaaatgtattcaacttgagagcaaatttctttcccaagtaaattctacagaaaacttgtatgtacctcctaacttatcaataatgaccccctctttcctgataactgaggaagcaccagtcagattacaagaggtttaatttcatacacttgtaaaatatactcatcccctaaacctctggtcacattaaagccaaaatacttaaggcaaagaaaaatccttcc

SEQ ID NO: 837259 - DNA, 475 bp, Homo sapiens
ccgtctcaaaaaaaaaaaaaaaaaaaaatatatatatatatatatatatatatatatatatatatatatatatatgacatcatggtckaaaaggacttattccatctataggttttgaaacaagtcaaaagaccagttttcactaggaaaggtttgtatttcagttagtaaatataggtctggtgaggactgcagaaagagcttagccaaatattcacagaaggaaaataaatgtaaaaataaacttctaccaaatgtattcaacttgagagcaaatttctttcccaagtaaattctacagaaaacttgtatgtacctcctaacttatcaataatgaccccctctttcctgataactgaggaagcaccagtcagattacaagaggtttaatttcatacacttgtaaaatatactcatcccctaaacctctggtcacattaaagccaaaatacttaaggcaaagaaaaatccttcc

SEQ ID NO: 837260 - DNA, 654 bp, Homo sapiens
acacaactttgaatccaaaaagtcctgttggaaagaaaagaaagagcatatttatttttacctccttcccctttatacttgttatatttaccctcccaaatttggattgaactttgagccatagctaatttccataattcagaatgttcctgtcctatggcaggagataccatttttggactaggggcgacaatgccagtaggactccatatgatagggacctcagcttttgtccaaatatattgtgtattatttaattgccaatggttctatcagtttgttacatttgttctacaagaaggccttctggtgcaattttctttaaagatccccttaggggactaattaatgatgattccataggaattattttatggcacctcagccttaacttgctatacaattttcccaagttcaagcatccccacctttaaactaaactctattttgtttatatttgaacttattcagatggaacctcagggttttaggatgggaatgattatattttaaactgtgccctgaaatcatatgcaaaacagcccatgatttattttttcggggaatactgccaaccaggcctgtgtgtcaatcygtaaacctccaacagcaggtcccaggcatattggggatatttatattctatggatatat

SEQ ID NO: 837261 - DNA, 360 bp, Homo sapiens
ttcaggtgaatcaggaagttggtgacatattttcaaaggcaggtgagtcatgttgtaggaaaaccacgaaacctgctcagcaggtgcctgccctctctgtccacagcggctgccgccctgrcctgtgcagtgcagacacttcccacaaacccatgctctccagggccctctggctcttatgtgtcccccctccccaacccccaaaacttactgcaataaaaatccacccctggccgggcaccatggctcactcctgtaatcccagcactttgggaggccaaggctggtgaatcgcttgagctcaggagtttgagaccagcctaggcaacatggtgtgaaatcccatctctaccaaaaata

SEQ ID NO: 837262 - DNA, 556 bp, Homo sapiens
attcatcatagcaaagacatggaatcaacctaaatgcccatcaacaacagcttggataaagaaaatgtggtacatatacaccatggatactatgcagccaygaaaaagaaacaagagcatgttttttgccagaacatggatggagcaggagactattatcctgagcaaactaatacaggaacagaaaaccaagtaccacatgttctcacttataagtgggagctaaataataagaacttatgagcacaatgaaggaaataacagatactgtggtataattgagtggggagattgggaagagggaagagagaagaaaagataactattgggtactgagcttaatgcctggttgatgaaattacaagtttacttatgtaacaaaccttcacatgcacccctaaacctaaaataaaagttaaaaaaaataaaattttttaaatgcaaaaagaaaaaagaaaaataaactcccaaatctttactcaatattaatcatgcctagctattggtgaacatcattctagatacttttctatgtgtgtatgtagataaatgaata

SEQ ID NO: 837263 - DNA, 472 bp, Homo sapiens
gtgagaagtggagggtgagaattggggtgggagttggggtgtcmcctcccaaaccctctcaccctcagattaagaagcccctcctatgggccctggaggaacaggcctttgacccaccccaaccccactggtgtcttgggcagggagatctcgaggtgggggcctcagctccccgtaggaccgtctagccctggaccacctgaccacagctacagtgggacaaggcccctgttgcctgtctgctgggggccgagcatggtatggaggagccagcagcccccgccttcatcacagaggaggaatccgaggcccaggagggtgtctctggcacccaacacgtgagaccctttgaaaatcccccgagtgtgtggggggctgggatgaacatctgggggcggcagcagcaggtggcccacctggccaaacacactcctgtgtccccttgtttttggcaatttcaatgaccaaaatc

SEQ ID NO: 837264 - DNA, 495 bp, Homo sapiens
cctcatgtcctcatcctcaggtgccctcccagcccttcaggggtcctgttttccagctgtgggcaggatgttgctcctctgccctgtctgttcacgactcagggtgccaaggctggtggagcctccctgcagccccaagggaggaggctggggccagagacgccctggggtggggcacgtctcttcccagtgaacctcagatccctcgggcgcccacgctccccactgagggcctggggccacagcactctgcctgtgaggggtgggcccttggaggcttggggacatgcacgcccacaggcacgtggggagagcctgctgagcgctgtctcagtgatggttccccacactggcccctgacatggggcttggtgtggcagcttgttggggaggtggtgcgtggagcaggatggggaccgggaggtggttgctgtgggctctgcggggcgtgagggccggtgtttgccccaagytcagtgcctgcctgtgaccaca

SEQ ID NO: 837265 - DNA, 592 bp, Homo sapiens
tggcctctccccagcattctgtctccagccgggagatctctacccagtgaaacagtgaaacaggaagggttccctggttaccccgcgcagggcgcagggcatgcagcgggggagtggctcgcttyttcagtgccccaccgctcacacctctaggggagcatacagacgggcaggctgtggggctctgaccccatggcagtgtctgggggtgaatgtttacagctcttgaaaccccagtgggagtgcgttaccgggtggtcttttagtctagcggtctgtaggtggctggtgagagtgagctcaattagacccctgccttataacaaggacagaggaatttctgtatcccagggtttcttgccttggtgtaccaaaaaattggatcacacgtgggcttggagaatgagtgcaaggttttattgagtggaagtagctctcagcagatgggggagccagaggggagatggttttcccctggagtcaggcaacattctcgggatgtccagcagcttgtcttcttccaccagtgtgttcctctccccacacagaggcttctgtctctgccttgctagggtcttgggtttttataggc

SEQ ID NO: 837266 - DNA, 610 bp, Homo sapiens
gcttgtatgtttcatgaagtacatgggtctgagtgcgtatttattttgtgagccaaggtttatgccttcttctataattttctttcaccgaaaattacctggagagctagaaactccatttgtgtcagygtaagaagctttagaatctatatccagaccaaggccatggaacaatgtagattcactcagtaaaaactcactagcggccttctttgtactagtctgtcacctttgcttggctttgggaagcttcaaactagggcagtttatgtttgggagtgaccagtcaaatagcaagacagacataggcaaggatgtaatttttaaaaatttaagtggggaatggtgaagcatgaatcaaaacagaaggtagtcttaccttcttggaactgtaaaataaatacatttgaaaaaggcaccctctcaaccttctgcgagtcagaatttttgctgccacccctcattttgaatctctattctgcattttttattcttttttttaggaaggaggaagaaaaatttctcctgaagaattcattggaaattaaaattaacttgcgtattttgtattctttggaatgtgatgaagactgatttgaaagggcagtgc

SEQ ID NO: 837267 - DNA, 443 bp, Homo sapiens
tattggaaatgcattctgtattgtgtgcaaaacagcatgtatttatgccaccttttatggttaggaaatacrtaatctagaaagattcacaagaaacagaatactttgctctgggaatggaaacagtacaagaagactggtgaaaaagattgactttcaccgtatacgtgttgcttcatatactttgtaaatatatgcttgttttagtagtagaaaaaaatcaatcaaataatgaaggagaaataaaacacattcttaaaatgtgcaggatgcagaataggtcatttaggaaactagggtcacgtaggacagaaagaattgcacggttgagtgagagcgtagggctggctgcttgtggccagagcgtaaacccgcacgaggccgctgggcacaccttctcctgacgccggcccagcatttcttagcttctggctattctgcaa

SEQ ID NO: 837268 - DNA, 442 bp, Homo sapiens
gcattctgtattgtgtgcaaaacagcatgtatttatgccaccttttatggttaggaaatacgtaatctagaaagattcacaagaaacagaatactttgctctgggaatggaaacagtacaagaagactggtgaaaaagattgactttcaccgtatacgtgttgcttcatatactttgtaaatatatgcttgttttagtagtagaaaaaaatcaatcaaataatgaaggagaaataaaacacattcttaaaatgtgcaggatgcagaataggtcatttaggaaactagggtcacgtaggacagaaagaattgcacggttgagtgagagcgtagggctggctkcttgtggccagagcgtaaacccgcacgaggccgctgggcacaccttctcctgacgccggcccagcatttcttagcttctggctattctgcaacaattaaag

SEQ ID NO: 837269 - DNA, 658 bp, Homo sapiens
ttgttgttgttgttgttgttgttgtttggcttgtttgtttgctgttgagttgtaggagttcattatatattttagatattaactccttactagatatgtggtttgctaatattttctcccattccgtaggttgcctttcactttatatttttttttcctttgctgtactgagcttttcagcttgatgtcatcccacttgtgtatttttgctttcattgcctgtgcttccgtgtcatattcatgaaatcattgcctagaccagtgtcaggaagctttcccctatgttttctcctaggagttttatagattcaggtcttacatttaaatcattaatccagccaggcacagtggctcatgcctgtaatcccagcactttggcaggccaaggtggttggatcacttgagtttaggagtttgagaccagcctagccaatatggtgaaactctatctctactaaaaatacaaaaaaataaaataaaataaaatagccggacacagtggcggctgcctgtgatcctagctactcaggaggctgaggcaygagaattgcttgaatctgggaggtggagcttgcagtgagccgagatcacgccactgcactctagactgggtgacagtgagactatatctccccccaaaaaaaaaatcattaatcca

SEQ ID NO: 837270 - DNA, 627 bp, Homo sapiens
agccccagggtaaacatccctacctgtgcgcactactcagcatatctctttgcagagtgtccctgccgtggtcctctggagcaaagccccagttacggctgtcttggtatttccccatgactagtacaggacygaacaactgtagacattgaaaatacatgtgctgagttaaactcaaagtaagtaagcttaacttacagcatgaactgtttttctttccagtgaaacactttttaatttaaaaattgtattttaaaactttgcatactaccatatatataaaataatactactcgtcataaacagaagattaccagaaaaaatgaataccatgaagacaatacaataatggttacattctaaccagatattgatgctgcccaaggtatagacacaggcctgttcttcagaaaaaggaaatggggtgggaggcactatgaagtgttggaagggtgctaccgcgtactaacaccaatgagagaacaactaccctactctagaactccaggttatgtaatgctgtgtctatgtgccacccaaaatgaccttgcctaacaccagtggaatgtgttgcacacacagcaaggctggtctggaggatctttaaggctactatctaatagaaag

SEQ ID NO: 837271 - DNA, 582 bp, Homo sapiens
caaaacaggaatgtcaaatctaagagtaccggggtcctccctcaaatatataaagagcawttttttttaaatgctgagatttataaaactatcagggacaaaatgtaattctattatgaacaaatacttactgagcaccacttggtgcttaagatacacagagtaaagatgacatatgatccttaattttcccaggtgtattatcatagactcctggtgttttacaaagtggaaattaaagtgaatggctacagttttcttctgtagttcttatgcaaaaagactatattcctcaaagtgcaccatctaagaagtatttatggagtaaatgatgtatccaagctgaaactttcctaacgaatgtattattcatttccaatatcagttgcaaggaaatccgtttggtcagtatttgctattctatgtggaaggtcagtgtacttggagattgttctttggtgctgtgacgttgatgagaaagtgatcctaatttggattttgtattgggtgtcattcatatggtgatttttctgctaaagaaaagccttcacatcagtaacatgaaggatttaatactcagtt

SEQ ID NO: 837272 - DNA, 567 bp, Homo sapiens
gcccttttttttttttttttttaaatagtatgcccatctgttggcctcatgagcaagcagctgcacgagggcmtgagtatcaacattcttaatgtcaggtggttgtgaaattttgcatttgtgacaaaaagtcttcagggccgtaattaacagagtagggaatttcaattcgaatactataacttctttaaaactatgcccatctgctggcctcatgtcctcaacagagcttgagtcctgaaagcaacaggaaaggaaaattacaaaatgtaattgttatttcaataagttttgcagagaggaggggacatggtggtgatgaagtggtgaggaaagagggatgggcatgttcgtaatttacaaaggaagtaagaggagctgttataattggatttcaattctgcttttcaaaatgttctcagtaggaccaggcacagtggctcacaactgtaaggactttgggaggccaaggctggaggattgcttgaggccaggaatgcaagaccagcctgggcaacatagactctatctctacaaaaaaaaaaaaaaaattctcagtagaaattg

SEQ ID NO: 837273 - DNA, 544 bp, Homo sapiens
gtgtagatgcaattttcttattgcatttgaacttccagagagctcctggtgctgtaragttctctgacaggacagtctgattctcatcatgtgtattaattagtaatttgtggttaaagacatcatcttggaggtccctgttttgtttgacatcctggaatacttctacactgcgctactgcaagaaaaatgattttaacatattttagattttctgtaatttaaaagaagattatttatactccaaagataaaatcagtagcaattacaagagaagttcaaaagtaacttttttataaatgtcaagtcaaggcgggaaagcaattatataaagtgattcaatatcatattggactcactcaagattaagaaatagtggcatttttcttgttttgaccatgaagcaaaatagttaagggtaaaggaacattatgtaatttattataaaataaatataatatagcccatatgcactaaaaaaatccagtggcaatctcctaatactgaaatgactcatttacaagccaaatgtaaaatgggcatc

SEQ ID NO: 837274 - DNA, 589 bp, Homo sapiens
tggatttttacacctttatttctctttcctcaccatttaaagagacagacttataaacagatgatcatgtgggtgatgtcatcagyacaggaatgtcatcagtgcaggaatagttgagtgccatgagccaccctgcagtgttgcctgttttgcacagttctaggggccaatcttgggttcaaggtggagctctactgtgtctatgtcactcatgtctcatctagattaccatattatccctagctccatgtttgagtctgtacaatcactgacagtaaacacagctgcagaaatcatgcccctttatggtccctcacaggttcgagtcatgccccagggctatttcaataaagactggtggctgctatatccagtcccatccagatcttttcatgctcactgcctgaatgaagagaagagtctgaggtctcagtgactggaagggaagctgcatgaaggaaagctgccctcttccttccgattttccttgggtactgaacttacttgactccatgttcttttatttctacttctattgactttagatcctcatctatagcttctgctctacccacactcaaccctttgc

SEQ ID NO: 837275 - DNA, 606 bp, Homo sapiens
ataactggtacataattttcagtgtggatattgaagcctcaagttagaaattgcataattactgtgtaattatgtggcttttggtatgtatacacactgagtggctgaagaagggcttggttcattttgtacgcttataaactattcacctgctttgctggctttcttgaatttgcattcgtatattcaaataatacctcattttatgagcatttgcccatagccaaaaaaaaaaaaaaaaaaggagtctaatgaaaacacaaccgagtcattggtctgttttacaatgttcccgaaacatgaatctcatttctaacctctagatcttttggtgacataatcatttcacttgaattttggaagcagagcctgtttttttttttttttctttccgacttttattttaggttcaaggggtagatgagcaggtttgttacatcagcaaagtgcatgttgtgtgtgcttggtgcacagataatgttgtcacccaggtaatcggtataataccgacaggtagtttttcaacccccaccccactcccgccctccaccaccatgtaraccctggtgtctattgttcattcccttcttcatgtccatgtgtact

SEQ ID NO: 837276 - DNA, 561 bp, Homo sapiens
aataaattaaactctaatttaaatttagcagaatagattaaaaacaaaacataatccaactatacacagtctataagagactcactttaaattcaattatacaaatagggttaaagcaaaaatataaaaaaattaattgcaaacagtactcaaaagagaactgaagtaactgtattatcagacaaaatagacattaaaataaaaatcatggagtgacaaagaaagacattatgtagtgataaagtttcaatcaatctagaagatataataattataaacatataagcgcctaagaacagataaccaaaacgcataaaaccaaactgacagaataaaaggtagacaaatcaacaattatagttggagcctacaatacttcactttctgtaatggatagaaccactagacagaaagtcaatgaggacgtagaggatgtgaacaacaccatataccaactattaggttggtgcaaaagttatcacggtttttgccattactttccaaagtaataggggyaaaaattgcaattacttttgcaccagcctaataagtcacaatatg

SEQ ID NO: 837277 - DNA, 483 bp, Homo sapiens
caaggggtcagggagttccctttctgagtcaaagaaagkggtgagggatggcacctggaaaatcgagtcactcccacccgaatactgcgcttttgcgacgggcttaaaaaacggcgcaccatgagattatatcccgcacctggctcagagggtcctacgcccatggaatctcactgattgctagcacagcagtctgagatcaaactgcaaggtggcagcaaggctgggggaggggcacccgccattgcccaggcttgattaagtaaacaaagcagccaggaagctccaactgggtggagcccaccacagctcaaggaggcctgcctgcctctgtaggctccacctctgggggcagggcacagacaaacaaaaagacagcagtgacctctgcagacttaaatgtccctgtctgacagcttgaagagagcagtggttctcccagcacgcagctggagatctgagaacgggcagactgcctcctca

SEQ ID NO: 837278 - DNA, 561 bp, Homo sapiens
gaggacccctgtagcagaaacgaggagacaacggagcmagggatgaccagagagagtgggagagagagactaggaaataagtgaagaacattttgaatcagaaggtagtagagagctttcttgacagggattctgatagtttgagtgaaatgaggactaaatattgaccactgaatttggaaacattcagattaactatgactttgaccaaaactgcttctgtggaatggtaagggcaaatgcctgagtgcttgactggcttgggtttaagggaaatagaagtaacgagggaaaaggaatataaactactctgtgaggaactttgtggtaaaagcaagtgaagaagttaggcatcagctggaaagatgtgggaaaatagcacagatattgtgagatggtaaatattttaggatgtttttatgaatacagaaaagttgcattacaagaaaatagcaggcaagaaaaagacaggtaaattgcagaagtagtgtccttaagtacacgtgatgcaatgggatccattacacaagtggaaccttagagttaaatgcaagcacaggc

SEQ ID NO: 837279 - DNA, 534 bp, Homo sapiens
gtaaggaggagagaatttaaggcaaatatgaacgagaggtagaatgataggaagttctttcatgtggttatggaattaactgggtagggatagaaggttattagagagcaaacaaatctcagagtatgctctaaaggagtttcagttgaatgggttggtgatactgtgtttttaaagatgaaagttaaagcaatagaccttttgaaataaaacatataagtgtatttttggtttatttcctaaaaacttaggaaatgttttctagggtcattcagcaaatctgtatgctataatttgaatgtgttccccaaagttcaggtattggaagcttagtccccaattcaacaacgttgaaaggtgggacctttaaaaggtgattagataataatttctcttccctcatgartggattaatgtctttaccatgagagtaggttagtgtattaggctgtccttgcattgccataaagaaatacctgagactcggtaattcataaaaaaaaaatagatttaattggctcatggttctgaagg

SEQ ID NO: 837280 - DNA, 602 bp, Homo sapiens
gtccatgatccattttcagttcattttcatatatggaataagacagggatccaacttcacacttttgcacatggatatctatttgtcccagcatcatttgttgaaaagaccattgtttctcccactgaattaccttgccacccttgtcaaaaatcaactgaccataaaagtaagggtttactttctggatacttaattctatttcattgagctaaatgtctatcctatgccagtatcacaccatcttgattcacatagctttgcagtaaattttttaattggaaaaagtgagtcctccaaattttttgttctttaacactgtttggctattctgggccctttacattcccatataaattttagaatgagtttgttactttctcttttttgttttttttgacagagtctcgctgctggccaggttggagtgcagtggtgcgatctcagctcagtgtaacctccttctccctgactcaagcaattctcctacctcagcytcctgaatacctgggattacaggcatgtgccaccacgcctggctaatttttgtatttttaatagagatggggtttcaccacgttggccaggctgttctcaaactc

SEQ ID NO: 837281 - DNA, 562 bp, Homo sapiens
agcttaaattagataagattgtattgtcattatcatcagcgccaacagaaattcaaacaccactaattcattccattagactcttctacggtcaattaaataagatctaattarcaggtgatattgcggattttatgtgcaaatatacccagccagacatggttttacaagttatattaaatatttgaatcgttgctaagttgcttattaggtaccagattttggaaactgctagaagggggagattaacgttttggaaccatattctgaagactatacccagagggctgtcataaccaatgctgttttataagagtgttcatagatttgtgccaccctttggtgaaccacagaagagaataagtcattgtgttatgtaatacacagtggcttcaacaagccatcaagacaattcttagaaaggacctcagatttttggtcttattgaataactccatgattggcactcaagaacacaataagaatactgctacatcctagaagagagaaacataactatattctgaggccaaagattttggtctactgggaaaaaaaacaa

SEQ ID NO: 837282 - DNA, 602 bp, Homo sapiens
catacctgtaatcccagctacttgggaggctcaggcaggagaatcacttggacccagaaggcagaggttgcagcgaagctgagatcatgccattgcactccagcctgggtgacagagcaagactccatctyggaaaaaaaaaaaaaaaaaaagaaagaaaatttctcaacagatcagaagaggactatctctaaaatgaaataaataaataaaaactctcaacctcaaatatcatgtcccattaagcactaactccaagataaacataaagattttttcaaacatcaaagtctgacattatttactactagcaaatgatactaaatgaccctcaagacttgctgcaagctgtgtctcttggaccaagaccagcagcatggacattatctgaatggtgttagaaatgcagtatctcaggtcccacctaggatttctcaaagtttcatggctgtaagtcacctagtgatctcgttaatgtgggagtttgtttctttgtttgtttttagagaaaggatcttgttctgtcacccaggtgggaattcagtggcactatcatagcttactgccattcaaagtcttgggctcaagcaatcctcttgcct

SEQ ID NO: 837283 - DNA, 602 bp, Homo sapiens
catacctgtaatcccagctacttgggaggctcaggcaggagaatcacttggacccagaaggcagaggttgcagcgaagctgagatcatgccattgcactccagcctgggtgacagagcaagactccatctcgraaaaaaaaaaaaaaaaaaagaaagaaaatttctcaacagatcagaagaggactatctctaaaatgaaataaataaataaaaactctcaacctcaaatatcatgtcccattaagcactaactccaagataaacataaagattttttcaaacatcaaagtctgacattatttactactagcaaatgatactaaatgaccctcaagacttgctgcaagctgtgtctcttggaccaagaccagcagcatggacattatctgaatggtgttagaaatgcagtatctcaggtcccacctaggatttctcaaagtttcatggctgtaagtcacctagtgatctcgttaatgtgggagtttgtttctttgtttgtttttagagaaaggatcttgttctgtcacccaggtgggaattcagtggcactatcatagcttactgccattcaaagtcttgggctcaagcaatcctcttgcct

SEQ ID NO: 837284 - DNA, 564 bp, Homo sapiens
cctcctttcatcacaaaaaagcaggtattcttcaaagtcattagtttggcccttacttttactcctattttctccctcttgataatctgctccagttaattacttccattattttcttagagaagaatcacctagattgcttcttaataaaatttcagggcctctcactggggcttctaaaccagcatgtccagtttgggacccaggaatatttatttctaaaagacctcccacacgctaccagataattcacacacagccagcacacacatttttatttgggaagtagtatagttgattagaaggtagttctaatgtaggtctctaaaattgactgttttcttagtcatagtaggctaggtagaaataaacctccaaatatcattgacttgaagaaagaaaaacttgtttcttgtttgtttgtttgcttctatcacagtccagtactgaagttggcaatgyccctgaatgtgattcagggatatgagctgcttcctttgtcggactttggtttctcaatatacttcacttccaatcatgtgaattgtgcaggaaggagaaagt

SEQ ID NO: 837285 - DNA, 584 bp, Homo sapiens
ggagatctggctcccatttgcagctttgcctcaaattaagtgacttggcttaaattattttacctctcctagactcaagcttcccatctataaaagagtgtatgatccagcaatcctgctgttaagaatatatccaaaagaaaggaaatcagcatattgaagagatgttgacacacgtactcatgtttatagtggccctattcacaagagccaaaatatggaaccaaactacctgtccatcaattgatgaatgaataaagaaaatgtggcctatacacaaaatggaatactattcagccatgaaaaagcaggaaatcctgtgacaggaaacaacatggatgaaaccagagataattatgttaaatgaaataacccaggcacagaaagacaaatattgcttgttctcactcatatgtgagagccaaaaaggcagatttaaaagaggcagagagtaaaatagtggttaccaaagcttgggaagggaggagasaggggaacgaagttagttaatgggtacaaatgtacaggttgagagaaggaatatgctctagtatttgagagtatagttgggaaattatatttaa

SEQ ID NO: 837286 - DNA, 657 bp, Homo sapiens
tctctctgagcattgccaagaataggatccaggtcagcactggagaaagcgtttgctccaagttctcatcaaacagaatttccacttgttctccaaacaataaatcctgaaaggaacatctcgcatgcactttmgtttactgagatgactgttcagcggcacacatcgttgcctggcatcattgcaacatgagctatatttataatccaatgtttcatctaatgttcaatagcacatggtgagtcaagaacctcctaatgttagtgagaagaaatataaagttataaacccagactaataaataaggcatcattttgggggtgttatgggctgaattgtgtccctgcaaaattcctatgttgaagtcctaattctcaatatctcggaaggtaactatatttggaggcagagtcttgaaataggtaatcaaggttaaatgaggtcgttagcgtgggcactaatctattatgattggtatctttattagaagagagatgaggacgcagaaaatacaggtgaagggacaactatgtgaggacacaatgagaagatggccatcttctagccatggcaagaggcctcagaagaagctgaccctatgacacctcagtctcagacatctagcctccagaattcagaggaaattaatttctgctc

SEQ ID NO: 837287 - DNA, 606 bp, Homo sapiens
agcatgctgcaaggactgaataggtagcaggaagaaaagtgcctaagagctgggtgcggtggctcacgcctgtaatyccagcactttgggaggccgaggcaggcagatcacgaggccaggagatcaagaccatggtgaaaccccgtctctaataaaaatacaaaaaattagccaggcgcggtggcaggcacctgcagtcccagctacttgggaggctgaggcaggagaatggcacgaacctgggaggcggagcttgcagtgagctgagatcgtgccactgcactccagcctgggcgacagagtaagactctgtctcaaaaaaaaaaaagaaaaagaaaaagaaaagtgcctaaaatatagcaaaattctccactgttaaattatcggaaaaaagttcctttgatagaaaggtactgaaaaggctaagagaattggcccgaactggcaatatctcctcactatctgcggctgcctatttttaggggtggcacataattactggttggttttctgtttctaatttaactgtgtaataatttgttttgattctcagtttattcatttagctctgcaatgttccttttattctgttattttattggctca

SEQ ID NO: 837288 - DNA, 581 bp, Homo sapiens
attagggaaggaataaataaagatgaaatgaagcctttcatttttctttttcttaatggatctaacagataatagtttgttcaaagtaataatagtaaacagtgaattgtgtggatgtagcacagagataaatgaaatgaatgacagcaattttataatgagtaggaaggagaaactgtaaacactctattttaaaacctttaaaatgatttagcatatttggagacgaacttggattgttgtaaatgtatgctgcaaactctagggcaatcgctgaaaaacattttaaaagagtaaaaattgagtcagacaaaatgctcaactaaaaccagatgaggcagaaaaagaatgggagacaaaaaaaaaaaaaaaaaaaagaaagaagcagaaacaaagatatttaatagaaaacagtaagaaacttgttagatattaatccaattatatcagtaatccctttaaatgtcaatggtctaaatacatcaattaaaatagtgtccgagtgaagaagaaaataagacgcamctatatgttgtctaccagaaactcattttaactataaaaacacatatagataaaag

SEQ ID NO: 837289 - DNA, 576 bp, Homo sapiens
gaccacatgattgagctaaattttcagcatccctccccttcttggaggttaagcctcaagttccagttctccaatcacttggttggtttctctggcaaccagcctccatcctgaaaccacttgagggaccycttccatgagccacttcattagcataacaaggaatttctgatttctgtcactaagagtttttgaagctctatgtcaggaaccatggacaaagaccaaatagctactttgtattatttcaatagctatcaactagagaatttcccttgccattctccatttgtggatccagatcctctttcctggtttatcttctcagttgatggatggtgtcctttattacagtttgggaaagggagcatagcaggattttgaagaccttatttttacccttacacttgatgaatagtgtggctaggaataagttgaatactttttcttagaattttgttgtttcttttcttattccaatgttccagttcccaatagctttgttttgctctctgaatgtttcttgttggaagtatctgatttttgttagtatttttaaagcaatgccgttgctct

SEQ ID NO: 837290 - DNA, 375 bp, Homo sapiens; identical to SEQ ID NO: 822386

SEQ ID NO: 837291 - DNA, 536 bp, Homo sapiens
  misc_feature 515, 516, 517, 518, 519, 520, 521, 522, 523, 524, 525, 526,527, 528, 529, 530, 531, 532, 533, 534, 535, 536: n = A,T,C or G
cccactccagacctaccaaagcagaacctgtgagggtggaagcccaaccatgtggattttgacaagcctcccagagaattctaatatatgctcaagtttgagaaccacrgctcgattgcattttaaagcaattaggccaaggggaaatatccttgttcttacataaaaccaagatgaccttaactagcattggctcctttctttcaacaggctcaaagtgaactcattttcataagaattgcattgtttaaataaatatgaagtttaaactgtatatatcctgtcccatgccaataagtccaatgcatacaaatcactttaaaatccacccatggagatctgtactcagtgatgttgctagaatcactcctctgttagatatcaatagtggcagatgataaactctcttctgcaatgtgacaccttctttactaatagaccattacgctgtctgaatcagagtttcactgattaaacaggaaatgccatctgtagagtctggtatccttccaggnnnnnnnnnnnnnnnnnnnnnn

SEQ ID NO: 837292 - DNA, 580 bp, Homo sapiens
cgctgctttgctctcttcccagcaaagtctggaaaagttctctctcctcttcagtctgtgagttgcacayggccagagacaatctctcttgttgacagctctgtgcccagtgacagcatggtgtctggtatatgaccgggagtccatgatggatggatggatgagtgaacaaataagaaagggaggtctggagagagacaggaaggctggacaccatgctggaaacttgcatgttcatgctttcgtgtgatcttgacaccacatgtaaaccgtgttaattccttctgtaaatgaggaaagtgaggcctcaagatggcttagcttgccctctgaataatagagccaataaatagtggaggctttttccaactggggcattccagcttcacatccagctgtcttttggaagttttttgaggacccaagggtgaatctggacatccgcttgagaagcccaatgctaattggctatgtgcaaatgtatcacatcttgtatgagctaaagtcataaatttatccctggctgaatgtttgctccagctcagtctgaggataactatatcctcgggagagaaaggag

SEQ ID NO: 837293 - DNA, 635 bp, Homo sapiens
aaagcccaaaataaagagtagtactgtactcaaaacatcttcctttattattttaaatatatttgaatttaatacaaacatataggggaacagtaaataaaattcaattcatccattctttgaacatcatccaacttttctatagatatttttattaaaacaaaaacacccttcataatatttttatgtcttcttcatctgtttttaaaatgttatttgatccacacatccttcaaaaagcaaagtgaatgtttcaaattataactttcaagtttacagcattttcaaaggctttgcatttggagaaaattttatattcatttgccctggaagaataatcagggttactttgaccccacaatacgtggaagcaaacttaaatgcaataacttccaataaccttgataatatatcatacttttccatgtaatttttccaaatattttcaacccatattatttttcatgggtaatagaaaaaaatattttcagaaaaaagaaacaaattgtaagaaatcttgtgatttggcataatttggaagaaaaactatgaaattaaataatttatttctaacagatayggtttggctctgtgaccccaaccaaacctcaaattgtagctcccataattcccac

SEQ ID NO: 837294 - DNA, 560 bp, Homo sapiens
tttccccatacggttacatttctactgcagcatcatgtttartggctgaataccattccctcttattatttcttcttatggaaggaattaaacataatttatttaaccaggtaaattgctactaatcttctgctgttatgaataatgatgaacaaaaatatcctatggagatatcaagaccaaaatacatgttgaagaatgttcactaaactctttgtttgtaataatgataaaatgaaagcaacctcaatgttcccaatgttgaggagtaattaaatatattatggcacactcacacaatagaatagcacatagccattcaaaaatgagataactcttcaccaaaataaaaaggtgctcatggtatatggttatgtgcaaaagaaagtgtgtataatgtgattccattttttgtgtgtgggaacaagtagtaaatgtgcatatttgtgtatatgattggatacacttaagaatgaggtctgaaaggatacccaccaaacatctgagcagtggttactcctagcactgaaaatgagggacagattctgtcagaataggta

SEQ ID NO: 837295 - DNA, 599 bp, Homo sapiens
gtgcaacctaagaaaactcagaaatttttcctgcctacaaacccatagagttaggaaaattacaagaaagcaagctcatataaagtttggtcgaggagcaattttcaaagtatgtcttaatatgtgtgctgatttagcctaattcctttcacttatagtgcaattttatgctttaaattatagctccttagtacagcaggattgctacctttaagaaacaaacaaccaaaaagcaagactaaactccacttcacaaagatttatgtaaattacttatgtccaacttagtaatgtaaggaaagcacactactacattgcagaaagtttatttttaaattttaacttgacaatttgtccaacccatacacgacatgccctgtacattcttttcaactgggactttatattatttggatttatagtctcacctttttgattaaataagtcaatttaggctaaagattatggacatatttgtgggaggaaaggggtgcggcaaatgccatgttaattgcacaccagaactgctcctggggagmataagattcctcacaccaaccaatctgaggtagtgtgttttcttaggtggggtttcccag

SEQ ID NO: 837296 - DNA, 534 bp, Homo sapiens
agttacttgaaaaccacaatgcttactttttattaattttttttacaaaatttcaataactttggtataacacaatacttactcttgatatcagactctggtctgccttctgtctgatacattctttcgtctcatcctcatctggtttattcctactaagttcccagcttaggcagcacttctctgaccccttctaggttaaatagtgctatttgcttccataatactgtacttcctttatcactcttctcttactgttgtttattcagttctatctttctgataagttgtaaggatagttcctggagaacaagatgtatgtctattttgtttaccactctatattcagcaacctcacacagtgtttggcaccaggaaagtattaatcacatttgcggaattatcttttttttaagaggcgaggtctcattgttgcccaggctggacttgaactcttgggctcaagcgatcctcttgcctyagtctcctgagtcactggaactatagacacatgccactgtgcccagcttacat

SEQ ID NO: 837297 - DNA, 501 bp, Homo sapiens
ctgtgaggcagttattgtatctacttactaatcctgatatctccagtacttcacacagggtctagaataaagtagctgcttattatatttttgactgaatgaatgactgaataaatgaatgctacctttgacccaagtcagtcttaccttatttgcacagaacccctgtaataaactggcatgatatatgacaccctcaatagtttgttctcttttcccataaactatgcctcaaaatgcaagaccctaaaatcttaaactatagctggatctgggctcaacctgctgtatacctgtttggattgagtctgatcattatgctttcttaagaaaccaaaaggtgccattttcacagatccttgcaaatagtgcttctaattttccctgcccacccagtttcccatcctttgttttccaaayaggtagttacattgctctccaagtatcacaagctgctctggatatgtacttgtgaaacagagaaggcacagatgaaaacaa

SEQ ID NO: 837298 - DNA, 501 bp, Homo sapiens
ctgtgaggcagttattgtatctacttactaatcctgatatctccagtacttcacacagggtctagaataaagtagctgcttattatatttttgactgaatgaatgactgaataaatgaatgctacctttgacccaagtcagtcttaccttatttgcacagaacccctgtaataaactggcatgatatatgacaccctcaatagtttgttctcttttcccataaactatgcctcaaaatgcaagaccctaaaatcttaaactatagctggatctgggctcaacctgctgtatacctgtttggattgagtctgatcattatgctttcttaagaaaccaaaaggtgccattttcacagatccttgcaaatagtgcttctaattttccctgcccacccagtttcccatcctttgttttccaaataggtagttacattgctctccaagtatcacargctgctctggatatgtacttgtgaaacagagaaggcacagatgaaaacaa

SEQ ID NO: 837299 - DNA, 400 bp, Homo sapiens
  misc_feature 1, 2, 3, 4, 5, 6, 7, 8, 9, 10, 11, 12, 13, 14, 15, 16, 17,18, 19, 20, 21, 22, 23, 24, 25, 26: n = A,T,C or G
nnnnnnnnnnnnnnnnnnnnnnnnnnggtcaatatatgttaactcgcttagactagtgccattttagtttaggttgttcggaggttaaattatgctccaaggtcaccccagccaaaatttttaatrcaatggtaatgggttagggcgagtttctatttgccttaatgaattaaagctccatagggtcttctcatcttgtttatatcccgccggataggtcagtttcactgattaaaagtaagagacagctgaagcctcgtgtggccatttatacaagtccctatttagagaacaagtgattatgctacctttgcacagtcaggataccacagctgttgaacatatgtcactggggacatgtctaatactggtaatgctagaggtggtgtttttggtaaac

SEQ ID NO: 837300 - DNA, 511 bp, Homo sapiens
ttatattaacattattgcttctattaagtaatagattagtccaacgtaatgttaggagttcagtagagtgattagaatttaaaatagatgttgagcttgaatgctttcttaattggtggctgcttttgggccaactatggtggtaataatgtttactctctggaggaaggttatttcctagggtctaaagatctgtccctcttcagactagcagttaaacttacaggggactaagtaattctgtgggtacgtagacggctaggcttgatgtggctagtataaatagaaggcctttattaaaattaattagaggatctggtatagggagttgtctaagattctatcttggacaaccagctatcaccaggctcggtaggtttgtcactgctactcatgaatcttcccactrttttgccacataggtaggtgtgctcttcagctgttcttgggtagcttgtctggtttcaggggacttggctatgggtctctgtgtaaagttagttatttctag

SEQ ID NO: 837301 - DNA, 603 bp, Homo sapiens
ttttttctctttaccttttttkgctttttctccttttctgctatggattgtatatccattttagtgttttaccatctacttttaaatgcgtaattaagtgtaaaactttctaataaattcttaaagtattcagtactgaacatagtatgaattttaacacattatatctaattgaattattgctgtttagattttcagcttaagcataacatattttacagtcaatatttaagctacttaaatttaagttaaattacacactaaaattattttgttaatttggggttcactgttgttttaggtgttcattactttctctctggctttactttttgcagaagtacatgtttcaatattgctttcattgaggctgtatgtgagtggtgaattcttgtggtctttgggttcctaaagtctcttattgctttcattattgaattattttagatggcaataaagtttaacaattatttttcttcatcaatttgaatatattattttactgtcttctgacatctagtgttgtgaatgagaagtccgctgtcaacatggtgattactttggaagaaaatctgatgttttatctggtaactttgaagattt

SEQ ID NO: 837302 - DNA, 587 bp, Homo sapiens
aagtatttacaaattaagggacatactactaaataactcacaggtcaaggaaaattttaaaatattttgaattaaaggctgatagcatcttaaaatttgtggaatgcagctaaagccatgcttaaagggaaatttatagctattatagggcaaaagaagtcagacacaaggcgatatattgtgggattccaatagatgtaaagtacaaaaacagacaaaaaacaaatgctcttggaagtcaggatagtggttcccctggggcaggtgtagcccttttaaggacgttatattagtctgctagcactgcaataacaaaatattaatctaggtggcttaaataacagacatgtattttctcccggttctggaggctgaaactctaagatcaaggtgcaggtagggttggttatttctggcctccctcctttgcttcagatgtctgccttcttgctccatcttcacakggcctgtgacctgttgacacacatccttggtgtctctttctcttcttattaggacaccagtgctattggattaggatcccatccttatgagctcattaaccttaattacctttttaaaggccc

SEQ ID NO: 837303 - DNA, 546 bp, Homo sapiens
tttttttaaaatgttatgtatttcatatttatcccaagcttttcataacacaaacaacaaacattttcagaaaacactggaaaatttttagtttaaatagaaattattgagaaaagttatgctatgatgtttgaacatgtaagctgaataaaaataaacaaatgtcaaagatcagaaagttgtagatttgtggtcttatttctaagatctctattctattccattgaaaggattccctatttaataaacggtgttgggaacactggctagccacatgcagaaaattgaatctggaccccttccttacacctcatacaaaactcaactcaagatggactgaagacttaaatgtaaaatccaaaactgtaaaaatcctagaagaaaatctaggcaataccattccgcacataggcacagtcaaagatttcacaacaaaatcaccaaaagcaattgcaacaaaagcmaaaattgacaaatgggacccaattaaactaaagagcttctgtgcagcaacagaaactatcatcagagtgaacagagatccta

SEQ ID NO: 837304 - DNA, 603 bp, Homo sapiens
caaataggagttacaattctaagaacacattaagccttctcccagtcattgtataaattcaagatgttcttctttcatttgactgaaaacacaatttaagcatcagcttcttggttacctgcctctggacaaaacagtacctcaagcctactagagactacatatctgctgcatgtatcatgggttgtgactttttttctaaatagcagatcttccacggcagggccaatgtctctgcagtttgcttaccctttccccatcttcacaacatgaatgcttgagttgtgggttcaagacaggaaaaatgggacaggtggcgccttatcaattcccctttaataagaaatccgaaagctttctctgaagctttcagcaggttaaggtttcttctcattggctagacctgtatctcccggctccacctagtggctagcatgttttcctggggacatccctgccctaacaaaattggggttttgttagcacctgagaaatgagagaagggatcragggaaggcaactaacagcatagaccacaaaatcgtagaactcatcttggataaagtgaatcacatagacaaatgtggatataaaaataatttt

SEQ ID NO: 837305 - DNA, 630 bp, Homo sapiens
tgtatgagaattgtagaaatgtatacatatgaaaatgttatatattatatagaattgtatatatgtatgcatatatgattatatgcatataaacattgtatctgtttatacctaagtcacatatattggctcctagccaaaaatgtgaatagacacacacacaaacacacatgcacatacccacactacgacattgctcaggacagatcacagcagtacctgggtactgatcacactgtccaaggaactgaccatgctcctctggaaagctcacattactgacacagacaaggaactgcagcctcttccctttctcaagggaagagctgcccaaaggagattgagctgcagattcaacgcagttgttgcttcccttggtgaccatgcacttgttcccacccaccaaaactctttttccttgtcctgtacaaaatgtcattttgttaataatagaaaaccaactggaagaactttgttttttaaatcacagacacaatagaagaacacaacatgtttttctattaatcttcacattgtatttgaattaggaggatgattctgtctcattttgcaaatggtgaaatctagaaatcccatatgctatmggctcacactctgctgaaactctct

SEQ ID NO: 837306 - DNA, 547 bp, Homo sapiens
agataaaattatgtccacttctcacacacataagaatacgtgctaaatggattcaaggtctraatgtaactatacaagtgccagaatgaaaccgaaatgaatctctctaaaatttgattgtaggtagatttctgactatacctcaaaagccacaggaaagagaagaaatgcttaacagatctgactacaaaaaaagcaagtggcaaaaacaataaacaaagttaaaagacaaataacaaattggaagaaaatattttaagtatttaatcacagatacagagttaatatccctattatgtaagaatttgtaaaattgaggaaacactgacagtactatcttaaagtgggcacaagacatgaaaatttcccaaaaagagatataaacatggcccttaaacatagaaaaacatgtacaatttcactcgtgaaattaaaattgaaactacacagagactcttctcattcaccagattagcaactattcaaaagcttgataatacattccattgaagagactctagggaaatacacactctcaaacactgat

SEQ ID NO: 837307 - DNA, 659 bp, Homo sapiens
catattctggcccataaaacaaatctcaataaatttaaaaagatttaaatcttacagtgtatgttttctgaccacaatagaattaaagatcaataaccaaaagatagttggaaaaaagcccaagtatttasaaattaagggacatactactaaataactcacaggtcaaggaaaattttaaaatattttgaattaaaggctgatagcatcttaaaatttgtggaatgcagctaaagccatgcttaaagggaaatttatagctattatagggcaaaagaagtcagacacaaggcgatatattgtgggattccaatagatgtaaagtacaaaaacagacaaaaaacaaatgctcttggaagtcaggatagtggttcccctggggcaggtgtagcccttttaaggacgttatattagtctgctagcactgcaataacaaaatattaatctaggtggcttaaataacagacatgtattttctcccggttctggaggctgaaactctaagatcaaggtgcaggtagggttggttatttctggcctccctcctttgcttcagatgtctgccttcttgctccatcttcacatggcctgtgacctgttgacacacatccttggtgtctctttctcttcttattaggacaccagtgctattggattag

SEQ ID NO: 837308 - DNA, 614 bp, Homo sapiens
atcaaacaaacctggttcaaagtgattattcaacaaatgtaagctgttatcatcttgtcctccatcattcaaatatgtcctgtatagatcttccattaatttcaaatatctaatgatctacaccatcaaatattatgaaggtgatgtttagcaggtcattggctaaaacaggctctacctcagtctctaatatagaaggaaagacaagtagcatttactaacacccacagtatgcttcatattgttgccagaaatttcaaatgcaccatctattgatgcatggaatcctttcaacattcttagaaggtgagtgttatcttaacttttcattttacgaaaatgaagctgagagtggttaagtatcttgcttaaggtaatattcataccatggggaggatcattatagttgaccagttaaatacgtgaattgaaggtaatatcacagatccctgctactcaaaatgtggtccactgaccagcatcgctggcattacctgggagcttgttagaaatgcagcgcctcaggcstcaccctgtccctacggaagcagaagctgcatttttcacgtggatctcctggcgatttctgcgaacatttactgctgttatagaag

SEQ ID NO: 837309 - DNA, 480 bp, Homo sapiens
cccagcaaaactcatataacaaagccagacaagaataaccgaaaaaggaagattgcaaactgcttcacttacgtctatacatattctaaataaaatgttctccaatcatgtcacaaattaaaataatattgcagccaaaatttattccccagaatataagagtaattcagaattacaaaatatagtgatgggggaggagccaagatggccgaataggaacagctctggtctacagctcccagcgtgagcgacgcagaagacgtgtgatttctgcatttccatctgaggtaccgggatcatctcactatggagcgccagacagtgggcgcaggtcagtgggtgcgcacaccgtgcgcgaggcaaagcagggtgaggcattgcctcacttrggaagcgcaaggggtcaggcagttccctttcctagtcaaagaaacgggtgacggacgcacctggaaaatcgggtcactcccacccgaatat

SEQ ID NO: 837310 - DNA, 598 bp, Homo sapiens
ctaagccattgggaccaatttgtcccgcaaaccctgaaaaagaagcggcttattttttctgcactacggtctggccttaatattatctctytaatagggaaaaatggtcacctgagggaagtataaattacaacactattctgcaggttgaccttttctgtaagagggaagggaaatggagtgaaataccttatgtccaagctttctttttactgaaggataatccacaactatgcaaagctggcgatttacattccacaggaggacctctcagattacctccatatcctagcctccctacagctccccttcctattaatgatgagcctcctctaatctcctccatccagaaggaaacaagcaaagaaatttccaaaggaccaccaaacccctcaggctatcagttatgtctcctttaagctgtagggggaggggaatttggcccaacatgggaccttctctctctctgaattaaagcagatcaaggtagacctgggaaagttttcagatgatcctggtaggtatatagatgtcctacagggtccagggcaaaccttcgacctcacttggagagatgtcatgctattgttagatcaaa

SEQ ID NO: 837311 - DNA, 558 bp, Homo sapiens
gccccacacccttattagggagggacatattagccaaagctggagccattaactatatgaatatggggaacaagttacccatttgttgtcccctacttgaggagggaatcaaccctgaagtctgggcattggaaggacaattcggaaaggcaaaaaatgcccacccagtccaaatcaggctataagaccccaccacttttccttatcaaaggcaatatctcttaaggcctgaagctcataaaggattacaggatattgttatacatttaaaagttcgaggcttagtaagaaaatgcagtagcccctgcaacaccccaattctaggagtacaaaaactgaatcgtcagtggagactagtgcaagatcctagactcatcagtgaggaagtaattcctctatatccggttgtacccaacccctataccctgctctctcaaataccaraggaagcagaatggtttcactgttctggacctcaaggatgctgccttctgcgttcctctgcacttggactcccagtttctctttgcctttgaggatcccacagaccacaaaacc

SEQ ID NO: 837312 - DNA, 580 bp, Homo sapiens
ggatgctgcttggtcttaaggaagtctttcctgcctaccaattgccacacccctttttctccaggtagagttgactatgttttcttctgggccattgctgtacttgcctaatacttttaataaggacttgcaaatgtgcctgtaggtctcttctaactaggctgtaaaccactcggacagaggaattgttttatttcttgtaactctaacacctaacacaaggccctcaagataacctgtcaaatgaatgaacagatgagctgaatacccgctgtgtgcctgttcttgtcttaagacatgagggacaacctgtaacacaggacacaatgtggctgtgtctgctctgaaatggtagaatatctagctacagcttagaataactgggtaaggaaataaatgctggattataacccaaagaataaaatatccaacgagtccaatgaataaataaataagggaaaaggaatgactcttccctgcagcagaatttcagttaataaacaaacgaggaaggaagsagtatgaaaacatcattagaactcatagtaagaattgccacgagaaagtcccaccgatggat

SEQ ID NO: 837313 - DNA, 628 bp, Homo sapiens
gctctttcagcacgtggtgccaacctaagacatgaggcctcctgctggagctccaggaaactctagtctctgccctcctcttgcatcygtaggatcgctgggctgctgctggggcttggcaatcctcagagaccttggacttgtctgcttggagataaggcacagtcatttcatctccaactgctgccaagccctgctggctggcaggacatttggactctctctccctgggttttcccaggacagaggttacagatccttcagctcttaggctgatgtcacttccactccttgatctcagcttacaggaaaggtggagagaaaaggcgatcagagcagagtccctttctgaagacacacttggtcctcccctgcctgggtctgcaggggtcagaagcatttccatagcagtcattttcatacaggccctggctcccattaggcaaccttcctctttggaaaacccaatagccaggaatttaaaaggcaggactcttttctcttaattttctcctgaaaaacccttccctgaggcaaccagacccagctgctgcccaaataggaaggaaggtcagaattgacaggaattcacaaggaaagagagcataggtttatatttcagggtatc

SEQ ID NO: 837314 - DNA, 665 bp, Homo sapiens
aattgcctaacaacgcatgaatggatccccacatttaagsaatacatgactgtatttcaataaatattcaatatattggtaagcatcctatagagtctttaaaaataaggcactataggcaacaatggctggcagggaaaacttcaagtgatttgagccatcaacttcccgaagggttttcagtcaaggtctaacagaatggcctgaggtcaggagaatatagagtcaaggtgaatggtctgcatttcaatgcagtggtccaagcatgggatggcaaaagccttaaattaaggtggcatcaagaataagaacaaaacccctcatactgtgttcattgctttatgaacattactggtatcaatttgcaacaaaaccgtatgaaaattatttcacagacaaggaaattgaagagagaaaataaccggctggaaatcaccatgtcagcacacagtcagaaaaagactttaacccccaatctctttgtctctacaggacatgtccctcagtcactgtcctagattattaaattcaagcaaaaatctaaaggattattcggggcacctgaccgattggatgaggagagctacaggcagagatggaatttagatttcaagactacaaagttacaaattgtctatttgtttaaatcatataaataataagaa

SEQ ID NO: 837315 - DNA, 543 bp, Homo sapiens
gctggaacagtttgatggccagtagtttctggacatgtgtacgtgaaaaaattttccagctaattctgagatcactttccaacctctccctgctggttttgagagtggtttagccatcagataaatggattacggaggtaatgtgtagagagggcggatgcctgttaaaattctaagactgctaaggcccacagtagcgactgcgactgcctgttaattcatctgtagtattacacagtttatactactcatctcctgtgatggaactattataataaccatgacctttcaacttaaacgataatatcaaagatctgatacatcaattttcagagaaaactggtggcaaatggaaacacagcagaagcttttgcaacagattctcccctaaccaaattaacaagtgctctctgctctttttctttcccaaatatgtattttgaaaaaatttcaaatgtatggaggctctgaaagaactttacagtgaatgcctstttactcacaggctctcccagtaacacagcctcacatgaccacatggct

SEQ ID NO: 837316 - DNA, 601 bp, Homo sapiens; identical to SEQ ID NO: 836407

SEQ ID NO: 837317 - DNA, 628 bp, Homo sapiens
tatgtttttccttgccttctctccccrctctaactcccatccaagctctgatcatgtctttctgttgacacatgccatgcttctcacccccaggacttggcacatgctcttcttcttcatggaaacacactttttctcctcttggcccaactgactcctactcatcttctaagtgtgccagtcaagatgtcagttcctctgtgaaatcttatctgcccttccagccatgcttagtttgtgtctcatcataggacttactatgttgggttttaactgcttgtctcaatgcccagatcagtttaggcatggcaagggatgggccatatctgtctcatttatggctattgatcctgagcccagcgcattctcacacacatagtggagctcaacaagtatccaatatctgaacaatactgagatgctaaagctcccctcacccccaacttcatttgtggagcgcaggcctcctgagggggatgactggggttctataaaggaagtaatgagtgggaaggtgaggaccctgaacaatatgatggccattctacctcaggaccccaaaactcaaatccacaagaacaaggcttggttctaagcaggggcagtctgctcttcagcactgggtgag

SEQ ID NO: 837318 - DNA, 679 bp, Homo sapiens
cctaactgtgacatgacttaggatcctattttccatgttattttaatttttcattttcaaatagtttgctgatagcttatagaaatgcagtgggtttttgcactactttgtatcctaagacgagtctaaatttatttattaatttgtcgataaaaagagtcaaactctgtaaaatatttgaagagatttattctgagccaaatatgagcgaccatggcccatgacacagctctcaggaggtcctgagaacatgtgctcatgctggtcagggtactgcttggttatgtacactttagggaggcatgagacttcaatcaaatacatttaagaaatacattggtttgacccagaaagacagaacaacttgaagggggcggagcttacagcttattatttagatttaaaaattttctggttgacaattggttgagtttatccaaagacctggaatcaatagaaaggaatgtctgggttgtgataagagtttgtggagaccaaagttttatcatgcagatgaagactccaggtagcatgctttagagagaataggttgtaaaatgtttctwatcagaattaaagtctgtgttgatgttaacgccagagaagtaaaatgaagcatgtccaagtcatggcctgaaccagtcttacagattaaattttaaaagacccctggctgagg

SEQ ID NO: 837319 - DNA, 627 bp, Homo sapiens
ataggaatcctaataattttctacgttgattttgtatcctacagctttgctgaagttgtttatcagctggaagagcttttgggctgagattatagggttttctatatgtagagtcatgttgtctgcaaatagaggttgttggacttcctctcttcttatttggatgccctttatttctttctcttgcttgattgccctgaccagaacttctaacactatgttgtatagaagtgttgagagagagcatccttgtcttgtgccagttttcaaggggaatgtttttagcttttgctcattcagtataatattagctatggaattgtcatagatgactcttattattttgaggtatgttccttcaatacctagtttattgagagtttttaacatgaaagggtgttgaattttattaaaagtctttctgtgtttattgagataatcttgtggtttttgtctttagttctatttatgtgatgtatcacatttattgatttgtgaatgttgaatcaactttgcatctggagaaaaagtctgyttgatcatggtggattagctttttgatatgctgctggattcagtttgcaagtgttttgttgaggatttttgcatcaatgtttatcaaggata

SEQ ID NO: 837320 - DNA, 588 bp, Homo sapiens
aaacttatccctttgtgtttagaacaaggcaaaagaaatttctgattggatattgttatgggcccatgacttctgttgcagagaaggtaatagaaaaaggtaaaatacttctacrctctataattcaccttgctggaaaaaaaacaactggattggcttgacaggggcttagacgggtgaccaggttactgtttggttggttgagagacggaagcagtacagaatgacaaaagtgtgtggtgggccaccggccactggttcatcatagcaggacctcaaaccaatgtctagtccatgaatgtttatatatgggttggtatatgaaggtggatatttgcaaacaaatgcttagttttagtgtcaggattttcttcctaattaatgaaaagagactgtatgttttcaagttctgtaggcctaactagaaagaaaagagttcaggatttcagattgtgctactttcacaagatgtaggtatatctttaccaaaacacacatggctatgcacatgttcaagtatcttgttataagaagggtgtggtgtaagtggaaaaattgcttctgttattcttgtgaggcagtgtaact

SEQ ID NO: 837321 - DNA, 263 bp, Homo sapiens
agagtggagcctgtggaacaggaagcccccctccccgccccccgacaccggggtccgcacagggctcccagctgttgaggatgttgtggatggggaagtgctgatagtgtcaccaggcaagcctagcacctccaatgggcccagaaggtcttgactttggrcccttacccttgtttcacaagtgtttaaaagctgtttttgcttttgttattttcccgaatactcattacttagtaggtagttattaatctttctttgggaga

SEQ ID NO: 837322 - DNA, 595 bp, Homo sapiens
tggctctaagaccggtttttctatttgtgtttctttgtttattttggtagaaagcaaagagggcaatacgttaaacggcatcttccttggatggtctcaggatcacagccttctctaaagaagtattcctctccaaagagctgcaggccttcaacagccttattaggtaatattattatacctgtttacttgaggaaactgacctcagtggtagtaacaagcccaaggtcacagaactatggtgggagggagggacgaagacaagacctgtggattcagatcctggtgccagaggctttgcttacatccagttattcaatccgcactgcagtcttctggggtcagaatcagacgacaggtcctgtgaagtttacatatcttgcccaaggtcacagaggcaaacaaggttgggatttgctgattcgaaagcccgtgctattttcacttcaggtcaacttacctctctatgcttgcacttcctaatctgtgaaatgggaataataatagtacatgcctctgggtttgttgtggsagttaaatggaatgacacacctggcccgtagtgagcgccgtaagtggacactattgttgttat

SEQ ID NO: 837323 - DNA, 580 bp, Homo sapiens
gtccggttaaatctatcctcaaggaaatcacttctcagtgttccatctgctattctcctactcctcagggatcgttcaggccccctccccttccctacacgtcaagctcagggatttgcccccacctaggactggcaaattgactttgctcacatgccccgagtcaggaaactaaaatacctcttggtctgggtagacgctttcaccggatgggtagaggcctttcccacagggtctgagaaggccaccacagtcatttcttcccttctgtcagacataattcctcggtttggccttcccatcactatacagtctgaaaccggaccggcctttattagttaaatcaccaagcagtttctcaggctcttggtattcagtagtaaaatcttcataccccttaccgtcctcaatcttcaggaaaggtaaaaaggactaatagtcttttaaagacatacctcaccaagctcagcctccagcttcaaaaggactggacagtacttttacctctcrcccttctcagaattaaagcctgtcctcagggtgctagtaaagcccatttaagctcctgtatggacagtcc

SEQ ID NO: 837324 - DNA, 391 bp, Homo sapiens
acctccccttcctcaacaaaagtggctatcaagatattttcctaaacaaaaaccggtctcaccctgctaaatgcattggaaacttamcacctggtgtatatattggcctcctgagcaattgattagtctgagtccacagctgggacctggctctcctctccaccagctgccaggcggagggcagacccagggccccaggggtgaatttgtcagggcaaaggcctctgtgggcagcctcttggcagcctgccagtagccccttctggcagcgtcccacctctcccggcatcacagatcaagcctcagaagagcagggcctaaggagaaaacccgagagtgacgatggcaaagagtgatcacaacaccccaggtgggtggactccgggggaac

SEQ ID NO: 837325 - DNA, 563 bp, Homo sapiens; identical to SEQ ID NO: 825596

SEQ ID NO: 837326 - DNA, 623 bp, Homo sapiens
taagtcccagtgaactgatattctgcagaatcttcactgttatatactaaagacaaaggcagctggaccaagagtctatctcttccttcacgtcctacagtgtctttaagaactactgttacagtttcatcatcataaaactgtgcatctaaacaactgtagatgctagaattaaaataagttttgttatatcaaagatgatcgtgactactgagaaaatattgtatgcatgttatactggcagcaagcagaaaaaaatttaaaagttaagtgacattctgtacaataacatttaaaatatatcattggtttgtattaaaatcagttactttttgtactgattattcacatatataaccaaatcttaaaaatgggtaatcatgactcccaaaaatctgtgaagttgtttcagttctagaaacccctggccatcaatggttaggccttaagcctgtggaaattctatgaatgacaccttatatacacattcagcagagttgactagactgagaaataaaaataagatactacacatgaaaaataggcacagcaactccaargactttatcataaaaaaacttattttatgtgaggaaaaaagtgagaaaaagatcagcctatga

SEQ ID NO: 837327 - DNA, 536 bp, Homo sapiens
gcctggccaaggtgatttttttttttttttttagtttaaattaagatgcttttctatctttcccacctataacttctctgcctctgsgcatgttttcaaacccaacccaggtctagcaagagtacaagacaaagagctgaaatgaaatgtggtagcttcatttgagagctgggcttccacctttctaactagttgcccttctaacttggctgttggacttggacttccatgtcatcttttgattgcgtgttgccaacagctctggagctgctgttgtctcctttgccaaggaggaagtttgcatctcagcgttccatccccttggtggcttttcccatagtctgggccgtgccaagatataaatgtgcgtgatctggtttccagttggctctgccatcttctgtcttcacagagccgtcattttcagaatttaaaatggtgtccccagtgcttttagtggaaatccaggaggctctggaaaccaaaagttgttattttgttttagtaactaatttggcatgtgccgtgcatttggt

SEQ ID NO: 837328 - DNA, 552 bp, Homo sapiens
actcacaaaaacaaaaagaacaatagaaaagaaattaaatttcagaaatgtcaaaagtgamggaagactgatgcagctcaacagcaaaagtgactgatgtggcttaagagcgtaggccctgtgccacgcagtgcacggagagggcagctgggaaggagcctccgccttggagaagcccagggatgctcagaccttagcaatgtcaggtctaacagaagacctcagggtgatgtgtggggctggacacagggggacaaactgaaaatataacacagagtggtcaatacgttctttcctccaaaacatgaagaatgcctagggggctactctccagtcaaaaacaaacagaggattcctcagagaaactgagtaaagtgggaagagctaaggcactttcacgtgggcaccagtatcctgaagcaaagctccacacactctggcacctgctccctgctgccccaacctacacagattccaagcaactttaaattgcctcctgaataaacatgagtaagcaaccaagcatctggtatttaaagaaaccttgcaagg

SEQ ID NO: 837329 - DNA, 481 bp, Homo sapiens
acacaacacagatggatcttacaaaaataatgttgagaaagaaagtaaacacacaaacacaaaaatacatgtacagtgcggataagtstacttataggaagttcaaagccagatgaaagtaagatatggtcagcatagcagttatcttttgagtggggggcataaagtgggcttccgggatcctgataatattctgtttcttgacctgagggttgatcacctgggtgttttcactttatgatcatttatcaaactatattgtgacaatttgcttccttttcttaatgtatgtaatcctttgataaaaagattttaaaactctatgattttaatagaaatataggatgagtatttttaaaatcatggtggattggaaatgtatggacaatctggcatattttcaggttggctgagtagcctggctgatgactagagtcattggtagctggaaacagctatggtactgcaaataggagttgaa

SEQ ID NO: 837330 - DNA, 575 bp, Homo sapiens
ctctggattaggctttggtttaagggaatgytgtgtggctggtttgttcttctatccagacactaaaactttctccatatcagcaataatgctgttttcattttcttaaccattcatgtgttcactggagtagcacttttaattttcttcaatagctttttctttggcttgacaacttgtctgtttggcacatgagggctagacttcagcctatcattacttttgacatgccttcctcttcaagcttcctcattttttaaaagcttaatcatttttagcttttgatttaaaatgagagatgtgcaattcttcctttcacttgaaggcgtagaggccattgtagggttattaattggcctcatttcaacattattgtttctcagggaatagggagacccaaggagaggaaagagatgacctgaacagtggatcggtcaagaacatgtacatttattaagtttgttgacttacctggatgcggcttatggtacccctaaacagttacactagtgcctcaaactagatcctgttcagagatattataacaaattactgagtttattttggtgcaaaaa

SEQ ID NO: 837331 - DNA, 654 bp, Homo sapiens
tatggctggatgatgttggtgagtattgaggttcactttgtgaacaactcttattctattataagtgggtaagttcagcatcagaaaggagctcttcatgggaacccagatcacgctgccctgttgggtgacctttgcagaggataccctatcagaacgtctgtgaatcacatctgagttccctcctgtgtctcgtctccaactctcattagcagtgaactcagaagttttgcaggaaggagattcattttctttccttatcccccctccaaccccaaaagagacaaaaattctggcattgagtattaacattcttatattaagacagatttacctctactcactttgataaaagagctcaggatctcccaagaaaactgatttttcagagttgctcatttgaatggacagcacctccaaagcttgtgctttggttgaaaaggggttttctgtgttccttgtattcatccttcaagttcatggccatcacccatcaccatctgagagtacttagtgctcagagtaactgaaaggaagcataaatcctccttgctttgaacacaacccagggtttacygtatgttcttgtcctggccaatgctaatcagctcttccccgcttcttccatctttaatgcttgtaaatcaagctgcc

SEQ ID NO: 837332 - DNA, 457 bp, Homo sapiens
taatattggcatgctgacagtaaagagagagaaactgaccccagggggtgagggtgcagaaagactgaagacctcaagaaggtgggataggatgacacccagagcacatccaaagggagtggtstttgatggaaggagggaaccccgccttcattgtgagaagatgggatgcttctaatttctctatggtaagatgatctctgagccagagggatgaaagttggccaggagtatgaacagagtgtatgaaatagctgtgtcattaaatggtggaataaatttatttgagaaacataataatgtttttgccaagctgtgttgagtctctatttgagtttagttgtcaagaatacgtagtaacatcatctagaccagtctttgtttccacttcccacatcctcttctggagttcctcaccccaagccagtttctgccatttttcacatgatgtaatgac

SEQ ID NO: 837333 - DNA, 457 bp, Homo sapiens
taatattggcatgctgacagtaaagagagagaaactgaccccagggggtgagggtgcagaaagactgaagacctcaagaaggtgggataggatgacacccagagcacatccaaagggagtggtctttgatggaaggagggaaccccgccttcattgtgagaagatgggatgcttctaatttctctatggtaagatgatctctgagccagagggatgaaagttggccaggagtatgaacagagtgtatgaaatagctgtgtcattaaatggtggaataaatttatttgagaaacataataatgtttttgccaagctgtgttgagtctctatttgagtttagttgtcaagaatacrtagtaacatcatctagaccagtctttgtttccacttcccacatcctcttctggagttcctcaccccaagccagtttctgccatttttcacatgatgtaatgac

SEQ ID NO: 837334 - DNA, 560 bp, Homo sapiens
gagctccccgcaagattttcagcttgcgaagagcgcacatgcgcagagcgtcgtggctctttcgtttagactgttggttctactagtagcggggtttggcttggggccttyaagatgttttgagtggcgtcgggaggctgccctatcagcgggctgatagatactacagagctggaagctcagaaaggaaccctatccaacggtcctagatgggaaacgtctcctgtcgaggacaccaggcttgctgcatcacctgcaatcccgccgaccgcgtgacagttttaacctgtactggaaatgctcccaagatctgacattaatctcgcctgtataacctggaatggtatcggacattccccgctctagatctatatgcctgattaacgaaatactgaattatcttggccccctcctcgtgctatatgcgaaaataaatttcagtaaaaaaagatttcaacggaagaatacaactgagaggattaaataaattttaggagaatattatataatccggggacagaagggactttcttaaccaagatttcaaaaccccaacatca

SEQ ID NO: 837335 - DNA, 569 bp, Homo sapiens
aggattataaatcatggtgctataaagacacacacacacatatatttattgtggcactattcacaatagcaaagacttggaaccaacccagatgtccatcaatgatagactggattaagaaaacatggcacatatgcaccatggaatactatgcagccataaaaaatgatgagttcatgtcctttgtagggacatggatgaagctggaaactatcattctcatcaaactatcgcaaggagagaaaaccaaacactgcatgttctcactcacaggtgggaattgaacaatgagaacacttggacacagggtggggaacatcacacactggggcctgtcatggggtggagggaagggggagagatagcattaggagatatacctaatgtaaatgacgagttaatgggcgcagcacaccaacatggcgaatgtatacatatgtaacaaacctgmacgttgtgcacatgtaccctagaacttaaagtataaaaagaaaaaaatagggaactataaacagtaaaaaaaaagagaagaaaagaaaagaaaaaagaaataaagggagagaagagga

SEQ ID NO: 837336 - DNA, 532 bp, Homo sapiens
  misc_feature 142: n = A,T,C or G
atttaatattttacattggggaaaatgtcaatttttaatatcattatcattttgaagtacctttgagatagtggagattctagggaaattttatcaccttttgatgtttcctatatatctatgagacaaaagaacgcagtgnaaaaaatgtagcaaagttttgatctctgcctttattttctgatactaatcaaaatttgaattcaaattcaaaaaagtaccagataatctaataattttgagaagacaggaatgtaaaattccggtcaagttcagacttctacaggcagattgttaatgtaggaaatcaagagtaaaaattatacaaacacacacatgcacacactcacacatactcctcacagacacacacatacatatacatagtccactttctatgtgcaaagcaacaatgctgggtgctttcagggatacaatgataaagcataatttyttccacttgagacttccacatggaagatggatacagatatttctgtaatgtgaaaaaaaagcgtgatatataccatat

SEQ ID NO: 837337 - DNA, 619 bp, Homo sapiens
ttaacatttatcctttatcttatttaaaaaaaaaaaaaagagatttgacctagggaacatttcttctaacatgaagaatgaatgagagaacaggacattgaacccacagaactaaaatgtattataaacaacatgggttttggaatcagaagacctaatataaataggcttttgaacataggcaagtcacatcatttctctggaattttttaatatgatttagttttttagatatgcatgtagcatttaaaagtgtcttccatataattttagaaaaatcagaatttagtacctctgatttgcatatgagatggagatttgttcctatacattttttaaataaaattattcatttttttctcttttctcttcaaacagggatctttaagattcttgaattaactgctcctactttactttggtaagtgcctttccccctagaatttaagcaataacttttatgtgaagaaagtgatattaaataatattattaagtaatatacttccaactttaattaaatcatattttcrtttataaagtgttttaaattttgctttcatctttttgactcacaaatgtaagttgtctgtgtaatttgcatgcatatttcataaatat

SEQ ID NO: 837338 - DNA, 506 bp, Homo sapiens
actgtcttgtgctgctctcagttttccggaccatacaaacgtggagggcaacggtmacacctttgatctattttgtatcttccaaagctgtgtcagaaacatagtagatgatccatgcatgccacttcttggccataactcttcacatctgtgtttggctttatagtttgtaaattctttcatttatgtagtcttcttagatcctcaagataactcagtgaagtatgcttgcttgctgtttttaatctcaacttaacagatttaaggaaatggtaattgaataggtaattgcaaaacccagggtcacccaggtgataaatgatacatccaggaaaagaatgtgttctctcccctatgcaaatgattgataggtggattgacttccatgcctttagcagatgtgtcaaatttcacatccgcattaacacttctaatcctgtaacgtaattctgtctttttatagatgtcaaactggttttatctcagaaaagggaactgcaaaatac

SEQ ID NO: 837339 - DNA, 581 bp, Homo sapiens
ggcagttacaggagttgaagtaatttacgtggtcataagggagtaaaattctgccctggaatgtgcatgtgtattcaagcctccccctctgtggtttgccacaggaaagcatggcaggtctgaggtctttggaagccttgctcatgattgcaaacgagaccaggccagggtctgtgagagcttagccatgcacccaacctcattgtgatgtcctgacatcttctagattgcaaacatcaacgtgttcctttgcatgagaccactggggtgggagggttactcttagctctgagatacccagtgagaagcgtgagggcaccttccccactcagtagtgcatctgaggttggtaggtccccaggctagcccaccacactgactgacatgatcttgtctgatggagacccaggggtttccatcccacatccgagcatgttgttattcatgccccagcctttgcacagggccrtgctgtttgcacaccaagccctccgcagtgtgggggtggtagtggagggctcagttaatagctgctgctttgatatcaggctgtgaaggacactcttggggctctggagcca

SEQ ID NO: 837340 - DNA, 572 bp, Homo sapiens
ttggaaattcttattccacttctggaagcactcccgcagaatatctgacaaagcccagaagtttacataagccagatctctagggctagtgagagaataagactcacctagacataactacaaaatggaagctcaaatacatctgagtagacatatagatgaaggactgaaaaaggtatagaagaaggggctgaagctatcataagttactgcatttagttattaaattctcatctccccattgggttgtagatacaaaagcaaggagaaaaagaaaggaggaatagagtgaattaaaagcttccacaaaggttgttggttaataaaagggcattagggctcattcagtcgtctcactgaggtgctccactgcatccttgtgcagcattcttcctttctaataaactttcatttttcaaacccatactgttgtcggtaaattctttttaccaacccacaagtcgacaactttccaatgccagggctctgacgcctcrcctggcatcttggtggcccatatggggactttactgggatttgttccctcagtggtctggttttttgtttgtttg

SEQ ID NO: 837341 - DNA, 623 bp, Homo sapiens
atggaaaggataagtaagatctagtacgtgatagcacaacaaggtgactgtagtcaatgagaatataattatacattttaaaataactaaaaatgtacaattaggtygtaacacacaaaaaatgtgtgaggtaatggatacccattttactctgatgtgatgattacatatggtatgcctgtatcaaaatatctcatatgccccataaatatatatacctactagttatccacaaaaattaaaaattaaaaaaatttagaaaaatttttaaaagacatggttaggtatgaatcagagtggaaaatgttaatggtaataacagtagttaacaccattatagtaattatagaactagcagtattctttgtcactgtcatcacagtagtagactgagtgcttgctgtgcactggtctccactctaagtgcattacatcgatgagcttattaattcccacacgacaagcttgccagagtgacacaggtccccaagccagagtctgtggattcaaatcctggtcccagcacttacaacctatatgacccttgggccaactactttaacctctgtgagcctcattttccaacatctacttgagagtacaccaagagaaatttatttcta

SEQ ID NO: 837342 - DNA, 575 bp, Homo sapiens
caattcttatttgtatattttggggaggcttagttgtccttcctgcctgtcctcacactccatgtgtwctaaagttctttctgatgcaggattattcaaatgtggactacacagcaagaaatacatttatatggtaacctagtcactgatgatatataattgtatgtgtcactgtgatgactttcataaaacggtacttacatgctttgcactgattttctatttaatcatatttcattgttattaaaatgtaggtcataaaagactagactaatttcaaaatccagtaatgggtcttgaccttcagtttgaaaaaagtgctctgccttgcccaatgctttggtgcctccagatcttcatggatctgtttcctctgcctggaacactttctccctcctctatcctatccctgctcaagccttactagcgtccctcctccagtcagttaggtgtctgtgctatgaggtatttctataatattcagaactactcttgtaacattcagtactctgtttaattgtttctttctaatagcttccctataagatgaaggagggccgagacaaggttgacct

SEQ ID NO: 837343 - DNA, 626 bp, Homo sapiens
acccaaatcccaacttgaattgtatctcccagagttcccacatgttgtgggagggacccatgggggccggtctttctgatgttattttcatgatagtgagtaagtctcatgagatctgatgkgtttatcaggggtttccacttttgcttcttccacattctgtcttgccaccaccatgtaagaagtgtcttttgcctctcgccatgattctgaggcctccccagccatggagaacctctttttgttcccagttccaattaaacctctttttgttcccagggtatgtctttatcagcatcatgaaaacaaactaatacagctggaaaagggcagaccgccaagcagcagatgatgcaggtttaaggtagactcttccttaatttatggtaactcctacattgtctttaatgttactggatttttttccctactttttattaatgcataagatgcattcagcctgtttcttatctctataataaaaataccttaaaaatatatgtatattttagaggtttgtaaatgaagtatttgcagagacaatgacatgatatcgtggatttgccttaaaataattcgtagaggatggagaagtgggtgtgggtatagaggaagcacgatgggca

SEQ ID NO: 837344 - DNA, 582 bp, Homo sapiens
gcatttaagtgttgctaacttcaggtaatagtatttgggttggggattggtgtgtttccggttgtacaaaggatagttktattaagttaggtgtaattatgaccttattgttttctttatttgaagattatgtatgatatcaggagatgtgtgtgggttcaagttgacaaggggtggccttgtgatggttaataatgagtgtcaacttaattggattgaaaaaagtattgattctgggtgtgtctgtgagggtgttgccaaaggagattaatatttgagtcagtggggtggggaaggcagacccacccttaatctggtgggcacaatctaatcagctgccagaaaatataaagcaggcagaaaaacgtgaaaggtgagactggcctagccttcagcctacatctgtctcccatgctggatgcttcctgccttcaaacattagaccccaaattcttcagttttgggactcagactggctcaccttgcacctcagcttttagacagcctattgtgggactttgtgatcatgtaagttaatacttaataaactcccctttatatatatatacacacacacatata

SEQ ID NO: 837345 - DNA, 573 bp, Homo sapiens
agtgtgtgctgcatgatttggtggcacattccacttccaagtcatcatagagttgtgtatttatggtgctgcatttctggcaaaaggcagtaaaatgtcttggacaagtggggcagttttcaagcagttttggggcagacagagatcttagctcaggatacaacagtgttctttgagccttcagggtctcaggggaaggacgcaatttggagggtcttcctgtttactaagaaggtcatgaaggtgcttcaggcaacatccaataagagaacaattggaaacaacacaatcacacgtgagcttgcacacacacacacaccctgatccaggtatgggatgtggatgtgtacccaagaacttactaaagcaaaactgattttagtttagagagatttgattttatgctaaacaaatttcatcaggattttcatatgaagagcctattcctccccgtatgtgtcctgattggctgcattttaatgtggttaaatccaatctttgagttctctgcaggccccagagggggaggaagttgctgtcacagrggcttccaggggacagaacttctctccc

SEQ ID NO: 837346 - DNA, 628 bp, Homo sapiens
aaattgctacacaaatgctctgtgttgacattcatgctaaagccagtctgcattttcaaaatgaaaatttcttcactatttaaggctttcattgcaataactttaaaaaccaaatatttgtccaccaacttagccctacagtaatgttcccaaagactcatgagagtttatggtttattggaaagggtccaaattggaagcagatattgattttctgggagcaaactggtctgcctttacaaagtggaagttcaccctctctggataacacctgtgtctcattcctccctctctgccagatctcgaaggcactgaataaaccatgcagcttttgaggaagaaagaaccatttggaagaactcactagaacttctttgagcatctctttgggaggggaggatatatggttagcacaccatttatataataattatcacagggatttttaattttatcatggcagtgttctgacagatgtatagtgttttgagggcagaggatgatctcctaatttgcccaaagagccttatgggtttgtggggctctgggggtgccaaatgggaaggagaggggrcacatgaaaaggaaatggcgggaagagggcaacaggccagggggtaatatcttc

SEQ ID NO: 837347 - DNA, 611 bp, Homo sapiens
ggacagcatccaggcagagctggtcccactgttatctccagaagcaaatgcccaagctgtgctcagaactggaagcaatggatgacttgtatcaggtgcttgtttgagaggatatattgacattattgccatagtaagcttaaaaaaatgtgcccactcattcattctttgtccatggaccactaatcatgcattgtcatttccaaagataaggggaaacatatcacatatcattgaaatagaaattagggaaagtttgtcaatttgttttcactataaggcatcaatggcagaaactacatatgagtaattttcaaaatagaccattgcttaaatgtttaaatgaagctaaaagaagtatgaacccattggttagagtgcagtggcttctttcaggcagacagcagatgctctcagatttggtggtgagttttggccttggcatggttggcatggagtcagcacaggaagccgggaggtatgaaggggcatccacctgggtgaaactgtcttgccaagccaaagccccgagrcctgccctgaagcagctgtagtggaggagaggcctgggattccttagagtcacctttttacgaatgtaccgccactct

SEQ ID NO: 837348 - DNA, 588 bp, Homo sapiens
ggctatcacaatcagccatgtgcctaattacatttcccagcttgtttaactggaaataaattcctaatggccaatgaaaggggcaaatgcatattcctcactggttttcaccaaactacgtttctttgcactaatgtttcagtggaaggtttaaggtgcatttgaggagaagcttagagaaaatttttggcacatcactaagactaggtaaactaaaaaactggtggtaaaaccaagagccaggagctgaaagcagtggttaaagcaggtggttgcaatggggcacagcctgacgaggagcctgttgcaaagcctcacctttacttcagatgatacaagtttactgctatcttcagtagacaagcccaaactggatttaagctagggaatcactcccagcatctctaaaaatgaatgaggaagcacttctgttaatttcctgatagacgctggcttcaaaatgactctcttcaagcccccaccctactctgggggatgcaggaagtayagaaggttgcggagtgttagtacaaattgtggaactcaggatagaagcttcaacagtgttgaactgtctattcacaaaca

SEQ ID NO: 837349 - DNA, 528 bp, Homo sapiens
caagcatgctctgcaaggccatcttcaccayttactggctgggccaggcacccagctaggggaatgcacgcattgcactctacacattttcatcttccaacgggattgggtatgctcattgacattttacagacacagaaactgaggcttggagaggtcacacagggttccacgagttcctcagctagagatatgcaaagctgggacatgagccgcagtctgttctgttccaaaagctgcatcttagccacgctgggtgctcctggctggtgtggctgctatgagtctgcccatcttggcaaggcctccactgggcctgctgacttccaggcctcgtgtgccctgcccaggccctgtctcaaaagggccccccctccccaaggggaccaggcagcagccccctgctcccagcacactacccactctgtctcttggcatctctgtccttctctgcttgctcacccgtgcccagctctcatgcctgctgtcccctggcatgtggcacggcacagggctggagacgcccct

SEQ ID NO: 837350 - DNA, 535 bp, Homo sapiens
ctcagtaatggccacttggagcaggaatatgatctttatatggaagactcagtggatccttatcaccttcatagaaaggtactcacctcccacgtcgagagaaaagccaacatgtttttcctccaatgcataaaaggaacttccatagggctggcaggagtcaggctgttcaagacaactggaaggagttgaataacatctatccagtgagtcctgcaagacttcaggctctactacctccagcagctccctgctgagcctggaaaaggaggaaaaagtaaagaataagccaggggaaatcagacacaacagagccccaactaggtttcatgggtagcatagggaagtggttaaaaaactaaaaggatagatccattaatgaggtaacaaattattgccttcatgttgggacagaacagggccaaatggaaaagaatgaaagagaaagacagatagacacacacacacacacacacacacacacacacacacacagasacacacacacacacagagagaacgagctcagtgaatt

SEQ ID NO: 837351 - DNA, 578 bp, Homo sapiens
atggccacttggagcaggaatatgatctttatatggaagactcagtggatccttatcaccttcatagaaaggtactcacctcccacgtcgagagaaaagccaacatgtttttcctccaatgcataaaaggaacttccatagggctggcaggagtcaggctgttcaagacaactggaaggagttgaataacatctatccagtgagtcctgcaagacttcaggctctactacctccagcagctccctgctgagcctggaaaaggaggaaaaagtaaagaataagccaggggaaatcagacacaacagagccccaactaggtttcatgggtagcatagggaagtggttaaaaaactaaaaggatagatccattaatgaggtaacaaattattgccttcatgttgggacagaacagggccaaatggaaaagaatgaaagagaaagacagatagatacacacacacacacacacacacacacacacacacacacacagasacacacacacacacagagagaacgagctcagtgaattgtccaggtgacacactgatgagggagtaacaggacactctgagtta

SEQ ID NO: 837352 - DNA, 580 bp, Homo sapiens
tggagcaggaatatgatctttatatggaagactcagtggatccttatcaccttcatagaaaggtactcacctcccacgtcgagagaaaagccaacatgtttttcctccaatgcataaaaggaacttccatagggctggcaggagtcaggctgttcaagacaactggaaggagttgaataacatctatccagtgagtcctgcaagacttcaggctctactacctccagcagctccctgctgagcctggaaaaggaggaaaaagtaaagaataagccaggggaaatcagacacaacagagccccaactaggtttcatgggtagcatagggaagtggttaaaaaactaaaaggatagatccattaatgaggtaacaaattattgccttcatgttgggacagaacagggccaaatggaaaagaatgaaagagaaagacagatagacacacacacacacacacacacacagacacacacacacagacasacacacacacacagagagagagaacgagctcagtgaattgtccaggtgacacactgatgagggagtaacaggacactctgagttagtgccctcagg

SEQ ID NO: 837353 - DNA, 545 bp, Homo sapiens
gaggcggaggttgcagtgagccgagattgcaccattgcattccaacctggtcatcaagagcgaaactccatccaaaaaaaaaaaaaaaaaaattggattttatctstttttatctctagttaggtgatttgagaagaatttcagaaagaatggctgtactgtctattgcatggtgacaggaagcaggaataattttatgattaattatctttaccttatctaaaaagaagagatgacaaaagcaaagctaaacctgtcattgcaaatagcacccatttatactggctagaggaaaagagatatggggaattttttgttgtttgatgcttcataatttttctatattcagacaggactatgaggtagccttgtttctgtcttaatcaattagcaacaggatgatcttgtttgatattaatgttttgtaaacttatttgtgtttaacaagagaacatgaaggcctcaatgatattgttgagacagctcccagatgtttcggatcaatttgttctctcttagtaacaataggctccttgcagttttaa

SEQ ID NO: 837354 - DNA, 614 bp, Homo sapiens
tctatcttaggtacataccatagcttttgtatccattcacctattgataggatttggagttgcctctaacttggggttgtttttaagtaaacctgcaataaatattcatgtacatgtcatgtctatacatatgctttcattttcctattcttcagaaaatacctaaaactgggatggttgggttatatggcattagtatgcttaacttttgaaaaagattgaactcttttctaaattaatagcagcactaaacattttcaccaataatgttttgtttctttcttcctttgcaatatataactgttattttttcccgtcttagagcactagctatgattttcaatatgaaaaatagaaatgaggagaaacggtactctactcttgccaggtacctgatcttggcatggatattggggaaaacccacagtttcttaatattaggtatggaactagctgtaggacttttaaaaatgttcttattcaagttkagaaattaccactaatagtttgctggaagttttcaatcacaaatggatgtcagattttgtcagataattttagttcatcagttaatataattacataatttatgttattttttcatgtatttctaa

SEQ ID NO: 837355 - DNA, 496 bp, Homo sapiens
aaatgctttgccaaggtagttctagtaatcacttaaacttagtcttctctgaagagtattattattgagaactgagtcaggttgtctacacagayaaaaacccttagacttacagaactgggatagatatcgaatattatttacctcagtagtagttcccaattctggttgtacattggaacaatgactttaaaacacatctgtatgtgtagatctcaggctctgttccacgtggttctgatacagactaaagattgagagccattgatataattcatttcctgcatataacagtttgggaaattgagattcctagagataaagatttcagtcaatgttactcaattagtaaatagtatatttgtgactaaagtcatgttttttgaaatcaaaataagagatttaaaaatatgttatgaatataaagccttatggaataattagtgcctcaaaatacttaatatttaatatttccggtcattgcctttattttcaa

SEQ ID NO: 837356 - DNA, 626 bp, Homo sapiens
aaattgggaaaaaacagtcaaatcatgcctctttggtgataatatgatcttatatatagcacaatctaaagactccaaaaagaaactcttagatttgataaatatcagtaagttgtagaatacaaattcaatttacaagataggtagtattttatgcaccaataataatctatttgggaaagaaagtaggaaggcaatttcatttatagaactacaaataaaatacctatgaataaatttaaccaaagagatgaaaaatctttacaagaactataaaacagggatcaaataaattgaagatgacaaaaacaaaaggaaaagcatgaaatgctcatggatcaaaagaattaatataattaaaatgattatgttgccccaaatgatctacagattcaatgcaatctctatcaaaatgccaatgtcattcttcactgaattagcaaaaactatcctaaacttcatttggtaccccaaaactgcttgaatagccaaagcaacacctaycaaaagagcaaaactggaggcatcacattatctgacttcaaaatatattacaaagctaaagtagcaaaaactgcctgatacaaaacttatcagtctactaaaaaagagctgtctcttctctt

SEQ ID NO: 837357 - DNA, 604 bp, Homo sapiens
ataaaggagcatatagaagcaagattacatcaaaagctatgtaaaaaaagaagarcatatgtcataaaggttatacacttttagaatattttgaaataagaacaagatatttaaaatagttctaaaaaaactgaaagtcagttataaatagcattataaacagcattttttctcaaaagtaaaaatatagagagatgtaaaaataagtaccaaataaatgtattcacatccacacaaaacaaactaggatgactctattaatctcaaggaaattagaatgaaaagcaaaaacattatttgagatagaagcttcaattaatgttgataaaagctcaattaaatggtttcatgccattcacaaatctaaatagcatagcataaagtttccaagaaaaacagaagtaaatactagaagtaggccaaaatcttatatcaaatacagaaactaaagcaatactctaacaatggaaagatctaaataactgtaagtgttgataaagataccttaaattgaatcttaaattattaattgtttttaataaacatatcaagtattttgccattaaataagggacacattttatttttaaatgttcatggaaaa

SEQ ID NO: 837358 - DNA, 604 bp, Homo sapiens
ataaaggagcatatagaagcaagattacatcaaaagctatgtaaaaaaagaagaacataygtcataaaggttatacacttttagaatattttgaaataagaacaagatatttaaaatagttctaaaaaaactgaaagtcagttataaatagcattataaacagcattttttctcaaaagtaaaaatatagagagatgtaaaaataagtaccaaataaatgtattcacatccacacaaaacaaactaggatgactctattaatctcaaggaaattagaatgaaaagcaaaaacattatttgagatagaagcttcaattaatgttgataaaagctcaattaaatggtttcatgccattcacaaatctaaatagcatagcataaagtttccaagaaaaacagaagtaaatactagaagtaggccaaaatcttatatcaaatacagaaactaaagcaatactctaacaatggaaagatctaaataactgtaagtgttgataaagataccttaaattgaatcttaaattattaattgtttttaataaacatatcaagtattttgccattaaataagggacacattttatttttaaatgttcatggaaaa

SEQ ID NO: 837359 - DNA, 627 bp, Homo sapiens
tgaaaatactcgactggcttagcctctgagtctacatctttctctcatgctggctgccttctgccctcgaacatcagactccaagttcttcagctttaggactcagactggcttccttgctcagcttgcagacgaccttacctcgtgaccatgtgagttaatactccttaataaactcccctttatgtatacatctatcctattaattctgtccctctggagaaccctgactaatacacaaggcttcatgcaaataaaataaaataaaatcttgagaatccatgtttcagtaatccagccaccaattggtagtttatgacttgaattacttggctctcaataaagattcagtagacacgttatacctggaagagaacattttattatttgtaagaataccctaacagaatttttatttattatgatgatattgaattttattaaaactatattgttcaaagaatcccttacagaacaattaatatcatgaattactcagagatattaatgaaagaaataaaccaatatttcccattgcaaaactggaatgccctctcattagagaacgagcattttgtccaggtgtggtggcrcatatctgtaatcccagcactttgggaggcagag

SEQ ID NO: 837360 - DNA, 575 bp, Homo sapiens
tgctggtaagaataatagccaatggtacattgccttcccattagagttagaaacctccagagagactatgaaggcaaagcgcgatccacaaagttgctatttgataagggtcattggtaagtatatcgagtttcttctctgctatttcagagggagaatttacaaaatgttatggctgcttatttgccactgaaagaggctgaactgaagatttcatttatgaatatgttagaagctcatattgctgcatggcagctgatagaatatattttaaaatttaaggaagaaaaaggccaagatgcaaacctagctctgcccaggggaggactacctattgtgtaggttcattacctgagtgaataacaggaaactgctcagcttctgtgttaaggctgataagcctgcaggtttattttaaaagtccacatgcagaagatacgctacaactacttccaatattacaaaaagcacccttgraatgattagctctgaagaatgtttgcactgtctacatatttcagacagcattttaggtgctgaattgaattttacacacacacacacacagacacaca

SEQ ID NO: 837361 - DNA, 587 bp, Homo sapiens
gattataatgataacagcaataaaagttaaattcataatatactaggcactgtactaagaagttttcattcattagctcatttaatcctcacaatgaccaaataaggtagtacaataataatctccactttatagatgaaagtatagaggtttttttttttttttttgaaacggagtctcactctgtcacccatgctggagtgcagtggtgtgatctcagctcactgcaacctccgcctcctgggctcaagcgattctcctgcctcagcctcccaagtatctgggattacaggcgtgtgccagcacgcccagctaatgtttttgtattttcagtagagacggggtttcaccgtgttggccaggctggtctcgaactcttgacctcaggtgatccacccacctcggcctccccaagtgctgggattataggcgtgagccaccatgcccggcaagtatagaggattttaygtgagcatgaaacacactctgctcctgtttaagctacctttattttgggtctctgtatctcacagccaaatctaatctgacacagtaatatgatatcttgtttttactagctaaaccca

SEQ ID NO: 837362 - DNA, 593 bp, Homo sapiens
gttgaaacatttcagctgggcagaatggaaggggaaatttattctaaaattactgataggcctggatttatctgtgacaattatattttgaaaggctctcaatatctctatattaagaggaattaaggtttctaaaaccattttgaaagcataattctttatgttttttgcattaattgtgcattcttatttccatttgttttcacaactaagatataggatctaaaataatttctgttccctgaactgttatatccctaagtaaattggttgtcccagaggttactactcaagatttcactttctgtggtaaaaaggatttgatgaatttgtttttaaactttcagagaagcatttgttcctcaaatggctgaaaggttctgataaatatgaggggagagggaataagccttccaaagatcccttggccagcgtgtgctaaaggcctatgcttgactgtttctaaagctatcttcaaattaattttagtttacagattatgattaggaraataataagttattttacaaaagtctttttgtaaagtggagctttagggagaactcaagaatgaaagttagaaagacctggat

SEQ ID NO: 837363 - DNA, 636 bp, Homo sapiens
tccatgcgtctctcaaaaaatgggaagagtcaacaactgagtgtgttcaatcaaaatggcggcaacaagttaaagttgagtagctgagtaatggctgcccactttggccaggcragatagcttggccttcttcttctccagaacccaccagcctctcttgtttgtgtgaccactctagctgctggaagcttttgagattgtaatcccttgtttggcaatgtaaccccaaaagcagaggttttacaatgtcagtcttctttcttccctttcataagtggaaagacccagtatagagattcatttttccactgacgtaaattatactaccaccccaatttagattgcagatgcagttacaaagagtttggttttaaatatattttccacctcactgcataaatgttatatggcatatttagaaatcctgcccccacccccagtaaaggtttctttatgaaaactgaaattcccaccattcaactatctaccatgctttgagatttggggatgattctagctgattccagaattatagctgaataagcataatacctgtcttctgagtaactttcagcaatgtagcccctagcatatctaatttaatgcttgttaaaggaattgcttttttgtttgctg

SEQ ID NO: 837364 - DNA, 625 bp, Homo sapiens
tgtatgacacatatattcaatggctaatcacgaggcattatttcaatacttatcttctacctttttyctccccgtaatccagaaagactggaatctgcatgatgttcaattctgtcaataaaatcataatttcttgcattttacgtagctttgcttttccagtgaagtcaaagacccttatgaagaaccttctcctggaaacggggtgcctggttgttcatgcatagtgaccatttgttttgtggtctgatcagcaatattttctttgagctccatccctcatcctatttcatattaatatattcagttcgttacccccaaccttcacccaaaggtggccacatgacccattgaccaatcagagacttccctgggatttttactacagctattaaaaatatttctttttttcctcagattgtaacataggggccaccagcagccatctcatttattgtatagaattagagaagcatgattaaatcatctgttcccctcaaaagaccaaatatctagggattcttatttataagaacccaaataaatctttctgttcttattgcttaaactggtttcatttgaatgcctccaatttgtatgtcagagtccccactaatgcaactga

SEQ ID NO: 837365 - DNA, 594 bp, Homo sapiens
aaaagtcagttattgaatacatgcttccagtgaaccttcttaaacgtaaratagtgtaacttgttatacaagtattactgttctggattttttgtttactattttaaaactgaaagaaaaaaataggtgtatatacttttggttattacgattacacataatttttttaaaaaacatgtatgaatgggagcctctctgtaccccacccatcactagcttccccctacttcccttaccctcccaggaccccaggttgggcattggctcattttcataaataacctcatcccagacaggggtgagggaaggtgttgtggctgttttgtttaaattggagctgtaagagggatcatgtcatattttatgcccttcctagaaaggggacgggacacctggtttgcattcctgtattgaccactgctgccgtcactcgtcacattgagttcacatctcctgagagtttgtataaattcaggtcagcgctgctcctatgcagccatccagtgtcatagaaaagcaattcactgataactgatctctccattcagaagtgtgcagttttaatatatagcaataagaaattgttatttatct

SEQ ID NO: 837366 - DNA, 594 bp, Homo sapiens
aaaagtcagttattgaatacatgcttccagtgaaccttcttaaacgtaagatagtgtaacttgttatacaagtattactgttctggattttttgtttactattttaaaactgaaagaaaaaaataggtgtatatacttttggttattacgattacacataatttttttaaaaaacatgtatgaatgggagcctctctgtaccccacccatcactagcttccccctacttcccttaccctcccaggaccccaggttgggcattggctcattttcataaataacctcatcccagacaggggtgagggaaggtgttgtggctgttttgtttaaattggagctgtaagagggatcatgtcatattttatgcccttcctagaaaggggacgggacacctggtttgcattcctgtattgaccactgctgccgtcactcgtcacattgagttcacatctcctgagagtttgtataaattcaggtcagcgctgctcctatgcagccatccagtgtcatagaaaagcaattcactgataactgatctctccattcagaagtgtgcagttttaatrtatagcaataagaaattgttatttatct

SEQ ID NO: 837367 - DNA, 515 bp, Homo sapiens
ttttataaagatctaaacaagtataatttattattatkatgatcatttaccagaaggctacatatgtaagagcgcaaaggaaagggagttttaggaaaggcaattgcaaaacactagaaaagagtgttatccaacagttctggaaagaaaagttaaagtttcctaatatgcttacacttaacgaggccataatatgctaagaagatgatatagatagatagttgattacagatattgatatatagacagatagatgttgatgtttattcatgattcatgtatttcttcttcttgttgcatcttctcaccttcttgaatagagttatcaactgactgaatgctctttacctgttcatctatctgtgtatggttttctgattcctattgtgtgaaagaagagagttctctctgaaataataagtgttctcttgctgcctatgaaaactaaaaacaataacattttggaaatgaatataactttagtgacaatctgatttacccctttcattttaata

SEQ ID NO: 837368 - DNA, 576 bp, Homo sapiens
ttgtacctcccataattcccaagtgtcatgggagggacccagtgggagataattgaatcatgggggattgaggggagtctttaccatgctattctcatgatcrtgaataagtctcacggaatctgatggttttataaaggggagttcctctgcacatgctctctcttgcctgccaccacagtaagaagtgactttgctcctcatttgccttccaccatgattgtgaggcctccctagccatgtggaactgtgagtccattaaacctcttttttttttttttttttttttttttgcaaattacccagttttgggtatgtctttattagcaatgtgaaaacaaactaatacaggttgcaaaagttcacaggacgtttaagccatgaccaagggcatggagtttatactaaatgaaatggaaagccgttggagggtttgtagcagggaagtaacatgacttgatttatggttttaaatgatcctcctggcagccatctggaggactaatagcaagggaataagaatggaagcatcagcccaaagcttctgcagaaatgagaaaagattttggtttaaac

SEQ ID NO: 837369 - DNA, 552 bp, Homo sapiens
actgtccctgatgcttctcyacgtggccctgcatgacatgccatgcctcctgtctctaggaatctgtgagtataaacctcttccttcatgacgatcattcctgtgtctgctgtcttaccatacccgagtaaaacaaattctgggaacatttgaatacatttccttttacctaagaaatagttcatgttggccaggcacagtggctcacgcctgtaatcccagcactttggggggccaaggcaggtggatcacaaggtcaggagttcaaggccagcctggccaagatgttgaaaccccatctctactaaaaatacaaaaattagctgggcacggtggcaggagcctgtaatcccagctactcaggaggctgaggcaggagaatcgcttgaacccgggcagcagaggttgcagtgagttgagatcgcaccactgcaccacagcctgtgtgacagagtgagactccatctcaaaaaaaaaaaaagaaaaagaaaaagaaaaagaaatatttcatgtttacagtagaaatagctttctcaggctgcttcctgtcta

SEQ ID NO: 837370 - DNA, 643 bp, Homo sapiens
aggacaccttagtcaacttagcattttaaacccattaaccaactttttataaattcctatatgatacaattgtcaaatcttcttggcccaatctgagtcagttggagatgagctgattttgccaatggtagcgtcagctaccattgacgtgcctccacactcccaagtctttcctttcataagccacaagatcaaatgaccttctcagtaacttacattttcagtttgacaaaagtattttcactggttccttgtaactctgcatgggagaaatcatgagaaaatttaacaaggacttaagtgtgtccacttatgtcgatgaatcatctgctcctagccctgaaccacttcttcctgccttgttggctctgactgcttctactctgttaataagtggttttgtctgagttgtgctgaagaaaaagatctggtgagggtggaatgcgtcatgggtaaatgaaagtgccaattgaagtgagaacacagaggtgaatggagagattgaacccatattcctttaaatttagacctgaacttatcatttcaagatggggcttcaatattttaagttggaaacagttctgagttaatgctcaggggatccamtaataatctgtcaataaagtagtaatcttgggagatt

SEQ ID NO: 837371 - DNA, 647 bp, Homo sapiens
agttaacaattatgactgtccagcaatgaaatgaacttctttccgtagaaagctctcaagtgggaatgaggctgtagatagrgataagttggtttacttttttttattttattttttatttttatttttagctgacatgggataatcatatgtacttatgagatatagagtaaattggttgaattttaatgtccctcaagtaattacctttttaaaaaagataattaaaatgtcccaaaataatgtattaatatttgggggcaacaatttacacaatgcagaggtgtataaagaaatgtttaataattttctctttcactttccatctctgagtaaacaaatgttaacaatttggtatatatcctttcagacattcctctatattcatataaagatatataagtacacacgtatatttttaattttaaaaaggaaaatatgataaaatatatacacctactatgtccccacaaaaattaaaaaagtttttaaaaaggaaaacatgacaaaaagggtgtgccatagtttactttgctaatatattattacatctttctaggtcaatatatgtgtatctcactcatttttaagtggctgcataattttctatatgactgatataccataatttattcaaacgttcacct

SEQ ID NO: 837372 - DNA, 647 bp, Homo sapiens
catatggagttgatatcagtatattaaaattgtattactaaatacatcttatgcttgaaaataagaaaagggaaatamaaatcagaaatccagaagcttgccaaaaagtgaggggagaggaagtagacaggaatccatgatagtaataagggcctaaatccattgggcttttaggggactgggattgtggaactggagcctttcaatatttggaagcagggctgacaccattctatctgcccatggctgggggctgaaaggggctacctgttctcagcagggtccagagttcctctgccacacagaaacaaagtaccacaacagaaattttgtgggtggcttaaacaacagaaatttattgccttgcagttctgaaggctagaagtccaagaccaaggtgtcagcagggttagttctttctgaggactgtgagggatcatctattccatgcctctttcctagcctctggtggtctcagacactccttggctggtagatgatgttctttctgtgtcctcacactgcttttcctctgtgtgtgtctctgcctcttcagatgccatttcttccataaggacactagtcatcttggattagagagactggtctctaccgattttttttaaatgcctcatgctaagagtgtc

SEQ ID NO: 837373 - DNA, 525 bp, Homo sapiens
tggcatagattgcatgggttgcctaaggagagtgaatgcccaggatccatctctgggccactcaaaatgtaatcatatcgagacaatgaggagcctataaagagtatctaataaaagaaaacacagtggaaccagggaaaaatctggaaagagtggtctcatgaaagccaaaagaggagagtttcaaagagtgaattgtggactaattgggaaatggaataacatgtatagagaaatgtgtctattggatttggaaacatgcaacagtttcatgtgcatgatttggaaggaagccagattagagtgggtttgtccattaactgattcatgatgttcacacatatttctttgagtaccgaacatgcatcagatattacttcggttgttgggggawtcattggtgcaaaagcaagcatgattctttacgggatcatggtagcttatgtgggaagacaattttccaatcacattacttctaggttcctggccatctagccaaaccataggtcacagcccttgaactgg

SEQ ID NO: 837374 - DNA, 525 bp, Homo sapiens
tggcatagattgcatgggttgcctaaggagagtgaatgcccaggatccatctctgggccactcaaaatgtaatcatatcgagacaatgaggagcctataaagagtatctaataaaagaaaacacagtggaaccagggaaaaatctggaaagagtggtctcatgaaagccaaaagaggagagtttcaaagagtgaattgtggactaattgggaaatggaataacatgtatagagaaatgtgtctattggatttggaaacatgcaacagtttcatgtgcatgatttggaaggaagccagattagagtgggtttgtccattaactgattcatgatgttcacacatatttctttgagtaccgaacatgcatcagatattacttcggttgttgggggaatcattggtgcaaaagcaagcatgattctttacgggatcatggtagcttatgtgggaagacaattttccaatcacattmcttctaggttcctggccatctagccaaaccataggtcacagcccttgaactgg

SEQ ID NO: 837375 - DNA, 521 bp, Homo sapiens
tttcacattttggttactttaatgaagaatccatgtcatcaagtgtacaaacttgtattatattcttacatgttttcatatatcaattacacctattgttggcagttattatacactaaatatattaaaatttaaatggaaatgaaaaagaccatgttaaaattcctatgtgctatctggacaagacttcatctatttaattattaattcatttaattattgatggccatctatgcttagaattgttcactaaagttctttctataaacacaagaaaggaagtataagctagatcaagagaagaatttcaggggtggttgtaagtagtttatgaagaataaaagaatttccggcggtaagagttgagagttgttcatggcattctagtaagtcactaatctgatgtgtatgtgacagtgaacaagaaatgratgacaaaacaaaacaaggcagaaaacaatcagttcaaagagtgaaaagggcttcagtgaagcttactgaacaactatttgccatgtgcc

SEQ ID NO: 837376 - DNA, 402 bp, Homo sapiens
ggagtcaaatgttacatgaggaattttgactgtgtagatggggtagcacctctagccccctaattgttcaacggtcaactgtaattcctatgaaaagatgcaaacaggacagagaaacagagtaaaacaggtgggctacctaaatagggcagtgagggaaggtttttctgtggagctatattaagctgagatctaaagacaaagaaagagaagccataccagttgacaggggcagagtcttctggaagagggaactgactgtgtaataccaccggggagggagactgtggcmcgttccaaaacaggagaaggcccaagggcagaggaaaaggcagaacaagatgagactggaacgaaaggcgaaggccaagttattcagggtctagtaggccaggagaggtt

SEQ ID NO: 837377 - DNA, 567 bp, Homo sapiens
catgatgccatgaaagaatattatattatagagaagaaattatgttagatattatactatgtgaagagcagaatattacaagtcatagtaacaaatttaagtcctgattctgtcagacatcatgatagtaagcctcagttttctcacctgtaatgtgagaaatactattgccccatccaggtcttagtgcaattgtaaggattcagtgaaatgcacccactcattcatttattcatcacacacttagccattcatcccaagtacattttctagacttgatattccaggaatctgctacgtcagtcacggatgaaagctctgtgtaaatggtaaaataaagcattatggacaagaacactgttactgaaagagaaatgattttaagatccattatcatcatgtttcaatatgttgaatttagaattcttattcctaaataaaaacgtaaccattgggaaaacttccattaaggtttcaaaaataagcagctgckgctttccttaggtacacgtcttcattttgtaagtgtctgctgagaacttacagcgtacaagacaccacacgagg

SEQ ID NO: 837378 - DNA, 599 bp, Homo sapiens
ttggctaaacgctgtttaatattacaagatcaagtgaacattctcacaaagacaaagaggatgaggtaatatgggaaagagagtctgataagaaaaactgactttaaaaataccatgctgaaaatgyctgccattccattttgtttagtctcccaaacctcaaaacttcatcaaagcaagcaaggatgtagagtttccctttcttgcaattcacttcacattcactgtggtacacttccaaaaggaatctttctgagaaagattcattaggaacatattaagttgcagaaaataaaatcagagtctgacattacataggtaagtacattgttttcaacacagattgtctattgcatcttgtggggccttttgtttgtattaaaagagactggagtccctgtctgaattctggctttaaataattgtggaactttggcaagttactggatctttctgaggcttggctctctcatttacaaagaaaatctgaagggtttgcactagatgacctctaaggtctcttccagatttatattctatgatgttaatatattttaaaatacaaatatttaggctaaattattgagcacagggaaaaa

SEQ ID NO: 837379 - DNA, 633 bp, Homo sapiens
caagacccaggtgccatgataagttcatgagactgtgaaccgaagaccacaaccccacaactgcttaaagcacttgcacctgtaatccagtgccactgcagatgcttgtaggctatgtcagacccaacaccaagagagatcccctcagctaagtcccctcattgagaagaaaacaacaggaggaccacaaaagccctttatactgaggatattaacaaccaatgccactattgccccgtcacaaatttttacagcctaggccactgagatgtccacagttattactgacattgaacacaacagaagaagctgcataaagagtatgctaatgcacctatccagaaatagggtcaccacactcatcacaactggcactctaaaatccaactgcagatgaaagtctttctctatgaaagtcactctaaaacatttggaagaggcaattgttctatcagatgcatagacataaatacagggacagaagaaacatgaaaaagtaaggaaatatcataccaccaaaggtacataataactctagtaacagagtccagtgaaaagaaaatcaatacatygcaggaaaatgaattcaaaataatgatcttaaggaaactcaatgaaatacaaaaaatacag

SEQ ID NO: 837380 - DNA, 605 bp, Homo sapiens
agtcagggtttcaccatgttggccaggcttgtctccaacttctgatatcaggtgatccgcctgcctcagcctcccaaagtgctgggattacaggcctgagcyaaggcacccagcctctgtattgattttttaacttcgccctagatattaatccaggtacaggaggaggaagtctagggcaatcccatcaaccataacaaccctagccagttggtttagactgacttaaatggctttagcgggagaatgtcatagctgtgatcacttcagctaaaaaaagtggcgaattccaaaccaccttttctcattggatgcttcccctcacagaaaaaaactgccataggacttacataaataacaagtcagttatcctatccctccaagacacaagccacagaaccaagagcagctgcttctggagaactctgcacaatcatctgaggctgcatggtctcctggtgctgtttcctcaaaccctcaaaggtctgttatggccatccccggggtacaagtccccatgagaaaggctaattaacacctggcttccagactaaaagcaaatatcaagggtgcacacgctgcccctggaaagagagcttacaatt

SEQ ID NO: 837381 - DNA, 631 bp, Homo sapiens
ctagagcttgcagtgccatgtaggcagggcacctcaaacctggatagatacctgtaaggagctgattttgatctcctctgcaggaggttctctaatactgtaccaaccctgcccacagaccccacatgcaacattaccatcaccaccactggctgacatgattcccttcatgatttcacccagaactgcaagactggggcaccagaatggtgttgacaccccaaataagagtgattctcactcaagttggacatgggctgaattcaggaatttggattaccactgtctacccttaaactagagctacttctgtgggcatatgaaaaaggctctatcaggttccacctctggtctagaaaaacctagagaagcaggaggcagcccttaataaatactgggtttgccatatctggctgaatggcacagagatattgagtattgtttatggtactatttcccatccaaagccaaaacaaatgtgcccaagctaccactaaagaatgtatttgtcaygaatatgacaggttatcaaatgttaccgagggataacctaaaattttcagttgcatactttcttgttttagcattctatagcaaagaaacttcttgttcagtaaattgaaagatacaa

SEQ ID NO: 837382 - DNA, 604 bp, Homo sapiens
ttgtacaaaatacttgcttcactaaattttaaaaagcagctcattaattatctaaatattgtcatgttakgcttttcctaattttttccgtgtagctttatatatggggacagtgggtctgagaaagactttttaaaagttttccattgtacactaggttcatttaaatttaaattctcaatagaattgaaaacactactgctggcttatagggtgttagacattttgctagatgctgtgaaaatacagactagtggtttcttatttagaggagtatgcagtctaatggaggagactttcatgcaggggactgagtaaagtgcagtatactaaatttcagggtataccagaggagggctgatttatgttgtctgaggatagtgaatattcattttcagagcaaccggcattgaattgggctatgtgtgatatgtttttgctttttacctctttctgtattatctcaatgagagctactccaaacctgtgactttataatcctatcatcccattttcttcccacattttcacatatttggagctagaatatatatgaagcagtaatgcatgataggaaatctccttgatgattaatctcctaaac

SEQ ID NO: 837383 - DNA, 487 bp, Homo sapiens
tcccatctctgcccctttcaatagagcttggcaaagtttttgtaggtataacattccatgaaacattgtgtgtcttctgtgcatgtcaaagtgatatgtamcagtagacaagagggtcgcccaaggatcctccctagataaccccatctctatccctggcttatgttgagatggctgatgggatccttgagtcatacacctagtttcttcagcaaaaggttgtctgggaacacaattggccttctggccagagcacactttctcagcagtgaatttcctaactttagaatcccttgcaatccagataggccaagaacttccaaagtcatcaagtgctggttcttttttgcttatggtttcttcctcaattcatctctttcttctcagactttattatgagtagcaagaagaaaccagagcttccacacttcgattggaaatattagctaaatatccaaattccctgcatacaatatatgctttccat

SEQ ID NO: 837384 - DNA, 622 bp, Homo sapiens
ttattttattttacttcattttttgtagctatgttaaatgggattgccttcttgatttggttctctgcttgatcattattaatgcagagaaatgctaatgacttttgtacactgatttcgtattgtgaaactttactgaattcatttatcagatctagagctttttggagaagtctttagcaatttctagatataaggttatattgccagtgaacagagataatttgacttcctcttttccaagttggataccttttatttctttctcttgcctgattgccctatgagttcagcactatgttgaataggagtggtgagaatgaacatccttgtcttgctccagttcttagagggaatgcttgcaactttttcctattcagtatgatgctggctgtgggtttgttgtatagggcctttattattttaaggtagttcttctgaagtttgttgaagatttgtatcatgaaagggtgctgacttttatcaaatgctttttctgcatctattgagatgattcatgaagaatttttgtatcactrcctggcagatgtttttcattctgttaaaatttttagaaaccaagtcatgctttcccagttaacaaagaagcaaagttaaatac

SEQ ID NO: 837385 - DNA, 613 bp, Homo sapiens
atgtctattaggtttatctatgttgctgcaaakggcaaaacttccttctttctttggctggatgataatctatcacatatatgtaccacaatttttatactcattcatcaattgatgtacacttgggttgtttccatattttggctatagtgaatgatgctgcagtgaacatagcagtatagttatcttttagagatacttatttcatttcctttgggtatatatctagaagtgagattgctggaacatatggaagttttattttttattttttgaagaacatctatattgttttccataatgcctgtgccaatttacattcccatcaatactgtgaaagggttcccttttctccacatccttaccaacacttgttatcatgtgtcttctcataatggccattacagtaggtatgaggtgatgtttcattgcggttttaatttcattttcccaatggttgatgatgttgagcaccttttcatatacatgttggctatttctatgtctgttttgggaatatgtctgttaaaatctttgccaattgtaaaaatcaggttgtttgttgttttactgttgacttgcgtacttcctaatatattatgagtattaaccc

SEQ ID NO: 837386 - DNA, 589 bp, Homo sapiens
tgttagtatcctcagaaactccttcactaaagaaacttggcaaacccttctcatgcctcctggtgtctctgggygatcaatgtggccttaagatgctcgacagtttccaaggcaagtaactgctccctttggccttggactataaatcattcaactgaacattgctgtctacaacctggactatttggacacatccagctaactattgtgtttggggtcacgggaacagcaccccacacacttagcatggctccagaggccttcttaagacaggataaagcaacacccaggccctctgtcatttctgcttgcagcaggactggcttcctatatccacagtcacctggcaggtgcccaagtgctggaggaggccacctctcggccacatgggaagaacgctgggactcactgagtggacagtgactggcatttgcgggctgcaaggatgacaagtgatggggcttggggcatgcttctgctctccctctcttggccatatgtcccaacaaaggatggggctggggatccccaaaattaggcagacatcaggcagtcacaccagcattgggtgccctatcgaaccaatggc

SEQ ID NO: 837387 - DNA, 589 bp, Homo sapiens
tgttagtatcctcagaaactccttcactaaagaaacttggcaaacccttctcatgcctcctggtgtctctgggcgatcaatgtggccttaagatgctcracagtttccaaggcaagtaactgctccctttggccttggactataaatcattcaactgaacattgctgtctacaacctggactatttggacacatccagctaactattgtgtttggggtcacgggaacagcaccccacacacttagcatggctccagaggccttcttaagacaggataaagcaacacccaggccctctgtcatttctgcttgcagcaggactggcttcctatatccacagtcacctggcaggtgcccaagtgctggaggaggccacctctcggccacatgggaagaacgctgggactcactgagtggacagtgactggcatttgcgggctgcaaggatgacaagtgatggggcttggggcatgcttctgctctccctctcttggccatatgtcccaacaaaggatggggctggggatccccaaaattaggcagacatcaggcagtcacaccagcattgggtgccctatcgaaccaatggc

SEQ ID NO: 837388 - DNA, 536 bp, Homo sapiens
ggtgttgggagctgagcactgaccacctaaatttttccagaaatgaagccagttggctgaatccaccttataccacaatcaaaccmtcaagatcatccaataggataaaagaaaataaaaatgtatccaaaagtcagcaacctcaaagactgaaggtggatatgcccacaaagatgagaaagaaccagtgcaaaagtcatgagaacaaaaagtgcgccctcattcctccaaacaaccgcagcacctcttcaacaggggttctgaatggggctgagatggctgaaatgacagaaacagaactcagaatatggagagtgaaaatgtagatgaatacagctatttatggagaatactataaatgttcctcaaaaaataaagaaacaaaatctactgtagaatccagcagtctcactactggctatgtatccaaaggaaatgaaatcaacatgtcaaagagatatctgcactccatgttcatgttcattgcagcatcttttaaaatagtaaagatatggaaacatcctaaattcccatga

SEQ ID NO: 837389 - DNA, 516 bp, Homo sapiens
agtttgtttattatcattttatccttttatggacatttgggttgtttcaaatcttaggccaccaataaggttttcattagcatgcgaatttaaatcatttcatagacatgtcttagctaaacacgaatgggattatcaggtcataaggtagctgtttgtttacatctacctgaaattacctgaagtttctattaagtttttcagagtggttagccattgtaaattcccaacatcaatgtatgagagttcaagttactccaacaattaattcaccaacatttggtgttgtgttttacttatgccattatattttctgcatttctaatgctttgatgtcttgtgccttcctaacactggaggaactatccctcttatggctagccaattcctagagatggtaaaagcctcacttgcaaccaatctagaaaccayactccagccacttcttttatcaggcacctatagcgctattacactccaggccactatttgccttccctaatcaccccagggcca

SEQ ID NO: 837390 - DNA, 403 bp, Homo sapiens
actcaaccaagagccagttctttctgaagctcagctccatggctgsctaggacacggctgagtattactgtgaaagactcagtgaggaggtgtccttgtgagccctgacacaaaacttgctgtcagggcactgaggaccgccagcaagactcaggaccacaagggggactcaagaccaccaggggaagagcaggttgcaggaagcacagggccagccccagagcaggtgtgggtggagatgagaggctggtttactgccagggtgtggggctgcctctacatctacatgtttcctccagggaccctcccttatttcatgatgctgtgcctagctctacgtctctgaaataccacagttttgttgtaccaggaggaaaccttcttacaggcactaaatgcagaa

SEQ ID NO: 837391 - DNA, 403 bp, Homo sapiens
actcaaccaagagccagttctttctgaagctcagctccatggctggctaggacacggctgagtattactgtgaaagactcagtgaggaggtgtccttgtgagccctgacacaaaacttgctstcagggcactgaggaccgccagcaagactcaggaccacaagggggactcaagaccaccaggggaagagcaggttgcaggaagcacagggccagccccagagcaggtgtgggtggagatgagaggctggtttactgccagggtgtggggctgcctctacatctacatgtttcctccagggaccctcccttatttcatgatgctgtgcctagctctacgtctctgaaataccacagttttgttgtaccaggaggaaaccttcttacaggcactaaatgcagaa

SEQ ID NO: 837392 - DNA, 614 bp, Homo sapiens
aattttcctgaaccttttccaaagacagaaaagttagaagctcttmcaccatgcttccataatatcctggcagtggctatatcacaactactccactgcactgaaactgtttcatagcccatctatctctgttagaacactaagcatactggaccacaaaggtcatagcccagtccctgcaacaccatgaatgcttataaaatcattgtaaaatgattcttctcaattgtctaggcaggtagggccactgcaccagtgacatctgagaggcctgacccgaccagcctatcagtgtatcttaacccctcttgagggtcaaaacaaattcctctgaactcagcactcactagtgagttggaggaggctgatgacagggctggtgtctagagtaggatgagatgagctctgggagccataacagtgcagaggttcctgccatcagcatttcagggtatgggctgagcatttcagcatttcagggactgggcacagcagctcacacctgtcatcccggcacttaaggaggccagggcaggcggatcacctgaggccaggagtacaagatcagcgtggccaacagggtgaaaccctgtctctactaaaactataaaaat

SEQ ID NO: 837393 - DNA, 608 bp, Homo sapiens
atcaacctaacatagttggaatacttctgtaaaaagatgtgttcttcttcctattatttctttatttgatcacttattaatatgtgtattggtttatggatgtctatttcatactctgaagaagatccatgctacattattcattttatttttcaaaccaccacagctttattatgtgctgggagctcatttagtttggatcctgcatccttacagctcacctcatgcttttgtttttgaacacttccctgtttcctgctattataataaattctaaactcattttctatattatctttttcgtacatagaatcagccatttttctaaagactgcttgtttctgatgttaaagaatagtatttaaaaaattgtaatactgggtatgtgcattgttaacgtggtataagtacttgtaggacctctcaactgactggcctagtaaactatgtatctaaccttctgtaatttgattacattaaaagtgagaacacactggtctctctacccaattatgctaccacatggacctttctagccttccttccttgactgyctataaccactcactgcaaagtgaggaaccccatccaaccatatgccatttgat

SEQ ID NO: 837394 - DNA, 380 bp, Homo sapiens
cttttcctgtgatcccgggatttgttttttgtggctgcatagcaaatgctcatctgctaagtcacttaaaagaataagcatttattctcccacagtgctgcgggacacaagtgtggcgttaaaaggaccatgctcactcctaaggctctgtgccaggacctttgtagcctctcccagcttctgtgggctttgggcattcctgggctttccttgtttcatagacgcatctcttcctccatcttcatgcgccttcccctctgtgtgtctctgtgtcctcttcttttcaagacaytgtcattgtatttaagccccatcctattccagtggaacataatttttaactagctacacctgcaaagaccctatttccaaatgaggca

SEQ ID NO: 837395 - DNA, 380 bp, Homo sapiens
cttttcctgtgatcccgggatttgttttttgtggctgcatagcaaatgctcatctgctaagtcacttaaaagaataagcatttattctcccacagtgctgcgggacacaagtgtggcgttaaaaggaccatgctcactcctaaggctctgtgccaggacctttgtagcctctcccagcttctgtgggctttgggcattcctgggctttccttgtttcatagacgcatctcttcctccatcttcatgcgccttcccctctgtgtgtctctgtgtcctcttcttttcaagacactgtcattgtatttaagccccatcctattccagtggaacataatttttaactarctacacctgcaaagaccctatttccaaatgaggca

SEQ ID NO: 837396 - DNA, 606 bp, Homo sapiens
agcattctaattccagcaggattcttacctggtagccagaatcattacaggtcatgtagcatttaccacagttgatacacatttcttcatcaatcatagccacaacttgctctacgttgctcaattcaccaaatgttccaaggtactgcagtgcttttcctattacatcctaaaaatagccactgaattacttagcaagctcattttaaaacattttcatgtaataattaatatcactcagcattttcctgtttttatacaatgttgcattatattaacttgggagactggatagtataattctcatagataagctttttatgataattatagcttagatgtttgtcttctgaaagatgggcaatatgcatgcctggcttagaaatacgagacctaattaactgcattcaataggtttttgactggataatttaaaacagcatttctgtggacagaaagaataaatgacacccgtgtgagttgttatggctaactttttctyatttttggaccttgaaggaccaaaagtaatacaaagtgacaaagggtaatacactatgctagaaaagtttagattgctcataatgaagggaatacgagtgtgaa

SEQ ID NO: 837397 - DNA, 468 bp, Homo sapiens
tgaaaaggtgataaatcctagatgataaacaaaaggggaatagagagaaccacatgaatatgaacaattttctttaaaaaacaaaaaaaaacttgatccctggggattgcagactccytatctccctagccctggactggctcccatgtggtggacagatgagttctaaggacagacttgtgcctaagattcactttctgaattactgcttcctttttctgccttaggaatcatctcttcccttggagactaacaggagaaattagcattcttttcagatagatccaatctgccttcaggaaagaccaccccgcatggccaatattcatgtgcaaaaattcagacataaaatgcaaagtgtagaggaggctttaagatacagtaaacaaggccaggcatggtggctcataactgtaatcccagcactttgggaggccaaggcaggaggatcctttgagtccaggagtt

SEQ ID NO: 837398 - DNA, 611 bp, Homo sapiens
gcttaaaagtaagcatactctatatgtagttttataactttcctattaaaacactcagaggaaaagatatttgatattgccttaaattttttcaaaaacaattctttctcattataaaatatatattaaaaggcaaatgaattcataaattatctcacctttggtttttagataaaccacaaagaaatgtctacagcataagttccagtttgggcagatacctgaattgtaaaaaacaaacagaaaaagacatggtcaatatggttgaatctgagtatggaaatttaattatttcaatagaaccctaacttgatcatttacctcctaaatttttacgtccaagctgttctttagatatctatagaatgtcaagaattaagaaattctcctggactttctattgcctttgattaatgttggtatttcttgaaattaaaagtatatcaaaacaggccgggcacggcggctcacgcctgtaatcccagcactttgggaggctgaggtgggcgggtcacctgaggtcaggtgtttgagagcaacctggccaatgtggcgaaaccgtgtytttactaaaaatacaaaaaaattagctggacatggtggtgtgtgcc

SEQ ID NO: 837399 - DNA, 609 bp, Homo sapiens
ttttctacacatgcacacacacacaatgattcttgttatctgtggtagttatggtccattaaattgycacaaacactgagttagtgaacactgaaccactgcttctagggaaaatgggaaagaaggttaggtttctaggagcctctggtcacaacattttcatcaactagccaacacataaccttgttttatctgtatttctgtttaaagacaccttacttaatatatatttactcattaacactgaaatcatggctgaaagcataactcatgattgagagaagcttacttaacatacatatttcttgcatagatatatcacagctttcttgcacttaggaatattacacagcactttgggacaacactgggggccatttgcttaaaaaagcaaaattaccaaaaaaaaaaagcacagaaaatgtgaaaaatgtggcattaagtagactgcaaaagggatgtttgtttatagtataagaaccgaaacaagaaggcagagtatcaagagtatcaccttgtccaactacagctgagaatttgcacatcaggtgactcaaatttttttaccactccgagcgtgcctgcaaattattacaaaagcaccgtaag

SEQ ID NO: 837400 - DNA, 580 bp, Homo sapiens
ttcaaatgtgtcttctgcttccactctttaccccccaattaattctctactcaacaacaacagtactcattaaaaatttaaattatgggggccgggtgcggcggttcacgcctgtaatcccagcactttgggaggccaaggcgggcagatcacaaagtcaggagatcgagaccatcctggctaacatggtgaaaccctgcctctactaaaaaaaaaaaaaaaaaaaaaaattagcctggcgtggtggcgggcgcctgtagtcccagctactcgggaggctgaggcaggagaatggcgtgaacccaggaggcagagcttgcagtgggctgagatcgtgccactgctctccagcctggccaacagagtgagactctgtctcaaaaataaataaataaataaataaataaataaataaataaataaataaaaataaatttaaattatgttactcctctgrtgaaaactcttcagtggctttccactgtattttagataacacattaatgcctttctcagcacctaccctgtgcaacctgctccccgatgccctcctcggtgcctttcatatcattctctgcct

SEQ ID NO: 837401 - DNA, 609 bp, Homo sapiens
gcagaaattagtaattcagggttaagagtttattgttatattcatgcaacttttctgtaagtttcctgcagtttgaattgtttcaaaataaaaaaggcttactcttttcttgaaattttaaatatttaattccaaaatctcctgaagaaacgatggaaactttttctaattaaagttagatttgcaatggaagaagactgttcactgattcgtgtagattagttttgaagcatgatattggattatgaaataagcctcaaatatcgggagcagtactttactatagctatcaccatatttacttacaagctctttaaggtctagttaactaagaaacaaatcttgttttgaagaagtacctaaaatctgtgaatggtcaccatggaataaagaacttcctcaaaattctcatgtataaatcagttgtttgaacacagagtaaaattctactgatataataccatcttttaatatgggaaatttttaataagcaaagsatgtaacatttggttttaattcatattatgccttcatggaatgaatttaatgtctactgcgtggaccagtaatgggcacaattgtgagctagccatgtccctttttgtacat

SEQ ID NO: 837402 - DNA, 613 bp, Homo sapiens
agctgtcagacagggacatttaagtctgcagagattattgctgtcttttgtttttctgtgccctgcccccagaggtggagcctacagaggcaggcaggcctccttgagctgtggtgggctccacccagttcgagcttcccggccactttgtttacctactcaagcctgagcaatagcgggcacccttcccccagcctcactgctgccttgcagtttgatctcagactgctgtgctagcaatgagtgaggctctgtgggcttaggaccctccaagccatgtgcggaatataatctcctggtgtgctgtttgttaagcccgatgcaaaagcacagtattagggtgagagtgacccaattttccaggtgccatctgtcacccctttctttgactaggaaagggaattccctgaccccttgtggttcccgggtgaggcgacgcctcaccctgctttggctcatgcacgatgtgctgcacccactgtcctacacccactrtctggcactccccagtgagaggaacccggtacctcagttggaaattcagaaatcacctgtcttctgcatggctcatggtgggagctgtagactggagctgttcctatttggccatgtt

SEQ ID NO: 837403 - DNA, 564 bp, Homo sapiens
tctctgacccctacattctgggatcagaaaggagacattcttcttagcttaacctttttagcttaacctttctcattctttgaaacatttaatcacaattataaggaaatagttgtcccaagtttgtttctcctactagaatattaattccatgagggagagactgtattattcttattcataacaagtacatagtaggcacttaatatgtgtttcttgaatgtctgattctctaatttaaattgctcaaaagtcatttgaggacacatgtatatcactgaagttctgtgggttcataaaagggttgacaacatgatgtacatttttgttttctcagaagattccattgaggtcatcccttgacttactctttttttttttctagatggggtttcgctcttcttgcccaggatggagtgcaatggcgcaatgtctgctcactgcaacctctgcttccygggttcaagcaattctcctgcctcaggtagctgggattacaggtgcgtgccaccacgcctgactaattttttatatttttagtagagacggggtctcacattgctt

SEQ ID NO: 837404 - DNA, 528 bp, Homo sapiens
acctgctttgggctctgaatagttcatagatatttcagtaagagttcatgtagtttgtactggcttttaatagaaactctcttccataattcagatttgagtccataggtcaatgactatgaataatagacaccatattgtacctcagattgcccttcctcaaattttattctctccccttcctaatctcttctcaaaattattgccaattatccattcagtggacacttatggaatactttatcttaaaatttaactttgttagtagtccctgaacaaaattacacacatctgagatggaaatttacaatatcatctaatttctgcctttctacttctatctgttacagtgctactctggggattctattctgctgtgaactaggattccttgcttttctctaaagaagcttcacttgttcctccttttttgccttgctcaagctcttccattactccaatttctctttccygagcagctgtaaaattccactcatctctggttgccgacctgtgaagtcatctttt

SEQ ID NO: 837405 - DNA, 513 bp, Homo sapiens
tccattgtgtgtgtgtgtgtgtgtgtgtgtgtrtatatatatatatatatatataaaaaacgttttctttattcattcatctgtcagagaaaattgattccatatcttggctattgtgaataatgctatgatgaatatgggagtgcagttatctcttcaacatattgatttcattcactttggatatacacccagaagcaagatttccggatcatatggtagttttatttttaattttttgaggaacctccatgctgtttccataatggctatactatttttagctaatttattgattgattgattggcatctgctctaggaatcacagtatgcatacttcacttaccacagtttacttagaattagtagtcagtcacttcatataaaatgtgagaacctttaacattataaacccacttgtgccgcctctatcttttgtgctgttgttgctagatattttgcttttcatatgttttaagtccccatgtcattatgttattattttgttttat

SEQ ID NO: 837406 - DNA, 603 bp, Homo sapiens
tcatcataatgtcctccaggtttatctatgttgcggcaaatggcaggatttccttcttttctaagggtgaataatattccattgtgtgtgtgtgtgtgtgtgtgtgtgtatatatatatatatatatatatawaaaacgttttctttattcattcatctgtcagagaaaattgattccatatcttggctattgtgaataatgctatgatgaatatgggagtgcagttatctcttcaacatattgatttcattcactttggatatacacccagaagcaagatttccggatcatatggtagttttatttttaattttttgaggaacctccatgctgtttccataatggctatactatttttagctaatttattgattgattgattggcatctgctctaggaatcacagtatgcatacttcacttaccacagtttacttagaattagtagtcagtcacttcatataaaatgtgagaacctttaacattataaacccacttgtgccgcctctatcttttgtgctgttgttgctagatattttgcttttcatatgttttaagtccccatgtcattatgttattattttgttttatacagtatgttatc

SEQ ID NO: 837407 - DNA, 572 bp, Homo sapiens
aaagatggttggatagaattttaaacatcttactcataattgaaactgaaattacattttcaacacatcagagtcacaaagattaaaacactctaaacttcattttggcacaaacgtgggaaaaacagccactctcatacgctgttgatggaggcagaaattaggaaaaatacttttataaggagaaatatttggagttgtcaaatatttaaaaggtcatatcattgactcagaattacatttctatgtctgtagacagatagcaagcatgcagctatgtattagaatgttagataacattaagccctcaagggtaaaagcaaggtttggggtagaaaatgactaactgctatttttttattagatgattaggaacatcctgtctgatgcactgacatttgggcagtaagccaaataatgaggagaagtgagccatgctaatacctagaaggacrgctttccaggagaagggaacactaagggtaaaagcctgaggcagcacaaaggagaccttgcagctggagcatttcaaggtgtgtatctgtgtgttagtgagagttctccagagaaag

SEQ ID NO: 837408 - DNA, 588 bp, Homo sapiens
  misc_feature 1, 2, 3, 4, 5, 6, 7, 8, 9, 10, 11, 12, 13, 14, 15, 16, 17,18: n = A,T,C or G
nnnnnnnnnnnnnnnnnngaattctttaagactccagtgcatttctcttctgtgctttaaattcaaagctaggtgctttgaactcaatatctaattgataccactggcctcagcttctctccttatctcmaactcatatattcaactgcttactcaatgcctccacctgaatttctagtagatatggcaaacatacccattccaaaaaaataacttattttttctatttcttctctctccaaacatgctcctcttccagtctttattaggccacaaatgaacctcatcattattctgaaaatgttgaccgtttttcagttatattttacatactttacgatttctcacatgctatatatattccatttgaatacagttgtccctcagtatctgcagagaattggttgcagaacacttccataccaaaaaatctgcagatgctcaagtctctgatataaagtgtcataatatttgcatataacctacagcaaatccttctatataatttaaatggcctctagattacttataatacctaataaaatgtaaatagttgttatactgtattacttttaaaattttatatta

SEQ ID NO: 837409 - DNA, 619 bp, Homo sapiens
ttttctccaaaattgtcttctaacttccctcttgcttactttgccccagctacactgatcttattgttacaaaatttgctaactttattccagcttcaaggcccttaacttgtgttaccgctatctataatacttccatcagagtatgatagtattaaggattatgtattaattattttctgagtatttgaggacagtggcagaatatgaagaaagaaaaggaccacttcttgcttacttccaaggtaaatagaactttccctacttttaattctggatcttccttactatcaagaaaggttaactttctctgtggatagtgtattgtcaaaggaagggaggcagaaagaactctgtgtttcagaggttgaaaagaaagcagattccttggtgatatctctgggaaggaggaatggtggttgaagatgttattaggcccaaatttatacgggcagagaatctcccaggcagtaagactttagaggaaagtggctgccagtagtgaagcctgtaaaggatggygcattacaggttatggtagatgtcagcatggggtgaatgacgcgcaaaaggagagggcttcccttgttgacgtatccttcttctaagagaagaaccc

SEQ ID NO: 837410 - DNA, 548 bp, Homo sapiens
agtcttgggggagacatcccccctgaaatattgttcctaatatccaactggggagagcataatattgaycccaatatcaaaagctgtgtacaccttccctgtgatattgttcctaatatccaggtggggaaaatgctgatattactcccaaattctcaagaggtgtacgccctcccatgatattgtttctaatatcctcgtaggtaggtataatattattccaaatatcccagatagtgtgcacaccccctgtgacattgttcctaatatacagcgggaaaggggatgatattgcttgcaatatctcaggtggtgtaaaacccgcctgtgatattgtttcttatttccaggcagggagagaatgatattactgccaatatcacaggaagtgtacacaccccctgtgatatttttcctaatattcaggagggaagagaatgagattactcccaatattccagggggtgaacaccttttctgtgatattgttcctaatatccagaatggagaggatgacattactctcaatatcacagtggtttataccc

SEQ ID NO: 837411 - DNA, 595 bp, Homo sapiens
tacacacagcttacagatgccaaggtgggcacaaaaggaccctgtcttccaaatattggggatctgtgctctaattgctgatcgcagaggtgcagacaaagaggtgggaagccwttgctttgctcctcctcccattattacaagtccataccgcctaccttcccgccattggttgttgtgactttcagatgacttaaagggctggtatctttttcctgccttcatttttctctttttccacttttagaagccagacataaaagaataaacattacaaaacaattgcatatgtgggaaaaattaggaagtgaccatgtattctcagggaaaggtgcaggctccaaaaggacctaccaggaccttaagtttattctcaggctgatcactggcagagacaggctacaacagttatgatacaaaaacaataatgataacaaaaacagcaaaccctgtggaagcgggagaatctgatttccagagttaccatgttattagcttcaaatgtcaaatttttttaaaaaaattacaagacataaaaaaaaaaacccagaaaagcataacccattcaatggaaaaataaaactaaatcaataga

SEQ ID NO: 837412 - DNA, 623 bp, Homo sapiens
tattttaggaaactgaaagggtagttaaaaattgtaaagcctacataaatggttgaacagcttgtagaagaagagtgactatcttctagtacgtatatttattcaatactagccaggcttttctaagagtaaggacttaagttttaccttcttggaggcaaaatattgtaattgaacatgagcaactttggaattgagcataacttagtttgagctgtgagtctttggcaaggtataaaaccttctcaagtatccatttttgtacttgcaaaatgggggaaactaatatctaatatttggcatcttggagttttacatgcgatatcaacgattaaatgcctggtacacaaggtgttcactaagccttttgttccaaatattttctcctataaataaagcaaagaatgtttagtggtaacatactaccacttctaatattattgttagtaatgatttctgtttattgaacatctattatatagtcagtattggaacggctgctttacatgcacttwttgagcatctactatgcacctgatttttgagttaactactttattttaaaattttgtttaattatttatttttgtggctacatagtaggtgtatatatttatgggtta

SEQ ID NO: 837413 - DNA, 617 bp, Homo sapiens
atgaggaaaaaagaggaactggaataaggaaraagcacacagtagaattctaataacttggccatactctcttgcttgtattgtatagtgagagtagaagggcttgcattaatattatatattctttatgtctccattcacatatattaaaagtactgatttacatattttaataaaaattgagatttgaatttgagcaactagaatttattgattaattgaacatatttactgaggatgttctatatgcaaagcactgttttgagtattgggataaagcagtaaatataccagattaactttttaccatagtgtggctgacgttctagtttcagaaatagaatgattagcacaatctttttattttactaagaaactgagaaatcagaagtccagatgacttttatatagttctaaaaccaggacaaagtccagatttaattgtagactatcctgataaccagtgcagtgctcctttcattacaaattcagctatctacatggagtagaaatgctatctaatagacacagggatggaagaaaggtggatgagtggagagagagatacgcattcataaatattatacctaagcaaaaacaaataatacattaagaat

SEQ ID NO: 837414 - DNA, 608 bp, Homo sapiens
ctgttctattttattaaaatcttaacatattccaacaaggtattcatttatttattctacaacattctagatgcttggggtggaaaggtaagtgagacatcatcactgcctctatgattctggcatcttactcagcgagaccaacaagaacataaataagtatgatctaatgtggaaagttttatattcaaagtgctttgagaaatacagtgtggtaagtgctgtatgtaaacttaccccacaacttgatccttttcccctaatttcttctgtacagatttataagccaaaaactgatttattggacccactgcactcagagaatgctttatgaataaattcttgtcaatgaaatatatgcagacatctgctgtagctgcctcttccctttcctccttcctcctacctgaaatgtggatgtgatgtctgactttgggtcatttgagttgcggctggaaggataaagtccacatgccaagaatgcagaacatgtgttgatttctcaygtcaatactttactacccttgaagctcttgttgtataagatataaagacctttcacttgtttaagccactgttgcagagtgtcctattacacacacagccga

SEQ ID NO: 837415 - DNA, 606 bp, Homo sapiens
gatgcacatatttcttatgcgaacacatctgtttttgatgtctgtgtaagggttttgtggtttaaacatatcaacattcacataactaatccctttttgatgaaaattgttgtttctaaataactcattattaataaaatacaacaaacatcttcacaaatatattttttgcttacatctatattttagtaagatggtgtattagtcaatccttatactgctataaagagctaattgagagtgggtaatttatgaagaaaagaggtttacttgactcacagttccacaggctgtagaggaaacatggctgggaggcctcaggaaacttacaatcatagccgaaagcaaaatggaagcagacacatcttaccatggaggaacgagagagagagagagagagagagagagagagagagagagagagtgaaagtgctacaaacttttaaagaaccagatctcatgagaactcactcactgtcacaagaagagcagggggacatccgcccctctgatttaatcamcccccaccagggcctctcccaaaataaagaattacaatttgatgtgacatttaggtggtgacacagagcaaaaccatatcaaatg

SEQ ID NO: 837416 - DNA, 528 bp, Homo sapiens
caaccagttaatttgtttcaggacaagaatttaccatataatactctttttatataaattccgccccccctttttttccttttttttttcgaagatgataaccattcttttccaaagcgaaccttttttgtgtcttgtggactaggccacaagaatataagttactatatacatgttacactgttaacttttagcaaactttagttgaaaacctttaaaaaaaattttaaaaaaatgcatgttgtgcacatgtaccctaaaacttaaagtataataataataataataaaaagaaaaccttctaagtttgggattttaattatcctttgctattaataagaccttgttttgtctaaattagaattggtatagatggcttttttttcttaactttgtatctctctctctttctctctttctttctctctttgactttgtctctctctttgactttccttttgcctctgyctcttcctctctctctgtgtgtgtgtgtgtgtgtgtctctctctctctctctctctctat

SEQ ID NO: 837417 - DNA, 528 bp, Homo sapiens
caaccagttaatttgtttcaggacaagaatttaccatataatactctttttatataaattccgccccccctttttttccttttttttttcgaagatgataaccattcttttccaaagcgaaccttttttgtgtcttgtggactaggccacaagaatataagttactatatacatgttacactgttaacttttagcaaactttagttgaaaacctttaaaaaaaattttaaaaaaatgcatgttgtgcacatgtaccctaaaacttaaagtataataataataataataaaaagaaaaccttctaagtttgggattttaattatcctttgctattaataagaccttgttttgtctaaattagaattggtatagatggcttttttttcttaactttgtatctctctctctttctctctttctttctctctttgactttgtctctctctttgactttccttttgcctctgcctcttcctctctctctstgtgtgtgtgtgtgtgtgtctctctctctctctctctctctat

SEQ ID NO: 837418 - DNA, 573 bp, Homo sapiens
ttctccaaaaaccccctcaacacagcattctcagaaacaaaaagaaagaacgcacacactaagctaggaaaaacacacataattacacctcaccacaaacagagatctggaaaaattkgtcgaatccagcatctttgccttcgccattaccaccctcatatcaccatattacacccacggtgagcaacgataggggcaattgacaacttcgtttctcaataggcctgttgaaaacagcaagcctttgggcatggtttatagttggctacgttttcaagtgaattctcagctctgtttttgccccgtggctgaagcgccatttctaatttgcatgtctcgccctttcccgcgtgggtaggcgtggctacggcgatctgagtccccgctgcggtccagctctgctcgcagcggccggccgaagctgggctggggctcccggtctggaccatccgggggtcaagacagtggtcagggggaaatgcgcgtgggcgtcactagcggtctgtggaagggagttggaggagagtggtccgagctcttttgaggaaagccatcaggtcatcactgtaaaga

SEQ ID NO: 837419 - DNA, 632 bp, Homo sapiens
cttcatgatccatgctttaagagcttccccaaggcatgcagagcaagctgagaagaggtagacaagcctgcagacctttcaaagaagtggggtggcttgggaagtaaaagaagatctggagataggagttcctaaaaagcagacaagagattaccgaggggttccccacagctccagcacacagcagctgcaaaaaaaatgcagtggaattactgagggacattatgggcttgatggaggacagggaatgcttgtgccaagccaccaaggatcatgctgtggcagttgtgaccagatagactatacttttgccaaggtgaaaggatttccctactaaatcctttactttccactttgtttaaaatgagtttaacaccaagaaaatagttgtctctatgtccttatttctaatcttcctgctcaaccatgaactgcactaaacacactcagacccatctaacctaaaattgagaaagggaggttctcactcctggagagagaattactgaaagggcggccctcatacagttcagggtcatacccccaakagctggttttatatttgaaagcagacactgggactctgacctttgcagagataaaagggatactttcctaacccagagaggcca

SEQ ID NO: 837420 - DNA, 602 bp, Homo sapiens
aatttttgtcatccttacaggtgggtactttttatgtgtctaggatttgaagttgaactgtgtgtggtctgtcagagactatttctttagcccctttagtttcaaataaaggggaaagcagaggtttgcatttttccagtggttacattttgtccatttcagagtgagggacagagtacttatgtgtctggaaacttcatcattgcagcaaaaaattcatctactcaacaaatatgaaggccacctctgagtcagatatggctgggcactggagatataatgatgaatatgacagtctcgattcctgctcttacacggtttacaaactcttaaagaattcatatatcaaataattacacaaaagtctacctaattaccagtagtggtaaaggttataaaaacttgctgggctcctggcgaattggagggatgacaagaaagcatcattcacagtgcagtgggcacagggagaaaagttgagggaggtgggagtggccagatggggcggggccctgcaagccgcaktaaggatactgagcataatccaaaagcaatggaaagccattgacaaataggaagtgattaaatggaatatttaaatt

SEQ ID NO: 837421 - DNA, 379 bp, Homo sapiens
tctccccaccctcagtcgtcagtttcctcatttgaaaaagagagggagggtaatgctcccactctacagtttttacaaggaggctcatcacatatgtgaaagttccttggaaatcatagagaattaattactagggtaagctctctgcatagactcctctgcattcgatgtaatcactcagtcactgtatttcttcttaggatctttgctttttgctaggattcatactcccatggagtttaagggttggaaataagctctgtgacagggtgtggtttccacaacctycttgaaggaaggaagtatcactttcccactcattgatcaaatgtcaccacaattatcctgctgcttgaaatagatctggcattttttgagc

SEQ ID NO: 837422 - DNA, 609 bp, Homo sapiens
ttgtcaaatatcttctatgaaatattaaatacacacaggagctgagaatgtgagctcctgaaaaagcgatcttgaagttgaaccccaaggctaacatttcctagccttgtgatcttacataagttatttaatctctcttagtctcagccaattcatggctaatatggagttactaacatgtaggtatgcagaaattttagctgttattactgtaactaactgctactttttattactagtatgtaattataatattcaatgtataattgaatatatcatggcatatcatatattattataagcaatgcatatttttataagtataatgatacagccacatgtcacttaatgaagaggaccttccaacaaatgtcttagtgattttgtcattgtgtgaacatcatagagtgtacttacacacatctaaatggtatagcctatgtattagtcagggttctctagggggacgggactaataggatagatgtatatatgaaatggagtttattaaggagaattgatgcacatgatcacaaggtgacatcccacaacaggccttctgcaagctgaagagcawgaaaaccagtccaagtcccaaaacctcaaaag

SEQ ID NO: 837423 - DNA, 598 bp, Homo sapiens
agcaactccaataacacaggacatgcccctaattttgcccagtgacaaagatgaagcagaattctgctgaagtgactagactttatttttatcttttctctagtaagaatttggtaagcttttcttytgtgtagagcacagggctgccatagggcaagtagatggaacttgcttaattgtaaggcagagtttgtgtggtttagggacccaaatatttctcccatcagcctgtctctgatccctaatctactgttgaatgtacagtgccttgtgaaatgaaggagttgtgacctaattaaaaaaactgagtgggaggagaaaatgtactggatctgatatatgaactcagatcatgtacgcaaagtactcattacagcgtctggagcatggagagtacttaataaatatgagctgttatttctattactaataattgctgcagcattcatgaagcaaatctttgttgagcatctagttggtgccaggatactgtactagacagagatacagagatggattgctgtaatttctcctctcaaaaacatgaggtaatcagggtaataaaacactctgataaataattagaatttaacataat

SEQ ID NO: 837424 - DNA, 641 bp, Homo sapiens
aaaggaagatagcttataattgtgttatttactggcaggcagaattgcatttcygcacatttttattctcttgtgaaaaatgtttttggtttcttgtttgtttgttttgatctaatcatggttggagagtcctttgtgtccagaaatacaactgactcttgtcttttatgtaaaagaacattgtttaactgggggccctgccaagttctggccccagttagaagccctaaccctgtggaaagatatattccagaaaactgagccaaatcagaatacctcaagggactgtaaaaaggtaaaacaattgaaggagtttcacatggtatgcattaagaataagtgatcatggctgggtgcagtggctcacacttgtaatctcagtactttgggaggctgaggcgggcagatcagttgaggtcaggagttcgagaccagcctggccaacgtggtgaaaccctgtctctactaaaaatacaaatattggccaggtgtcatggcacgcatctgtaatcccagctacttgggaggctgagacacaagaatcacttgaacctgagagacagagcttgcggtgagccaagatggtgccactgcactccagcctgagcgatagagtgagactgaaaaaaaaaaaagtgaat

SEQ ID NO: 837425 - DNA, 449 bp, Homo sapiens
agtgctatgctgggagatcccctgctctcttcagagccagcaggyaggaaagtttaagtccgctgaagctgcatccacaggcgccctgtcccccaggtgctctgtcccagggagatgggagttttatctataagcccctgactggggctgctgactttcttttagagatgccctgcccagagaggaggaatctagagaggcagtctggctacagcagctttgctgagctgtggtaggctccacccagttcaaacttccacgcggctttgtttacactgtgaggggaaaaccgcctactcaagcctcagcaatggcggacacccctcccccgaccaagctccagcaccccaagtcaacttcagactgctgtgctggcagcgagaatttcaagccagtagatctcagcttgctgggttctgtacaggtaggatctgctgagcttgaccact

SEQ ID NO: 837426 - DNA, 449 bp, Homo sapiens
agtgctatgctgggagatcccctgctctcttcagagccagcaggcrggaaagtttaagtccgctgaagctgcatccacaggcgccctgtcccccaggtgctctgtcccagggagatgggagttttatctataagcccctgactggggctgctgactttcttttagagatgccctgcccagagaggaggaatctagagaggcagtctggctacagcagctttgctgagctgtggtaggctccacccagttcaaacttccacgcggctttgtttacactgtgaggggaaaaccgcctactcaagcctcagcaatggcggacacccctcccccgaccaagctccagcaccccaagtcaacttcagactgctgtgctggcagcgagaatttcaagccagtagatctcagcttgctgggttctgtacaggtaggatctgctgagcttgaccact

SEQ ID NO: 837427 - DNA, 587 bp, Homo sapiens
ccttctcctccctgttgacccagttgctgaggattgaagggtatcctagcactctagacagttaggcccaagtggagtttgaggctagagctgggttsggggcacagagcaggcccctgggaggaccagcacatgactggtagaacaagctggaggcccagtttctcgaaaggaatctgcattgggtgaagtccctgttgtgacacatccctgttgactccaacactgtgtccaagaaactgaagaagagacctaaaacgtgcaaaggagacagagacatagagtttattagagagttacagacagggcagtccaggaacagcgggctggacaggaaaaccactgccgtttgtaaaaagcattcagtttatttagccatgaaactgcctttgcaaaattataactaaggaaattctaacagtgaaagaaatcagacctaaccaactccattttgcttataacctttaagctgtccttgttcattcctgggcataggctgaacaaactttgggaaggaactccgttcatggtttgactctgaaacaaaattgataacagccctttcccaaaaaggcctccttgcctgg

SEQ ID NO: 837428 - DNA, 519 bp, Homo sapiens
ttttcttccacaggtaactacttagtctcctatttgcagtttaatattttttgtactttattaagatgcattgttattgcaatcttcttaattgcttcctaattggttctttcttccccttggtgtatttttcatgcattattaaattccaactggctttctgaaactcaatttgaattctttccagacagcccttccaaagttaaagtgtgtgtctcctggtcccttggtcacacaggaaaaagcactggggaattgaaagggtcactcttttgaacctacgtgcttccttatataagtacaaagctatcaacaacatcaaccattctgattattgtcattcacaagcaccttcacataaagcaattcatctgataacagtttcttaaataaagcaagtattattattctcattcaacatgggagacttctaaggattagaatatctttctktcctaaattcaaaaagctgatccgggacttatacctaaatcttattaagtcctctgctcattccag

SEQ ID NO: 837429 - DNA, 592 bp, Homo sapiens
ggaagcttgacataattactgtgctgactctcaaatgaggtttttctctccatttactagatctttaatttttaaaatcagtgttgtgtagttttaacatacaagacttatatatattttgtaagattgacaccatagaatttcatttttgagtgattataaatggcattgcatttaaaattttaaatatctgtgttcattagtagtgtataaaaatataattgatattttatcttgtgtcttacatcttgtgaatttgctgacttcagatattagttctagaagcttttcttatatattcccagagatcttctacttaaaaaactatatcatcttcaattaaagacagttttacttttttctttccaatctctttgccttttatttctctttcgtgccctaatgcactggctagaattttccagcactatgttgaataggagtggtgagaatggacacccttgccttgtttccatctaacagggatagcattcagtctttcaccattgagtarttataattttagctacaggtttttctacatagtttttaatcaagttaaagaatttatcattattcctgtttttctgag

SEQ ID NO: 837430 - DNA, 389 bp, Homo sapiens
gggaaaaacacataacattacatttatcatcttaacaatgtttaatgtacagttcaatagtatttaagtctattctcatcgttgtacaacagatctctggcacttttcatcttgcaaaactgaactctatattcattaagcactaatttctattcctccctctcagtccttgacaaacacctctctacttctgttgctattattttgactactttgggtactccatatgagtgggatcctatggtatctgttcttttgtgactagtttattttactttgcgtaatgtccttaaggttcatccstgttgttagcatgtggcaggattgccttcttttcaaagcctgcatcgtattccattataggtataaaccatattttctttttctaa

SEQ ID NO: 837431 - DNA, 542 bp, Homo sapiens
gttgtattgttatttgtttcctagttgttttataagttmtttgtttctttcttttcctctggctgtttgtcattgtggtttggctgaattctgtagcagtgccatttgattcctttctcttcgtctgtgattgctttatgagtgagttttatatatacttttgtgtgtttccataatggtgaatgtcgtcttttcacttccaagttagggcttccttgagcagttcttgtgggactagtggtgatgaattccctcagatcggcttttctgggaaagactttatttctccttcatttatgaaggttagtcttgctggatatcaaattgttggccgaaagtttttttcttgcagcagtttgaatatgtcaccttattctcttctggcctgcaaggtttttgctgagaactccactcttagtctgatgaagtttcctttataggtgactagatgcttttctcttgattttagaatttgctctttcactttgactttggactgattcatggtgcactgtggtagtgtcttttttgcacgatgtttt

SEQ ID NO: 837432 - DNA, 642 bp, Homo sapiens
cctatagcaagaaatgcacttgtatgacatagacctgtacacacacacacacacacacacacacacrcaagcaaccacaactgaaacgaaagattcacaagcagtactcattctttctgcatgagatgtactttactttctattactttgtttaaaaaatgttggctttgcctttatacaatacactgatttcaagtcacattcagaaaacaataatctggcccaaaccatttactctatagattggaagaccaaaatccagagagagcagcaacactgcctagctcatactaaattcaagtaaccctgtcttgaaattgagtgtgatagttaacatactgtctttatccccatcaatggtcctatacaataagaagaaactacagtttagtcaaagagaaaaaatatatacaacatccttcttggagctgaatccaggtgcttcattgggtagattctctaacctctttaagccttactgtacttattttttatagagggatttaaaccctcatcgtaacaagcctcaccatagccctggtaggtggtcattgagacaacaggaatgaaatgcctaacataattcctggctcacgttcttctattttacttataaaagaagtcaatgaaggaaaataaaga

SEQ ID NO: 837433 - DNA, 642 bp, Homo sapiens
cctatagcaagaaatgcacttgtatgacatagacctgtacacacacacacacacacacacacacacgcaagcaaccacaactgaaacgaaagattcacaagcartactcattctttctgcatgagatgtactttactttctattactttgtttaaaaaatgttggctttgcctttatacaatacactgatttcaagtcacattcagaaaacaataatctggcccaaaccatttactctatagattggaagaccaaaatccagagagagcagcaacactgcctagctcatactaaattcaagtaaccctgtcttgaaattgagtgtgatagttaacatactgtctttatccccatcaatggtcctatacaataagaagaaactacagtttagtcaaagagaaaaaatatatacaacatccttcttggagctgaatccaggtgcttcattgggtagattctctaacctctttaagccttactgtacttattttttatagagggatttaaaccctcatcgtaacaagcctcaccatagccctggtaggtggtcattgagacaacaggaatgaaatgcctaacataattcctggctcacgttcttctattttacttataaaagaagtcaatgaaggaaaataaaga

SEQ ID NO: 837434 - DNA, 577 bp, Homo sapiens
agcccaggggtccaagaccagcctgggcaacttggcaaaaccctgtctctgcaaacaaagcaaaacaaaattaaccaggtgtggtggcrcacgtgtagtgcccagctacttgggagagtgaagtgggaggcttgctggagcccaggaggcagaggttgcagtgagccgagatcatgtcgctgtattccagcctaagtgacagagcaacactctgcctcaaaaaaagggggatatggttaaataaattatggtacaactcccaaaatatttcacagctattatacaagatgcacttgaaaatatcttaatgtaaaaatgtttatgatatttgaggcaaaaagaatgataaaagttagtatttcttgggtgctttccacatcccaggactgttttattctctttacatgtgttttctcattcatttcttaaaagaacctcatgaaataggtactattattaatattactattattaatatcctcactttatatatgatgaagtggaaacaagatggttatcttacccagggttacaatctaagaagttccattccaggcttgatgctgttaaaaatttt

SEQ ID NO: 837435 - DNA, 577 bp, Homo sapiens
agcccaggggtccaagaccagcctgggcaacttggcaaaaccctgtctctgcaaacaaagcaaaacaaaattaaccaggtgtggtggcacacgtgtagtgcccagctacttgggagagtgaagtgggaggcttgctggagcccaggaggcagaggttgcagtgagccgagatcatgtcgctgtattccagcctaagtgacagagcaacactctgcctcaaaaaaagggggatatggttaaataaattatggtacaactcccaaaatatttcacagctattatacaagatgcacttgaaaatatcttaatgtaaaaatgtttatgatatttgaggcaaaaagaatgataaaagttagtatttcttgggtgctttccacatcccaggactgttttattctctttacatgtgttttctcattcatttcttaaaagaacctcatgaartaggtactattattaatattactattattaatatcctcactttatatatgatgaagtggaaacaagatggttatcttacccagggttacaatctaagaagttccattccaggcttgatgctgttaaaaatttt

SEQ ID NO: 837436 - DNA, 537 bp, Homo sapiens
agtaggtcatgagacctcattccagaaggggtcctgccccacacctgggggaagggaatgacacacagaaggaggaaggagaatctgaacagacagrccttgctgggtttccccactcagtctattaccattagatcatttactttttgtccaatcacgtttcttcatgattgtccgttcttcaccaaacctaagcatgaaaatggacagttttccctgagtctttgagtcgttatttatttaggctttcacgtcacataaaactttgatggtacagtttggatctgtgtccccgcccaaatctcatgtcaaactgtaatccccaacgttgaaggtggggcctgctgggaggtgattggatcatgggggtgaatatcccctttggtgctactcactaatagtgagtgagttctcgtgagatctcatcatttaaaagtgtatagcacctatcctgctccagccatgtaagatgtgtctgctttcccttcaccttctgccatgattgtaagtttcctgtggcctccccagaagccaagc

SEQ ID NO: 837437 - DNA, 537 bp, Homo sapiens
agtaggtcatgagacctcattccagaaggggtcctgccccacacctgggggaagggaatgacacacagaaggaggaaggagaatctgaacagacagaccttgctgggtttccccactcagtctattaccattagatcatttactttttgtccaatcacgtttcttcatgattgtccgttcttcaccaaacctaagcatgaaaatggacagttttccctgagtctttgagtcgttatttatttaggctttcacgtcacataaaactttgatggtacagtttggatctgtgtccccgcccaaatctcatgtcaaactgtaatccccaacgttgaaggtggggcctgctgggaggtgattggatcatgggggtgaatatcccctttggtgctactcactaatagtgagtgagttctcgygagatctcatcatttaaaagtgtatagcacctatcctgctccagccatgtaagatgtgtctgctttcccttcaccttctgccatgattgtaagtttcctgtggcctccccagaagccaagc

SEQ ID NO: 837438 - DNA, 543 bp, Homo sapiens
aggtgttaggtaaatagtaactctaatttttgtatctttcaacaggtatcccaatgtaatcttttcaaaatcctctgttcagactattcgacgtttccgtctttgaacactaggggaattttcagtgcatgccactcagacgttagtggtgtgctactgctgagttagtctaaccaggccaggcacactctgggaaggcaagaaatacccaggccatcagatggtcacacttctaatcatgccaggcatctatcaatgtcccacaaacctgagctgaccagtaatcaacagatagtgaattaaactcacccctggcaaaatcacctagggtaaagatgactgtagaatcgtttatcattgtttggacaaagtgatcttgagggttttactaatcacctgtggctcttattccccttgaaacagctgtgtggaagggggtcctggtgtccctaccttattgcccrtggcagtgtccaccaggaagcccaggatcctgaggaccatgttgctcacacccacgggatatcggccctggcccatgtg

SEQ ID NO: 837439 - DNA, 546 bp, Homo sapiens
agacaggctcatcagtgcccaaggaaaccaagaagggccaccggagtgtcaaggctctccagggaaaatgtgggtttctacagcatgggagactccagagactttaacacgcaccaactgaaatcaaggctgctcggtgcatgtgttggtttcatggcatggatatttatacaagaaagataaaccctctaggaagtgattaagagaaaaatcaaaagaaagactgaaaagcctgggcctggagtgacgcccacctacccttagatacctcccctgtacctaatggacttgatattctttgcaaataggcataatcattactgttttgcaatttcgtgaataatctacccttggagggaatgaagtttcttatcctattctgccagcctcctcagccaccctccctctcccccagcytataatctaaggactccacctctccccctcacacactattacagagtttgtttgaggagtgtacaagtgccttctagaaagaggcagactgggtattcgtttactctagtgctatcatccctccccatt

SEQ ID NO: 837440 - DNA, 444 bp, Homo sapiens
ggtatatctggaagtgaaagagttctctgtgcwgtttgaaaatagagaaatggggtgggtggggagagtaagatgctgaacagggtagcatagctgagggaggaagactgcagaggggacaagattgagaacactgcagaggacttctcaccataattcagcaataattcgggtagtgtgcctttggtctagttagcttctgttgtgtaacaaaccatcctgatttgtggatggggaatttgggcagaactcagcttggtgatcctcccactccatgtggtctcagttaggcctagcaatgacatttgcctggtgactgggctggtctaggggatccaagacagcttcgctctcacaccttgctgctgtggaaggccatgcccacatgggctccttcttctctgtggtgtctcaagatgtttctacacgatctttccagtagga

SEQ ID NO: 837441 - DNA, 535 bp, Homo sapiens
gtaactttctggtaacacaacctgacagttgatgtttcraatttggtagctgccatctttactggacaacaatgtttctatagttgttttaacatatgattttgcatatacatacttatacgtacttaaattttatttatattatataaaacaaagaggaaataggaaactaaatgctgactagtagttataaacatagtcctcaaatataattataaatctaaaatagacatgtagaaagttaattttaatttcaattgaatatagaatactcaatccatgtgtttcaattgggtaggaaaagaataaaagaacttatgtgaaattgtggggaaatactgctaaatactatgtttaaacagcaaagtatgattaaactatatattttagccttcttggaatggaagttcttgtcttgttatatgtaaatctgtttttcatttgaaaacataagggatagtctacttcactacaccataatactttgtttctaagaataaaaaagctaaaaacttacaaatgtagttcaatctct

SEQ ID NO: 837442 - DNA, 387 bp, Homo sapiens
gagtgctagattgacatatgtctcatctgggatagtatggaagaattcatggcacactgattcagctgagaataacataactttttatgttstgcaattaaaatttattgttacagcaacctgttgcctgtaaagtgctaagggattactgccatcatagcaatataagggccttcagatagcttgcttgctgctttctatgctatttacgtagttcacaattacatttactccttcttcatcaggaggaatatgttaacttattactttccaaaccacactaatcaatcctattcatccctctcctcctaaaaacaagcaaacaaaacaaacagttggcttcatggcttataagggaatgccatttaccttttcttgaactctttc

SEQ ID NO: 837443 - DNA, 583 bp, Homo sapiens
acatggttattgaatacctagtctggccatgaaatttctgaatcctgagtatacagcagtgaacacacctgaaaatactcctgtccttacaaatcttatactgtaatgggaaaaagatggctattaagagcttaagcaaaatatatgccatgtttgatggtaatgagctctacggaggaaagtcaaggagtaagagggcatagggagtgcagtgggatagagacagagaggtcccagtttagaagagtcagggcaggcctcgctgagagagtgacatttgagtacaatttgacagaattgagggagccagggagatggaagagcaacggcgagtattgtcttagtatcattaatttggaaagttgtatttttatcaaaaatttatttcttccagtctagtgtcttttggatcctgtattataattgttaatttttaagtttcacgtacttctaaatatatccttttttactgactgactttccccactcgtttttttttttttttttcttggagttattttctatattccttccacccaaatgaggcwtgtgctgttaggaacacatagttcacaagcaggaa

SEQ ID NO: 837444 - DNA, 602 bp, Homo sapiens; identical to SEQ ID NO: 829409

SEQ ID NO: 837445 - DNA, 577 bp, Homo sapiens
ttactatcatgtatattcctgagcgaggttaggaaatttttaaaaaatgctttcctgggaagaaaagttgaagagttaatgaatattcattttctgtgttcatctgtttcttttcacgtgacttttatttgggccataactttatgctggaaagtttacacttcaattgtctcactgaatatatacagcaatactatgactaatatagttactttcatttcagttttacagctgaggaaacaaggactttggaaatcaagcaacttgtctaaatttggattcaaactcaatttgtttctgtaacccatactccatttatcacatacccccttggaaatttaaagagaggattttttttttaatgatatgtgacttcaattactaaccttaaagtatgagcaacgggcataagcaaagatttttccatcttgcattttcaaaacaatatattgaatcagattaggtaytaaaatatactcaatcactgtatcaaattgcagcacttctaagaaaacgaattttagccagtgcaaatatacttagcaagcacatagtaggtactaaataaatgtttact

SEQ ID NO: 837446 - DNA, 609 bp, Homo sapiens
ggttgaacctaacagacacttaacagaggtaaaaaaaaaaaaawttttttaactctgaatagtattgtacactacctcttttgtttgtttgtttgtttttgtttttgagacagtggctcactctgtcatccaggctggagtgcagtggcatgatcttggctcactgtaacccccacctcctgggttcaagtgattctcatgcctcagccactcaaatagctgggattacaggcatgtgcgccaccatgcctgtctaatttatgtatttttagtagagacagggtttcactatgttgcccaggctggtcttgaactcctggtctcaagtgatctgcccacctcggcctcccaaagtgctggaattacaggagtgagccaccatgcccggcctcccctgcctcatctaaggcttgttttttttcttggagtcttgaacatctttacatatcagtacaggtagatctgccttactgtttctgattgttttatgatccatagtatggatatattgtaatatttttactataaatcctgttaagtagaaatattgtagtgttttttgaaattagatatttttctttctttctttttttttttctttagggaaag

SEQ ID NO: 837447 - DNA, 613 bp, Homo sapiens
cttgggtcccaaatcaatgacagaggattgatgaaatcagaggtgatggaggtgacagagtcccattatgggggcctccctgggacttccaagtgttgagatgaggtgtgcctgcaagatgtcatttgtttctttttgtccctttccttgttcctttgttgctgctgaaaggaagggaaagcagaggatcagctgtgggagttttttttgtttttgtttttgtttttttttttttggcagggtctcactctgctatccaagctggagtgcagtggcgtgatcacatctcactgcaacctcaatctcctgagctcaagcaattcttctgcctcagcctccttgtagttaaaaaatgtttttttagagagacggagtcccactatgtttcccaggctggtattgaactcctgggctcaagcaatcctcccacctcgggctcccaagctgctgggattataggcttaagccactgcacatgasgaagattcttacagttgtaacaagatggaattgcctcccctctcctttggcatatactagagggtgatgaaaatcctgggagggagctttgactaagtagcgccttaatagaggtagaaggaaaagatttctt

SEQ ID NO: 837448 - DNA, 631 bp, Homo sapiens
actcttatttaatagaaatccttgtatgcaaacatttattaagaaaaaaattaccactctgactatttctcttacttccttgccaggttatgggtgttttttaaaacatgattcttatactttatccagcatcttgggcattttatgcttgaagatgtcagaatatctaatcaccattttgccaaaaaatgaagtctctttaactttgaactttaattaaatcaacacttcgcatgttagtttgaaaaaaaataatgttcatagtaattcaaatagtggcttgttttaaaagctttttccctcctttcatattgattgatcttctactttccaattctattttatgggaatatgatactaaaattttttgtgaattccctaacaaaacaagctaggaggagaagtatttctggagtgacagaatgagaggctcttctgatgctctctccagtgaaacaactataactggtgaaaatcatttaaaaaccaaccatgtaaagtctctggaaattgtcctaaggacatatagcaaatggrgaaacactgacttgggaaaagctattaaatctgagttagaggagtaagattctgtgccatttgagccatcacccattcttttccaccccaaccc

SEQ ID NO: 837449 - DNA, 618 bp, Homo sapiens
gatccaagggagttagaagaggaaattgccaatgagacaatatgtgtgaggtcttaaactcatgggccttatataaaagtgagtggttcaaaaagactgaagccaccccaggttaatcactccacgatcctattattaggtggtatgtttcttaaacaaagtggtagtacaggaattattgtttcatttctgtcaagtcagcagatatttgttgagtacctattatgtgctaggctaggatctcagaatacaatggtgggcaaactgcaaaattcctgcccttaggaaccttaaaatatagtaaaagagatcaacattaatttgatttgaaccattttaatatcttcaaaggagaagcacttgaacgccatgaggatttgacctaattagactgatttgacctagttggaatcctatagaaggggctgtagaactgagatctaaaagatgagtcatgtttaagtcaggatggaggggagggaagagagcrccccacagagagactaagataaaaagtccctatcaaagaaagagctgaggctttaagaatcagctgcagtggaaattgtaacaaaacatgtggaaataaacaaagaccacccaaaagagaacaatcca

SEQ ID NO: 837450 - DNA, 611 bp, Homo sapiens
ctgtctgctcaggctctccttgggcacggaggacccatgagttctctccgggcagcccaaaccctcctggtccgaaaacgtctggaatcttccaacaggcattcttcgcttcctgcactttccgggggctggcaggggaccaggcaccatttctcctgacaaatccaacttctgagaagaggccgagtcctcggtatccatggagtctgagatatagagaggatggggcgcacgtcaggccaaattctctgggtgcagtgttcagcactgtaacttttaaaaggcatgtgtgtgcccatgtatatacacacatggacacacacacacacttacatatgtacacgcacacctatccacgtgcatacatacatccatacacctgcacaaagacacacgcagagggagggtgccgagggaagaaaggggcatactggggcacacgtgctaacacgcaaactctgggggagtctggatgaagcagacacggaccgcccagcttcgcgtgttcaccccrtgatgaccgacgtgcagtacgcttcaacaacgcattccaaacaacgtctaagcacacgcccatctctgaagacaggtgaagtgacagactctgatgg

SEQ ID NO: 837451 - DNA, 611 bp, Homo sapiens
ctgtctgctcaggctctccttgggcacggaggacccatgagttctctccgggcagcccaaaccctcctggtccgaaaacgtctggaatcttccaacaggcattcttcgcttcctgcactttccgggggctggcaggggaccaggcaccatttctcctgacaaatccaacttctgagaagaggccgagtcctcggtatccatggagtctgagatatagagaggatggggcgcacgtcaggccaaattctctgggtgcagtgttcagcactgtaacttttaaaaggcatgtgtgtgcccatgtatatacacacatggacacacacacacacttacatatgtacacgcacacctatccacgtgcatacatacatccatacacctgcacaaagacacacgcagagggagggtgccgagggaagaaaggggcatactggggcacacgtgctaacacgcaaactctgggggagtctggatgaagcagacacggaccgcccagcttcgcgtgttcaccccatgatgaccgacgtgcagtacgcttcaacaacgyattccaaacaacgtctaagcacacgcccatctctgaagacaggtgaagtgacagactctgatgg

SEQ ID NO: 837452 - DNA, 357 bp, Homo sapiens
gccttcctctgggagggtccacagcagtcgtgcgacagccgctccctccccactgcagagcctctgaccttagatggagctttaggctggggagggtgcgtggtggccctgggggcgcctcaggatgctcttcccaggagccctgggcctggccccggccaggggaggggactgccagtgtgcagggctgaggcagtggtgggggcaccggtgtcagggcgcagggacgccctctggactttgcaaggcgcccgcccccagagtaggcggctggsccatggggttgagaagactgaggcgtgccacccaggcagggcttggggacgcagggctacgccacagggcagggctgccgag

SEQ ID NO: 837453 - DNA, 357 bp, Homo sapiens
gccttcctctgggagggtccacagcagtcgtgcgacagccgctccctccccactgcagagcctctgaccttagatggagctttaggctggggagggtgcgtggtggccctgggggcgcctcaggatgctcttcccaggagccctgggcctggccccggccaggggaggggactgccagtgtgcagggctgaggcagtggtgggggcaccggtgtcagggcgcagggacgccctctggactttgcaaggcgcccgcccccagagtaggcggctggcccatggggttgagaagactgaggsgtgccacccaggcagggcttggggacgcagggctacgccacagggcagggctgccgag

SEQ ID NO: 837454 - DNA, 636 bp, Homo sapiens
ggtccactgggtgaggccaccatccagccaggggatggcatcttttgactgacactgaacatggacattctgcccartgggccaaacttcatgcaatgatagtagccatgcaggctgcccccaacactatattttgctccatttccactaaatcatgggccattgccaacaacccagccatctggtcaggaaaatagcaactgagtggcagaactattaaaggatcccctgtgtagggaaaaggactatggccatagcttgcttcctggacagctaaatgtatgtcactcagttagatgctggggctaccatggtgacctttgaaaggaatttatgtcatgtttttggataccccatgagacttcactctgaccaagaaacaaccgcccaatccgcatgacaatgggcacattcttgaggaacccaacggagactttccacgcaattaccaacacccaatactacctgctgtgcctggataaacacctcgggtattctagaaatacaagtagaggtgatcctaaagcaggcccactggctgcagagaatagggcatctgaaagatccccctttcacttcttaacatcttagtcactgctttggggagtcttaccctcctgccagtgtgtgtgtgaa

SEQ ID NO: 837455 - DNA, 636 bp, Homo sapiens
ggtccactgggtgaggccaccatccagccaggggatggcatcttttgactgacactgaacatggacattctgcccagtgggccaaacttcatgcaatgatagtagccatgcaggctgcccccaacactatattttgctccatttccactaaatcatgggccattgccaacaacccagccatctggtcaggaaaatagcaactgagtggcagaactattaaaggatcccctgtgtagggaaaaggactatggccatagcttgcttcctggacagctaaatgtatgtcactcagttagatgctggggctaccatggtgacctttgaaaggaatttatgtcatgtttttggataccccatgagacttcactctgaccaagaaacaaccgcccaatccgcatgacaatgggcacattcttgaggaacccaacggagactttccacgcaattaccaacacccaatactacctgctgtgcctggataaacacctcgggtattctagaaatacaagtagaggtgatcctaaagcaggcccactggctgcagagaatagggcatctgaaagatccccctttcacttcttaacatcttagtcactgctttggggrgtcttaccctcctgccagtgtgtgtgtgaa

SEQ ID NO: 837456 - DNA, 578 bp, Homo sapiens
tttgtgtatctatagtacatagtttgatckcatactggtaagaacaatggcataacaccattacctgatacttacaaatgtatgtaccatcatgtcaataaattttatttttaatttttttacataggaacaatgttaaactcacagaaatgttgcatgtatacgacaaatacccccttccctagccggaatcatataagagtcttttgaagacttgagaattgtaccgtctaacattttactatgtgtttcctacaaacaacaatattctcctaaataatccccatacaccaatgaaatacattagtccatcaactcctgaggaatatttcaaatcgtcaaaaagaaaccaaaaaatgttactcacaacaaaatagttcccagtagaaacacattctctgcagacaaatttgtgctaccctggtcttacctgggacacctggggacactgagctggtgctgagttactgagatgagccagccctgcagctgcgcccagcctgccccatcccctgctcatttgcatgttcccagagcacagtctcctgacctgaagacttattaacaggctgatcaca

SEQ ID NO: 837457 - DNA, 533 bp, Homo sapiens
atgacacttgaggagtctagtttatggcttcagcttgaattcatataacacagaagaagccactatagatattctaagcaggaattgtcttaatacagagaattaaagtaaactactaaagtcaaaataaaatgtagagatgaatctctaaatttaagttttatttgcaaagaaatatttgccaggtggggcatacaggaaaactcagtggtcttcaagatattggaagaacgaagagaaaattagcattttatgaaaaagggaaaatgttacctgtggctctttgagaaagttcattggcactaggaagggttgggagctggcaagctcagactggtaagcagtggtggacaaaatgaatcctagaattatatcaagttatctcagaagttgtggacaaatttgatttcaggttacaataagccaaagcagtgaaggttgcagagaattttgttactgaaatgccagggattcagtgaagacyctgcagcttaccccacagaaagccaatcactaagacaacaagcattgcc

SEQ ID NO: 837458 - DNA, 627 bp, Homo sapiens
ttcgtgccgccacgcgcgcctgcggcctgtgcgcccgagcccggcatccccggagagacccgcgggccctgcttcctggccggagacggccgcgccascgaggtcccctccctgacggcactgcacacgctgtggctgcgcgagcacaaccgcctggccgcggcgctcaaggccctcaatgcgcactggagcgcggacgccgtgtaccaggaggcgcgcaaggtcgtgggcgctctgcaccaggtgcgcggggtggtcctgggcgccctgggtggctgcgggcaaagcggggggcgcctcgtgtgggtgcgcagcatcgtggcttctctctcccaggtacttgcacagccatcatgggcgcccacatgggtgagctccaggtcgtggggccctgtgtgggtgcgcagtcctgctgggcgccctgcatgggcgtgtggagggtcatcgtgagctcctgtgcaggggccgaagggtaactccggagctggcggccctccggggcccctctgtcccacctgcttaccctccagccggctggtgattatcccaccaagacccaacaaccacagccccacaacagtggcagccagaccacccaggtttcccggtgcgcacagccaagctacg

SEQ ID NO: 837459 - DNA, 627 bp, Homo sapiens
ttcgtgccgccacgcgcgcctgcggcctgtgcgcccgagcccggcatccccggagagacccgcgggccctgcttcctggccggagacggccgcgccagcgaggtcccctccctgacggcactgcacacgctgtggctgcgcgagcacaaccgcctggccgcggcgctcaaggccctcaatgcgcactggagcgcggacgccgtgtaccaggaggcgcgcaaggtcgtgggcgctctgcaccaggtgcgcggggtggtcctgggcgccctgggtggctgcgggcaaagcggggggcgcctcgtgtgggtgcgcagcatcgtggcttctctctcccaggtacttgcacagccatcatgggcgcccacatgggtgagctccaggtcgtggggccctgtgtgggtgcgcagtcctgctgggcgccctgcatgggcgtgtggagggtcatcgtgagctcctgtgcaggggccgaagggtaactccggagctggcggccctccggggcccctctgtcccacctgcttaccctccagccggctggtgattatcccaccaagacccaacaaccacagccccmcaacagtggcagccagaccacccaggtttcccggtgcgcacagccaagctacg

SEQ ID NO: 837460 - DNA, 637 bp, Homo sapiens
gaggatccaggctccccctggaccacacacggtcaccgtaagcacatggtgctccggggggtcctgcttggtgggtggctcacccttatgtgtcaggcacccattttatagatcaaaacgtagaggtctggaagtctcagaagcagcaaggctgtggccgctcagtctcacagtctcacgtcccaggtctttacagagaaccaacacacatcctcatacttgaagctcgatgataagtactcagcgaaaagtatcaggccagtgccgtgactcacatctgcaatcccaacacagtatcatcaggccagtgccgtgactcacatctgcaatcccaacacagtatcaggccagtgccgtgactcacatctgcaatcccaacacagtatcatcaggccagtgccgtgactcacatctgcaatcccaacacagtatcaggccagtgccgtgactcacatctgcaatcccaacacagtatcaggccagtgccgtgactcacatctgcaatcccaacacagtatcatcaggccagtgccgtgactcacatctgcartcccaacacagtatcaggccagtgccgtgactcacatctgcaatcccaacacagtatcaggccagtgccgtgactcacatctgcaat

SEQ ID NO: 837461 - DNA, 636 bp, Homo sapiens
catctccaacattcgggatcacatttcaacgtgagacttggaggagacaaatatccaaactatatcatttctctttttgccttgtcctaataaaggaaggaagttacttgtggtgataaaggccttggttttcactttgttgtctgctgcctgttgaaatgggtcagaatataaaagggtttttctgaggaaaagtaaatgcttggaaaagttcttgttactgggcctattatattagttcccaataagaatttgagctacactgtgctaatagagtccatgagcccgctggtgtcccatctctcagtagaggacagggcagcatattccactccagtagtcgttgtataaaatatatttgaagcacaactctcattacaaggtacgcaatacatttttagtgtgtcattgagaaacatccaggaaatcactcagagaagctttcctgtattctctgagcatattccctttaaaggcttctcaaagtcagatgactcatttatgctacagatttgtgtgtgaggaccatagtyacttgcctacgtctcatttcagccacgtctttcttccttcctcctcctccccttcttcttctcctcctacttctacttcttctttccttttcctttcttcctt

SEQ ID NO: 837462 - DNA, 638 bp, Homo sapiens
taatttcagatgaatttgggatatttcttcagatttatgttcatgttaaaattcaaataataagaaagaaatagcctaggggaagctcaaactgtaaactgaaagggagaagactgacagaattgaaaatgtcacaaactctcctatatgtcacagtagaaacttgaaaaaccaaaacaaacaaacaaacaaaaactctgctggttaaaactcatgaggatacagaaaaaagttaagaatggcaagaatatataggtaatcaaaatgacacagaagaatttaaaaagatgatgatggtcaggacactcttaaatgggaaagaaaaataccagaatattaaatattaaaataaaagtgaagtaaaacacaatttgttcagtcaaacaatacgcagaagccaatagcagcttcatttgacaaattcactgaccttgacaaatactgtgatctccctttacagcttgttacaccatttaatgaaaatgtagtaggtttttccctccaaaattattatcccaataatacagaaaattaaacagaacayacaggcaatttttgaaaagaagttttaaaaataggtattctggaaaaaaaactaaagatgatcaaactatggtgatattctggctggcctattc

SEQ ID NO: 837463 - DNA, 605 bp, Homo sapiens
tttttttttttttgagacagagtctcactctatcatgaggctggaacgcggtaaaacgatctcggctcactgcaacctctgcctcccggattcaagcgattcttttgcctcagcctcccragtagctgggaatacaggtgcatgccaccactcctggctaattttttttgtatttttagtaaagacagggtttcacaatgttagccagcatggtcccgatctcctgacctcgtgatccacctgtctcagcctcccaaagtgctgggattacagacatgagccactgctcctggccattttttctatctttatctacactcttccctctatttgtaaaggttttttcccaccccaataatcttgcctcaaaacaatatccaaaatgaaaaatatcataaattctggccacagtgggcccttctgcctctctggccacagtctgtccaagtatacccacagctgctgtctttgttctaggcttatggaatggtctagaccctgtagacacttgtgacatgggccctaaactcacttttacattctatttttaaactgaacttagcacaaggcagggcacaaatatacagtgaaggatagatagatag

SEQ ID NO: 837464 - DNA, 596 bp, Homo sapiens
cagtggcctggatttggcccacaggtgctaatttgctgacccttgtgctaaaaggaaggtgctgctaatgcmgtaacacttatttataaaagtgcccagcatgtgtgacagtatctttcctttgagaaaaggatatattttggtattcacctcaccatatttttccacagtgacttcatataattttaaaaatttcatttgtaaaataagattattttctgcatttctgccactttattcctgttaatagaattcagtattttatggtgatcaattactttgtatattcgatgagcatcaactgtcctagaattggctgatttttatcaagcaagaaatactctccttgaaacttttagtttttcttggtctttatgtataagcatgaacaaaatgataattggcttatgtaatctagaaatggtcaaggcaacttttagttctatagttttaagatttaacaccttggtctggcatttttaatgccacatgtgtataatttttataagctttaaaatatataattgttatataaaatttgaaaactacaccttttatgtaaaatttgaaactatttgtctattacttttccatga

SEQ ID NO: 837465 - DNA, 581 bp, Homo sapiens
aataatgccagagaagatataaagatatataacccaattattttacattgctctaaagataattgattgtctaattttttaaaaaaagagtaactttatattatggaattcataatatttgagactataatgcatgacataaatagtataaaggagagaggaaacagaaatatacattttaaggtttttataccatagttggtatagtacaaattataggttactgtaataagctagaataggtattgaaatctctagagaaaccatgaacatttttaaaaaatggtatgtgcattaatgttttcatagaacttccagcttttatttatttgtttgtattcatttaattttatttattttttttgagatggagtctcgccctgttgcccaggctgcagtgcaatggtgtgatctcagctcactgcaaccacctccgcctcccaggttccaatgrttctcctgcctcagcctcctgagtagctgggattacaggtgcccaccaccatgcccagctaatttttgtatttttagtagagacggggtttcaccatgttggccaggcttgtctcaaactcctggcc

SEQ ID NO: 837466 - DNA, 570 bp, Homo sapiens
ctcaaaaagaagaaaagccatccagaagaatggctccttatccctagacaacctaccacttcctggtctcttaactgcttctgataaaaaaataaaatacagtttgcactaagcttttagtcaaaacacaacatcatcggtggagaccgaaagcctgctgctgttggtggttgctgatgtttaacagttgatacaggttttctggtgatgctactgtgctgcttagttaccctgaacacattattttttcactgcactcatggtatctcatactttttactgttaagtacttgcgtgtgaacaagcataagaaaatgattgctttttagtagcacataaattcagagtcaggaatgatggtgatgccaaacagcatagactatttacatgggtggctgagattgtgacacttttgctttctgatagtacaatgtatacaaacttggtttatgcacaaaagtatgtaaaatattggataaaattaccttcaggctatgtgtgcagatgtatataatcataaatgaatttcgtgtttagacttggatccsatctccaagatatctcattaag

SEQ ID NO: 837467 - DNA, 618 bp, Homo sapiens
aaaaataatgatgaaacactacataaccacacctgtgagacatatttagagcagagatcagacggaacaattatgaagaataaccccaaacacctatatcaataaaaatgaaagaataaaaataaacacattaaatcctaagtaaataaagccagaaacagaacaataaagcaaaccaaaaggaagcatcaggcaggatataataaattctaaacaatatttaatgaggcagaaaacagagaaatagcagggtaaattaataaataaaaatactgattctttaaaaaaatcataaaaatacaataaccaatagctaaaataatcaaggaaaaatatacagatatacaaattaagaaatgacaaaaggaaaataattattaataaagaggaaacatatatcataactgaataatttgcctatctctatgcaaataaacttaaaatcaaatttaccaaaattgatcctagtagaaagagaaagtttcaatagactaatgttcttagaagaaatagagagasttatcagggaactaacacacaagaaaataccaaccctagaagttttcacaggggaaatgtagccaaatcctaaatattaggtaaattgatgagatataa

SEQ ID NO: 837468 - DNA, 613 bp, Homo sapiens
agacaaaaggtgctttttcttagttccttaccgtaagaacctgatgggatccctagaggtgagagtcatcaaagtgtgcgggattccctaagaatgtgatccccaggagtttcttactctcaagctagtccacactcagcattcagtcagatcttcatcggaattaccatttaagtgtccctaccagtttatggtttcagtgacttctgctgcagttaaacggatcttagctgcttttctctataatcgcctgcctttctagatttgggagtagcagttagttttatgtcctaatttatctgatgagcccaagaaatattgttgattttcagtttgttcaaatttttcttattttaaggaataaataagcttggaaggagtaatgccttccaagctttttagcttttagagaagaaaccagaaatcccccagcctggccaatatggtgaaaccccatctctactaaaaatagaaaaattagccaggcatggtggcctatgcccgtaatcctagctaytcgggaggctgaggcaggagaattacttgaaccagggaggcagaggttacagtgttgcagtgagccaaaattgcaccactgcactccagcctgcgc

SEQ ID NO: 837469 - DNA, 693 bp, Homo sapiens
tatgtcctcaaagtgaaaacaggtctcttgtgggaaggatgtatttggatcctaattttgtaaacacattcaaccactctgtcctttgattgaagaatttaatccctttaacaagtaaggttatttttgataagtatagacatatttctaccattttgttaacttttttcttgttgttttgtaaatcctttgttcttttcttcccatcttgctgttcacctccgtagtttggtgattctctatagtgttgaggtttgattcctttctctttatctttcatgtatctgctgaagttttttgctttgtggttaccataggacctacacaaaacatcttatagttacaataggcaattgtaagctgataacaacttaactttggtctgataaaaatatcctagaattttaccctcccctcatcacaatttatattttgatggccacaatttacatctttttagtttgtatatttcttaacttattgtagctacagttattttttattttatctatttattttgagatggagtcttgctctgttgcccaggctagagtgcagtrgcatgatgctggctcactgcaacctctgcctcccgggttcaagcaattctcctgcctcagcctcccaagtagctgggattacaggcttctgcttgcctaggaaaattcatttctctttatttctgaaagatga

SEQ ID NO: 837470 - DNA, 612 bp, Homo sapiens
cccaaataagtactacaccaagaatgtaagcagacattcaataaatatcaaattaaatcaagggtatcactatgaactcactaattgaaaactgttggactatatcctttctaactactgctcattataaaggctaccatctcagatgaactctaagctgttcaacaatttagtagactagagctctaggaattttatgccacgggcataactcacaaccactgttaaaggtagatacagaaaaaaaaattatccccctctttcccttccttcctccttccctcacttccaaatactaactcaaaaatctcccagaaaatctagttttgggcaggcccttttttcttctctcctctaaattttctccttcatggaaatggacaagaacttctttctcagtccttcccgggacaccgctgttctcttcaactcctcatcttccttcactgcactaagcctccttcttatgtgctgtgtcatccccctgaggaattaaatctatttgaaatatgttttctgtggaagaatcaacttgatttttcaaaaataagaaaagcactgccayggacttgtcatttacctgaattttgttagaaacagaacataggacct

SEQ ID NO: 837471 - DNA, 617 bp, Homo sapiens
aagagtttttattgaaactggaggaatatgaaagaacatctgtgaacacttagttgttcgtaagttctgtaatttcttttctttgtttttttttttttttgagatggagtctcattctgtcatccagactggagtgcaatggcgtgatctcagctcactccaacctccatctcctgggttcaagcaattctcctgcctcagcctcctgagtagctgggattacaggcacacaccaccacgcctggctaatttgtgtgtgtgtgtttgtgtgtgtgtgttggtgtgtgtgtgtttttagtagagacggagtttcaccatattggtcaggctgatctcaaactcctgacctcgtgatccacctgccttggcctcccaaagtgctaggattataggtgtgagccaccacacctggtcaagtttcgtaatttctatacaggtcttaatgttgctaatttagtaccaatatctattctctcctctatctcaatgatagacccttcacatttatccttastcaggaccagagtagagccctatattttcagtctttcttgtggacatgtaggtgtatggcaaaattctggtcaatggaatcaacagagatatcatgaagaaaa

SEQ ID NO: 837472 - DNA, 544 bp, Homo sapiens
ggatccctgtggaagttgtctcaaatttatcccaccgaggggaggatacattggaatatttatccagtaacacagccttttttttttttttttttttttttttgaracaaagtcttgctttgttgcccaggctggagtgcaatggcacgatcttggctcactgcatcctctgcctcccagtttcaagagattctcgtgcctcagcctcccaagtagctgggattacaggctcccaccaccatgtccagataatttttgtagttttagagatggggtttcgccatgttggccaggctggtcttgaacttctgacctcaggtgatccacctgcctcagcctcccaaagtgctgagattacaggcgtgagccaccacgcccagctaactcagcctttaaagtgttgatgattgcccctgagggtgttaagtcccaggcacttcagggctgtctggtgcacaggtgtgcaagttctcctggtgttccagaaaacccgcaggacgagaatcagagtgtttccaggtttcgaggtgggaagctgtcagca

SEQ ID NO: 837473 - DNA, 581 bp, Homo sapiens
tatagccattatggaaaacagtagagaggktccgcaaaaaatgaaaagtagaattaccatgagattgatctggcaatctcattcctgtgtatataaccaaagaaaataagatcactaccccaaagagatatctgcactcccatgtttattgcagcattattcacaatagccaagatatgaagacaacctaagttttcattggtggatgattaaagaaaatgtgtatagatcatggaatatttttcagtcttaaaaatgtcgccatttgcgacaacatggataaagctggagaacattatgctaagtgaaataagccagatgcagaaagacaaacaccttataatcttgcaaatgtagaatctaaaaaagttgaactcatagaagcagagagtagaagcatggttattaggagtcagggggtggggaaaatagggagatgttggtcaaagtgtaaaaactttcagtcataacatgaataagttctggagacctaatgtccagtatgatgactatggttagtaataatgtattatatactcaaaatttgctaagggaatagatcttaagaattctcaccatgc

SEQ ID NO: 837474 - DNA, 611 bp, Homo sapiens
tggctgcatgggccctgcactgtcagtgtggaggcaggagccagggcctttcttgtttcaataaacagtgtttcttcctcccacctgccatgatgagctggccagttccgtgggcatgttaatgagcttctctctggtgaccgagacacagcatacgacacagctcctctggcccctgaagggcaattaagtcccagtagtgtctgagagcctgatggctggcttctgggactccacacactcttgcatacatattctccttctctccatccccacaaatattgtagctgtctcaggttctaaaagcaataatgacttcttagtaaagacattctgaaaaacctaaagaaaatagaaatgattcaaaatcctaccgctcagaaatagctagtactcactttttggtgaacccaaggcccctctctcacacacatctctcatttaatgatctcatccttggagctgttgtgtaacctgctttttcacttaatcacctctcccagacatgttgttatatgtcgataaacacagacagccctgayactcctcacttccccctcttctcgcttcctgatggttttcctgcttcatgtggattgcctgtctagccc

SEQ ID NO: 837475 - DNA, 588 bp, Homo sapiens
aggggctcttgactgagtagaccataacttgtaagccagattctatggctatctgccattctttggtttgatttttcttttattcttatcagtcttaaagaaaagtgtgcttgaatgtgccatctttgctagcgagacttaggggacaacttctgccttggcccacttttgggcttcagcatcaaagagccagcaacacctcatgtggtcaatgtggtggtacagtgatattagtagaacctcaaagggaaggagatcagccaccaacagtggccagcatcctctccctctgtgaagagttttcttccgttacttgtcttggatggccattgtattaaggaatcagaggggtcttataattggtgattagtagtatcttggttggaacagcccatggcccatggctagagacttcaatatccaacaggaggtggacaagagatcagagctttagcaaatggtttaagagccagtacaggacttccrttctaggaggcagccagaatacaaaccataaattccagagaaaaggcacagttcattgggagtggcaggtaaggggagggcaagtttgcaactcaacagctt

SEQ ID NO: 837476 - DNA, 542 bp, Homo sapiens
cagagatttcttcttggtttggatccattgctggagagctagagtgagtcttgaagaaccttgggtatcttacagaatcttactttgctatgtgaccaraattacttttctggttccttctcatttgggtatactgtttcagtggaaagatctggaactcaagggctgctgttcaagttcttttgtaccatggggtgatgccttgatgctgtgctcttccccttcctctagggatagggcttcctgagagccagaatgaagtgatttttatttctattctgggcctagccacccagtggggtggctgggttccaggctggtgctggagaatgtctgcaaagagtcctgtgatgtaatctgtcttcaggtctcgcagccatggataccagcatctgtaccattaaaagtggcaggggaactaattggactctgtgatggtctttggttgtagttttgtttagtgcactggttttctcaaatggtggttatgatagcagtaaagtcatgtggacagacacaggtcctctggtgaggcagggtac

SEQ ID NO: 837477 - DNA, 584 bp, Homo sapiens
gcttctggtgaggcctcaggaaacctaaaatcattgtgaaaggcaaagggagaagtaggcacatctcccacggccacagcaggagaaaaagagaaagagcaggaggtgctacacacttttaaacaaccagatctcacaaaaactcactcactcactatcacaagaacagccccaagggcatggtactaattcattcatgggaactccaccattatgattcccaccaggcccctcccaccaggccccacctccaacactggggattacaatttgacatgagatatggtagggacacagatgcaaaccatgtcattttgctgatggcccctccaaatctcttgttcttctcatattgcaaaatacaatcatgccttcccagcagtccccccaaatcttaactaattccagcattaactcaaaagtccaaagttcaaagtctcatctgagacaaggctaatcccttctacctatgagcctgtaaaataaaaaagaagttagttwcctacaagatacaataagcgtattagcattgggtaagtacttctgctccaaaaaggagaaatcaaccaaaacaaaggggatcc

SEQ ID NO: 837478 - DNA, 619 bp, Homo sapiens
taaataaggcatatttcttgcccttgaaaaacttcagagcaatggtcttccagcattttaaattttaaatcatacatccacrccggtttgaaaaaaagagaagtttctgcatgcactcctatgcatgtgtgtatatgtatttatacataacatcatgtattagtatacaagtgaattagttcatatccatgctgccaataaagacatacctgagaggggaagaaaaataggtttaatgaacacacaattccacgtggttggagaggcctcacaatcatggcagaaggcaaaaggcacttcttacctggtggtggcaagagggaatgagagcttgggcagggaaactcccgctgttaaaaccaccagatctcatgagacttattcactatcataacaacagcacaggaaagacctgctgccatgatacaattaactcccacagggtccctttgggaattcaacatgaaatttgggtggagacacagccaaaccacatcatttcgcccctggcccctcccaaatctcatgtcctcacatttcaaaaccaattatgccttcccaacagttcccccaaagtattagccattctgactggtgtgaggcaatatctcattctgat

SEQ ID NO: 837479 - DNA, 606 bp, Homo sapiens
ctgggattctgcagtttggcttccttcttaccgtctcccttccatgttggattaggtttcagtgttctctgttttgctaaatcagatcccatctgttcattcactttccggcttccaaaatgtgtttgacatcttttgtttgctattatgttctctcctgttctctttatccttgtggtttatttcctttgattcctttaccaccagcaatgttttaggaggagagataaacatgcgtgctcaatctgctgtacaaaattggaagctgaatgtaccacagcttacccaactgattccctgctaatggaaacatattccaatgttttgtagttacaaataatgctaatgcattcttatatgagcatatttgagcatttggggagtgttaactataagacagattcctaaatgtagaagcattgggtcagaagttgagtacgtttgaaacttactgccaaatgtcactccaaaacaattgaaccggttaatactgctgwcaacagtgtgtatgaaataaagcacgtttttattaatgaactagctacgtgtcctttttgatgctggaccattgggtttctttgcttgatttaaaacatttcctctatt

SEQ ID NO: 837480 - DNA, 589 bp, Homo sapiens
aatatgtaatcagcaactggatttcagatggcctaatcagagaaaaatccaaatagtccagaaaagcccaaaaagtatccatgacgattttataaattagggctccacagagcagtgatttgcaagratcccagaatctgagttctgtccacagagcctatgtctgctttcagttcagcacaacacaaactaaggctgaaaccacctaacaacaggcagccacaggtttcagtttagagtcagaacaggcaattagaatatgtgaattctggatttcaaaggagacagcttcttttcttcctgcagcaacaaaaccaagatactttagagtcagagagccatggtccaagtccaagggacaagaaatgctttcccaggccctttttattttgtcaggcttagagtcttaattgacccactcaaaaaatacgcgcatcaccctggaacatcatcagccttaaagattcagacatctgacatcacaagggctctctagcaactaaaaattgatttttcaaactcagtgtgtctccatctggagacaacgtctgagaaataaaaataaaatcctaagccccacaagcaactg

SEQ ID NO: 837481 - DNA, 619 bp, Homo sapiens
caagaggaaggtgattgaatcatggggacagatttccccctccatgctgtcctcatgatagtgagtgagtgctcacaatatttggttgtttaaaagtttgtgatggcygggcacagtggctcacgcctgtaatcccagcactttgagaggccgaggcaggcggatcataagttcaggagttcgagaccagcctgaccaacatggtgaaaccccgtctctactaaaaatacaaaaaattagctgggtgtggtggcgcacacctgtaatcccagctacacaggaggctgaggcaggagaatcgcttgaacctgggaggcagaggttgcagtgagccgagatcatgccactgcatagcagcctgggtgacagagcaagactccatctcaaaataaataaataaataaacaaaagtttgtggcaccttcccctacctcttcctcctgctattgccatataagacacgcctactttgccttcaccttcagccatgaatgcaagtttcctgaggcttccccagccatgcttcctgtacagcctgcaaaatcatgagacaattaaacctcttttctgtataaattattcactttcaggtatttatttataacaatccaagaatgga

SEQ ID NO: 837482 - DNA, 578 bp, Homo sapiens
atgcttttagtaaagatctaggatacacaatcaatataatgaaacttcgtagcatttctatacaccaataacattcaagctgaaagccaaatcaagaatgcaaccccatttacaatagccacaaagaaaataaaatgactaggaatacatttaaccaaggaggtaaaagatctctacaagaagaataacaaaactctgatgaaataaattatagatagcacaaaaaaaatggaaagacacactatgctcatggattgaaagaatcaatatcattaaaatggccatactgcccaaagaaatctacagattcaatgttatccctatcaaattaccaatgtcatttttcacataattagaaaaaaaattaaaattcatatggatccaaaagagaagcacaaatagagaaaaacaactctaagcaaaaaaacaaagctggaggcatcacactacttgacttccaaccatactayaaggctacagcatggtgctgttacaaaaacagacacctagaccaatgcaacaggttagagaacccagaaataaagctgcacacctacagtcatttgatcttcaacaaa

SEQ ID NO: 837483 - DNA, 529 bp, Homo sapiens
actaagctgcccagcttgaagagtctgaactyaagagctttgatcctgcaagaagagtccattcccttgttcttcagtgggaaaaccctgtcacctgagttcatttaaaactgatgcaaatccagagagcaaagccacgctgcattcagaacatgtcttaagacaataggttcaaggaaacagcgttgttactgagcaaattccctttgcaaatttccaggcccttccgtgccaaagcaaggtaatccagtttaatgcgagttgcctttttgggagagaaaaataaaaggcaaaatatttaaggattcctttattctgcttttagcttctgagcccagcaattaattcgtatgtgctaaaggacttctgtgtttatgaggcattattatttaatgtaggcctattttaaattgtaatttttttcattaagttgcctcttttcacttattaagaccagttttataacctagcatagactgtattccttgagtaataactatttttcttttaaaatattccttaataaccc

SEQ ID NO: 837484 - DNA, 400 bp, Homo sapiens
ctccgtctcaaaaacacaaaacaacaacgacaaaaaatcagctttaattgaggtataatttaccaacaaaaaagtccaattagaactgtcagattagctgcattttgacaaatgtatgcagttgtgtaaacaccaccacagtcaggatatagaataagccagtcactcccaaaagtcccatcacggaccttttggaatctcctgcatcctgcccttaggcccaggcaaccacccacctgcttcctgtccctgcagtttggtcttttctagaatttcctaccagtggaagcatacagtttgtgtcttttgggtctggcttygttcacttggcatgatgctttggagatttagccatgtggttacacggaccactcgttcatccctttttattgctgtgtag

SEQ ID NO: 837485 - DNA, 558 bp, Homo sapiens
atgctgagtttttttcatgtttattggccgcatgtatgtcttcttttgagaagtatctgttcatgtcctttgcccactttttaatggagtggtttgtttctttttcttgtaaatttgtttaagttccttgtagactctggagatcagacctttgtcagatggatagattgaaaaaattttctcccattctgtaggttgtctgtttgctctgatgatagtttattttgctcctcagaagttatttagtttaattagatcccatttgtccgtttttgctttcattacaattgctgttggcattttcatgtgaagtctttgcccatgcctgtgtcctgaatggtattgcctaggttttcttctagggtttttatagttgggttttgcatttaagtctttaacctatcttgagttaatttttgtataagatgtaaagaaggagtccattttytattttatgcatatggctagccagttctcccagcaccatttattaaataggacattctttccccattgctagtgtttgtcaggttttttcaaagatcaggtggttgtagg

SEQ ID NO: 837486 - DNA, 640 bp, Homo sapiens
ttataaaaatgacttttgaagagtaagaaatggaagcaggatatgctcacaattaagggaactttgtaaggtttctactacttttgttacagcccctttccccctagtgattaataataaagcctctgtgtgctcagtgaaggagaggcaagtacactggagggcaggagaggtcatagcttcttccactatgagctctggaaaggaaaaacccagaagcagagaaagaagggcagctttggagccatgggtacaggtgggtggggagagattcagagaacagctgagaaactaggacctaggtagggaaagaagactagaattgtgcagaaaagtcaacataacaggcctgagattgctttccttaggaagtcttgcttgcagggttggcacatgactggcatctaagaacttagatttcagaaggcttttctcaaatctctaactgataagagtggctcactgtgcctaaacagtttgtgcaggcaatgtggtttatgttgaacacccactttcctgggatttttgcacatgctaagcagaggtacctacayggccaataaaatccctgggtgctaagtctttaaggagcttcactggaagacacttcacacatgttgtcacaattcatgctgaagga

SEQ ID NO: 837487 - DNA, 589 bp, Homo sapiens
cccaggctagagtgcagtggtgcaatcttggctcactgaaaaccccgcccccgggttcacgacattctcctgcctcagcctcccgagtagctgggactacaggtgacagccaccatgcccagytaattttttatttttttgtatttttagtagagacagggtttcaccgtgttagccaggatggtttccatttcctgacctcgtgatccacctgcctcggcctcccaaagtgctgggattacaggcgtgagcctggcacccagccaaactcatcctttttcatggctgcatagtattccatggtgtatatgtgccacattttccttatccagcctatcattgatggacattttggttggttccaagtctttgctatggtgaacagtgctgcaataaacctaagtgtgcatgtgtctttatagtagaatgatttattgtcctttgagtatatacccagtagtgggattgctgggtcaaatggtatttctggttctagatccttgaggaattgccacaattgtttcctgactttttcatgattgccattctaactggcatgagatggtatctcattgtggctttgatttgc

SEQ ID NO: 837488 - DNA, 589 bp, Homo sapiens
cccaggctagagtgcagtggtgcaatcttggctcactgaaaaccccgcccccgggttcacgacattctcctgcctcagcctcccgagtagctgggactacaggtgacagccaccatgcccagctaawtttttatttttttgtatttttagtagagacagggtttcaccgtgttagccaggatggtttccatttcctgacctcgtgatccacctgcctcggcctcccaaagtgctgggattacaggcgtgagcctggcacccagccaaactcatcctttttcatggctgcatagtattccatggtgtatatgtgccacattttccttatccagcctatcattgatggacattttggttggttccaagtctttgctatggtgaacagtgctgcaataaacctaagtgtgcatgtgtctttatagtagaatgatttattgtcctttgagtatatacccagtagtgggattgctgggtcaaatggtatttctggttctagatccttgaggaattgccacaattgtttcctgactttttcatgattgccattctaactggcatgagatggtatctcattgtggctttgatttgc

SEQ ID NO: 837489 - DNA, 528 bp, Homo sapiens
gcattgtacaaaatcctgtctgtccatgatgtgcaaattttgtcctgcatgggataattaagtgggaatcacacacccacatatttccagaattccatccaataaattcacaaacacttgaaaatcacaatacatattttaggtaatgggccataagagattattttaattgtaagaaaatgtacaaaaatgttttgcattttacatatcttctacttaatagcaataaaatgaagtgacactaaagtagaaaaaagcctgaaaagtatgatttctttgtatcaacagtgaagggctggctcccctgtatatggagttcccgaacagtcaggtttcttaatccttgtcatctgtggccagtgtaaaagaaagacctgacaggaaaatttaaggagccagctgggtaattccatatgagggaattcttggtgacattcaaaaaactcacacttccactttcaaaatyaagaaacacaccaactcggaccagaggtttctctacatagtgaggaaacattggggaggtgg

SEQ ID NO: 837490 - DNA, 594 bp, Homo sapiens
ctcagtgctttgaatgcatgaagacaacatggcagagaaacctsaaaactaacattcatttgaagcagatggcttcccttgccagaaaagccagtctctggctattcctgagctctgaggagcaaatgtgtggcactcacagggagacaaagaagatattctgtgaagtggacaggagcctgctctgtttgctgtgctccagctctcaggagcaccggtatcacagacaccgtcccattgagtgggctgctgaggaacaccgggtaagtgatgcctctgaagatctatttctataaatgacacatgaaattcctgtgggtctattttcttggagattgggtaaagccaaacctgagtccctttaagcagctcacttttgggctttcttagcttcaaacctctgagatttgacgaagaagaagggaaatagaagaaatgccatttcctagggacttacttgtctctcattctcagcccgctccctatgaaacggtctgcatgttactttattgttttcactggtgattcaatttatggctcttttgcaggagaagcttttaaagaaaatgcagtctttatgggaaaaagcttgtg

SEQ ID NO: 837491 - DNA, 594 bp, Homo sapiens
ctcagtgctttgaatgcatgaagacaacatggcagagaaacctgaaaactaacattcatttgaagcagatggcttcccttgccagaaaagccagtctctggctattcctgagctctgaggagcaaatgtgtggcactcacagggagacaaagaagatattctgtgaagtggacaggagcctgctctgtttgctgtgctccagctctcaggagcaccggtatcacagacaccgtcccattgagtgggctgctgaggaacaccgggtaagtgatgcctctgaagatctatttctataaatgacacatgaaattcctgtgggtctattttcttggagattgggtaaagccaaacctgagtccctttaagcagctcacttttgggctttcttagcttcaaacctctgagatttgacgaagaagaagggaaatagaagaaatgccatttcctagggacttacttgtctctcattctcagcccgctccctatgaaacggtctgcatgttactttattgttttcactggtgmttcaatttatggctcttttgcaggagaagcttttaaagaaaatgcagtctttatgggaaaaagcttgtg

SEQ ID NO: 837492 - DNA, 550 bp, Homo sapiens
tagcatctcatcacgggaaattgacataattaagcactcttcaaagaaaaatagactctgatgtctccaatgctattaaatatttattgtgcacattatcgcagtaaatttcctgacagagagtgagtctaccaaagtagatcaaatgagaacatcgcattgccttgttgcaagtgtatccacctctatacattattaaacaacatacatctatacacataaaatataaatgtagtagccgcataccgtggaggctgaggaatctatgaaagaaagtatgtttagagtatgtttcccaatactcccaattctcagctcagatgagaaggttactatgcttatttctgccggcagattccttcctgctgaatataattagatataagaagaaaaaaataataattaaattatggatagtcctcttgcagaaaaattttacatcaaagtaacaaaaaaggatactgaattagaaaaacaacgcagttgtwgagtccctgaataggcttcttctaaaagtaaaatcaactttttctcaaaggagagaaaaaag

SEQ ID NO: 837493 - DNA, 642 bp, Homo sapiens
acaaacacacacacacacacacacacacacacacacacacacaagttcaaggagagaataatcaactgtgtcaaatactgctgatgggcaagtaatacaattaaaaatgagccaytgcatttagccaagtagagaccattggcgatcttgacaagcgatgtttcattggagtggtagagatacagtctgattgaagtggttgtaaaagagacgagaaaaatagaaaaagcaaatgtaacaagctgttttaatgaggtttgctttaaaaaggaggaaagaagaaaggcagtagttggagagatatgtgaagttcaataaggcttttattgtatttgttttattattttccatattggaaatataaagcatatttatattactagagaaatgatatactttatgaaattatcaggagatgttgataatgtaggatagagtggagaattgctgaaagcatattctttaagaggccagaaatgatagttcctctatggtaaaaagaaggacagcacagaattagaatgcaggcgcaaatatagtaaacaattagaccgtgggaatacacagccattttcacgtaattgtgtttattttctagtgagagagtgaacacgatcatcagcagaaaatgaagatagaggt

SEQ ID NO: 837494 - DNA, 600 bp, Homo sapiens
ggggtgtgttgcctgcaggggagttgggggggtggtgctcacagayaagtaaacataaaattatagtagaaagtattgtggtaagaagaataatctttactccaccaaaagaagtttacattccaatttctggatcctagtaacacgttaccttacatggcaaagggaaattaaggcgggagacagaattaagattgttaacttctgactttacaataggaattggattgtccagatgggtacagatgtaatcagaagaacgtttaaaagtagaagaaagatacagaagaggcgttaagacaagaagaagagaaactgaaaatgacatgatgtgagaaggacttggcctgatgttgatggcttttaaggtggtggaaggagggcatgagtcaagcaatgcagtcagcctctacgtgctggaaagggaaggctcttctagagcctccagaaagaatgcacccctgttgacaccttgatttcagctcaatcagacctatgccacaattttgatctccagagctgtaagacaattagtatctagtgttttaagctaatatgtgtgtagtaatttgttatggtagcaagatgaaactaatacaa

SEQ ID NO: 837495 - DNA, 536 bp, Homo sapiens
ccaacaatgtaagatttaccattaatggtttagcattaacaagagtattaatgcaattcatggaattcactgaataagcaaactaaaagaaaaaaaatctyaatgaatgcagaacaaatagttgataaaattcaatacttaaactcataataaaagttcttactaaagtagaaatagagaatttccttcacctggaaatgataccttccaaaaatcttcatcagatatcattcttagtggtaaaaattagaatccttcatttttacatcagagctgtagttgcttctatcactgtactggcaatactagccagcaatataaagaaatgtaaggactggaatggaaaaagattaaagtactggaaaggaattaaaaacaacaaaaaaaaaaacaaaaaacctgtgttaatttacagaagactgacataattttattaaaattaagaactctgttcgtcaaaagatctcttggaatgtgaaggtaagctacaatgtaggagagtaaatttgccacacatattatggataaaagattat

SEQ ID NO: 837496 - DNA, 622 bp, Homo sapiens
tagcacgttgaggctaaaggcatttatgcaattactaagtctactgtatatgtgagcaaacatgagggtagaataagaatagagctattatgttactgtaccattattctagtggtctgcctttaatacccagagacatctttggagaatgtcaaaatgttccctttattataacatttttttctttctttttcttctgattaataaggtgggttgataatataaatttttaaatttttatttttattttttggagacagagtctcactttgtcaccccggctgaagtgcagtggcacaatctcagctcactgcagtcttgacctcccaggctcaagccatcctcctgccttagccccacaagtagctgggactataggcgtgtgccaccatgcctagataatttttgtattttttgtagagacaggtttttgccatgttgcccaggctggtctcgaactcctgagctcaagtaattcgcccaccttggcgtcccagagggctgggattacaggcatgagccccacgccgggcctataactttttwaaattgttatatctagttctttgctagagaaattttattttgataaatgagttaataattataatttaattataat

SEQ ID NO: 837497 - DNA, 559 bp, Homo sapiens
gtaagtggaactagatggtagtgaaagccattgctttttcacatagtttgacaacgacasgggaggcaagtaaactggtctctagagcccctgttctgtccactctaccacaccagctctccctattttcagattatcatgcaaatgatgaagtaacaggtcatgaatacgagatgggaaacagaaagcaggaatcaaaggaagcaaaataagacatttatgttaatgtttcaaagacccagactagcttaggaagtcattatctgtcttagaatagtggtgaacaaaaagcacaaaattctttcaggtcagaaaatgcaaattatgtcagcccttattgcagagagtttaaaacacggaatagattatcactatttgttttgatgtaattcatacagtttacatctgcccaaacaaattttagtccattaataataatctcttgcctacaaatgtgtcatcttcaagaaatatttattgagtacttgccaagactaggcattgaagatacaaagataaataacatgtatttggttaatagtaggatagtaggagtgtt

SEQ ID NO: 837498 - DNA, 595 bp, Homo sapiens
cttcttttcagaaaggtatgtcatttaggtcctttgcccggtttttaaattgtgttttttcttgctattgagtcatttgagttcctagagtattttggacagtaattaatcccttatatgatgtagtgtttgcaaatattttctctcattttgattttgtctcttcatgatgtttattgtcttgtcggctttgcagattttttttttttaagttggatgcaatccatctgtctattcacccttttgttgtctgtgcttttgggtcatataccaaaagtttttggcttaaccagagtcaatgaggatgtcccctgttttcttctagttggtttatactttctagtttttaatttatttggatttattcttgtgtacagtaagatataggggtccaatttcatttttcttcatgtggctaccaggtttccctatcgccattgatggaagaaactgtggttttgtggtggtgagttgttggcacccttttaaactatcagttggctgtatatggatggactgatttctagactctctgctctgatccggtrgcttaagtgtctgtttttatgccagtgttatgccattttggttccta

SEQ ID NO: 837499 - DNA, 623 bp, Homo sapiens
ggatactagttattcatgttatttcttcttagttctgtaagttctttgatggctgaatgagtcatatttatatttaaatcatatatcgcacacttttcttagcatgtgacagaagcccaataattttggttgaagaaataaaggtaacacttcaaatacatgttaattttgagttgtatgaagaaagagagtactaaatgaggaaatattagcacgggtaaaagcgcgtccacaaacaggagaatttctaagcattagagagaacctatgtttttagaactaacagaagacaagatggcaatgtgggtctgaaccaggttgtggagggccttatctgccaaagtaaattcataagaattctttaagtgtggggagtctttggggattagattacaatacataaaatggatagaagttgtgtaaatacaagctcaggtgaccagttagtaagcaattttattagttcaaattagaagtaatgacctcagtcagggagaytggcataaaaaaataaaggagacgacatatgtgagggatatcaagtaatgtcaacaaacatttatgacaaagcaggaggcttattaaaaaaatgtcatgaggtttattgcttcataatgcaatga

SEQ ID NO: 837500 - DNA, 624 bp, Homo sapiens
ttctttaaatgtattatattcttttttatctcattttwtttcccttagcatcactgagacatcattttggaaaatcattaaaccatgtcagctgtattaagagaaaagcaaccttggtttatgtcttgttcatgagtccaggagggctagggaaaatgggggcctctcaaaggctcaaggctgtgagatgaattagtgattccagccagtgcagtgaataagaacagcaaatatcaaagactcaaactcatagtatgcatgtcctcatagtagcctagaccagagttcatttccatctgaaggaggtggctaggaatggtgtgcttcgtgtttttatttgtttgttcgttttgtattttatgtggatttatattactatatgcaggaagagaaatatgacataataaaacttatatatctgaaaaagacattgaacaatattctttactaggccagagttttgagaaatgacatatgaaaaaggcaagaactcactgcagtgtatgaattaacctggacagtaaaatgaaagacaacatgaaccagaaacaaaagaacaatttgaaatcacaaacaagaacgatagaaagggaaagcaaataaaagtaaaaccaagaaactgcc

SEQ ID NO: 837501 - DNA, 600 bp, Homo sapiens
aagcactaacttggatttatactattcctacccaaactgaccattactcatctaagatctacaacagatccctttctgagtgtacgaagaaaaggatcttccaaacacagtagamagaaagttcctgggaatctaaggatactagccatgctataacacacatttcaaaattatcaagtttattcgcaatacagaaagataagtttgattctgtaaagcaagtctgtgaaaaaatatatgtaaaaacaatgaaaaaaagtagagtaaatctacagtcacgtgtacagtccatggaattaaccttcatctgaactaagaagaaactggacgttaaaaatttttttttcaagaaatggtggcacgtgggctatacttaaaacttggttaacataagagagcctttgtcagatgagtaggttgcgaaaattttctcccattctgtaggttgcctgttcactctgatggtagtttcttttgctgtgcagaagctctttagtttaattagatcccatttgtcaattttggcttttgttgacattgcttttggtgttttagacatgaagtccttgcccatgcctatgtcctgaatggtattgacta

SEQ ID NO: 837502 - DNA, 560 bp, Homo sapiens
agtttggctggctatgaaattctgagttgaaaactattttctttaagaatgttgaatattggcccccgctctctttcggsttgtagggtttctgctgagagatccactgttagtctaatgggcttccctttgtaggtgacctgacctttctctctggctgcccttaacatttttttccttcatttcaagcttggagaatctgatgattatgtgtcttggggttgatcttcttgtggaatatcttagtgatgttctctgtatttcttgaatttgaatgttggcctgtcttgctagggaagttctcctagatgatatcctgcagtgtgttttccaacttggttccattctctctgtgtgtttcaggtactccaatcaatcataggttcagtcttttaacatagtcccatatttcttggaggctttgttcattccttttgattcttttttctctaatcttgtctgcattccttatttcagcaaggtggtcttcaaactctgatatcctttcttccaattgatccatttggctattgatacctgtttatgcttcacgaagtgat

SEQ ID NO: 837503 - DNA, 591 bp, Homo sapiens
tatttcttcatataagtttgacacaygcaattttggagaatgcatatactaaaaattatctatctattgtttatctgaaattcaggtttaactgggaatcctgtattttatctggtacacctaggttcaggccaatggtaatcaagataaattgtatgcatggtgctttagtgagtaaattaaataggtctaattgtatattattttatctttagataaaacaatcatttgaaatacatgataattgagagagagaatgatacagctgagctatatttgtgtttcacttattcttccaggaaacactaatggagatcattgtgcaaccctcttgaagttaggtaaagctatatgactgaattctacacaagagactgtgagcaaaagtgatgttcccctcttctagtcccctctctccctttccttttccttgtctgacagtttgaggtaaggcctccagtggaagaccctgagcctttatgataacagtatcaaaatatggaagggggctgggtacctgagtgactacatggaacagagaaccaactccccatttcttcctgccaccactaacacacagtagatggtgaa

SEQ ID NO: 837504 - DNA, 540 bp, Homo sapiens
atggacatgattttaataaaaaagaatgacataaacctatttattgtggccgaattgtgtgacacacacaaaaaaacacaccttgtaagcctttggtatcaaacttgaattcaaattccatgctccatctcttacaagtcacatgctatgtactatctctatgtgtacatccctcactagttaaatggataagttacccgatgaagttgttttatgcattgtgtgtgtgtgtgtgtgtgtgtgtgtgtgtgtgtgtgtgtgtgtgtgtgtgtagatatatagataagtagatcttgacacggggactaaaaatagtgaattggcagattggctttagttttccaactcaaatacaaacatatccatatacccttcctgtccacttttctggtgttttctgtggatggcaggtgtcctgagattttgggtggatagggaagtaagttaaatcagccttctggarttaaagacaaggcctcccaattttctggttagtatagatactaagtctgtaaatccaagctcatacagaaactgtgt

SEQ ID NO: 837505 - DNA, 466 bp, Homo sapiens
aaaataattatgtgaggtgaaggacttagtcttatttaatcattacacattgtaaggaaacatcaaaacatcacataatgccccacgaacatacacaattattatttgtcaataaaaagtaaaattaaagaaattaaagaaaatattctaatcagacaagcatataatttatattttggtttatgtaatacacatcagcacaaatatgactttttctgttttacccaatgaaatacacattatttcctgaaaaatctgaaaaactatgttggttttgacccattataattaaatgaaataactatttctcagttttaaaactccattgtgattatytctttttaatataacctcttctgacatcaccttgtaaattgaacacaatacttattgttgtgaaaatggcatcccaaaaagatttattctttttcccttacccattatacagtagacccttgaacgaaac

SEQ ID NO: 837506 - DNA, 466 bp, Homo sapiens
aaaataattatgtgaggtgaaggacttagtcttatttaatcattacacattgtaaggaaacatcaaaacatcacataatgccccacgaacatacacaattattatttgtcaataaaaagtaaaattaaagaaattaaagaaaatattctaatcagacaagcatataatttatattttggtttatgtaatacacatcagcacaaatatgactttttctgttttacccaatgaaatacacattatttcctgaaaaatctgaaaaactatgttggttttgacccattataattaaatgaaataactatttctcagttttaaaactccattgtgattatctcyttttaatataacctcttctgacatcaccttgtaaattgaacacaatacttattgttgtgaaaatggcatcccaaaaagatttattctttttcccttacccattatacagtagacccttgaacgaaac

SEQ ID NO: 837507 - DNA, 471 bp, Homo sapiens
attagcatatacataatatcaaacctttattatttctttgagaacattcaaaatcttctctttgggttatttgaaatatgcaatacattatttttacctatagtcacctcatagagcaataaaacaccagaacttactctttgtatgtaactgtatcttcattcctgttgaccagccagtggtaaccactattctactctctacgttacatgattaactttttaatatttcacatgaatgagatcaagtggtatttgccttctgtgttggtttatttcactgaacaatgtcctctagcttcatccatgttgcatcaaatgacaggatttcattcttttttatggctgaatrctattcctttgtgcatatatatagaaatctatttatccattaatggacagttaggtagattccttatcttggttttgtgaacagtgctgcaataaacgttggagtacacatatctcctca

SEQ ID NO: 837508 - DNA, 663 bp, Homo sapiens
cttccctccctgactttttaatactgtagtgccttaaggctcagtcctgtattttatccatctctacattcacagacctggtggtctcatccaatctcatggctctaaatgctatctgttactgrtaactcccaaattgacattgctagccaatctctctcatgaacgccagacatgcatatccaattgccttctcaacagctcaacttggatgacagacctctcacttagtatgtacaatttcaacccctatacctatagttacattccctcaattgacagtaactccatcctcccagttattaaggtcacaaatattgaaatcatccttgtctcactccttcacaccctatatccaatcagttattcaaagcgtatccagaatctaagtacttctcattatttccattgctgtaaccaggtccaagccacccatctccttctttaattagtgtaatagcctcctattacactggttttcctgtttctatgcttgctctctataggctactctgaacacagcagccagaatcatttttttaaaaacttaagttggatcatagcactcctatgttcaaaaatcccccaatggttccctatatcactcacaacaagagcctaagtccttaaagtgatccacaacttcttcttacgctactctca

SEQ ID NO: 837509 - DNA, 577 bp, Homo sapiens
gagaagctcttttgtaccctccagaaaagaacagccatgagctgacaccaccaagtgacaccagttagagccccatgaagcagaggacttgcctagttgatcatgagccataatagttgctgttttggccgggtgtggtggctcacggctgtaatcccagcactttgggaggccgaggtgagtggatcacctgaggtcaggagttcaagaccagcctagcctacaaggtgaaaccccatgtctacaaaaatacaaacattagctaggcatgatggcaggtgcctgtaatcctagctacttgggaggctgaggcggcagaatcgcttgaacccaggaggcagaggttgcagtgagccgagatcgcgccattgcactccagcctgggcaacagaatgagactccatctcaaaaagaaaaaaaagaaaaaaaagttgctgttttaagccactargttttggggtagtttgttatgcagcaaaagataactggaacagtgcagtgggagtctggaattgctacagccacatgtggagagtctaaagccatccaaaaagtgatcaggacaaagtcctcttaa

SEQ ID NO: 837510 - DNA, 623 bp, Homo sapiens
tcaaacaaattagttattctcatctttctggccagacatgagacaacagtcccatgggattaatttttgctacatttgcattttgaggtgagtgaggcattggctgtggtttctgtattcaaaaycaggcttcaccttcagcaacataactctgataataacgagttaatattccaaagtctgccataaacatcctcttgaaggtatttattaactctaattatggagagaaatggagccatatactcataagatgtcattaaaaatgagctagaatgcccacgggaacgtagactactcaccttactgtgtctgtttcctggttgctagaactttgggatgattcattttgagtgtttttttttttttgcagcgagttccctgatacatttcagtggtgcccaacagtttgttatgcagactgtttcaaatcaggacagcagctctcacttcaagtctgatatgatccgcgtgaccatagctgaaaccttgaactttggaccttaaacaaagtctgccatatatagcttacatattcctagcagaatgtggcctatcagtgacttgtccatctggcttggctaagctctctccataccacgctgagttagagggggaaaaag

SEQ ID NO: 837511 - DNA, 498 bp, Homo sapiens
cctggaaatgtttttgaaatatctytgccttcccagaaaccagggagtccatattcaactctgactgagtctgtgctgacataaaattcagtgaagatgatattttgcaattttctgattcatgagtgactcatcaagtcatccacgccagtggttcagaaaacacacgggacaaggccctagaggtgtgaccttggtaaataccagatatttaataaatatttattgtttttaaatcgcaaagtaatcctaagaactagaattcactctggaaagggcattataatctggtttgttaatcatgaacatatcatccagaaacttaactttgtgctttgcaaactacctaaagcacagccagtgaaatttgtcacagcacagaaaggttttcactttaccaacccagccctcatgagtatcggccagatgccattaccttctgtgctttctgaatggactaagaaggggaggattagaaccaaagggttggaggatttt

SEQ ID NO: 837512 - DNA, 577 bp, Homo sapiens
agtggaataaaaattaccacaaaaacctggtgctggaaaagcaggtttgctcaaagatgagaagtagaggaaagttggggaaagataaagaaagtgagggagggacgacatgaccacagacaaatagcaagaacaacaaaaaaaggttaaaaaacttccctggtcaaaaaagcagaactagtggacagaatgggaaagaggaagaatgctgagggaaaagaagaaaatgaattaacaacggttgttattacattgaacaggatacattatcctggctgggcgtggtggctcacgcctgtaatcctaacactttgggaggttgaggtgggtggatcacctgaggtcaggagttcaagaccagactggccaacatggtgaaaccccatctccactaaaaatacaaaaattagccaggcgtggtgatgcacgcctgtgatcccagcttcttgggaggctgaggcaragaatcgcttgaacccaggaggcggagtttgcagtgaatcaagatcgtgccactgcactccagcctggggtgacacagccagactccgtctcaaaaaaaaaaaaaaaaaaaaaa

SEQ ID NO: 837513 - DNA, 577 bp, Homo sapiens
agtggaataaaaattaccacaaaaacctggtgctggaaaagcaggtttgctcaaagatgagaagtagaggaaagttggggaaagataaagaaagtgagggagggacgacatgaccacagacaaatagcaagaacaacaaaaaaaggttaaaaaacttccctggtcaaaaaagcagaactagtggacagaatgggaaagaggaagaatgctgagggaaaagaagaaaatgaattaacaacggttgttattacattgaacaggatacattatcctggctgggcgtggtggctcacgcctgtaatcctaacactttgggaggttgaggtgggtggatcacctgaggtcaggagttcaagaccagactggccaacatggtgaaaccccatctccactaaaaatacaaaaattagccaggcgtggtgatgcacgcctgtgatcccagcttcttgggaggctgaggcagagaatcgcttgaacccaggaggcggagtttscagtgaatcaagatcgtgccactgcactccagcctggggtgacacagccagactccgtctcaaaaaaaaaaaaaaaaaaaaaa

SEQ ID NO: 837514 - DNA, 577 bp, Homo sapiens
agtggaataaaaattaccacaaaaacctggtgctggaaaagcaggtttgctcaaagatgagaagtagaggaaagttggggaaagataaagaaagtgagggagggacgacatgaccacagacaaatagcaagaacaacaaaaaaaggttaaaaaacttccctggtcaaaaaagcagaactagtggacagaatgggaaagaggaagaatgctgagggaaaagaagaaaatgaattaacaacggttgttattacattgaacaggatacattatcctggctgggcgtggtggctcacgcctgtaatcctaacactttgggaggttgaggtgggtggatcacctgaggtcaggagttcaagaccagactggccaacatggtgaaaccccatctccactaaaaatacaaaaattagccaggcgtggtgatgcacgcctgtgatcccagcttcttgggaggctgaggcagagaatcgcttgaacccaggaggcggagtttgcagtgaatcaagatcgtgccmctgcactccagcctggggtgacacagccagactccgtctcaaaaaaaaaaaaaaaaaaaaaa

SEQ ID NO: 837515 - DNA, 562 bp, Homo sapiens
ctcaaagaaaaaattaaaacaaacaaacacacaaaacccacaaagtattaaaggtctgggttgagaagattccctacctaagaatattttaattcagagagcagaagatataaagagggaaacaactcttaagtgactacagcctggattacctgagcataagagggatatgaaaatgtatttttggccaggcgcagtggctcacatctgtaatcccagcactttgggaggccgaggcgggcagatcacaaggtcaggagttcgagaccagcctggccaacatggtgaaacccctctctactaaaaacacacaaaaaattagccaggcacgggccgggcgcagtggctcacgcctgtaatcccagtactttgggaggccgaggtgggcggatcacgaggtcaggagatcgagaccatcctggctaacacagtgaaaccccgcctctactaaaaatacaaaaaaaaattagccaggcgtggtggcatgtgcctgtagtccagctacttaggaggctgaggcaggagaattgcctraacccagaaggcagaggttgcagtgagc

SEQ ID NO: 837516 - DNA, 607 bp, Homo sapiens
gcccaggaaccggatgttgcagtgagtagaaatcccgccactgcactccagcctgggctacggggcgaaattccmtttcaaaaaaaaaaaaaaaaagagagagacttccacatgaaactgggtttatatcctggccacatgatgatggtcatataatctaacctaacttccctaagcctcactgtgaaatgggaataatacaatactattccatgaggattattattctgaggattaaatgatctaatatgtataatttgttactatactcccatgacattatcacattatttgttctttttttgtatgtcttggcaacttacaggtcactgtcaaaatttttgccaaatatatccaaaatcaaagaattataatgcattccatccaaggaccaataacagtcctccactggcacaagtaagtgagaactaacattctctaaagaatatagcacgtgatgggaaatgtagcttaccagcttatgtttgctccttcctcaaaatattactgggttatctgtcaggaatgggcataggctaccttggtcccaaaaatgtcaatcttaacattaaaatccaatgctatcaggccaggagtgttcctaaaa

SEQ ID NO: 837517 - DNA, 639 bp, Homo sapiens
tgaccattccgggctgattgctgcagaagttgtggtttggcttcctgtgcaaagctagagggtcagagttctatccttttctaggctaaaccacatattttgtatattcgtatattcagttcctcaaagcagtccccactgataatggctcgaatttgtaagcatggaggggagtggtgcgagagctgttcagtagctctaccatatcacaaaagtggtttccaaggttgtgattttcttggctctcatctcttgggtataagtggctgtgttcgagaccagcctggccaacattctccttgtgagaatccaatgcctgatgatctgtcactgtctcccatcaccccagattggaccatctagttacaggaaactaagctcaaggctcccactgattacacattatggtaagttgtataattatttcactatatattacaatgtagtaataatagaaatgaagtacacaatgacatgtaatgcgctcccaatcatcctgaaaccatctccatggcccctgccccaccaaacgtggaaagattgtcttccatgaaastggtccctggtgccaaaaaggttggggactgctgctctactacatagattttctcccacctctgccacccccgagacagtaag

SEQ ID NO: 837518 - DNA, 617 bp, Homo sapiens
actttggtggtgtctgccctcgctatgggaggtcaaaggcactcagaatgaaattagaagatctcctagcatctggaattgggttcctggggaggtaatgtggacgagcatttatcttacaaaaatcatgtggtctccagaatcctcctactccctggacccaaaatgactcaagcagacgacaaaatctggtcaccaagcttcaccccccaaacttcctggggacttagagcagaaacagttatcttgtgaaacttggaagcacactgaacactctgacattgttcaaattggccagcttttcctctcttcttaagcccagagacttcagatgacctggctagtttgcaagtaaaaatgcaaaagaatatttcctctctcattttgcttggggttggctttagaatcagctgtcatgtggaaggtacttggcagctcagcgtgatctgctcacaggctgggagcatccacggatctctccctccctggcccttctgacctacaatggccatgggagaaggtggatttattacctyggggtatgaacagcagagacggatgctgggtttccccgagacacctaatatcgctctctgtgatgggcagctgatcccctc

SEQ ID NO: 837519 - DNA, 597 bp, Homo sapiens
actctttattgtaattgacctaaaacaaataacaccaccaaggtctcatagaagatggtctgagctcacccctgtgacacatcattttaattgctagagaccctgaaaatagttaatggattctgacactgcrcttggagttgggaagttgcctgtatgaaaaacatgggctgaaaattgatgctttacttgacatggctggtaaaagcagggttgggactacttggccatagtggatacttgtggtgttcgctactcaatgtccattctgtttcttgggtcaacagaactctttagaaaaaaacattctacctctaatctcagccacagagctttgtggagctaactcaacctccaggatccagagtgcgtcatgcaatttaagctaaaccagtcagcccaatccttccacctggcccaggttccaaggcagtccattcatgggcaaaatcttgactcaatcttaggacttatacttaagccattgagtaagctttctttccttctgctagactagatgagttgatgagcctaaatttccccagacccaacacacagagttgaaaatgaatccaaaaggaaagcaatagatggacc

SEQ ID NO: 837520 - DNA, 610 bp, Homo sapiens
caacaaatgtgatttttaaaataaaaatatgttcattaacttttatcaataacatcaaacaacacatttgtttcacgaaacacaaagtcacaactgagcaatgagcagagaggatgttgcctagctctggccctcaggtgattttcttctctccgtttcccgagagctgattgatgtcacaattccaagatgacttgtaagtgcaggacagaaatgaaccacgcgcatctcatcatcacactccctaagtgatgaacgttccaggggctgtttcttgccaggaaaagctccagtgtctggtttcaggcacctggtcacctcctcctaacctctcctcctcttgagccatatttcacagttacagtttcccagccagcctcccctgtaagtggctccattcactgctacttggagttaagttcagcagcttagattttcattcttggaggaggtgattttaagcctagaaggcgtgcatgaagacgattacctcctctaattcagtccagagaacagcrtctcacctgtggctcttgctggaccccagggcttggtgtcgtacaattacaatggtgattgggcctgagaaacggaggcggcatctgggaaa

SEQ ID NO: 837521 - DNA, 559 bp, Homo sapiens
gccctggtgcaggatccactaagtgaagccagctgggctcctgagtctagtggggacttggagaacctttatgactagstaagggattgtaaacacaccaagcagcactctgtgtctagctcaaagtttgtaaatgcaccaatcagcactctgtatctagctaatctagttgggacttggagaacctttatatctagctaaaggattgtaaatacatcaatcagcactctgtgtctagctcaaggtttgtaaacacaccagtcagcaccctgtgtctagtttaaggtttgtaaatgcaccaactctgtgtctagctaatctagtggggacttagagaacctttatgtctagctcagggattgttaccacaccaatcagcaccctgtcaaaacggaccaatcagctctctgtaaaacagaccaatcagctctctgtaaaatggaccaatcagcaagatgtgagtggggccagataagggaataaaagcaggctgcccgcgccagctctgacaacccgcttgggtccacttccacactgtggaagctttgttcttttgctc

SEQ ID NO: 837522 - DNA, 437 bp, Homo sapiens
gagcctctggagtccattggggcttgccaaagcccctttcctagtgcccgggtcccagggycaggggagtgggattaatgagatctagttgattaaaagttagttgaattacttgcactcttatgcctcttgccggcattatatccctttgactatttgttttaaatttcattagcgtcttctttttcatttatttgccctgtaaatactgatagtgtctagtgtttagtcttgaagacacttcgcttctcatgtgcccgcttcatctgtcattcttgatccttccataacttgaactatctccagtgaggtaataactgccaaacttgggtctccaggctccacctctctaacgagctctgggtcctacaacacagcattatataacggaaatataatagttaatttcactgagtttaactgcaaaaaccacggta

SEQ ID NO: 837523 - DNA, 562 bp, Homo sapiens
gcacagacagcagcaacaggtatggtggttgggggtcctgcaggctcctttcccttgccactctgtcctgaggtggtcccagtcacaagaaggtgctacagtgcagagaggctaaaccttggctttctagccrtagaaccttgaggagtggagattacagaaaggagacatctgagttagatatcctttaaatgtgtgtatgaagttctgggctcatccctgagctgcacatgcataaaactgactagaatgagcacagcaaaaccttttgagaattttagaaggaccaagtctcagcataatattcaaaatctgtaggatatgaaccaaaattatccaacatacaaagaaccaggaaagcctaaaaaattctcgaggaaaaaggcaatcaacaaatgccaaccctgagaggattcaaatgttagaattattagacaaagactttaaagcaactattatgccacattctaagaagtaaaaatgagtactcttggaattaatggaaagatagaaattctctgtaaaaaaaaaatagaagctataaagatagaaattttagagt

SEQ ID NO: 837524 - DNA, 589 bp, Homo sapiens
  misc_feature 1, 2, 3, 4, 5, 6, 7, 8, 9, 10, 11, 12, 13, 14, 15: n = A,T,C or G
nnnnnnnnnnnnnnngtctcgttgcttgccactgaagctacctgggcttgacttgagttttaggaaggacacttagatggtttaaggttaatttttcagaggtcaaacctttttttagacctctttgtmgctcttaaaagaatgaaattgttatctaatttttgtttcatcctaagtttaagtagttgccaagtttgtaatgtctggcttgttgaaaatattgatatttataaatgaaaatattaagtcactctgagatttatgcaatggaatataaatagggtagtgatttaacatccaccatcttcatttaaaataaaactcttcaacaatgggaaattttactcatttcttttcctctttgaatttgattttcatttcacttttcccaccgaattaccccattgttttgcttgagggttttttttttttttttgctcaccctatcatacttttctgcaatatgtatatgtacatatatgcacatgtatgaataagtgtaatgctttttcttaatttcctttgacaataaggctctcttagaaacaaatgctggttctttggtgccaaaaagaagaactagcgctca

SEQ ID NO: 837525 - DNA, 566 bp, Homo sapiens
ctacatggatgagaaaaaaaaagccaatataagtcttttatataaaccaatctcttaaaacattttaataaatattttattttaatctattaaaatcccttcatagcccactaacattctaaaataccagctatagatttcaagttcattttttagaactttgaaagaaaaatagatatattgcataagaaaggtgatgaacttaataatagttatggaaaaagatacaaatataacaatgaaaggtcctgcagattaatttaaccatttaattaagaaaaagagagcactattacttaggtaattttttaaagtcaatattactataactcagtatattaaaggctttcaaaatgaaggaattagtcatggaatagtgttttgtataattaatgacatatttaactttttcatttagtcatattgctatctttactcctaatcaaaatgcaatttacrgaatgtattatttcatcgagaaattaacagctggcttgtaagaaacatttaagttaggttaattactgccttttaaatttgtataatatactgtgacagaaaattaa

SEQ ID NO: 837526 - DNA, 581 bp, Homo sapiens
atatttagttaaaaaaatctttcttctagctgattcaacactttggaacatctccsgagtttccctcaatacagcatgcatatataaattacgtatatacatgctgtatttttttaaggttttagtcttttatttcataacaataactgtgaggtaagcaggtagctacatttgcgcattccagcttaggtagcttctcaaatttccagaagttatctaggtattcaagttaaactcagctgaatgcaaatgggcttcccttatgctgcagttttatagctttttatcagtttgtagatattgacagctttctatcagtttgcaaagtaactaaatggattgactgaataatttgctgaaaaatgaaagaatgaagtttgagttagcatattataagaatatttatgtaggaaatcttttcacatatcaaaaaaaaagtagacttgtaagccctctaaatatttttctcagatactatacagatcttgaaagttttccacgtttgcgtaaatgatccaaaatgaggttaagcatagtgtggtttcctttatttcaaattacagctgcaagtaataaaactc

SEQ ID NO: 837527 - DNA, 505 bp, Homo sapiens
aaatgattccatttatttctggatataatatgaagcaaccttttgaaaattttttaaaaattaattttagccaagcctccagttgttttgtctattcacttacaaagaatcaggaaaaatgtattatcatttttacaaaaataattgtatattcttccttgtactatatcagtcagtagtttaaggggaaataaaccactttggacactttcattaaagttcccctcaccttgggttgtgtctggtatttttcttagtccatttgggctgctataacaaaacaccttagactgagtaacttgtgaatgacagacatttttcacagttcttgaggctgggaagtccaagatcaaggcagcagcgtatgtttggtgagggcctgcttcctcaaagagggcwtgttttcactgcgtcttcacatggtggaaggtgttctctcaggcctcttttataaggacactaatcccattcatgaagcttccagcctcatgacctaaataaccct

SEQ ID NO: 837528 - DNA, 552 bp, Homo sapiens
gaaacaaaaaacaaaactttacttcttctaccaccttcatctttccctgtaccattaccaccccgacctgtcattccctaccccaaaatagaaaacctgggggraaaaaaaaccaaaccaaaccaaaccaaaacacagagacgaaaccagaaccgtggggcgtctggaaaattacatgatgaatgcatgccggaccaggtcggtttaccctggtaatgatgctgcctccacatgaagatgctgctccagtgggacaagtcgtcagacacgatgggcagtcggttcctccaggtcttcaccaccgtcttcatgtcgtgcaggctgttgttccttcccaggttggttggctgtaagcctgcgttgatttgtgcagcttcctggagttcgatgatttgctgggctgcctgatgggaccagcataagagactctgcggtaaatgtcagtaaagatcaaacgggaaaaacacaccagagtccattggggacatgattatcgcaaagatcttatgatgcaattaccaaaggaagcactctcatttacaccacagacac

SEQ ID NO: 837529 - DNA, 392 bp, Homo sapiens
ctcagatagtaaatattttatgctttgcrggccatgtggcctctattacaactactcaactctgctgttgttgtagccatggatactgagtaaactgattagtgtggctgtgttccaataaaactttatttacaaacacaggcagtagcttgccaaccccctaactagagcgtagctgtcactttgagacctgagtaacttctctgtaggattacacccttgcaagaattctgcccgcagcatttccgagtttgcattataaccttgtgggcagggcagtgaaagtactgttatataggaaagttaccgtctcctaggaattttgttttaagaaaaagattctaatactaaagtatgacatttgttgaatattttttattggcagtaggaaa

SEQ ID NO: 837530 - DNA, 585 bp, Homo sapiens
cgattaaggagatgaagattttcttttatgtgacttaatattaactgtgtcatctaggacacaatgagtctttaggagattctttraataccacacatgtgaaccacttagtctacgatttaacccatcagtgaagaaagaacgtggcaaagatcattacaaaagcgctaagttgggcactgcagggcagctggaaggtatggtagggaccacactctgggtgtgcaaggcagagaagggggccgggccagaactgctcagtgggcttcgatcccccaaactcgagacagggtgcccccagcccagcctggccacgacccttcagggtgctgatgaggaagggaaaggtgtgggccctgctccttcaggacaccccaggctggcccattgctcacaggcccacacagcgccctctgatcccagcgctggggcagagagctaggctgcggcctgccccacttgttggtcagttgcccaagtgacgccggctggcgagtgctggagacggcggcagtggcatgctgaacccagaccagggctggccccaaggctggagtgcgcagagtgtggcctggaagaatgaaa

SEQ ID NO: 837531 - DNA, 593 bp, Homo sapiens
tgaaaccccacctgtactaaaaatcaaaaattagccaggtgtggtggcacgtgcacctgtaatcccagctactsgggaggctgaggcgggagaatcacttgaacctgggaggcagaggtggcggtgagctgagatcacgccactgcactccagcctgggcaacagagcaaaactccaccttaaaataaataaataaataaataaataaacaaactgaaatacagattgcggtgctgacatcctttttttctgattgttattaacaattcctcataaaattaaatgttgtcagaagactgagaagctcaggaggtgagctgctggccctggcgagtatttaagatggagatgaattcggaaaagcaaagcctgtctgaggtggagaaatcagcatcgatcgggatttgccacagaacttcaagttatttgtgagcggcaattcagatgagtgcccccagaatagtagctttgaatataccatttgctttctccctccacttgtgctgaactctgaactgccaccagattatccatcctccttcccaccttcattcacacttagtggcaaattgctgtcaccaactcagctctct

SEQ ID NO: 837532 - DNA, 527 bp, Homo sapiens
gggagaaaaagtcactgggagctatttcttccagctcactgaactacaaaagctgcaacattttggggtcattcatcaagaattgtcagaagggtaagtaagtgctgacccaagacttggatagcatgactgcagagaacataattgctgaggaggactttgtcaattccccatcacactcacttgttgagaatgttggcttttttccaatccagtttattttcatgaaggtctaaccataacatgggattggaaggaggtcctggggcagttgagggtctctggctgaggctgcacattggtcttatccaaaggccacttgactgacgccagtccccaacagcccattagggtgtcagcactaggacctccagcattttctgtctcatttacttttttctttcgtggctgtcatggctcatatatgccaaggccagctctgtcatggagaccctaacccagcgacactagaggaattaaagacacacacacagaaatataragtgtagagtgggaaatcaggggtc

SEQ ID NO: 837533 - DNA, 551 bp, Homo sapiens
atccccaggaaaacatcgtgcaaaaaagacactaccacagtgcaccatgaatcagtccaaagtcaaagtgaaagagcaaattctaaaatcaagagaaaagcatctagtcacctataaaggaaacttcatcagactaagagtggagttctcagcaaaaaccttgcaggccagaagagaataaggtgacatattcaaactgctgcaagaaaaaaactttcggccaacaatttgatatccagcaagactaaccttcataaatgaaggagaaataaagtctttcccagaaaagccgatctgagggaattcatcaccactagtcccacaagaactgctcaaggaagccctaacttggaagtgaaaagacgacattcaccattatggaaacacacaaaagtatatataaaactcactcataaagcaatcacagacgaagagaaaggaatcaaatggcactgctacagaattcagccaaaccacaatgacaaacagccagaggaaaagaaagaaacaaakaacttataaaacaactaggaaacaaataacaatacaac

SEQ ID NO: 837534 - DNA, 579 bp, Homo sapiens
atccctggtgaccactgccttgctttctggcatgaggtaagtacaaagtaccttgtactttgtctgctccagctcttgaaagagccccaaaagccctagtccttttaatggcaggaagcatttagaaaccaacatctgaatgttaggtgtgattgctgctgctagggtgtcactgttccgaggctctctcagtggacagtgtgtgtgtggggcagggggtggggggggaaggtgagtgtacacacattttacgtacatattcatgtctctctttatatattgaaaaccatgagctcacaccaatacctccaattccaattcaacatcccaggattcaatataatggaattatttttttctttactatttggtagaaattgctttaaagctatctgagcctagattttctctgtgtgaagatgttaaacaaatcaatttctttaatggtcctacgacattcargttttctatttcttcttgagtcagttttaataagttatattttctaggaattttttcatttatgttttcaaacttcaaatttattggcattaatttgttcataatagctcctcttta

SEQ ID NO: 837535 - DNA, 625 bp, Homo sapiens
gtaaaattgctgagaacaaggtcagaccccaatgctaagttctacctaagctttgaaaaaataaaamggaagaaaggtcagggcccaaaacttctgcaaaaatgctgacagcttggtttggcacatcatatccaagcccagaaaagttaattgtattctttctaacttagtcttattatttttcttaaatgttccttctccagaaatttagaattggccacctccatccagttctttctctgacctgatttaagcattctgtgaatattaagactaggataaatgagactgtaattgattaaactgttagtgcatgcaagaatgtgtctcagatattttattcctcaatgtaatatttttcaaaatatgtgtttttgttagtataagtcagtcttactattggaaagcttctttgttctgatttgttttgttttcagatttctaacaaacttggtgtgcatcatagttatctccgtgcagattgtgttgaaaacacctttgatgcttctcccagtcccaaggtactcctggtaaatacaaaaatccatttttaatacaacatttgttgacaattgtgcatgtctatcaaaaagaaataaatctgggaggaaatttgtgaaggcag

SEQ ID NO: 837536 - DNA, 575 bp, Homo sapiens
ttggccatctccctagcccctaccctaccagctgcctcctaagacactcccttagccctggacatgctcaccagtcctcggccccaaccataatggtccccttcttggctgcctccaaaaactattwaaaaaaaaaatggccaggtgcagtggctcacgcctgtaatcccagcactttggaaggctgaggtgggcggatcacaaagtcaggagatcgagactatcctggctaacatggtgaaaccctgtctctactaaaaatacaaaaaattagccaggcgtggtgacacgcacctgtagccccagctacttgggagactgaggcaggagaacggcatgaacccaggaggcagaggtttcagtgagctgagatcacaccactgcactccaacctgggtgacacagcgagactctatctcaaaaaaaaaaaaaaaagaaaaaaaaaagaaaagaaggaaagaaaatgtattcttggcttctctttttggatatgtggctgctgtgtattgagtacaggtactatactaagtgctctacatgtactctctcaattaatcatcacaattactatctaa

SEQ ID NO: 837537 - DNA, 638 bp, Homo sapiens
ctcattctctctcctgcaaccctgtgaagaggtgccttttaccaagattataagtttcctgaggcctcccccgccatgtggaactatgagtcaatataagctcttttctttataaattacccagtcgtgggtatttcttcatagcagcatgagaacagagtaatacagtaatttgcttccacagagagtggggtgcagctataaaaatacacaaaaatgtggaattgactttggaactgggtaacaggcaaaggttggaactgtttggagggctcagaagaagacaggaaaatgtgggaaagtttggaacttcctagagacttggagggttcagaagacaagaagataggagaaactttggaactttctagagacttgttgaaaggctttgaccaaaatgctgatagtgatatggacaatgatgtccagggagctcacatcttgcattagcatgacctggatttgagaaacagaatcaaagaaaatcattttggaactttaaggtttaatgactgccctgttggattttggacttgcactgggactgtaccccatagttttggccaatttctcctatttggaayggttgtatttacaaccatttacaatgcctgtacccccattgtatctaggaagta

SEQ ID NO: 837538 - DNA, 613 bp, Homo sapiens
tgcattgtttccaggagttggacttgtactttactgaaagaagcaggaaaaataatatctagatcatattgcctggatcgaaaactgacatatttggaaactgtcatagcaccttcttcataatatatacccagtatgtatgtatggaataaacacatgaagaatgccaaactaaaatttgttgatgttggaccacaagtatttcttgaaagttgctaaaaatcaccagcttttgctttactataattgttattatggctggggaaaaataggacctctagttatctgtccttttgcatatctcgtaatagattctaactcctggctattcaccattgatttaccttggttaacataccagtctactcattgtctgcataccaatcagaaagctaaatgtccctcagagggattgattgctacaaagatcaccttacactttgaacatgtattgtatctatggctcaactatgataacaacaaaaaaaaaaaaacagtaaaattytagtaagtgaaattgaaggaatatgtctacaaatactttgctccttttgaccccattgtaaggtccgtgttcattagcataaaacatcagctctttcaatttattatc

SEQ ID NO: 837539 - DNA, 343 bp, Homo sapiens
atgactttcgaagtttgtttcaggagtagcctgtcttgactatttaaaggcccaagactcactctgaaacttgatttcccatctaataaattgctgaatacaccttgcaaaagtgaatatcctactctgagaaaggtagtattccgattctgaaatttagaatctcactcttaagagttagttacttctttggttagtaattttaaaatctaagactatagtaagaaaaaatctcattgattaaaatatgtggaaaawtaagctatacatttgtcacttctttctaaattcctctctcactgtgtaggtgcctcaaatctgtggaaacatacaacatatcatg

SEQ ID NO: 837540 - DNA, 426 bp, Homo sapiens
accaggccttagtagagactgaaccatgagccagcaagtcaccatgggacctgagttgaccacaaggaattgagtgttagctggcctatcaagctataaatggaggcgtgcacagcaayactccattatccaatggaagtggtgtatacgtgatggggtctgagcaggtcgtgaaggcacaagtaatttacatgaagtgtcccaaatgccatggtcgccagttctgctacactgctttctcttttccattttggacttatgacctcatggggggtcccctacaatcagttgacagagaaagagaaggcttggaacaggtttaccgatggttctgcatcatgtgcaggcaccactgaatgtggacagctgcagcaccacagctctttcctggggcatcctgaaggacagtggtagatggaaatcctt

SEQ ID NO: 837541 - DNA, 524 bp, Homo sapiens
caaataattaaagaataagccctaaaataaaaaagaaaatagtcacctatttggggtctattttttaagatttggctttgttttttgattgtcttgggaactatgycaaaaatttacatatgtttaaaacaaattaaatttaaaaatctattattactaataaaaagtaaaatgaaacagatgaatttcactgtatatatagtttgtgtcaaatccacaaaaagaaaaataattccgaatgactgtaagtcacaataatttgactatttatccctggtgggtaggatacacactaaggacaaaaagaactgtccctcaaatatgtaaactttcaaaaatcttcctattgtttatggcaaagttgatgctgtcattcagagactattgtgtgtgtattgtgaaataatgcaattaaataattatgcaaaatataaattttattattcctgtaaagaaaggactgtggacaaataacccattttcttcaataaacaaattgtagcaaagagagatagagagagaga

SEQ ID NO: 837542 - DNA, 492 bp, Homo sapiens
ttaaccatataagaaactgccttatgtttccaccatgagtatactattttttcttcccatttgcaatgtacgagagacccaggtgcttcacatcttcaccagtactttttttwaaatttttttatttttttattttttatttttattttattttattttatcttttattttattttttcttttttgagacggagtctcgctctgtcgcccaggccggactgcggactgcagtggcgcaatctcggctcactgcaagctccgcttcccgggttcacgccattctcctgcctcagcctcccgagtagctgggactacaggcgcccgccaccgcgcccggctaattttttgtatttttagtagagacggggtttcaccttgttagccaggatggtctcgatctcctgacctcatgatccacccgcctcggcctcccaaagtgctgggattacaggcgtgagccaccgcgcccggcctatttttttttttgagaca

SEQ ID NO: 837543 - DNA, 603 bp, Homo sapiens
gtgaagccgacacggatgagggcattgatgatgatccacttccacttagtgaatatattttatcttccttatgagtttttwaataacgttcttttttccggtttacttgattgtaagaatacagtagataacatatataacatacaaaatatctgttcatcaactgtttatgttattggggaaggcttccggtcaacaataagctactaacagttaagttttagggaatcaggctgggcgcggttgctcatgcctgtaatcccagcacttttggaggccaaggcaggaggaccacttaagcccgggagttcaagaccagccagggcaatgaaaggagaccccatctctacaaaacacaaacattagccgggtgtggtggcgtgcacctttggtcccagctacttgggagactgaggaggaagtatcccttgggcccaggatttcgaggctgcagtgagctgagattgcaccattatactccagcctgggtgacacagcaagaccctgtcaaagaagttctatgtgggttttctctgtgcaagcgtcattgcccctcagcctgcatcgttcaagggttaaccacatccacccaacagatgaatg

SEQ ID NO: 837544 - DNA, 636 bp, Homo sapiens
ctaacttttagaatttgtaggaaaactacattgttaaattgttcaagaaaatatgaggagkggacttcaagaggattttaaaaaaatatagtagtcttcttttatagttcttcatcttgtgtttcttctagcttgggcaatggaataaatgttctgtagattactatggaactaaacctaattaatgttgtcccaaataagggcaatcctatgaaatgccctctaattttagtgtatcctcttgattgtttctttaaaaagatagatttgaaaggaaaatacgatattgatatgcaagttggggaaatagatacatctgacttttgatatttatctaaagcaaatattgttactaaattgagatacttcatgaactctcacttttaaaaatgttttatgcaacttcatatatgtgatttagctatctgtctagtaggaacagtacaaaagtataagaaaagaattgttcatagaggtttagagcttggcctctgaaatcaaatactatttgattagagtatttgtgacttgcagcacctctgcttagagttttgtgacttggagcaatttgtgaggccctggaacctgggtttcttcctctgttaaatggtagtgatgataatagtgcctgcctca

SEQ ID NO: 837545 - DNA, 368 bp, Homo sapiens
cttgctccagaggagcccagcatctccagttttagggagtccggtcacrctaaagaatgtcaggcttttgcaccctaggggttaacgacagcctggtgttctaagtcccagagctcgctgcaggatctccgaacccccagcctctgaagctttcacctgtcagcgttctgattaacaactggaaggccgacccctgttttctgatgggttccatgtacacgctgtgcaaggctgtgaaggtggaaatgctattttcttttgccactgggaggtcaggagcacttaataagacccctggccccacctggctgggctttggatatgatttttaaatcaagtgaactatttttagggccctactcaaagct

SEQ ID NO: 837546 - DNA, 598 bp, Homo sapiens
taaagagatcaaaaaagcaacccagttttcaatagctacaaataaaataaaataattaggagttaacsggagaagtgaaagatctctacaacgaaaattataaaacactgataaaatacattgaagggtacacaaaaaattgaaaggtatcccatattcatggattgaaaggatcaatattgttaaaatatccagactagcccaagtgatctacagatttcatgcaatcactgtcaaaatatcaatgaaattattcgcagaaatagaaaagaaacatcctagaacttacatagaaccagaaaacacccagaatagccaaagccatcctgagccaaaagaataaaactgtaggaatcatgttatctgaccacattatactataaatgtatagtaatcaaaacagcatgggactggcataaagagacacatagaccagtggaacagaggaaagatcccagaaataaatccatacatctacagtaaactcattttcaacaaatttctcaagaacatgcattgaagaaggaacagtctcttcaataaatggtgctgggaaaattggatatccatttgaagaagaataaagtagacctttatc

SEQ ID NO: 837547 - DNA, 598 bp, Homo sapiens
taaagagatcaaaaaagcaacccagttttcaatagctacaaataaaataaaataattaggagttaacgrgagaagtgaaagatctctacaacgaaaattataaaacactgataaaatacattgaagggtacacaaaaaattgaaaggtatcccatattcatggattgaaaggatcaatattgttaaaatatccagactagcccaagtgatctacagatttcatgcaatcactgtcaaaatatcaatgaaattattcgcagaaatagaaaagaaacatcctagaacttacatagaaccagaaaacacccagaatagccaaagccatcctgagccaaaagaataaaactgtaggaatcatgttatctgaccacattatactataaatgtatagtaatcaaaacagcatgggactggcataaagagacacatagaccagtggaacagaggaaagatcccagaaataaatccatacatctacagtaaactcattttcaacaaatttctcaagaacatgcattgaagaaggaacagtctcttcaataaatggtgctgggaaaattggatatccatttgaagaagaataaagtagacctttatc

SEQ ID NO: 837548 - DNA, 632 bp, Homo sapiens
aatgacttgttctatctggagtattttcgtattttgcatgaaagaaagatggtcaaaatatgtatcagacctcaaatcaaattaaagcccagaagatttcattgccattctgctttttgtttcatacataaatttacataaaattgagttacttaagatttcatatctgtttcaattttcttcccattttagacattctaaaatgaaaagcgatttaatagaacactgcattaattgttttaggagagttacacaatcaactcagctattttctaatttaacttcgggagacactattgttcttttgcatattctccctagttataatttgtaaattattcacattcatagccactaaaagaaacattaacagaaagagtgttatcaacaggcagtaaaatgacaactgggaggcctggactttcctttaatattttaaatgatcatttgaccttcatgaagggaatttatcttgcatagtatcattccataagaattaataattatatacactgaagacttttgagtgaggtgtctgtcagttactttcttttgacacaartaagcattaagagtattcctattgttgggaccaataaagtactagtacttttactaatatagtaaccatt

SEQ ID NO: 837549 - DNA, 585 bp, Homo sapiens
aacatatatgtccactgccttgtactgagataatttatgtccaaaacaaataccatcaattgcttctaaagaaagagtcaaaaatacaaatgtcttccttaaaaggttatgtaatttaatacctcttttgcatatagaataaaatctaaatatcccttcatttattcaagttgaatatagtctacaaattatttagttgtatttataaatcagatacgtacttagaaaatatattgatcatgtttagttcttccattaaaatacaatctcttttgaggccaagaccaagagattttgctgttgcttattttgtttttatgtttgccattttttaccaagcatgaagcagttgctcaataaaaattaatttcctttctcctaaatatttcaaagctccttttagaatttattttataagctttataatgtctcctgcttctagagaaatgtttgtcgtttttcttgtatataagcatgttggaataaaatggaaakttcaatatcacacaataaaacaaagtgaaacaacaatatagctctcctttatcccactcactactcccatcacagcaccaaatttcttca

SEQ ID NO: 837550 - DNA, 608 bp, Homo sapiens
tcattttttatttgatgattttttctttcattcactaaatatctagtgatcacttaccatgggttatattcttacttagacataagagataaaaacggtgatcaaagtcagagtattgaaaaarttacaattcttcaaaacagagatcagattgtgcaaagactgcaggaggggacatagcacactcaggaaattaaaagccagtgtgcctgtaatgttgagaggaacagaaagcataaggaaaatagttagagtctagaaaattaatagagatacagggtgttaaaacctacctaatcatggtgtatttccttttgatatgctgttcaatttggtttgctagtatttgggggaagatttttgcatcgatatttatcaggcatatgagtttgtacttttcgtttttttgttgtatttttgtctggctttggtttcagggtgagactgggttttattccaggaaggtaaggatggtgcaacatatgaaaattaacaaatgtgattcgtcacgtagaattaaggacaaaaaacatatgatcatctcaatagatgaagaaaaagcattgataaaattcagcgtatcttcatgataaaaacctgcagcactg

SEQ ID NO: 837551 - DNA, 571 bp, Homo sapiens
aaccgaaaagcattggaaggaaagataaaacttttctgtcccttacatgtccctccctcatttgacctgaagatttttttttcctttttcttagaaattactgaggaaactatttaattgaggtttttgccatggaaggtacttttacaccaacctaatacttttcttcatatagacatcatctctgaagtgttttggaattgttattcttcatttcattattagttgttttcagaattttcctttttatttaaaaataattgatccatgtttttactgtaaaccattttaatctttaaaaaaaataggcagtgtatgaattttaaattatccatgttgtattatttcattttccaatttaggaagtagacattccgcacaatttatgacagaattgttaaacattaggctatttgccagcggtttaatccagtgtaaaaatacattattggtgagattctttyattagcttcaaatgttgtcgtttcaataagaaaatatttcttcttattacaaaaaaccaaaactttcactggatttaaatttctgcttgtggaggttgaaaaaaggg

SEQ ID NO: 837552 - DNA, 612 bp, Homo sapiens
gtgactttcgagaaggagagagggaagaaaagatctgaccgggagccatgagcctgggctctgctcccagctctgctacccactagctccggcccagggagcggctgacctgcctgcctcgctgcctcgyccggaggatgagggcctgaccagggagcccgtgtgggaggctgcttggtgaaattcagcgtgtggctctggggctctgggcgcgtggctctctctctaggatccgtttcaccatctgtgaaatgggcttatgatcatgcctccctcacagcgtcctcgtagagcggctgacacaaagcaggggtcagtcggaggcagctgctgtggccccgccacaacatccaacatgaactctcaactggaagtgaatcatcacctcgctctcagcacagccacagaacacagtcttgatctccgcggatacaggttgagtatctcttctctaaaatgcctgggaccggaagtgttttgggtttccgatattttcaggttttggaatatttgcatatacataatgagatatcaggggatgggacccaagtctaagagtaaactccatgtatgtttcatatacctcttacacacacagcctgaagcgaattt

SEQ ID NO: 837553 - DNA, 523 bp, Homo sapiens
tcttttccctcgatcccacccttccccttcttccctcactgccctggacagttytgtctgctcatcagcgtaaagaggtctccaaaaagtacaagaccctccctctccccgctttccaagcaccctatggtgcctctcgctgctccttcaggaactgtgagcagggcacaaatacctagtgctcagcacccagtaggccctcacgactgtgccgagccatggccgtgtggctgtgattgtgctgacagcacacagtaggtcctcacgactgaggcgagtcatggccacgtgactgtgaatgtgtagacaggcacagaatggcctgaagcgtgggaaggtcgcctgcctggcagcagctttagcaccaggaaacctcccaccttggggctgcccctgagggtgaacaagtggggccagtgggaagcacctgctcaagtgggactgtgcacacaaatcactgggaattactgcctcacacacgattggttttcagcattttgtaagtccaagcaaacccccaaga

SEQ ID NO: 837554 - DNA, 523 bp, Homo sapiens
tcttttccctcgatcccacccttccccttcttccctcactgccctggacagttctgtytgctcatcagcgtaaagaggtctccaaaaagtacaagaccctccctctccccgctttccaagcaccctatggtgcctctcgctgctccttcaggaactgtgagcagggcacaaatacctagtgctcagcacccagtaggccctcacgactgtgccgagccatggccgtgtggctgtgattgtgctgacagcacacagtaggtcctcacgactgaggcgagtcatggccacgtgactgtgaatgtgtagacaggcacagaatggcctgaagcgtgggaaggtcgcctgcctggcagcagctttagcaccaggaaacctcccaccttggggctgcccctgagggtgaacaagtggggccagtgggaagcacctgctcaagtgggactgtgcacacaaatcactgggaattactgcctcacacacgattggttttcagcattttgtaagtccaagcaaacccccaaga

SEQ ID NO: 837555 - DNA, 546 bp, Homo sapiens
gccgcaccaaagccttcgggcctgcctgcctctgtgagtgcagcctctccttgtataacgtggcattcatttcctttccgtggttctgggtgtttgctggggactgacattgttggaaacagtagctcacccgaggtgccgagcacacaccaggcatcagtgaggcttcagcccgcagactccatggccctggtgccacctggacagtgccaggcacaagcggaggggctgtcagctgctggaggtgggcggccttggctgtgcttaagcccagttcagagcagcctgcagcagagtgcccaagtcgcgcggctttgaccttgcaccccgacggtaggctccttctgttgtaggactttttaattcagctaaaaacagggtctttgtcacatgaccatgaaaaattaggctcccagacactttgaagggtgggaagggcagggtttattgggtgagaaggaaaaaacgggaaacagkgcctccccgcaaagccggagtcctgctggtgcacttcccgcctcgcagattggatcccaggttctaccc

SEQ ID NO: 837556 - DNA, 584 bp, Homo sapiens
ggcgtggccatggggacgtgtcctcgtgcagcccctcctccgagcgctgccccctcaggaccaagtagcatcaaccaatgtcgaaagcccgtctttgtccctgtagctgtcagacgtgaccgggaggagatgcatagtcggggcaggggccggtgggggcaagggaccagccaggctcagccagcggtttcggagagaccagatgtgagcatctcccaacaccagagggagagggcagttccttggctgagagagcgagcactggagcagggccagggtcctttgcagaacgggctccagacagcagtagaagggctccagctccaaaaccaggaacgtttggtgtatgcgatggaaagcagagagcgggacaggcaggtgggtggaggtgaggccgtcgtccaccagggcaatcagctggggcttgaagagcgcctgagggtcacgcaggaggggctggtgaggccagggggcgcggatgtggttcccggaaggctcagagggccygcatgctttccccacacccaggccgacctccctgcctgtctgctggaggatgcagagggccgtttcctccattctaa

SEQ ID NO: 837557 - DNA, 528 bp, Homo sapiens
gcaacattttcactatgcttttagggttttttccagctgggtctgagaattccattgacgtaagatagatcaagaggagaaaagtatgcaaattatttaaatccaagttttctgtggtatgggaggaaaggaagactccaaaacacagttagagttgaacacttaagtactgagttgcagaaagcgtaagttgtagaaaagtaatctgtgtaagaggctggaaggtgagagctgttctaaaagggtctgagcagacaggattctttccgcctccacttcccatcctagtgatgagaatgatcgtttcattctggtatcagaagagcatcattcacctgggaattgcatctcctgcttcccaggaacagcatgaggctcagagagagagtcctgcatctgctgcccttcaagtgcctctgactcaaaattgtcaattgcaggatggcatattttggggtggcaygttctgatctcctttgcgtgcactatgtggtctgagcgtgtggcttctttcactcagcctagggt

SEQ ID NO: 837558 - DNA, 491 bp, Homo sapiens
acatgattatcgttctaatggtgctgccatagtaataggctcacccctatgggggtaacatatatgtttgtgattatgtaatattataaagtaggtcccggaagctgtggcacctgctggaggctaggggtgcacaggaaaggggtggagggtggaccctggaggacagtgtgccgtgtgaaaagccctgggcttggtcccaagaaaacgagactacatcaagatgtctgatcaggggatagagcgggcaggatgtggtagtgttctaggacacaggaaggatagtttgaaagcacagaaactgctgaagggtgacctgggtggagctggggcacaagctctgtgaccccacaaaggctgaaagtgggcaggtgcgacgagaagggagaacggagggggaggggaaaccagggccagygagggctgtgcctgccgagacagcgtgcgtgacctcggggactcggctggggtccaggatccgaaaccttcag

SEQ ID NO: 837559 - DNA, 623 bp, Homo sapiens
acctgggtcctccaggaggtgtctgtgctgcacaactccaggggtgctgtttatatcatgatatgctctttgtaratgttgtcctatgaggccatgtgagagaggtggagctgcagtgttcctaaactttagggtgtatcagcagcacctgatgtttgcctgacccaggtgtcacctgggacccaggtgccccaggtgataccaacataggtggaaacacggctctggccaccatgcctgttgctggacaaaaataacaatcaggaaatattccaggcttcaagagactcacagtctgaaaggggaaccagatgtgaaaaccaagaagtatcctaaaaaggaatgggtgtaaaaataaagtggtagacagggtacagctgggggtgcccaggaggaaatgacctctagtggcttcccagaagaggtgatgcgtaagttaaggtgaaacagcaggtgttccttccacaggcttgggagaatggggcattctcagaaacagggaaatagcccggaaaagggaaactttggggaacttcaagaagtttggtatgtccccatgggcccatccatgccagactcatcttctaaaaatattgctttcatgatgtcatgcacacaggcag

SEQ ID NO: 837560 - DNA, 540 bp, Homo sapiens
ttctttgtgaattgcatttctcactgtaactaccctggatattttgttattcacagacaattgctgtcttgttttgatcttcttcaaaaatggtttataattagctatagaattttgacaggtgctctcaaatgcaggtttctgataaatttggagattgtgacattggaatgtaggaaaaatgcacaggactcatgtagagctgaaatgttcacaaatatcaaacaaaacaagatttaagtaaatggactgaactcatacacaactgaagcaatctttttgacttttgcttggaatatcgctgatccttgttttgtttttcagagtcaaggaaacttattttgaactatttatgacctttaataattgagtaatgtatactcctgtgaacaaaatttggagcatatttktccctctctttctgcctggcttctccagaatttggaaaccagttgtgagtattcttaacttatggcaacatagttgtttgcatcagtgcaataataatcaattttcttttgcaacatgatgcaattggag

SEQ ID NO: 837561 - DNA, 606 bp, Homo sapiens
aatattcaatacctgaagttgatgcttgaccaaagggacctaacaaatatcttcagaacactccacccaacaacaatagaaaatttaatcttctcatctgcacatgtcacataatctaaaaatgacacatgatcagctatggaacaattctgaacaaaactttaaagaataaaatttaaccttccacattctcataccaataaataaaaatctctgtaaagaacatatccaaaaaccatacaattacatggaaattaaacaatcttctcctgaacgacttttgggtaaacaatgaaattaaagcagaaatcaagaaattattttaaaataatgaaaacaaagatacagtacaccagaatctctgagaaacagctaaagcagtgttaagaggaaagtttatagcatgaaacactcacatcaaaagattagaacaacctcagatttacaacccaacatcacaatagatgttaagaactagagaaacaaaaggaaaccaaaccaaaagcyagcagaaaataaacaacccaaatcagagctgatctgaataaaattgagacacaaaaacatgtaaaaagttagttatttaaaagagtaaataagattgat

SEQ ID NO: 837562 - DNA, 657 bp, Homo sapiens
gagcttccctgtccaccaaagtgtccagcatgtgactcaccaccccccaccattcatagatgaygggacaagggctgaccatctggcgaaagctggtccaatcagatactctctcctgagcaacaaagctgaagattctacttcaacctgggatgtctctttatactagcatgatggaaactcagaacccgaggatagagaatgaacaagtaggctttttctggattccatgagtaaggagtatgttggttttgcctgctcagtagccattcttccttttggtaaccacactccaattctgttaagggatcactcccttcttctcaggccatttgttttgtgtggggctggccccaaccccaacatccatgtgagcacatgacctcggcttggctaatgaaaatgctgcttttctctggcaacagtaattggttggggggtgggcacatgacccaagtcaggttcatgagactcaactcctggacttggctgaagctactgggaaacaaagctcatctttcttctgtggtgctaagctggtgggatttgagccaggagttgctggggaccctcttgccaccacccagcctgagaatgaaattgacccaaaagaaagcagagccatgaaaaggggctggatccctgagctgaagccat

SEQ ID NO: 837563 - DNA, 632 bp, Homo sapiens
gttgggaactggagcaaaggtgactctcgatatgttttagcaaagagactagcagcattttgtcccttcccaagagctttgtggaactttgaacttgaaagagatgatttaggttatctggtgaaagaaatttctaagcagcaaagcattcaaaggtgactcgggtactgttaaaaacattctgttttataagggaagcagagcataaaaggttggaaaatttgcagcgtgaaggtgcagtagaagagcaaaacccattttttttttaggagaaatcaagcctgctgcagaaatttgcataagtagcaaggagcctaatgttaattccccagaccatgggggaaatgtctccaggccatcagagaccttgtcagcagcccctcccatcataggctaggaggcccaggaggaaaaagtagtttcgtgggccgggctcagagtccatgtgttgtgtatgtcacgcgcatctgtgtgaagcgaccacgaagcaggctttgtgtaagcaacaaggctgtttatttcacctgggtgtaggcgggctgagtccaaaaayggagtcagcaaagggtggtgggattatcattagttctcataggtttgggataggtgtacaaagtacattcttaagtgtg

SEQ ID NO: 837564 - DNA, 675 bp, Homo sapiens
ctctgtcgagataattgtgtttctcagatacactttgaattactaaacagcagcaacgctgcggtacaaaaattgtctgtgatacttgagggagggatgaatgatgtcagcgagcagacacttggtcgacctaaaactgtattttagtcttgttcctcccttccttgtccactgagagaggaaggaaaggttggcacacctgcattgagctgtccaaatccagctctacctcacaccagcatggagactcactcaccaaggttgcaatctccctgctagaaattcagcggagtaattaaaaattactttcccatctgatctggctgtttctctttacaattcagagctacttccgattcccatgaggttcgtccacatcctgccaattgctaaatgtttattgtaaaaccagagaacaatgactacctcattcctggagaaataatgctttcaatgatcgcatggacttatacagacgaccggcaccatggcctgccttgccagggaggctctcttgggaaccatcaataatcataaataatgataataatagttactgtttatttaatgcatcctatgtgccagtgaacctttctcttgcttgctgcaagakacttctattcattatctgctttaatcttcacagggatccagtgagatttgtgccattgttga

SEQ ID NO: 837565 - DNA, 628 bp, Homo sapiens
tttatctcttcctctaaatcctcatgcccaatcagtcaacaaattctaatcttgttaaaactataagtcaaatcactttacttctctaatcaaaaccctcctatggttcctatggttccccatcatggttagaataaaagccaaaggcctctcaagggccaacagggaacatgactttccctgccttttccatcttttctcccacttacccgcagccacagtagcctccttgctggtcctcaaaatgtccggatacgctgacattggccattctctctgcttaaaatattaccttagacacattagacactgctgtatagtcaggggtcttcagaaaaacggagccaataaaatagagagagatgaggaattggctcacacaattatggaggctatcacactctgccatccacaagctagagactaaggaaagtcagtgttatagtttcagtaccaatccaaaagtctgaagagcaagaacaagtcttagtccaaggctaggaaaataataatttcccagctccmgcttcagcaatcaggtagaaagagaaaaaaatttacccttcctcctcctttttgttctatttggttcttccatgaattgcatgatgcccacctcataggggag

SEQ ID NO: 837566 - DNA, 646 bp, Homo sapiens
gttttggtatcagggtggtactggctttgtagaatgagttaggaggagtcctcctctacaatttttttkaatagtttcagtaggatggttaccatctcttctttgtacttctggcagaattttgtggtgaattcctcttgtccagggcttttattggttagtagggtttttattattaattcaattttggaacttagtatttgtctattcagggcttctatttctttctgattcaataattggaggttgtgtgtttccaagaatttatccatttcctctagattttctatttggtatgcatagaggcattcttagtagtctctgaggatcttttgtattctgtggggtcggtggtaatgtcaactttgctatttctgattatgcttgtttaaatattccgtcatttttttcttgttaatttagttaatggtttattaatcttgtatattctttcaaagagacaacttttggttttattgattcattgtgtggatttttgaactcaacttcattgagttatgctctcattttctttctttattttttttctgctagctttggggatactctgttcttctttctctacttcctctgggtgtaatctagatcattaatttgagatctttttaacttgtttaggtaggca

SEQ ID NO: 837567 - DNA, 638 bp, Homo sapiens
agaaagtccccaaagatcaaaaagtcaaaataattaacagattcgttaattcattcaacaaatacttaggaagtctccagcattgtcccattgtggaaaaaaacagaattgaagttcctaccctcaggaagagtatgggcatgcggggaacacatgctccatggagatgagttgactactcctgtgatgagtgcctcttgagcagtgtggtccctggatcaaaggcaccagcatcccttggagacttggtgcaaattcttggcccacttcaaagctgctgagttaggaattctgagggtgggtccagcaaactgggttttaaccagcttccaggtgattctgagaaccactgctaagaaaagaggttaacaaactttcaggaaagggtcagattgtaaatatatttcaggcttttcagatggtatggcttccgtcacaagtactcaactctgcaattatagtgcaaagctgccataaataacatgtaagcaaatggatgtaggtgtgttctcagaaaacattacttatggacactgaaatttgaattccgtataatttttatgtgctgtaaaatattattcttcctttgctttttcccaaccattmcaaaatattaaaatcattcttagctctctaca

SEQ ID NO: 837568 - DNA, 542 bp, Homo sapiens
atttagaacacattttacagagactgaacttttggggccatcttttagaacagcagtgatgaagagacagatattacctacaagggtggggggaaactgactcccatcccttcacatccaatactcaactattcattcatgggtttctgtgcctctacccacacctgtgccaggaatgctcgctgagtgctccctgtcattacaacttgctgataatgctgcaccctcattcaacatccagcctggctcctattatgcagtcagagaaatgatccctgaggaggagtctgtcatgtacatctgtgctgctgcaacacgtcactcacagtgggctgtttatgggggtcgtgaagggtacagatgctggactgctgggctcccactctgattcaccacctgctagctcgcgtagccataggcaagcaatttcatcctccaggacttctgcttcctccatgattaattgaggataatggtggtctactttacaacccatgtaacatacygatagtagctagtttgtagcacctaataaattttaa

SEQ ID NO: 837569 - DNA, 578 bp, Homo sapiens
tttaaattatccatgatttacctgaataaaaggagaggaagtgcctgaagattattctaattgagccagacttttcaaatcatggaaataccagcatttccaaggggaaatccaatccgttcaaattgcccccgtgagtaactcatacaaacagaaggaaagagggggctttcatttgccaatgtgggtctgatcagtgtaaattggataaatggtgagggccagaagggcatgaagctcccagagtcctctgcccatgttttcttagccaggtttgtaaaagggatcattctggagcagagggcgtttgaggaaattcctccatttcggcaccaagcctcctcctcctgttattgaaaacaggccaggcagagggtgttttctcctggctgatgcatgtccttccaacttccagcttctctgccctgaaggtctgcagataacaggcatctttaaagggyggacacggattgtctatgcctgtatttcagttaaagagttcaagacaagaagaagacaaaaacttggcatgactgcatggcctccctcctgggagaggctgaaagcctctgtatgaa

SEQ ID NO: 837570 - DNA, 670 bp, Homo sapiens
atcaactctcaccactaccaacagatggcatgagaaggtgcttgtaaaataccactttggacttaagaacactctargaaccaacttttctgtaagcagaggagcttctttttctctaattttctcctctatttatccaccaactcatccatccatccattcattcatccatccatctatcctcccatttatccatctatccatccattcatccatcctcccatttaaccatccatccatctatccatccatccatccacccacccatccatccattctttcaacaggcaattgcttgcttgctctgtgccagacacttgagctctgtggtggtaatcattgggggaacaatgaagcccctggcctcaagaaacttggaatctcgtacaaaagtgttgtattccccctgcatgcttgccattgcctatgaccatacggcatccttcacctagagtatcattatttatgttctccatctagaaaatgcttcactaacattaagagttagttaaagcacttctttctaagactatccatatctccccatcagtaagaatatggagtcagacctgcaaaaaacctcatggtgtcagacaatgcacaggaagcttatttcccctttattacccatgggactttaaagagatctttctctttttttgaaacaggg

SEQ ID NO: 837571 - DNA, 504 bp, Homo sapiens
catgttgctgctgttttaaataaactttggatccctagactttcatgactgctaaatttaaccgtctcaacatgtctttgtggagtcacttcttaatgttcttgaggttttggaaatagttcaaagaatccttgacctcagcttctcatgcttaagtgcatgagaataagttctactttggctagctcatcttgctctgtagatagccaccaatgcatgggtggagatgtggaggtggagaaactgggtgggtttggaatcgcctcactgtgggattttgggccaccttgagcaccttcatcacaaagtgctggccgaggatctgggaggctgcctgcaggtgtggctcccccagctccctggctccgtttyttcctttgcaacatgggagtagaaacaacaccccgacttcctttcagcattgctgtgaaggttgcataattggacaaggtgtgtgaaagcaccctgggagtttcaaggtgccatacagtttgttttgtttgt

SEQ ID NO: 837572 - DNA, 504 bp, Homo sapiens
catgttgctgctgttttaaataaactttggatccctagactttcatgactgctaaatttaaccgtctcaacatgtctttgtggagtcacttcttaatgttcttgaggttttggaaatagttcaaagaatccttgacctcagcttctcatgcttaagtgcatgagaataagttctactttggctagctcatcttgctctgtagatagccaccaatgcatgggtggagatgtggaggtggagaaactgggtgggtttggaatcgcctcactgtgggattttgggccaccttgagcaccttcatcacaaagtgctggccgaggatctgggaggctgcctgcaggtgtggctcccccagctccctggctccgttttttcctytgcaacatgggagtagaaacaacaccccgacttcctttcagcattgctgtgaaggttgcataattggacaaggtgtgtgaaagcaccctgggagtttcaaggtgccatacagtttgttttgtttgt

SEQ ID NO: 837573 - DNA, 504 bp, Homo sapiens
catgttgctgctgttttaaataaactttggatccctagactttcatgactgctaaatttaaccgtctcaacatgtctttgtggagtcacttcttaatgttcttgaggttttggaaatagttcaaagaatccttgacctcagcttctcatgcttaagtgcatgagaataagttctactttggctagctcatcttgctctgtagatagccaccaatgcatgggtggagatgtggaggtggagaaactgggtgggtttggaatcgcctcactgtgggattttgggccaccttgagcaccttcatcacaaagtgctggccgaggatctgggaggctgcctgcaggtgtggctcccccagctccctggctccgttttttcctttgcaacatgggagtagaaacaacaccccgacttcctytcagcattgctgtgaaggttgcataattggacaaggtgtgtgaaagcaccctgggagtttcaaggtgccatacagtttgttttgtttgt

SEQ ID NO: 837574 - DNA, 530 bp, Homo sapiens
taagtgcaatcacaagtataaagtgccttgtaaatgataagttccataaagtaataactattaatgttaacagtwttatttattgctcaacagtctgtgattgattaactgaattaattgattgatcaattagtaactaatttattagaaaacacatgatttttacacgttggtaccatttaacccattcccgtgcttttcctttaaagtatccaagtgaaagcaagaaagttccagcatccggaggtttccaaatatccaagtgctgggcagtataagcctgtggggtttggatgtttggctaggagcctcatctgtctctaggaggttttcctccatctcatcttggtttttgtaaagcagtaggttgagacacagagacagagcaaaactctgcacatctgaacaccagggtgcaggcacagccctgtcctcaggcaggagggactctgagaagactagatagcccagagcactggcctggtttgactgcagctccaaagaaatggcagtcacaagattgcagctca

SEQ ID NO: 837575 - DNA, 552 bp, Homo sapiens
tgctgggctccatgcgggtgggatccactgaggaagaccacttggctccctggcttcagccctctttctagagtgaacagttctgtcttgctgtgttccagggaccaatggggtatgaaaaaaactcctgcagctagcttggtgtctgcccagatggcctcccagttttgtgcttgaaacccagggctctggtggtgtaggcacctgagagaatctcctggtctgtgggttgtgaagatcgtggggaaagcgtagtgtctaggccagaatgcaccatccctcatggcacagtccttcatggcttcccttggctaggggagggagttccctgaccccttgggcttcccaggtgaggcgacaccccaccctgcttctgcttgccctctgtgggctgtacccactgtctaatcagtcccaatgagatgaactgggtacctcagttggaaatgcagaaatcaccccttctgtgttgatctygctgggagctgcaggctggagctattcctgttcagccatcttgcccaggaatccctttttttttttttttttttt

SEQ ID NO: 837576 - DNA, 638 bp, Homo sapiens
taggcatcagtggataacatggtgttattttgggcagtgggtcagccaggtgctccataagtcatatcttgtaggcgtttgttctttcagcaagccaggccagctctggttgctacttctacatactcttctaacacctgtatttgcctgaacatgcagttcaaaagacagagagagtgggggagagggtattaaacgtgtattttgtgcctcattttttgtcccatttcctcttccatctctctcctttttgttaattctttcttcctctctcccccttttctctcgttctctcttctctctctgtcttcttctctccctttcctctattcctctctctgcctttctttcataactgctttaataaaatgatattttctgtgttttctacacaatgccttgggcatttcaagaaatacctttcccatctctctgttttgattactctgaacaaggatacacagctggccccttttcttttcgcataaaaccacaatccactaagcaaatcactgcttttcactctgctggctggagggagaaaggatcagatasgtgagatgaggatgtggaaggggggatgggaagataatgacagatttgatgatagttaatattttctgtgtctgaatagtgaa

SEQ ID NO: 837577 - DNA, 351 bp, Homo sapiens
ctaggccaggtgtagctgggcataagtgatgggggccggggggcctttagtgggaggtgccgctggaaaggaagactgtgagccctggctaagcactccagccctcgggcctcagtgtcctcatctgtagactggagaccacaaattctctagggacttagggattgtatgagagaagtgacagggagtaaatgagacgtggcaggtacaggctcagcacaaayccctggtgtggagtcgggtgcagtccaggctgctgttattatccaggatacaaagcacctggcgcagtgcctgcacgtggaatcagggttgtatttatgccccgacgctcgggctgctttgagtcaa

SEQ ID NO: 837578 - DNA, 686 bp, Homo sapiens
tcggctcacactatcggcctggatcccacgtctaccaagggagactgcgtggggtggtgacgggtgtgtaagcacgcgtgaggtccggccactgcacagtcagacacgccggctgctgcagtggggcaggcagctccgggtgccagcatgggccccagctctctgcgaggctacagctggaccaggcgcactgcaagcagcttccacagctggcactggggaacacagtggctctcagaagcttggagatgccagaaaccacagggacccaaagagggcatcacagccctggcttgggagactccccggtctgggctccccaaagggctgcagctcttccttccttctcttcccctgcaacgtggccagcaaggggcatgtctcagcactgtttgtgttatagctcttttagccttattcagtgggtcccaagttcttgtcctccactcaggaagaatgaggtacggaaacaagagggtgagcaagacgaagaggagctttattgagtgacaatagctcagaggaggccctggagagggcagttcctcactacagctggtcatccgacrtctgctcagctctggctgagcctggggcttctgtcagcctcagagagggggaagttcatgctgactggtccatgggcggccatgggcaggcccagaaaaggcaacacaagttcgcac

SEQ ID NO: 837579 - DNA, 405 bp, Homo sapiens
tcagagtgagacctgctctcgtatctgtaaacactgtgttcaaggagagagacactcctttgaaacactggaatgcggacagacgtgcaggctccgagttaagcccgctcccaccagctactctccgataaagatacgctgtttgagcagcacagaggaggttcgttgaaaccgctgttgccgtagatgatgcctgtgacgcgccgccgcccttccactgtttcgccccgaacatctgcttaaatctaagtgattggactcaatagtgtggagaccagagctctragccttttgcagcctccacattttgcaactggccccctggctcccaccttcactcttaacctgtctcttctcaatcctttgtcgccaccagacttcgggtaccctacgggtggtgttgag

SEQ ID NO: 837580 - DNA, 576 bp, Homo sapiens
ccgggcagcccccgctccttgagggatggtcgccctggctgttcatgtcctggggaggggccccatggagccatcgccaccyccctgactcaggctgccccgcgccggcccccaggtgagcgtggccgcccgcatggcacagaagatgtcgtttggcttctacaagtacagcaacatggagtttgtgcgcatgaagggcccccagggcaagggccacgccgagatggcggtcagccgagtgtctacaggtgacacatccccctgtgggactgaagaggactccagcccagcttcgcccatgcacgagcgggtaagggctgcacagctgggggcgggggctcccatccgtcaagttcactttccaccgtctcccccgtgctcacggccccctggggacataggtgttgtcatccccaaccaccagtgcgcaggccgaggtgccgagcgtgcggaggcccggaccacccagcccttctctttgcctagcggtttgtaggaggcactgccgcaggggaggcgttcctgccttgcagacctggagggctgtgcctggccaaggtcacaccgcaggctggt

SEQ ID NO: 837581 - DNA, 642 bp, Homo sapiens
ggagtgcccaccccaaccctccatccacaagaactcctgaaacgggactcgggatcacagcatccattcagtttttgtctgggtccagtggctcacgcctgtaatcccagcacttcaggaggcccaggtgggagggtcacttgagctcaggagttcgacaccagccagcgcaacatagtgagaccccttctcttctaaaagaatgtatctgggctgggtgccgtggctcacgcctgtaatcccagcactttaggaggccaaggcaggcagatcacgaggtcaagagatcgagaccatcctggcaaacatggtgaaaccccgtctctactaaaaaatacaaaaaaattagccgggcgtggtggcgggcacctgtagtcccagctactcgggaggctgaggcaggagaatggcgtgaacccgggaggcagagctgcagtgagccgagatcgcaccactgcactctaggctgggcaacaaagcgagactccatctcaaaaaaaaaaaaaaaaaaaagtgtatccagagatctggcaggagactcagggaaaaatcactgcagygttgtaaccccatttttctcctctgtaaagcgggggtggcatggacagtctcctcgagttgctacagggttgaaggggcact

SEQ ID NO: 837582 - DNA, 695 bp, Homo sapiens
acctacatgcattagcatattaagggtttgagaaattctgcagctaacaaacctaagttatttattccagagatccctgaatattactcttcctagcatacctataaacatcccatggaatatctttcttcttggatagaagaaaaacatagacttgaaagcaaatatgtagaatttagagtgagatctagaataaaatttgaattctatcatttcctaactgcctgacctttggcaaattacttaacgtccttgagctttatttttcttctttagtaaatgaatgtaattatttctacttaataagtttgttaaatagtactagaaaagaaaataatttatctatgctaaataaattatttaccttaggtacagggcttggcacatggctcaaatattataagtaatgataagaatgataagtaataataagagtgacactatatgatatttgttgagcatttactatgtgtcacatgctttccatagtactctcacctgtgttatctgttttaatcctcataacaagcttgtgaatgttattgttgttccaaattttagattaacatacctyatcttagagatataattactcaccaaagatcacaaattgtcagaatggggatttaaacccagatatttttggctgtaaagactcataaacccttatgcaatctgtatcagatagtgatgat

SEQ ID NO: 837583 - DNA, 612 bp, Homo sapiens
cattcctgatccaatgcctcctctttctcaacctgccctcataaccacatagagatttccctatagctggttgactgaaataatacagcttcatttaaagatgggagcccctttcagacctatttggggtggccttggaggacaagggtgaagggaaggcctccagtggacaaaactttgagcagtgaatctggctgtttgctttgcttggaagaagatagggccagagttgtgaatctacaccacttaatgaacagtggctaaaagattagataagtggtcagggacttggaagaaacataattggaaaattggttctgtaactaggcacagactatgacaatatttgctcttcatctgaacacttacaaaacaacaacctcaaacaagagaattttaatgatcatttagacaaaatgacccattctgtgaaggtaagtcagccacttctgtccttgtcatgagtgagcttcatgaacaaagtggtgatgttttagggctagagtttaarcttgggctcagaaacataaactatcactcaccaaggccaatttagctaaagccattgctgacctaccatcaacagagacaaatgttgagcccccatttttg

SEQ ID NO: 837584 - DNA, 491 bp, Homo sapiens
aagcttagaatttatttccttaggaccaaaattttatgacttaytcagctccaatatgtccttgaaggtgaagattgcaaagtagaccatcacccctaatagcaagtcacttatttgttttatcgatatagctgactgtctaaagcagacctaatttacaggcagacccaagattactgtgcatttttcagaatgctgcccacagactatagtcacaaaatattaagtattgagtctaacttgctcccccctattcaagaaagtattcactaggtctttctcacatacaaagactagaggtccaacttcagagctatacctgaagaggtattcatactatgaaacggagcaaaagtgatttcacctgtctcatagattttttttcccctgtgaaaatgtagttctccctcttgaaaaactaagtctgaactttcaaaataatttattgtgatcaggcaaaccatggcacgtaaacacttcaattccataaa

SEQ ID NO: 837585 - DNA, 491 bp, Homo sapiens
aagcttagaatttatttccttaggaccaaaattttatgacttactcagctccaatatgtccttgaaggtgaagattgcaaagtagaccatcacccctaatagcaagtcacttatttgttttatcgatatagctgactgtctaaagcagacctaatttacaggcagacccaagattactgtgcatttttcagaatgctgcccacagactatagtcacaaaatattaagtattgagtctaacttgctcccccctattcaagaaagtattcactaggtctttctcacatacaaagactagaggtccaacttcagagctatacctgaagaggtattcatactatgaaacggagcaaaagtgatttcacctgtctcatagattttttttcccctgtgaaaatgtagttctccctcttgaaaaactaagtctgaactttcaaaataatttattgtgatcaggcaaaccatggcaygtaaacacttcaattccataaa

SEQ ID NO: 837586 - DNA, 470 bp, Homo sapiens
ggacatctcttgaattgagaaagtatgaaaagggacttaataaatccttatcttgttcctttcttgaatgacctattctcttgtgtcccccatattgatcatgttttggagccttaaaytcatcttaaaatagtcttttttcctcatcttccatacccaggtgatctctcagtacttccaatcctatctccatatagccgtttcctcttttttgttcctgttgtcatgacactggtccacaatctctcttttaaggtttttaactagatgcctcattggtgtctcttgtctccagtccattctctatgttgccatcattactctttctaaaagcttaggtctgtctacaccattttcctacacacaaatctgctttcttctcagattgctaataaaataagattaaaatatgttttaaaaattgtaaaaccctccttagttcatggattagcattatcatattttggatc

SEQ ID NO: 837587 - DNA, 604 bp, Homo sapiens
atttgggatttttaactttggtagacgctatcactcaccatcgaggaaggccttgtcccctctgaatctgctgtagatgaactcagatttgattcctgccagatcaataagtagaagctgagcttatattgaatattctgggctggcataataaccataagctgttaattaattcatgcttcaaagacataacaatcgacacacatgcacactcacgcacgcacactcaggcatgtacgttcacgcacatccgctcaatttcatgaactatttccgattaaatccacaaaccccctatcccccatctctgactttaccatcaacctaggtaaatgtacccctgccaaaccccaaaaacaagagacctggaacccagaaaattaaaaagagagaaattatcccaggacttgagacctaattgaattggtttgaggggctttgccctccaaatttgtattaaagttttactttttatataacagaatttgaatgacaaaaaaaattaaakttttttgtgatcgtcaactttctttgaataaatttggaaaatgactaatatgtatatgtaataatagatatttttataaaggtttcttctttaaca

SEQ ID NO: 837588 - DNA, 496 bp, Homo sapiens
aaagagaaacataatgaatcagtttgatggcaaataataacacaagaaagtagtctttccttttctcatatagttcaatggaacattgtggatgaagaatgatggaggatgagatagaatattgtaattacagttaccttcaattccatcatattaatttagaaaccctggtgagtatgctccacaggagacagaaaatgataaatgtggcaaattactgcttcctttagcaatgtgggggtatatcttgaactgattcttatcaatggtcaaagcaggaccagcaaattagtgtcatcaaagtgaagcctttccaatttaattatatcgagtggaatcatgaaatcgaagccatttatttacaaaacacaatttataactttcaagaaatwggccagaaaactaattcaagaaaacaagtgagttatgcatattagagaatggaaaccataagaaaaaaaatggatgcagaggatgcacattatttatcatgatc

SEQ ID NO: 837589 - DNA, 496 bp, Homo sapiens
aaagagaaacataatgaatcagtttgatggcaaataataacacaagaaagtagtctttccttttctcatatagttcaatggaacattgtggatgaagaatgatggaggatgagatagaatattgtaattacagttaccttcaattccatcatattaatttagaaaccctggtgagtatgctccacaggagacagaaaatgataaatgtggcaaattactgcttcctttagcaatgtgggggtatatcttgaactgattcttatcaatggtcaaagcaggaccagcaaattagtgtcatcaaagtgaagcctttccaatttaattatatcgagtggaatcatgaaatcgaagccatttatttacaaaacacaatttataactttcaagaaataggccagaaaaytaattcaagaaaacaagtgagttatgcatattagagaatggaaaccataagaaaaaaaatggatgcagaggatgcacattatttatcatgatc

SEQ ID NO: 837590 - DNA, 505 bp, Homo sapiens
cagcaccatctctgctcctgagaggatgtccackgcccagtggcgagggcacatgtgggtgcgtcactgcacagctgtgctgtacagcgctgggagcgtgcgaggaggatcacctggcatgcaccgtgtgcagtttcaccagagccagtgggaggagtcacacacaacagacgtcaaataggaacgctgcaaaacacacaaatagcatctccacagctaatgtaaaatagttttctggataggttcccttcagttaatgatgaaaggtgatgcagctatcggcaatggctggagactagctctgcggtctgctcgtggataaccgcgctccctcgctgccgggccacccgcacagccgggcaaaccaaaaggcccactttttcatgctgtacccaccacttctgtttccccgcaggcatcctactttctaaactaacaccttttcactcccgagaattctaacaaatattatacaattcctacccgcatctaccctccacctgga

SEQ ID NO: 837591 - DNA, 606 bp, Homo sapiens
actgagcgttcattttctaatgttggtctttctctccagtttggaagagacctctccatagtaaactttttgttgttgttgttgtttgtttgttttgagacagagtctcactctgtcgcccaggctggagtgcggtggtgtgatctcggctcaacctccacctcccaggttcaagcgattctctcacctcagcctcccaagtagctgggattacaggcgtgcaccaccacgcccagctaatttttgtatttttggtagagatggggtttcaccatgcaggtcaggctgatcttgaactcccgacctcaggtgatccgcctgcctcagctttgtcaaatgttacacatatttttccaaaactctcatttcttcattgactttgttgctaatatctttatccactcaaaagttgtcatttttattctgtcaattgcatctttgtccgcttctagagatccggggtcaatgaggacgggtccytgatgccccaattgtctttggagatttctcttgctttactttttacagttaagccttgaatccatctgaaatgtatcttcccctcatacttagatatgaacaattgaccagccactgaaaaagttg

SEQ ID NO: 837592 - DNA, 606 bp, Homo sapiens
actgagcgttcattttctaatgttggtctttctctccagtttggaagagacctctccatagtaaactttttgttgttgttgttgtttgtttgttttgagacagagtctcactctgtcgcccaggctggagtgcggtggtgtgatctcggctcaacctccacctcccaggttcaagcgattctctcacctcagcctcccaagtagctgggattacaggcgtgcaccaccacgcccagctaatttttgtatttttggtagagatggggtttcaccatgcaggtcaggctgatcttgaactcccgacctcaggtgatccgcctgcctcagctttgtcaaatgttacacatatttttccaaaactctcatttcttcattgactttgttgctaatatctttatccactcaaaagttgtcatttttattctgtcaattgcatctttgtccgcttctagagatccggggtcaatgaggacgggtccttgatgccccaattgtctttggagatttctcttgctttactttttacarttaagccttgaatccatctgaaatgtatcttcccctcatacttagatatgaacaattgaccagccactgaaaaagttg

SEQ ID NO: 837593 - DNA, 289 bp, Homo sapiens
acgagaccacatcactcactggcggtgcacctgtttctggaaaaaaaccctgactaggatgattcaccaactgccttcgctgaacaaatgtttcagaatctgagaagcagagccccaaggaagccacaagagcctggggtcagaaggcggcagcctcgcctggctctgctggcagctgggtttcctggggcacctrgctttgccctgggagcctagccgtacccacctgggagggagggtgtgcctttcccacggggtggcccagggctcggctgagccaatggcatga

SEQ ID NO: 837594 - DNA, 630 bp, Homo sapiens
gtttgatgcccagaattgtgttttctacatttccttctaagtttgtaatagtttgagggctttcatttaaactttaacctacttgaggtaatttttgtaygtaacgaaagggaaaggtaagagcccagtttcattcttttgcatatggcttttcagttatctaagcaccactgattaaatagtgagtcatttcccctttgcttatttttgtgaacttcgtcaaagtttgaatggatgtaggtatgaggctttacttctgtgttctccattgtgttctatttatgtatagatctgtttctgtactgtcaccatgctgttttggtcactgtagccttacaaatatagtttgaagttgggcagcgtgatgtctctggctttgttcttttgcataggattgctttggattttagggctgttttttggttccatataattttaaaatggttttttttagtttagttttttttttttttgaaaaatgatgttaacagctggatagaaataacattgaatctgtaaatttatttgggcaatatggccattttaacaacattgattttgaagaatctgatgactgtgtcttgaagtggtcatcctgtatagcacagaagttctccgaatttgcacttg

SEQ ID NO: 837595 - DNA, 634 bp, Homo sapiens
caaagctttgatacacatatgcttttatttttcttgaccaaataggagtggaattcctgaattataagggaggtagttgcttaagttaatgagacagcctaagataacattttacaatctatggtagagggaatcatggtcctctaaagatatcctaatccccagaatttgaaaatgttaccttacatgacaaaagggattttgcagatgtgattaaattaagaatcttgagatgggggattatcctgggttatccttgtgggcctaatttaattacaagtaattccttataagaaggaggcaggaaagtcaaaatcagagagaggagatatgatgatgggagaaaaggctggaataatacactttaaagatggaagaaggagccataagccgaagaatgcaggcggcttttagaacctagggaagtcagagaaattgattatgtcctaagcctccagaagaaagatagcactgctgataccttggttttagacttcagacctgtaacctcgaaaattgcatgacagtaaatttgtattgttataagcccctaagaagtatttttattttacagcagcaagaaamaaataattaatacacattggtactatcaatgtgtgatagttacaattaa

SEQ ID NO: 837596 - DNA, 619 bp, Homo sapiens
gatatactgatttcctttgggtagatagccagtagtgggattgctggatggtattgtacttctattttcaatgttttgaaaaacctccagcctggcayagtggctcacccctgttatagcagcactttgggaggctgaggcgggtggatcatgaggtcaggagagcaagaccatcctggctaacacagtgaaaccccgtctctactaaaaatacaaaacctagccgggcgtggtggtgggcacctgcagtcccagctactcgggaggctgaggcaggagaatggtgtgaaccatggggcggagcttgcagtgagccgagatcactccactgcactccagcctggacgacagtgcgagactccgtctcaaaaaaaaaaaaaaaaaacctccatactgttttctatagtggttgtactaatttacattctcaccaacagtatatgagaatttcctttttatccacatccttgccagcatctgttgttattatgttttgtctttttaataagagctattttaactgcagcaatacgatatctcgttgtagtttttatttttgcttttctgatgattagtgatattgagcattttttcataaacctgttggacatttgcatgt

SEQ ID NO: 837597 - DNA, 588 bp, Homo sapiens
ctcccctccatgtattataattttgatgtcaatatttacttttttttgtaatttgtattccttaaccatttattatagctgtaatttattttttaaaagtttgacttttaacctttgtaatggtgataaaattgctttacataccactcttacaaaattagagaattctgagtatgactatgtatttcttataattgagtttttactttcatctgtttttttaaaaaacaaattgcagcctttatccttattttagcttaaatgatactctttaacaatttctatgaagcaagactgctggtgatgtactcctttaggtttcgtttgtctgagaaagttttatttctccctcatttctgaggcacatctttgccagataatgtattcttgtttggcagtttttttccttcagcactttgaatacatcatttcactctcttttggcctgagatacacagacacacacacactcacacacacacatatgtacatgtacatcttgctttcagtattctctttttttgtcttygatttttaataacttgattatgaggtatcttggtgaactcctctttgggttgaagttca

SEQ ID NO: 837598 - DNA, 597 bp, Homo sapiens
tatgtttgcccaggctggtttcaaactcttggattcaagcgatcctcctgcttcaacctcccaaagggctgggattacaggcacsagccatcgcacccagcctaattaaagcatttctatgacagttttataatataaagagaaatggccataatatatcatgcacaaaattactaaagatctatgggctattggctaatatgaagacagctgcttctgatattgtactcaattaaggaagccatgaacacggtaaatttaaaagtgtctggtcaaacacctaacaccagtattaataaagttttctaattatgaaatgaccatattgttaaattttccctgagtaagactttcctccacctactgaaagtggagaagaatggagggagttacagttatgatttgggacataaagcctgaattatttttctatagttcccgctaagctactgataaaccacagaaggcagtaacaaacctcacaagagtgcctggtaggctctaattggatcttatctaacattttactgtattttttcttttttcttaactaaattactctaagtagtaaatatcttttgccttctgaaatcaata

SEQ ID NO: 837599 - DNA, 616 bp, Homo sapiens
gttcaagaccagcctggccaacatggtgaaatgtcatctctactaaagataaaaaaactggctgggtatggtggcacaagcctgtaatcccagctactcgggaggctgaggcaggagaattgcttgaaccctggaagcggaagttgcagtgagctgagatcgcatcgctgcactccagtctaggtgacaaagcaagactctgtctcaaaaaaataaaatattaaaataaaataaaatatcgctgggcgcagtggctcacgccactttgggaggccaagacaggcagatcacgaggtcaggagaacaagaccatcctggctaatactgtgaaacccagtctgtactaaaaatacaaaaaaattagccgggcgtggtggcggatgcctgtagtcccagctactcgggagactgaggcagaagaatggcatgaacccatgaggcggagcttgcagtgagctgagattgcaccattgcactccagcctggatgacagagtgagactccatctcaaaaaaaaaaaaatggccaggcgcagtggctcacgcytctaattccagcactttgggaggccaaggcaggcggatcatgaggtcaggagatcaagaccatcctggct

SEQ ID NO: 837600 - DNA, 599 bp, Homo sapiens
tgcaatataacaagacccccatctctacaaaatatttacaaattagctgagcacagtggcacatacctgtagtccaggctacttgggaggcagacgaaggagggttscccgagcccaggagttcaaggttgcagtgagccgtgattgcaccactgcactccagctgggcaacagagcaaggtcctgtcttaaacaaaaacagaaggacacttttgatgacttagaggtcaacctgtcagctggaccccccacagaggacctcagctcagaggggtttgcaggctgtatcccgtgcgtgatattgccgcctgaaacgcgggtgcatatttctctctgttttcgtcaataagagcagattaggtagggatttccagtagattgatgtatctaccaagcaaaaaggcctagtgaggaaaagcccaggttagaaggtacagctgccagcaggaggcaggacacagagtgagccgtttgacagtgctcccttttctcttctgtaaaatgaggacgtctgtcctgactactgtgccaagttgtgaaaagactgaaaacacatgaaatagatgttaatttattagggaaagataatcttgctatat

SEQ ID NO: 837601 - DNA, 603 bp, Homo sapiens
ttattagcagccagtagttaaaaagtgggagacttcactgaaaacccagttttctagcttctcacaagaaataaaaaactctggtgacactgagcctatgctcctaggtggcagcggctggtgagagccaaggagcagtggcccgtgtggggcttctcatgtaccagccctggtgtggccacaggggcatccgagggcatgattctgctatggggcttcatctgcccgcccccaattccgtgggtggctcccaccagacattaagatgttgttctgctttaagatgatccaacaaagctgccccaggcgctgaaggcaaatgcatttcatactcgaaggttccaccaggtcactcgagtgtgagcaccgagagcctgcccctcagggccctgtatgggcttagacttagtggtgatcaggacgcaggatttaaggggagcactgagtgcttgggaggaggggtcctcccagagctctgtctgcaggagatgatggctgctcggctcacctgcagggccacagtgaagtggctgsttttagtgtctcggacgatgctagtgttcatggctgactggataccccatcgccactgcaggtagccca

SEQ ID NO: 837602 - DNA, 601 bp, Homo sapiens
tctaatatatttttcatcagatgagttagtaataatattcaacaatcaaatcaataataaggaaatgtaatacatggaaatattggctttattttattaaaaaatcagaaaacttttagaaataaacaaatctgttcagaaaacttcaccaaagaaaataataggtttattattcattgcaaaacagaagttatttgttgattactgagtacaaagtggagagagcatatagggaatacaccttagagagctttgaataaaaactgactcctgggaccatctacaaatattggatttagttggtatggagtggacttcacacattgatttattgaaaaagtttcttttgtggattctaatgtgtggctggtttgagaaatagcattcttgaataatttggaataatctattataaatatgttcgagtgtgtgtgtgtgtgtgtgtgtgtgtgtgtgtggcagtggggagagttgtagtttgcagctattgtttttgcttkttggcttgggctgctcagctgtttgaataattcctaatgttcttaatctactaaaagagtttcataaaacatagttaacctgaacaaataaaaaggataat

SEQ ID NO: 837603 - DNA, 518 bp, Homo sapiens
gatagtaaatattttcaggtttgagagccatatcatatttgttagtcacagctactctactcatgttagagcacaaaaaccatcatagatgatatgtgaaaaagtgagtgtggctgttttccagtaaaatgttaattataaaaacaggcaactggcagaatttgcccagtgaactacaatttgcaaacctctgtactagatcctttcaaactcaaagtatagtccatagaccacctgagagcaggaaaagctacataaattgtgtgacctaatacaaaatgaaaatgcagagccccttgtttaaaaataactaagaatattaaaatgctgacagcagagcatgatttcaaatgtgggtttcttttgcagacttacaagtcacacatctgtgaatccagccctgcctgggagcttgttaaaaatgcaggccttgtctctgacctattgaatcataatctgcatatcagtaaggtccctggatggktcatatgtacatatgttttgaaaagtactgatag

SEQ ID NO: 837604 - DNA, 615 bp, Homo sapiens
ggaacatgcccttgagaagcagccctgcacaggatgccactgctcagctttgggtcaatgtccaggccagtatctgacctcgaacttctctctaggtcttccacctttacttagcacaggcctgagaacagtccagccaggggtctaggagagaaagtggctgagactgtgtgagacggggatggggcagaggacggatagggtagagggtggattacagtgagtttctggctattgactgctttcacatgagcagctcatttctgtgccaaccatttgactagtaagttggcagaagccctgcctgttggtcacattctggcccatgctacaaggccacctggcaggctcaggctgcagcacggcaggctgtgtgcacacggctatctcccctagtccgtccccagagctgtctgtgcagtcctgagctcccatgtaagccagtgctacttttgtgtgaagaaggtggacgaaatcatcagcaactcttgcttatatagaatgtgacccaagcartggaaagagaaaatccaggtcttggttttgtactggcttgcgagaagtccttcttttcctctctagcaatttccctacatccatccctgcctacccaca

SEQ ID NO: 837605 - DNA, 593 bp, Homo sapiens
gtttcaatttatttgctgagaatttcaattttttattggtttctcgtgtgcttataattgttcattgaagcatttttatgacagctactttagaatctttgtcagataatctaacatctcatttctctcagtgttggtatctactgatacctccctagctgaaaaagatatgagtgactcatttctgctccccatgcagcctcaactgacaccactgatatggggtgtgggccttcttacactgggctgtggtgaaatcctggttctccactctcctttgagactacactagcagagagcgggaggccttataactctgagttaggggtaaaaatccagactgaccaggtgatctttaaaggcaccatgtagtgatgggagatgcttgttactgcttggtggggatagaagtcctggctccctattcaactttctctgacaccacctgacaggtgattggggcacattcctgcaaggctagrctcccacttgaccttggctggtgtgggtagtggctgagccacagtttttcttgggtgtttggctggagtaggatggttattgcctgaaagttttctgtcttgctaggctga

SEQ ID NO: 837606 - DNA, 614 bp, Homo sapiens
gccaggattttaaattagatccagccagttccagaatcattactttttccgttccgtatgcataccaggctgcctctttctagattatcctccaaaaagccctggggaggyggcacgagcatgagcggcagacaggcggccaagaagtgaggccccagacagggatctgagcgtgatctttgcccttgggacgcaaggcatccatccaagaggtcacagaaatcagcagctttcaccgggaagccccaagtcctgggattggggtgctgaagggggatccaaaaaaaacagtcattgatttggaaggagatgctgttctccatctcagccagctgttaaagggacatggattgaactcccaggcagggaggggcattttgtttcccttggccacatcagcatgtttttacagttgagagagcaggagatgactctccagcctgtggcagagagaaagtgcccttggcccaactccgtggaagatgttccccaccccccttccaggagaagctcctgctggtggatgcacgaacccagctggtggcgacacaaggccagtgggcactctctgccttgctgaggcctcagcctcctggctgcgaaggccccgggtt

SEQ ID NO: 837607 - DNA, 645 bp, Homo sapiens
tcaggttttcattaaagttacttgtagtgtaggtgtactggcagagctggtaacacttgtggctttactgagtactggccaaaatggtgccttcaacattttccatctttatacttgcttcagtgcatctattacagtcattagtaagaacactgcatggggagaccatttcttccctctttcaactctagctatatgtcattttaagctagtcacagtctgtctctctgggcctgacttcctcttatgtaaaataatagagctggtttaactcttgcagcagccctgtctggcctatcatgatgtaaatgatttaaatctgtgctgtccagtgtggtgaccattggttacaacatgacttaaaatgtggctagtataactagggaattgtgtttttcattttatttaattcattttaactttaaattgccacctatagctagtggcaactgtgttgtataacatatctctagagaatgatttcaaaatgctgatccagcccaagcattaaaggaccctgactgatctgaccccacataggaactctttctcttggactattcagtaaaacatttcctctcttaaattaaaaaaaaaaaaamctcaacaaattcgggagttatcattgattttattttgctttta

SEQ ID NO: 837608 - DNA, 559 bp, Homo sapiens
acttagccttattgctaacaaacgtttggtcattaaaaaaatgtacaaagtcatggtgggaagttgacataaaaattgaaggctgagagagcctgaactttctaaacaacataagaaaaacatcctgagagagctagcaatttgttttgcttttatcctccctgaaataataaaaacaattttcatttcctgaatcttccttttccatgagtagtactatatgtcagtccatatctaaatggcaatcaagacttgccctgcttttctagtgaagagaacaaagatagctgacctcaggtctgttcctctctaacttgcacctgcctttgtgtgatgttgccctaggcccagtggccttagcaactccttccctataagctctcactgggcgtgacgttggggagaccagcaagaaaatagttgctgtaaaagatatcagaaacactgtatagagcacccaatagattcaatggtgtgytttataaatggcaaactgttccagaaatgcagaaggagaagcatgttggatggagttatctcggtccagtttttaaaatca

SEQ ID NO: 837609 - DNA, 609 bp, Homo sapiens
ctgtggtggccagaggcagagagggccctctgtgttctatgggccttttggcgtctgttttaggctttcgatgttactttccctagagaaattagacagtttaaaaataataatggtaattattattattttacaatacgagcaaacaagcaattttcaggccttattcacttcatccgggtggctggcctccaaagtttgagtgccctctggggctggcaggcaggaccagagctccttctgttgtgtggtgaggagtgggcatctgtaggacttttctgggtccagagggctcttgggcttctcggctcccgcagctcctccaccactcctcagagaggcagctgaattctgggaagaaacaaagagttgagttgcttcttaagatggaaagaagtgtactgtttggactgttattttaaaatacagggtggtgggggaaatcgaggctccttggccggggagggagtaaagagaagcctaattgatgaagagggagttgaggtgaatgyggtccatgggcaccgatgggggaggcaagagcggcctccagcaccctgggaattgggctcaggctccctggcgccagataccctcggaatccgggat

SEQ ID NO: 837610 - DNA, 614 bp, Homo sapiens
aaggcctcagcccagagggactrtgctggtcccagaaacagcccacatagaaatggtttggacgattggctggccttgtaagggtggctggacgggggccagctggtaaaacatcgcggtggtgaggaaaggtgcctggagctaatgtgtatagataggagtatcattgtgccaccgggccaggcattccccacccagctgacctgattatggatggaggacaagatgctgctgctgccagcttccccagacccccagaccatgcagcacttcctggcctcagacagttcctcctctatgaagatttgtccaatcagagcagccacaggctgccccagcctctctgtattcacatcctggaccttcctggcctgacaccctcaattttatactgcatcttgtttgcttccataaatgtcatcctgtgtgtcagatcacatgtccccctttttttggtctcagaaaataagattgttatatttacattacttcattgagttttattttgtggaaggcagagggagagcgtaagtaatgagtttgttgtgtcttgctttccaacccattgtagatttcctattttttctttcctgttgtaaatgttaatcaatcaa

SEQ ID NO: 837611 - DNA, 614 bp, Homo sapiens
aaggcctcagcccagagggactgtgctggtcccagaaacagcccacatagaaatggtttggacgattggctggccttgtaagggtggctggacgggggccagctggtaaaacatcgcggtggtgaggaaaggtgcctggagctaatgtgtatagataggagtatcattgtgccaccgggccaggcattccccacccagctgacctgattatggatggaggacaagatgctgctgctgccagcttccccagacccccagaccatgcagcacttcctggcctcagacagttcctcctctatgaagatttgtccaatcagagcagccacaggctgccccagcctctctgtattcacatcctggaccttcctggcctgacaccctcaattttatactgcatcttgtttgcttccataaatgtcatcctgtgtgtcagatcacatgtccccctttttttggtctcagaaaataagattgttatatttacattacttcattgagttttattttgtggaaggcagaggsagagcgtaagtaatgagtttgttgtgtcttgctttccaacccattgtagatttcctattttttctttcctgttgtaaatgttaatcaatcaa

SEQ ID NO: 837612 - DNA, 581 bp, Homo sapiens; identical to SEQ ID NO: 819251

SEQ ID NO: 837613 - DNA, 581 bp, Homo sapiens; identical to SEQ ID NO: 819252

SEQ ID NO: 837614 - DNA, 613 bp, Homo sapiens
ggggtgttttttttttttttycccttgagacagagtctcactctggcccaggctggagcgcaatggtgcgatcttagctcacggcaacctctgcctcctgggttcaagcgattctcctgcctcagcctcctgagtagctgggattacaggcacctgccaccacacccggctttttttttttttttttagacggagttttgttctcgttgcccaggctggagtgcaatggtgtgatcttggctcactgcaacctctgcctcctgggttcaagtgtttctcctgcctcagcctccctccggagtagctgggattacaggtgctcaccaccacacccagctaattttttgtatttttagtagagatggggtttcactgtgttggccaggctggtctcgaactcctgacctcaggtgatccactcgcctcagcctcccaaagtgctgggtttatagtcgtgagccaccatgccctgccctaatttttgtatttttagtagagacgggcttcaccatgtcagtcagactggtctcgaactcttgacctcaggtgatccaccccgctcagcctctcaaagtgctgggattataggcatgagccgccgcgcctggccgag

SEQ ID NO: 837615 - DNA, 613 bp, Homo sapiens
ggggtgtttttttttttttttcccttgagacagagtctcactctggcccaggctggagcgcaatggtgcgatcttagctcacggcaacctctgcctcctgggttcaagcgattctcctgcctcagcctcctgagtagctgggattacaggcacctgccaccacacccggctttttttttttttttttagacggagttttgttctcgttgcccaggctggagtgcaatggtgtgatcttggctcactgcaacctctgcctcctgggttcaagtgtttctcctgcctcagcctccctccggagtagctgggattacaggtgctcaccaccacacccagctaattttttgtatttttagtagagatggggtttcactgtgttggccaggctggtctcgaactcctgacctcaggtgatccactcgcctcagcctcccaaagtgctgggtttatagtcgtgagccaccatgccctgccctaatttttgtatttttagtagagacgggcttcaccatgtcagtcagactggtctcgaactcttgacctcaggtgatccaccccgctcagcctctcaaagtgctgggattayaggcatgagccgccgcgcctggccgag

SEQ ID NO: 837616 - DNA, 590 bp, Homo sapiens
ggctattctatttgcattacacaggagagtgccatttaagccataagtacaactctacataattcgacttagtttaaacatcttgctagaggaatagtaatcaaatttagcttcaggacataccgtagactaatacaaagctctatatgcacagttaagattataccacaaatgtggtttctattttattatttgatgaatggtatgtcacatagtgttacgtgattccatcataaaagatgttattacaatgcctctgctcagaaggacaaagttaagcctgccaagaggacatgaattctcaaattctagaggtgaataagttgcctcatggcttattctttgagttcttggagaggaagaaaatatatgtgggcatccaaaacaggtcttccaactgcattaggcttccaaaagtgtcttctagatgttagatcatttatgacaaatttttctttaaagtacatatgtagctagatgtatttataccaatagattagttattcccatgaaatgcagcaaaatattttccactcatgaacaaatwagtctagctgttgagatttaagcagcagtggtggtgtacataa

SEQ ID NO: 837617 - DNA, 622 bp, Homo sapiens
aggtgatatattagttattagattgctatggaaattaagctcacattgactacaataggcagtcattgcatgaaaaagagaccagtctgtcagcctgtaatgaaacagcatttaaactgcatatgtatgtgtgtatgtttttctgtacttttatatctgcatgtattcttacatgtgtacatgctacactcagcctataaaccttctcattaggaaactatggcaatgggactatcactgactccataaatattcctaactactttaaaacaaatgtgtgatttcttctgccttgtagggtgtccctgttactcattttaatattctttaattataaaaaaagatttgtgaagtgggatatacatggaactgtgccttgggcctccgtggggttgattctggccaaggataaaaatgaaagtagaattcttaattggttttcatggtgcctaattattctggggcctgtctgaaatggaatgcattttgttttgtggtaagttttgtggctgaaaaaagaggcagctgcctgaatggtgagatttcagaaggtctycaaagtaccctggttttcattatctcctcatcatacctgaaattagaggaacatttcaactgaaaa

SEQ ID NO: 837618 - DNA, 591 bp, Homo sapiens
ggaagtctcaatcttagtctggttgggcagaagtgtcatggttgactcttccttgggcactctatctcagctgtagtgtagtggccatctcctcttcctactattcctctaatgcttatacttctctttaactcttcctagccaattttttattactctgatcttctgttgataattcttgatattaaattttccctattcaaaatactgtgtgatttctagaagctaattggacatggactgatatgatcaaatttctacttttccttatcttttattgaaaccattgctgagcatcagtaggcctcttgaaatcttaagaggatagtgaaatatgagtaagaattccatcagattttaagtatttgtttacttattgataattattaaaagaattgagaactaatttgggtaccctttcagaaaagtcatccaaatcttaaaaggtaatgtaaccaytaaggttgttattttccagagcttttacattgctgtacagaccctctttgaatatggttaatgccattaaataagtgaatctgttattattttatgggtcaaagtttatatacaaccttaaatcactattaa

SEQ ID NO: 837619 - DNA, 628 bp, Homo sapiens
attttaggaactaaaaggagttcaattttgttggagcagaatacaagaaagagagtggtgagagatgaaatcagagaacaccaaatagaggcctctctttggaagatttctaaatatttgttagaactttatcctcattgcgtttaaatagtagttattaatttttaatgcagataattttaaaagcaaataaagggatataatccaactatccaaataacttctgttgatattaaaacaaatgaacaaagctacatgtgaaaaataaaaattttcacataaggcagaaaagaataaagtaaaaatgaaagcttctatctgtcagcctaatcaaactccctatatttaactgtcatttaaagttttgttgagttccttccaaggtgggatataggaatatttatcaatctaattaattatctacctatctatcaatctttatttctgtgtattattctgctctatttctatacatcatggtatattttgaatattatttatatgaacacacagsattatctaattttctaacagctatgtattactcaattatgtggatatgccagtaattaagttattttttcttggtttcaaacctagtcttctaaaactccttatgatgcggtag

SEQ ID NO: 837620 - DNA, 617 bp, Homo sapiens
tagaggtctcaactgagacccatcaatgagccctgccctataggacttcaggaaaggagagcacgcatcaggctgggctcatgagaaagaaagccccacagaggaaggggtacatgagctaggacctgagatgaggatggagaaggcactttagatcgcataagcagtctccaggcttttagcactgtgtaagtcttcatgaactatattgggagaaccataaagctcgagtcttaagagtaattggttcccaggggccacctcagaattcttcctcattacattatgtaatagtgcaaatgaaacccataatatattgcctgttaggtaggcctcagtcaatattagttctttttattattaagtacatcaaaatacataaaagatttgtgatgtgtggatgtttttccagattgatagttatttgacagtgatggcttaattgtatcagcagtccccagtattaggaataaaaatgggttaagagccagccctggaaggcttarcatttctcaaacacactgtcagaaattacaaagttctgctttgtaagattgggtgtcacaatacatgattcctggaagtgacagaatttgttccagctgccgtgctgagcc

SEQ ID NO: 837621 - DNA, 607 bp, Homo sapiens
aaattgatggtattttgtcctggtgctagcatagcatcgcacatttttaactatcaccattattttaatttagagatgggcacttaggagttaaaggatgtttgatttgccctttaatggacatctatgtcaaatatatggaattatttttgttataattgtcatagtctccagtgatttcatttgtctatagcgaagtcccaggaacctacagctattttgatttatgcagcctttataagtcctcgtaatatagactactgatttcttccctgtatcctgctcattgttgaaaagccagagctatttttaacatttacacaatttcaatagatgattctttattccacaaggtttggtgctaaatctgtggagactttcataatcacatccttcttgtggtttgcttgaatttgatcacagtggctgatttcatgcattgataatgaaggcttaggttgcctgtttctcagcataaatccacctcagacttgtacattgacagtgcttctggtttcagcacacatggagatatagaattgaaattgctctgctttctttacaaatgactcagagtgtgcttgtycttccctaaaatgttgccagc

SEQ ID NO: 837622 - DNA, 288 bp, Homo sapiens
ggcacaattgaagaatcagacatcatttagagttgtttccatttaggtttactaatgaaccaataaacaaatgagagatcacaatacaggttagtggatgcagttcatgattacttctttcttccacatagtcataatggcatattcaaaatggttaacgcaatccatgtaccatgaagcatccacctggacagagcagcccagagccagcagctttgcctcgtagcccaataggatgggggaagggtgtttacscctcaccatagaagaaatttcttcctgaatcac

SEQ ID NO: 837623 - DNA, 446 bp, Homo sapiens
caatcacctcctaccaggtccctccctcgacatgtggggattctaggggttacagtttgagatgagatttgggtrgggacacagagccaaaccatatcagcttcagtatccagtaagggcatgcacaatctgcctattcttaggtgaccaatatgtagctagttccacctgtggcctctgacccctggacaccctggcaaccactgctcttattgagattctggagccttggccttcatcctagtctaacgggttggtgcctgctattcctctgcagaaggggtagtgggctgaacttgaggctccttagcgatccactgttctggcttgagcttctgccccagtctgaccagaaaagcattaggctgtttatctattttctcagcaggtgtccctgccactaccaggtcataacacatttgttgccagaccaccctggtggatcc

SEQ ID NO: 837624 - DNA, 451 bp, Homo sapiens
tttccaacaaagaattcaaagtagctgtgttgaggaaactcaaagaaatacaagataacacagagaaggaattcataattctatcacacaaatttaacaaacagattgaaataattaagaagaaccaagcagaaattctggagttgaaaaatgcaataggcatactaagaatgcatcaggactctttaataacagaattgatcaagcagaagaaatcattattgagcttgaaaagaagctatttggaaatacaatcagaggacataaaagaaaaaagaatcataaacaatgaagcaaacctacaggatctagaaaattgcctcaaatctaagagttaactggctttaaatagaaggtagaaaaagatagtagttgaaatgttaytgaaagaaataataacaaagaacttctcaaacctaaataaagatattaatatctaagtacaagaagg

SEQ ID NO: 837625 - DNA, 548 bp, Homo sapiens
acaaaacaaaaaatattatatttcagaatggtcttaggcttgattaattcactagtgcaaaccaaaacatctgatttctttcttttttttttttttttttttttgagatggaatctcrctctgttgcccaggctggagtgcagtggcacgatctcggctcaccacaagctctgcctcccaggttcacgtcattctcctgcctcagcctcctgaatagctgggactacaggcacccgccaccacgcctggctagtatttttgtatttttagtagagacggggtttcactatgttagtcaggatggactcgatttcctgacctccttatctgcccgcctcggcctcccaaagtttacaggcttgttaacttacagggattacaggcgtgagccaccacacccagccctaatttcattcttaaacttcatgggagtcattaaattatagatttgtgagatctgtgctcttaaataggtggccatttacagaagaagagaaatcaaagaagacacttgatatagtctttcgtcttaccaaaaccctcaactt

SEQ ID NO: 837626 - DNA, 575 bp, Homo sapiens
ctgacctgcaatgaaagctgcatgcccagcctcaccaggtgtctactcytaaagtgagggcattgattaaaaatgaatgggaccctgctgcttgaaatggcagtgtgtgaaaggaccctgatgaagctggggacattgagtttgtaaattctggtcaaagttgtttttctttttttcttccccagaagaaacaaacagcttcccctttaccagaagaaacagcttccccatccccagtagtggcaacatcttcctctgacctatgctgttatcagcctttccctctttttctgaggagataaactctgcactgcctgaggcaatgtgatggcctcccttgaggcagttgccaagcagagtgatgttgattctcctcaggagctactcccaacacccctgtttgcttttagacctataactaaagtcctagcagatccctagaggtgaggttgagagtgtgatccataaggaggcatgctacactcaaaaataactgcttgagttttctaatttatataaacagaaatctggagaataggcatgggaatggatattaagggtgtgtgataatggtg

SEQ ID NO: 837627 - DNA, 501 bp, Homo sapiens
taaataaaatgtatataactacagtggaatattatgaaacctttaaactaagaaaatcctgtcatatgattcaacatgagtgaaccttgargacattatgctgaacaaaataagtctgtcacaaaaggataagtattgtatcattgcattaatctgaagtatctaatgtagtccaaattatagaaacaaaaaatagaatggaggttatcaagggcctctagggaatggggttagtgtctagaagatagggagtttggtgttggaagttgaaaaagtgttagacatctgttgcacaaaaatgtgaatatatttaaaactgaactgtacacttaaaaatggttaagtaaatttaagtaactgaatacattttatcatgacaaaataattataaaataaaaatatatacataatgcattactcttcattatgaatacctaatactccaattatttttgtcttgttggcttgctattactctttccatctattaagaacatccca

SEQ ID NO: 837628 - DNA, 516 bp, Homo sapiens
ctcagtaacacggagttttttttcattatatataattttttttacaattatattttacataagtgaatcatttgttatatttatctatgtatttccattttcagtactcatgatttctttatccttttgaatagatccaaatttcctttagatataatttttcttacattagaagaacttcctttaacatttctcatagtgaaggtctcctggttatggcttctttcaactattaaacatataaaaacttaatttgttttttgttgcctatgagaaatatgctttgtttctctgtacctaatgtgtcttttgcttaaaaaggtctgcttttaagactttccctttatcactaatattaagcaatttaattatgatatgcctaggtgcagttttcttacaattctagtgcttgatgtcagtttaacgtttttatcaaattggttgatgccaacttctatttattcatgtatttttctgccccatgccmtgcctcttttccagggaggctccaattac

SEQ ID NO: 837629 - DNA, 630 bp, Homo sapiens
acaaatcattctataagtcttgttataaaaaaatcgcaaaaataaaaaattgttttaagttgtagtcyaccagtcacggcagtggactacacctattgtaatcccagcattttgggaggccaaggagggaggatcagttgaacccaggagtccaaaaccagcctgggcaacatagtgagacctccatctctcaaaaaataaaaattagctaggcatggtggtgcatgcctacagtcccagctactcaggtgactgaggttgctggagtgcttgagccaggaggtcgaggctgtagtgcgctgtgatcatcccactgcactctagcctggccgacggagcaaaaccttgtcttaaaaaaaaataaaatttgtagtctaccttcagctaatgtcctgttcccaaggggcattcattttcaactcttttgtgactttcatatttccgtatcacgtgcttctagtattacatcttgatttctagtttgggacattagctattcaattctgttttagctctttcacacattcctcactgtcccttatctgcacatagtccccagtacatgcatgtgcatttctcattctctctcttctcaatataattgctgtaattttttactagatcagtatt

SEQ ID NO: 837630 - DNA, 533 bp, Homo sapiens
ccccactttgtccttctctcccttaatctccagcaattctcagagctattcactactcaagttatattgataatttttgcttagttaaggttatttgtatattttcctagtgcctgaaatcatcatgttatctttaattcactaaccaaattataagctcctcaggaacagacatcagaatattttatgtagaatcatggattattaaagctggagggaaatttggaaatcatttagtccacttttcttatttttccaataaggaaacaaacctaagaagaaatatgacttgggaataagtaaacctattcttcattaggatttttcatgaggattatttgaggtagtatattcaaaatgcagacatattgcaggtactcaaatggcaataggctcccttccagactggaaaaacttttcccgcaagatagggattaagagggtaatcaagctgtttggatcaaaaaaaaaaagagrtaccattttggaaaattaagtttccattttaagattctgttaacttttgaatgtgt

SEQ ID NO: 837631 - DNA, 539 bp, Homo sapiens
cttgtaatcattactttaaagtgtacttcttctacttattaaaaaaaagttaacagcctcaggcaggttccktaggagatattccagaagaaggcattgttaccacagaagatgacagctccatgcatgttattgcccctaaccccatataggcctgggctaaatgtgtatgtttgtgttttagtttttaacaaaaaagtttaaagagtaaaaaaacaaaaaataaaaattttaaaaatagaaaaaaacattatggaataaggatataaagaaaacatttttgtatagctgtacagtatgtgttttaaactaagttgtattacaggagtcaaaaagttaaaattatttttaagtttatatagaaaagatacagtaagctaaggttaatttattactgaagaaagcatattttttataaattttgtgtagcctaagtgtacagcatttatgtagtgtgcagtaatattgtaagccttcacattcactcaccactcactcactggctcacccagagcaactttcagtcttgaaggcttcat

SEQ ID NO: 837632 - DNA, 637 bp, Homo sapiens
ccttttttcttttttttttctcctgccaccttgtctgagaacttaggttccattttatactttttttggtggcaaaatatacataaaagttaccattttagccatttgttaagtgtgcagctcagtggtattaagtgtatttatatttttgtgcatccatcaccaccatccatctctagaattttttcatcttcccacgttgaaactcatacccattaaacaccaacttcccattccccacttgttccagcctctggtaaacaccattctactttctgtctctaggaatttgacttctttaggtatctcatacgtgtggaatcatacaacatttgactttttgtgtctggcgtctggcttacttcacttagcataatatctttaaggatcacctatattgtagttcgtgtcagaatttcattccttttcaggctggataatattctatgatatatataaaacattcaaaatctatatatactacttgctaatatccagctttgtcttatataaaatatatatacatttacrtacatacataccacattttgttcatccattcattggtgtacatttgggtcgtttctaccttttgactattgtgagcagtgccagtaggaacattggtatacaaata

SEQ ID NO: 837633 - DNA, 601 bp, Homo sapiens
ctgtcctgagaggttggcagtcatcctttcctctgctcctgctgaatsgccctctactaaagctcagggtgttcctggggtctcataacagctctgtcttgtctctgcctcaggcctagtgatgtgctttgctccctgctgttggtggactgctcctcttgtgggtatatcacaggctccctgtaatgctattggttctgtattttaaataataatttctctcacttaactacacttttgagtgttacactcttccttcctgatctatgtccaaaacagaagtctcaataacatgcaaagatgcagtgtgttaagcaaaagtggaagataatgagaccatttcaggtagattcatatgctgcagtcctacaatggtgtatggttaacataggaaaatgaggccattggggtgacttagctcaggttgtgctaatgaaatgccatgggctgagcttctcaaacagcgacattattttttattttttaaacatttctccagcatgagatatctaaaatctagctgccaggcaatatgattcctggtaaagaccaagttcctggctgggatatagacaccttcttgctataccctcatatggaa

SEQ ID NO: 837634 - DNA, 436 bp, Homo sapiens
  misc_feature 53: n = A,T,C or G
gattatcaggaccatagctcctgtcaaagaaggtataaaaaaaagtcatcatnaatatgatagtaaaccataygtgactgtgtggtgtatcaataggagagcgctcaaaagaatttctttttttttttttcttttttttttgagacggagtctcactctgtcggccaggctggagtgcaagtggcacagtctgggcttactgcaacctctgccttccaggttcaagctattctcctgcctcaccctcctgagtagctgggattacaggcacaggtcaccatgcctggttaatttttgtattttttatagagacggggttcctccatgttggccagggtggtctcgatctcctgacctcaggtggtctgccagcctcggcctcccaaagtgctgggattacaggcgtgacagccacacccagcccaaaagaatttct

SEQ ID NO: 837635 - DNA, 500 bp, Homo sapiens
gaaattcatctccaattccttaaactgtccttctccaggagcagaattcatttaccatctgctttayaagaatctggacactctatgtttctatcttattatagattcagctaatatgatttctcccatccaccatccctaaacaacacaacatgtgctttgtctttgactaagccccacagccttctctccatacagggtgctttctgatgattcacatcaaatttcctgtttggtttcctttatgggtgcatggctcctaatgtttttacccatcttctcatggcgcatccggcccaggaagctttactgcgcttgttagtttagcagctgtgcttctccactgaggctaccccaggtgggaggcagctggagaaggacaggataagaaattggagatgaacttcattgttgttgttgttattgttgctcatgctgttgttttagagacaaggtctcactctctcgcctaggctggagtgcagtggtgtgaccatagc

SEQ ID NO: 837636 - DNA, 500 bp, Homo sapiens
gaaattcatctccaattccttaaactgtccttctccaggagcagaattcatttaccatctgctttataagaatctggacactctatgtttctatcttattatagattcagctaatatgatttctcccatccacyatccctaaacaacacaacatgtgctttgtctttgactaagccccacagccttctctccatacagggtgctttctgatgattcacatcaaatttcctgtttggtttcctttatgggtgcatggctcctaatgtttttacccatcttctcatggcgcatccggcccaggaagctttactgcgcttgttagtttagcagctgtgcttctccactgaggctaccccaggtgggaggcagctggagaaggacaggataagaaattggagatgaacttcattgttgttgttgttattgttgctcatgctgttgttttagagacaaggtctcactctctcgcctaggctggagtgcagtggtgtgaccatagc

SEQ ID NO: 837637 - DNA, 515 bp, Homo sapiens
ctttgcagcaatatggatgcagctggaggccattatcctaagcaaattaatgcaggaacagaaaaccaaatactscatgttctcacttataagtgggagctaaacactgacacaaagatgagaacaatagacgctgaggactactagagtggggaaggcggaatagggtgaaggctgaaaaactatcaggtactatgctcactcccttggtgttgggatcatttgtacaccaaaccccagccacacacaatttacccattaacaaacctgcacatgtacccccaaacctaaaatgaaagtcaacaaatttttaaaaagttaacaaagaaggccacaaaatatcatgtccgctgagaagaggggtcttgttccctctcctcgaatctggggagggggagctctgttgattatgtgacagaagacagcaggatgacgctgtgccagtttccaggctcgagttaaaagatcagttccttcctctttctgtcgcttggatcccttactctgggcctggt

SEQ ID NO: 837638 - DNA, 515 bp, Homo sapiens
ctttgcagcaatatggatgcagctggaggccattatcctaagcaaattaatgcaggaacagaaaaccaaatactccatgttctcacttataagtsggagctaaacactgacacaaagatgagaacaatagacgctgaggactactagagtggggaaggcggaatagggtgaaggctgaaaaactatcaggtactatgctcactcccttggtgttgggatcatttgtacaccaaaccccagccacacacaatttacccattaacaaacctgcacatgtacccccaaacctaaaatgaaagtcaacaaatttttaaaaagttaacaaagaaggccacaaaatatcatgtccgctgagaagaggggtcttgttccctctcctcgaatctggggagggggagctctgttgattatgtgacagaagacagcaggatgacgctgtgccagtttccaggctcgagttaaaagatcagttccttcctctttctgtcgcttggatcccttactctgggcctggt

SEQ ID NO: 837639 - DNA, 515 bp, Homo sapiens
ctttgcagcaatatggatgcagctggaggccattatcctaagcaaattaatgcaggaacagaaaaccaaatactccatgttctcacttataagtgggagctaaacactgacacaaagatgagaacaatagacgctgaggactactagagtggggaaggcggaatagggtgaaggctgaaaaactatcaggtactatgctcactcccttggtgttgggatcatttgtacaccaaaccccagccacacacaatttacccattaacaaacctgcacatgtacccccaaacctaaaatgaaagtcaacaaatttttaaaaagttaacaaagaaggccacaaaatatcatgtccgctgagaagaggggtcttgttccctctcctcgaatctggggagggggagctctgttgattatgtgacagaagacagcaggatgacgctgtgccagtttccaggctcgagttaaaagatcagttccttcctctttctgycgcttggatcccttactctgggcctggt

SEQ ID NO: 837640 - DNA, 501 bp, Homo sapiens
tgaaggcctttgcttcttaactagcattcggtgtgggtctctgggcctgtcagctactgtgtgtggaatatcttctacactttcttctttgcccaacattttactgtgaacatgtttttatstccattcctggaaccacctgaaaataagatggggcaacatagtgtctcaggaaggaagcatctcagtcctacagggtagaccacatctatgcctctgtgtccccaattctggctccataggtgacacctaattggcagttaggccaagtggtagactgtcttttagttcattattggcactctgtcaatgtgtttgaataaatgcatgaaggaagtagcacctgtccactctgtgtcctccatgtctgtcacattatttggcactcagtggatggctaatgtgtgcctcttccttaaaaggcattttaaccagctctagggactcatagtcatgaactcagctcaggccatcctttctctcttcaaagcagtaataacc

SEQ ID NO: 837641 - DNA, 553 bp, Homo sapiens
tttccctatcttttctgaccatgatacttttgaagaagcttgggtcaggtgtatactctcacttttgaaaaagcacacaaatctcatgttcagctttaaggatgtatgaaattttaaaagtcaataaaattccatgaccgcagtgaaaatagttctcgtattgtatgctcttcccatcatatatgactgtctaaagattgcgaactccttgcctgaggcatataaaccctctttcttacatggaaaacagctcctaggctgatctgagcttctgtttccacatccaataataaaggggtagtggggtggactacataatctacactctctgccttggctctaaaagtagatttcataaactaaatttcatggacttaaaaatagaatttttgctccttaattcttgatcaaatttctaccttaattttaagggaaacactattaaatcaatatcttttmaagtctaaaacctacactttttctgtctctgggcattcctctccccgtctctccacttcaccaggctcaagactgtgggaggacagcgggtgag

SEQ ID NO: 837642 - DNA, 547 bp, Homo sapiens
ctggatccctacctttcaccatatacaaaagttaacttaagatggattaggccaggcacggtggctcaagcctctaatcctagcatttcgggaggccraggcaggtggaccacctgaggtcaggaatttgagatcagcctggccaacatggtgaaaacccgtctctactaaaaatacaaaaattagctggccgtggtggtgcatgcctgtactcccagctacttgggaggctgaggaggggagttcgcttaatcccgggaggcagaagttgtggtgaactgagatcatgccactgcactccagcctgggcaacagagtaagattctgtctcaaaaaaaaaaaaaaaaaaaaaaacaggatggattaaagacttaaatgtaagtcctaaaactataaaactcgtagaagaaaaactaggaaataccattctggacattggccttggcaaataatttatgactaagtcccccaaaacaacaaaaagaataaaaattggccaggcatggtggttaacgtctgtaatcccaacacattgagaggctgaggt

SEQ ID NO: 837643 - DNA, 574 bp, Homo sapiens
aaaatacagtggttaatggtcaggctttgaagttgaacagaactaagtttgagttcctgctttaccatgtacaaaactcagtgactttgacaagtcttttaacttctttgagcttcaatttcttcatgaagatactagctagttccataggaaaggaatccatgtgtacagtattgatggagacttttggttgcagacaacagaatctgttctagctaaggagtttattaagcagaatagaaaatgcgcccaaattgaatcctggctggtcttccaggaacaactgccaaagctacactgcagacctcgaccaccaaaagagctactcctctgcctaaccaggaaactaaagaattaggacgctgccactacagttgctgactccaggaccatgctgcctcttacctaagttgtaccaggaaaatggatgcctcccaccctgcttctctatttaagtaacttagttacaaaccaaagtctcrcacaagatcaccagatgcattgaacctaaatcacatttggaaattaacagttagggggtctggaaaatgccacagcatttcagtctttgcca

SEQ ID NO: 837644 - DNA, 559 bp, Homo sapiens
ctcaaagaaaaaattaaaacaaacaaacacacaaaacccacaaagtattaaaggtctgggttgagaagattccctacctaagaatattttaattcagagagcagaagatataaagagggaaacaactcttaagtgactacagcctggattacctgagcataagagggatatgaaaatgtatttttggccaggcgcagtggctcacatctgtaatcccagcactttgggaggccgaggcgggcagatcacaaggtcaggagttcgagaccagcctggccaacatggtgaaacccctctctactaaaaacacacaaaaaattagccaggcacgggccgggcgcagtggctcacgcctgtaatcccagtactttgggaggccgaggtgggcggatcacgaggtcaggagatcgagaccatcctggctaacacagkgaaaccccgcctctactaaaaatacaaaaaaaaattagccaggcgtggtggcatgtgcctgtagtccagctacttaggaggctgaggcaggagaattgcctaaacccagaaggcagaggttgcagtg

SEQ ID NO: 837645 - DNA, 559 bp, Homo sapiens
ctcaaagaaaaaattaaaacaaacaaacacacaaaacccacaaagtattaaaggtctgggttgagaagattccctacctaagaatattttaattcagagagcagaagatataaagagggaaacaactcttaagtgactacagcctggattacctgagcataagagggatatgaaaatgtatttttggccaggcgcagtggctcacatctgtaatcccagcactttgggaggccgaggcgggcagatcacaaggtcaggagttcgagaccagcctggccaacatggtgaaacccctctctactaaaaacacacaaaaaattagccaggcacgggccgggcgcagtggctcacgcctgtaatcccagtactttgggaggccgaggtgggcggatcacgaggtcaggagatcgagaccatcctggctaacacagggaaaccccgcctctactaaaaatacaaaaaaaaattagccaggcgtggtggcatgtgcctgtagtccagctacttaggaggctgaggcaggagaattgcctraacccagaaggcagaggttgcagtg

SEQ ID NO: 837646 - DNA, 635 bp, Homo sapiens
agcagtgccaagacactgagtgggagtgaaccaggcctggcctggccagggctgcaggaatggatggagccggtgaagttgagagctgtttgctgcactctactaaatgctcagagagcaggcgcctccgtctcatggccctctgtgccccagcccagcacagtgcctgacacacggtaggtgctccatgaacattagtgaagtgactgtgggtccctgagtggcctgatgtgggctgcatgtgtggatggcccactctgcccacgaggccaccaggccaggcttcggatgtcccaagatgaaggttagattactgaagatcatgtttctccacactgccaaattaaactcctgcctccagcccttcgcatccctcatagccagaactggcagggggaaggcctggccatctgtggtttaacaacctctctagaccccatgcccttcctgaatgctcccattgtgggggacgtgcacttgagaagcagcagtgagagcctgcagggcatcctggcctgacgcgcatgcacacggctccttcagcaggggcaagcctctcccaacctgctcctyctggagtcttgtacctggagcctggtgtcttgggaaatatatttggccgctcaaggaacaaa

SEQ ID NO: 837647 - DNA, 579 bp, Homo sapiens
caggagccactaaacactctggagtctaagaatatgaagaacaggaggatatttccttatagtgcccaaataaagccagccagagggtaacacccctatattcacctttgaacttctatctttctcaacagatctggcagttcagcagcctcttctccaaaatcaagagctgggagtttaatgaagtcacctccatgtctgagcacctgaagtcctgtcctttcaacattgtagagcacaaaactgacccgattcttttgactagcatgtgtcagccccgtgagcaggcccgagagagcttagtctccacctttagaatcagaccacgaggaagatacgtctcctaaaaattcagatgccactcgatgcacccttcttggatttcttctcggagttcctgaagtaggacagagtgtgtggttttgaggactcccttctgtaaactgcctatttgcttatcgggstgtattggaacacgcaatgtccttcgaaacctcaacacgaggcctaagaatttcctaagccatgtcttgtaccatagtgccacattgatgacttgtttccttttttcttttcttt

SEQ ID NO: 837648 - DNA, 579 bp, Homo sapiens
caggagccactaaacactctggagtctaagaatatgaagaacaggaggatatttccttatagtgcccaaataaagccagccagagggtaacacccctatattcacctttgaacttctatctttctcaacagatctggcagttcagcagcctcttctccaaaatcaagagctgggagtttaatgaagtcacctccatgtctgagcacctgaagtcctgtcctttcaacattgtagagcacaaaactgacccgattcttttgactagcatgtgtcagccccgtgagcaggcccgagagagcttagtctccacctttagaatcagaccacgaggaagatacgtctcctaaaaattcagatgccactcgatgcacccttcttggatttcttctcggagttcctgaagtaggacagagtgtgtggttttgaggactcccttctgtaaactgcctatttgcttatcggggtgtattggaacacgcaatgtccttygaaacctcaacacgaggcctaagaatttcctaagccatgtcttgtaccatagtgccacattgatgacttgtttccttttttcttttcttt

SEQ ID NO: 837649 - DNA, 653 bp, Homo sapiens
ataaaactcctgcaggcaaatctgtctccaagtcttttgtagagtccctttccaactgaagacatgtactaattaccaycaaagaatgtgtgtgaacaggagacaagacacattgctaaagtttaagagaaaggccaaactgaggctcagggaattcggtaccaccctggaatttctagagagtcccggcccctaggacaggccagtgaccacactctggcttacactcctctacccactctaggatattaggagacactaagcccctctccaaatcacctctttgcagaggtaactgaccttttcttaatcctggattaaggtcttaacgagggatgtctgcttgctggatgccccagttaagatgctgacatgtcgtccttaaaaacagatcttgagtccctcctgccactggccctgggcttgagccacatgaacatcccctccaccttcctccaccccactcttcctttaaaccagagacaacgagccggctttgccagttagcagggctcacggcgtgaaaacactattgttaggttcctgtgctgcactgggagctagtgagaaagacaatggcagagtgagtgtgcatgagagagtatgtgtcagtgtgtgtgggtgtgtctgagtgtgagtatgcatgtgtgagt

SEQ ID NO: 837650 - DNA, 616 bp, Homo sapiens
ataaacaaaactaaacattgctacatgatgacggcttatacttamgcagtaagaaagtaaaagacgccatcaaactttcaagtgtgggtgacgtgagtaatgagggttttgaaaagagagatggcagcaggaaaatctgatagactctcaaagtctagagatgacgtgtttggttttaagcacttgatttcatgttctatcctcccttcatcccatttcctattcagaaaacattatgcacaaacacagacattgtatttgggaagttatggacttacttcctaactgaagattttcatgtgaaaaagactttagttaataacatatctgcattggttcattaattgttaccaatgtattacactaatgcaaaatgttaataggagaagctatgtttgtaggaataatgtcatgtgagaactctgctcaatttttctgtaaatttaaaacttataaaagtaaagtcttattttttttaatgacagagagaaagtaacactttgacattacataactatagcagtgccagcaccgcttgcctaccagaatgttttactcagagatagcatgatcatgcacttgatttgcccaggatgatccagtttatgtctgttgt

SEQ ID NO: 837651 - DNA, 590 bp, Homo sapiens
ctgaacttaggctacaaatgattccttacagaactgatacttaactcaggggcataaaggamagctggagaacttgggacagagaggcaaatgcagaggaatggaggatctcataaagtggcatgttgttctgcctgcactcctgagagaagaaagggctttctgcattattatatgcctgcgtgggtggcattcacaccactgtgagtcctgttgtattagtggggttgttgagtcctgtgggctcctgatcccagaaagcgctgcctccagtaagggtattgtgtgtatcctatgagctatgatgcttgggattgctttcccatcaacacctggagagcttccacagcccttccctgggccctgagtgtgcaaaatgtgacaatcagagttatttattaccagcaccttcctctccaggcggcggatcaattttcttttctccagatggctgtcataggccagccagagagaggactgggctggccatctgcttcctgttgccttttcaagctggctagccactcagtgaggctggcaaagcccaaggcaccagctgtcagtttaggctgcccctgcttggccttgca

SEQ ID NO: 837652 - DNA, 590 bp, Homo sapiens
ctgaacttaggctacaaatgattccttacagaactgatacttaactcaggggcataaaggacagctggagaacttgggacagagaggcaaatgcagaggaatggaggatctcataaagtggcatgttgttctgcctgcactcctgagagaagaaagggctttctgcattattatatgcctgcgtgggtggcattcacaccactgtgagtcctgttgtattagtggggttgttgagtcctgtgggctcctgatcccagaaagcgctgcctccagtaagggtattgtgtgtatcctatgagctatgatgcttgggattgctttcccatcaacacctggagagcttccacagcccttccctgggccctgagtgtgcaaaatgtgacaatcagagttatttattaccagcaccttcctctccaggcggcggatcaattttcttttctccagatggctgtcataggccagccagagagaggactgggctggccatctgcttcctgttgccttttcaagctggctagccactcagtgaggctggcaaagcccaaggcaccagctgtcagtytaggctgcccctgcttggccttgca

SEQ ID NO: 837653 - DNA, 554 bp, Homo sapiens
gtaattgcaaatgggagttcactttgtaataaaatagcatcttgtttctgaaactcctgttccattcattgataccattgctrtcagtatctgttgttagtaactctggaaagcagtctttaagcatatacaggtatattgaccagtgccagtcactggtagcgaacatagtctactttccctttcatcctggagctttcagtgatacaacctacatgtatcttgtagggctaggaatattctgttggttgtttctaccagaagggaactaaatgctcccattaaattggactcattaaagattagccatggttcctacccttaaggaattaaaaatcttattagaagctactatgattttattaatgccttttttaaagaaaattaagcacataggatgccttgtgcaaaatatccttagtaaatagatttttacattaggctcatttggagggcggggatgggaacaagtgtttctgtgactcatgtaccatattattgcaccagatatgtaggaaaaacatgccaggatccacttacatttcctgattttt

SEQ ID NO: 837654 - DNA, 565 bp, Homo sapiens
agtatctgtgggctagactcccaactgaggcttgaagacactcaggaaaccatgatcagcctgaatggactcaggccctctcataaccatgtcaatttctgtttgcaattttagacagataataaagcccttcttcatgatctgcagacccttctctctgtcctctcctttgccatcctttacccaccaactaccaggactgcaagaagcatattctcattcatttattcttagtttttctgtctctgtctctgtctctctctctttctttctctctctctctctcgctctctccatctctttctctttctcttcccttcatgaggcataacatgagtgaggccaatgaaacttggtctcagtcatgagatctagataaaagaatctagaaaatcctgtttaacaatgcctggcttttaagacagttgtcttctgtaaacttctatttgtacgatcagargctgaatattcattcactttctctttgatttcacctggcattcttaatgtctttctgtggtagatagatgcctaaagttaactgagaaattaaatgtggatatat

SEQ ID NO: 837655 - DNA, 727 bp, Homo sapiens
ctgaaactgtgaaatttgtaaaagaaaataaagagggaaatttttcaacattgaccttggcaatgaatttttgggtatgacaataaaacacaatcaataaatacaagatacacaagtggaattattcaaactagaaatcttccacacagaaaaaaaatcaacataatgaaaaggtaagctataaaatgaaagaaaaatatttgcaaaccatatacccaataagcagttaatatccaaacaactcagaagaaaaaaaatctgattaaaaaattagcaaaagaactggctagacatttttccaaagacatacaaatagccaataggcatatgagaaggtgctcaacatcactaatcatcagggaaatgcaaataaaaactaccatgagatatcacctcacatctgttagaaaaactgtttatcatacacacacacacaaagacaaacattggtgaggatgaagagaaaagggaatccttgtacactgttggtgggaatgtaaatcggtgtggctactatgaaaaacatacagaaattcctaaaaaaatgaaaagtagaactaccatatgatccagtaattccactactgagtatatatccaaaggaattgaaatgaggatctcaaagtgatgtctgcatctccagcattattcacaatatccaagacatggaagcaatctaaatgtatactgatggacaaytgaataaagaaaacatgatataagcatg

SEQ ID NO: 837656 - DNA, 632 bp, Homo sapiens
atttacaagagagagtccagatataaacccaaatgcatattggaattgggtataccataaaggtataattcaaatcagyaataaataaattactcaataaataaaatgggaaaactgcttaaccattggggttgggaaagaactaagctggaaacccatttcacaccttatactaaaacaaaattacagatgaagcaaaaatttaaacgtaaaacgtacaccttaaaagttccagaaagatacacagatgactttaaaaataatcttaggctagagagagtctctgtatgcataacacaaaacccaaaagtcattaaaaatattgaccatgtaaagttgtgtaagtctgtaggtttagaaaaatagcatgtaaaaggtcaaaaaacgaatactaaacatatttagcatataagttaaatagactacttcttgggtattttgtgtactagttaggataggggaactactattatatttaaaaaaaaaaaagacctaaagtgtatgatggttcaagtcaagtggtttcagttaaccacagaaaagggaaccctctcctctaaatcattcaaagaccaggctgacaggtcttaccagctctaaccccgggtgtcatggaggcgagttggtgggaa

SEQ ID NO: 837657 - DNA, 620 bp, Homo sapiens
ggtattaaataacagaagtaaatgttaactttatgcaaatctgataaacatctagacttataagcaaaagtaggtgatgatcatatactttacaaagggattagtcatgggatgcctttaaataaggctcatgtaacacaaacatactgaaaactaatgacaactcactaatcactttttagaaacccattcaacattcagagcaagaattatgaacacattaaaaagatttctcccatcaggaatgtaaggactatttaccttgtgacaaggaaccaagcaattttactgaagtctggagaaggcctcatatatgtcttaatatgtggcatggcattgctgcggccagaagtctcagctgaccatttgctagtgacagaaaagacaaaagttactaattatgaaataaaattgatcataatcctaatattaggaaactgcatgaaaacaaagagcctattatctaaaaatcaacagtggctacacgactctgtgacctgtgagattttatgaaactccrttcaagtaacgcatgcccattttagaattataaacttcccacttttcacaagaagcactgcaacctttcagcatatagcctttccatttttgccatgaac

SEQ ID NO: 837658 - DNA, 690 bp, Homo sapiens
tcaacaggactttgaatattctcccatcagggatggggaatacagtttgtggcagtcaatgagatggctggtgctattgtttggctatggtttgaatatgtccccaccaaaattcatgctgaaatttgatccccaatgtggtggtggtggaaggtggggcctagagggaagtgtttgggtcacagggggcagatccctcatgaatggcttgatgtcattcttgtggcattgagtgagttctcgctttggtgagactggattagtttccatgggaatggatcagttcccttgacagtgggttgttataaagccagaatacccctggggttcatgcctgtctgcttcccctttgaccttcaccatgttaagatgcaccacagaagcccttgccagaagccagggtcatgcccttgaacttccagcctccaaaactataaactaaagaaacctcttttctttataaattacccagtctcagttctgttatagcaacacaggatgaactaagatagctggttctattgggcagaggcatttctgggtgtataggaaggagggtttacggtaagaggtagaacaaaatatagaaaacaaggtttgagtttcatctcccactccccttccctgagtacttcgtgtggcagccatgtttgtgctgctggatccragcccccaagatgcacctcagtg

SEQ ID NO: 837659 - DNA, 365 bp, Homo sapiens
acaccatgtgtttggggaacgttctgctcaactagttaattagttcacaatacaatctgaggctttgagggtgacacagacatctagaagaagcgtggtccctggagccaagcggatctgcctctctttctgctggctgtgcagtgaggagcaaatttcctgtctcagtttcctcatcttgcatggagtgttgttgtgaggatccaatgagatgatgcacttacactagcacttagtgcagtgcctggctcaayacatttaattactggaattggggcccctatttggagtgtccaccccatacccagaggaagcttagcacccagcgcaaattaagggtctaagaaatggtgggtgtttagtct

SEQ ID NO: 837660 - DNA, 557 bp, Homo sapiens
atgttaatgtgaaccccaagagtgagttgatagctggtgaagagggagaaggtagaggtgagggcctttaggttggccggctgggcttgcctygcagtcagtaaagccccctcatgcagagccattcatctcctgttgggaacgctgaccttttggttcagatgcctgatataaactcactgatatgggaggggaggatctgaatgggtaggaaggaaacagggaaagttactaggacagacagattctaaggcttctctgaaaggaaggaaggagttgtgatgtgctaccggggaggtccaagggagaagggcctgggcagtgtgcaccactggtgagggtgtgaaaaatgggctggtgactggccaccaaatggcttggggagaagtggctggagagagggtcacctgtgtggtgggagggatcggacaagtgtttttagatgttatgagaatgtctaagtttgacacaagacactcctaagtttgcaaagaaaggatatacagtcaccttccttcaatatcagaaacaacatgctggggattaaaaataaatac

SEQ ID NO: 837661 - DNA, 539 bp, Homo sapiens
ggagcagacgtaatggctttaatgagctacttaactactttctagagacaaccaagagacacttgaagagcccagtctgagacctggttccacctttccatcccttctgtgtccctgcctccagcccccacccccaggacacatctggcagtgaagggactccaattcctgttctagggagtggcccccacttgtgctcaaagtataattaagtggcttaaaagtaagtgcaagggtccggagaaggacttgactgcatgagggaacttttagaggttatagaaatgtttctaccataattgtggcattggtaacatttaacaaaactccttgaattatataccaaattggtaatttttattgtatgtaaattatagttcaataaagctgatttttaaaatactcratgtaaatcctgatatgtgcattcattgtatgtaaattctacatcagaaaggaaaaaactaaacagttgttgaattccagttaatgatatacatgctgaagtatttaggggcaagcatatagatatctgcagt

SEQ ID NO: 837662 - DNA, 633 bp, Homo sapiens
atttacaagagagagtccagatataaacccaaatgcatattggaattgggtataccataaaggtataattcaaatcagyaataaataaattactcaataaataaaatgggaaaactgcttaaccattggggttgggaaagaactaagctggaaacccatttcacaccttatactaaaacaaaattacagatgaagcaaaaatttaaacgtaaaacgtacaccttaaaagttccagaaagatacacagatgactttaaaaataatcttaggctagagagagtctctgtatgcataacacaaaacccaaaagtcattaaaaatattgaccatgtaaagttgtgtaagtctgtaggtttagaaaaatagcatgtaaaaggtcaaaaaacgaatactaaacatatttagcatataagttaaatagactacttcttgggtattttgtgtactagttaggataggggaactactattatatttaaaaaaaaaaaagacctaaagtgtatgatggttcaagtcaagtggtttcagttaaccacagaaaagggaaccctctcctctaaatcattcaaagaccaggctgacaggtcttaccagctctaaccccgggtgtcatggaggcgagttggtgggaag

SEQ ID NO: 837663 - DNA, 586 bp, Homo sapiens
ttccaatgatggacatttaggttgattccattctttgcgaaygtgaacagtgagcataagtacatacgtgtctttatactagaatattttatattactttgggtatatactcaataatgaaactgctgagttgaacagtagctctgtttttagctctttgaggaatcaccacactgttttccgcaatggttgaaccaatttacactcttggcaaaagcatttccttttctctgcattcttgccagcatctgttttttttttttttttttttttgactttttaataatagccattctgatttgtgtgagatggtatcttactgtggttttgatttgcattctccagtgactagtgatattcagcttttcatatgcttgttggcagtgtatacgtcttttttgaaagtgtctgttcatgttctttgccacctttctaattttttttttttctggtaaagttgtttaagttccttatagatgctagatgttagatctttggcagatgcatagtttgcacatagtttctcccactctgtaggttttctgtttactctgttgacagtttttttgtggtgcagaaacttttt

SEQ ID NO: 837664 - DNA, 538 bp, Homo sapiens
tgcaggaaaattcaaagactcttttctcttgcatttcatrtcaattagaaattctggggaatacctgtagacttaggccagaaagtttgatttaaggggacagtcctgtggctttagagtcagaggtagggtcaggtaacttttaccacttataagcagtgaaaccctgaaaaagtcatttaactgctttgatgaagccttttaagaaatactaataaaatggagataatgattacaaccaacctctgttataaagaccaaaaagataatggataatactttagaaactgtggtgccattataaacacactgataaggtttggctgtgtccccatccaaatctcatctttaattcccatgtgttgtgggaaggacttggtgggaggtaactgaatcatgggggcaggcctttcccgtgctgttctcatgatagtaaataagtctcgtgagatcccatggttttgaaaatgggagttttcctgcacaagctctcttctcttgtctgttgccatgtgagatgtgcttttcaccttctgcc

SEQ ID NO: 837665 - DNA, 591 bp, Homo sapiens
actaataaagaaatttcattagtatattggattatcatttgttgactttcacttgaccttcatgatgatataaagaaatcttttyattaaagatttattttatatggatactcaaaattaacattccaggaccatagcaaaaaagcaagtgcctctctctggtagcagctctgaaaagaggagatagttactattaattatgctgcttttacctcccatattctgtaagtattctaaatgtattcttgcatatacatttaagggagtattaagattcttgagctgaatcacaaacactcaggtattttggattcaagggcttctttcctactaagtaagcacctcctcttcctggccccttcttgtctaattaacatattgctcattacctagtctgtttgggttctaaatgggtattgctaacactttcattacatttcgaaggagaattcttgcttcaagtatgactgctgcaatctactaactcagggcattgaacatgggtgttccttttttgtgtacaactcctgtcctttaaattccacatatcttgaagaaagtcgttcctggtgacatagcatttcaaactta

SEQ ID NO: 837666 - DNA, 502 bp, Homo sapiens
atggacattttcattacactttatttttaaacaggagaatatacttcttttaaagcccagttggaacatttatacagattgatatttattctagtcaataaaatcgtctcaatacrtttcagagaattagtaacatacagctcacattctgtgaccacaaggcaagacaattaaaaataaatggagataaataaaaagaagaaccaacataagaaaatgaaaagaaaaacaacacatctaaataattcatgaattatgaataaatcaatgtaaattataaaaggcttaaaatcaaattatgcaaatacttcatagcaatagttaaggggtacaacaaaatcagatccgagaggaaaatttgtcgcagaaatgcttgtattttaaaaaactaaataagctatgatttagataattatattagatcaataaattaataatttatgaatagaaaaatagaataaatcaaaatgttccaaactaggcataataaagatacatgaaa

SEQ ID NO: 837667 - DNA, 576 bp, Homo sapiens
gaattatcataaaaacggtaattctacaagttgtctgaagatgctgtttytcagggccttaagttgtattcctctgaacacaatttaaaaatatatatagttcagatcccaaacaatttttagtaatatactgatctaaataaaatatttttatatttaaaataacttccagagagtctgtaccattccctattactatgaaaggagtttgcaagttagaaaaggctgaggcatactgatttagaacgttttctctaaaatgctggctcctctgttaaccactccgagttccctaagccccagggaggacctgaccagcctctcccctgtgccctgctctcccaggcagaggggccctttagtactttgcttcatctttgcttttgtggctgctatattgactaggatgtcagctccctgcttcattcatctttttatcttaataggcagtacagtgcctggcacgcagaagactctttttaagtatctgttaatgttcctgagatcaaatgtctatgtactgatgttggaacccctttagggattaacaaaaactgagaggggaagagctgaaat

SEQ ID NO: 837668 - DNA, 626 bp, Homo sapiens
cctgccccactgacccctgccaggccttggtggaagttctgtccacagagtgcacacgtgggtgtctgaatctttgtgtatcatccagctccctttcttgcccagcaggtgctggatgtgtctggggcagacatgttggccaagtcaattgccaactgccaggtggagcttctggaaaactgtgggcactcagtagtgatggaaagacccaggaagacagccaagctcataatcgactttttagcttctgtgcacaacacagacaacaacaagaagctggactgaggccccgactgcagcctgcattctgcacacagcatctgctcccatcccccaagtctgacgcagccaccactctcagggatcctgccccaaatgcggtcggagcgccagtgaccctgaggaagcccgtcccttatccctggtatccacggttccccagagctttggggaccacgcgaaaacctccaagatatttttcacaaaatagaaactcatatggaacaaaataagaaaccccagccatgaaatctaccatgaagtcttcaagttcatgtcactgasaagcttgtgcaaagcagccaccttggaccataattaaatcaaggacattttctttgagacat

SEQ ID NO: 837669 - DNA, 540 bp, Homo sapiens
atattgaaattaggccaattaataaccctacaatggcctctaagtgtttgagtgaaagaaagagttgcacatctctcagtttaaatcaaaagctagaaatgactaagcttagtaagaaaggcatttagaaagccaagacaggccaaaatctaggcctcttgggccaaacagccaagttgtgaatgcaaaggaaaagttcttgaaggaaattgaaagtgctactccaatgaacacatgaatgatgagaaagaagaacagcctattgctgatgtggagaaagtttgaatggtctggatggaagatcaaaccagccacaacattcctttaagccaaagcctattccagagcaagatcctccccaactgtcttcaattctgcaaaggctgagggaggtgaggaagctgcagaaggaaagttggaatcagcagagttcggttcatgaggtttcaggaaagaaaccatctccataacataaaagtgcaaagtgaagtagcaaaygctgatagagaagctgcagcaagatatgcagaagatctagct

SEQ ID NO: 837670 - DNA, 538 bp, Homo sapiens
tgaattcctcccctgaaaacggccttttcttttctaccacatggccaggcaaattttctaaacttttacattctgcttcctttttaaatataagttccacttttaggtcatttctttgctcacacatatgagcatatgctgttagaagcagccaggccaaattcttgaatgctttgctgctaagaaatttctcccaccagataacctgaatcatcactctcaagctcaaagttccacaaacccctagagcaggggcacaatgccaccagtctctttgctaaagtatagcaaaagtgacctttattccagttcccaataagttcctcatttccatctgagacctcttcagcctggacttcactgtttatatcactatcaacattttggtcacaactatttaacaagtmtctaggaagttccaaactttccctcatcttcctgtcttcttctgggccccccaaaactattccaacctcttctcattacccatttccaaagtcacttccacattttcaggtaactttatagcagtaccaca

SEQ ID NO: 837671 - DNA, 519 bp, Homo sapiens
tcacctactcactaattataataaaatcttgataactgatgtagtcactttactaattgggccttaaatcacttaggccttagcttcaatcttacaggtattttggttattcattttggctaaagtcataaaattccttcggaggttagtgacttttttttgtcagttttatagtgttttcctaaataggtagaatgatatttactatattcgtatatcattttattctgagactgaaagcattagaattcgtgtctaggtagaaattaggatgagacaacttcagttaatcttagcttgatttaattctgaactaaagccagtttcaatttggccaaaggcaatgtttctagtttattgttagtgccttagcagttgacaataggaggaagtgttccacttgctgcatcttcctactggtctgcagcatgaacggtcggtctttcsatgtgcaggcccaccctgaggctcagggctacgtgtgaatgtgcatccagggctggtttcaaggacgtgtgg

SEQ ID NO: 837672 - DNA, 587 bp, Homo sapiens
tagctttgacatgaacgtgtatatcagaaaagtagagaaataccactataatcatgtttaatcttttaaagctgtgattgagaagtggcatttgggcaggatttaaacttggctttgtctgtggcaaatattaagcccactccagttctctcctagccttatttttttctcattagttagatgtcacataggaaatgaaattattataaacatatttaacttgtttaaataactttaaaaacataacttataatcggtgggtttcaaaattcaataaatcctctcacttattagttacagaatatagttgcatttaacctaataaacttaaagacatggctttaaggaatattctttcttggcaagaattaaattggcttggctaatttacattgttttaaatttagagagaattgtgtactgactcatgattacaatacataaaacatttccatgaaatggtctgaattaacctcctcgctatttatataaacagcayataacattgcatgcactgcagtctactagatgggaattttttaaatcagtaaattatacttgtaatataatctctagcaaaatatgag

SEQ ID NO: 837673 - DNA, 525 bp, Homo sapiens
cactatccttaatattctacaatttttcscaggggtctattacttcccactgactgataaatgtctgtcaagttaccatttgatagtaaggcacacaaactcatttaacttaaacaaactgtaaaatgcatcagaagaataccagagacatagccaaacctctcaaagagtagaatcagttgagaaccaaattcgtttcttcacctctctatttctctctgtaaatctagttatccttctctctctttcaatagtggctatttctctgattcttcattaacacagcagagactgactatataagtttcctgtttcctgctttttatcatctggtaattgaagtcctaacaaaaactcaatcaattataagttcaaatttaaaagtcctggtaagagaagtgtattgtcttagcttggctcatgagaatacctgtggtccaatggttacattttggggtcacctgatccactgactatatagctgttgctctgagtataggctttctgagaagagggcaaatgtag

SEQ ID NO: 837674 - DNA, 610 bp, Homo sapiens
aaaataatgtaagctattaaatggctatatattgttatttgcactacaaattccaggactatgaaaataatgggtgaggcagctagtaaggaacaaaatgactttttaaaaattgtccctggggatgggtgggggtatcagctagactccagggtaagattgtcttccctctctgtccccttctcatctccctttcctgctgagagctactttcatcagcaataaaatcccctgcatttaccatctccaatttgtttatgtgacctcattcctcctgaatgccagacaagaactcaggagcaggtgcaaaaagctgttgcactgatcctccactgagctgttaacacttaagtcatccatagatggcaaagctaaaacagcgctgcctgtaacactctttctggggcttcagggatcaagggcacctccctagatgctgctgtggtggtgcagggagttttgctcttgttggcacccaaaaccagcagccctggctcctgcacctgctcatmtgtgctcctcctcctgcaaagggtggaatatagtgggaccgagcaagtggtatccatctctgctgcagtgaagcagctggctagttctagcacccatg

SEQ ID NO: 837675 - DNA, 624 bp, Homo sapiens
ataataaaaataatagtaactcattcctcttttcttagaagaaatgggagtactcagttaagactacatgaaggcagagggagggaataaaaagaggaggcagaatttaaataggattttttaactcctagtccaataaataaatgatgcccacagttgttggtgttggacaagagtctgttttctgttgcttttagatctgagaactgagccctctccttcacaacaaaattggcctattaattccagtgttacttcatgtaatttttttatttgtccagaactaaaactatcctttctctattgtcgacaattccattggctaagccaggtttcaattgtctgctgaatatcaggagctctgtgttaaaattaactcattcattctgctttgattttagaaaacagataaacaactgatagtatttttgcaagcatcttttgttctaaagcataatatgtattggtctgttttggtacttccatgtatgtatttcatgttaaaaccaagaaggctgaatttagtaaatccaaagagtttcccccatcatkttcccttttcattcatttctactgccctaggttgggccttcctcatttcttgtctgaatagctcctgatggg

SEQ ID NO: 837676 - DNA, 676 bp, Homo sapiens
aacactcaattcactgttgaaatgaggctcaaatcaagaaggcacgtggccttatctattcgaaattgattcgtccttcaaaagcagaagatatcagataattataaaagggactgttaaggtagaaagactgtcaaactctaggctaccctggctctcctctgtggccattctaccaaaataaagagagggggtacagcatgtcttattcaccttttgttctcccttctcctaaatgtaccatataaaatgactagaaaacatgtgtcatatgttgactaaacgaagcattcatttagattttcctccccagcaacatgtctggaaaaaaaatgataggaacatcttgtttggttatttttattgcgggcccttaataagatagttgaagccagaggtgcctcattaacccaactttttacagctgatgccatccattgtagagtgaaacagaatcaatagtcagattgttcccaacttggctttgcccagcctcggaggtcagcagtgggcacagaaaacactgtgaattacaaggaggaggaggtaaaggggaagctctgacagaatgagtctgcagctccaacccagcagtgagctcaatgagtggytgatgttacttgttttgatgtgtttgaagaaatcaaccaggttcaggagaaaaaaaaaaaaaaaa

SEQ ID NO: 837677 - DNA, 612 bp, Homo sapiens
agaattaacattccaaagcctgtggccccagactaattatgacaccacaggcacatgcacacccttgcccccaggtctgcatggagaaaacccaggcacagcctccttccccagggatttgctttggctctagtaactgccaggctgactgcaccagccctctcactcagaagtgttcagtgtcccaatagttccagactctaggttctcccagccccttcctcaggttctactggccaaatctagttagctcctgtccctccccacgtcagggcagtgctggtagaatcactgcagcatttggtgtaaacctcaagtatttcgttttgcatcagcactgactaggaggagggtgggcagggcagagggtggtatgtcaaaggagattctttcatagcttttcagttgcagatatattgttgcagttaaaagtgttctatttggcctagcgtggtggctcacgcctgtaatcccagaactttgggaggccgaggcaggcggatcacgaggtcaggaaatcaagaccatcctggccaacatggtgaaaacccatctctactaaaaatacaaaaattagctgggygtggtgacacatgactgtcatcccagcta

SEQ ID NO: 837678 - DNA, 549 bp, Homo sapiens
tcttgtattttatctaccaatcctacctactacttaggcaatgagctttgtgctacatgaacaaaaaacacacctggggtcccgcatgagaatcatagactttgcacaacccataatgaaattaattgtttagttagaacagtggtaagtgctatacgggaacaaaacagggtgccaaaatagagactatcagtggtggatctaaatgcacccaaattccttcccaggccccaaattcagaccccatgggggtaacttttggaagtgttccctcccggtctcactttcccccctattttgcaagcatctggccttacttcctcccatagacatgtttcctgtccaaggtgtttctttttttttttttttctgtcttttttggagacagagtcttgctctgtcgccaggctggagtgcagtggtgcaatctcggctcayggcaacctccacctcccgggtttaggcgattctgctgcctcagcctcctgagtagctgggactacaggcgcgcgccaccacacccaactagttttttttatttttattaga

SEQ ID NO: 837679 - DNA, 549 bp, Homo sapiens
tcttgtattttatctaccaatcctacctactacttaggcaatgagctttgtgctacatgaacaaaaaacacacctggggtcccgcatgagaatcatagactttgcacaacccataatgaaattaattgtttagttagaacagtggtaagtgctatacgggaacaaaacagggtgccaaaatagagactatcagtggtggatctaaatgcacccaaattccttcccaggccccaaattcagaccccatgggggtaacttttggaagtgttccctcccggtctcactttcccccctattttgcaagcatctggccttacttcctcccatagacatgtttcctgtccaaggtgtttctttttttttttttttctgtcttttttggagacagagtcttgctctgtcgccaggctggagtgcagtggtgcaatctcggctcatggcaacctccacctcccgggtttaggcgattctgctgcctcagcctcctgagtagctgggactacaggcgygcgccaccacacccaactagttttttttatttttattaga

SEQ ID NO: 837680 - DNA, 604 bp, Homo sapiens
ttaatttttatgtatggcatgaggtacaaatttaatttcatctttataaatgtggttatccacttgtcccagtaccatttgatgaaaagactatacttaccagttgaattaccttggcaccgttgtcaaaaatgcattgctgacatggtggcatgtacctgtaatcccagcgactcgcgagctaaggtgggaggatcacctgagccccaggtgtttggggttatggtgaactatgatcgcgccactgcactcaagccagggtgacatagcaagaccctgtctcttaaaaaaaaaaaaaaaatcgaccataaaagtaaagatagttattaggtctggtctgtatgtctcttcttatgccagtgccaatgttttgattgttgtcgcgtttaaagtaagtgttgttcttttacaaatttttctggctactctggatcctttgcatttccatataaattttaggttcagctggtcagtttctaccaaaaaaaaaaaaaaaaagcctgcagggatttcgataggcattgtgaatctatagatcagtttgaggaarattgctatcttaatgatgttcacttccaatccatggatgtggaatgtgtctccg

SEQ ID NO: 837681 - DNA, 254 bp, Homo sapiens
tcccaaatccacccggatccccatccccaaccccttaaaggatgtccgcattgcttggcagagaccccaytcttggggataatcccttaattcgtaaggaaacaccctccctccttgaagccctccctcaatcctgaggatgccctcccctaaatatttcagagcagaaccgactacaaatggggcccagtgcaaaatgaaaacgtaagggtccctcctgtgagactgcactgctggtttacccacgaagccgg

SEQ ID NO: 837682 - DNA, 556 bp, Homo sapiens
ctacaccaaaagcaagcagaaggaagaaaataataaaaatgacagtggacatcaaataaattgaacacataacaacaatagaggagaaacaataaataataccttggaaagacaaataaactgataaatttttaagaagactgatgaagaacaaaaaagagaagacacaaggccaggctcatgcctgtaatcccagcattttgggaggccaaggcaggtgaatcacctgaggtcaggagttcgaaaccagcctggccaacatggtgaaaccccatctctactaaaaatacaaaaattagctgggcatggtggtgtacgtctgtaatcccagttacctgagaggctgaggcaggagaattgcttgaacctgggaggtggaggttgcagtgagccgagattgcaccactgcactccagcctgggcaacagagtaagactctgtctcaaaaaaaaaaaaaaaaaaaaaaaaaaragagagaagacacaaaatactaatattagttatgagagaagagatattactatagaccccacagacattaaaagcataataagag

SEQ ID NO: 837683 - DNA, 643 bp, Homo sapiens
aatgatcctgatgtgatttggctgtgtccccacccaaatctcctcttgaattgtagctcccttaatycccacatgtcatgggagggacccagtgggaggtaattgaatcaagggggtgagtctttcccatgctgttctcatgacagtgaataagacacacaagatctgatggttttataagtggagttcccctccacatgcactttgtctgctgccttgtaagatgtgactttgctcctctttcaccttctgccatgattgagaggcctcctgagccatgtggaactgtgagccaattaaacctctttccttatatattacccagtctcatgtatgtctttgttagcagcatgagaacagactcatacagtccctctctctactttgtgtcaacatggctggacatggtggctcatacctgtaatcccaacaatttaggaagccaaggcaggaagatcgcttcaggccagaagttcatgactagcctgggcaacacagggagacctggtatctacaaaaatttaaaaactagttgatcatggtggtgcacacctgtattcccagctactcaggaggctgagacaggaggatcgcttgagaccaggagttcaaggctgtagtgaactatgatcataccactaca

SEQ ID NO: 837684 - DNA, 643 bp, Homo sapiens
aatgatcctgatgtgatttggctgtgtccccacccaaatctcctcttgaattgtagctcccttaattcccacatgtcatgggagggacccagtgggaggtaattgaatcaagggggtgagtctttcccatgctgttctcatgacagtgaataagacacacaagatctgatggttttataagtggagttcccctccacatgcactttgtctgctgccttgtaagatgtgactttgctcctctttcaccttctgccatgattgagaggcctcctgagccatgtggaactgtgagccaattaaacctctttccttatatattacccagtctcatgtatgtctttgttagcagcatgagaacagactcatacagtccctctctctactttgtgtcaacatggctggacatggtggctcatacctgtaatcccaacaatttaggaagccaaggcaggaagatcgcttcaggccagaagttcatgactagcctgggcaacacagggagacctggtatctacaaaaatttraaaactagttgatcatggtggtgcacacctgtattcccagctactcaggaggctgagacaggaggatcgcttgagaccaggagttcaaggctgtagtgaactatgatcataccactaca

SEQ ID NO: 837685 - DNA, 618 bp, Homo sapiens
gctctcctgggtttctagcttgctggttcacactgcagatttggacttgccagcccccgtaattatgtgagtcagttcctrgcaatgaattgctttctttctacataaaaccatcctattaattctttctctggagaagctcaagtaatacaccaaagaaatgtttgttcagaaaaccaagattgctattccaagccagttctggagtgtgtaaaaggattctagttggggtgtttgatatagccctttctgtcttctgatgcttattgttagcatagtgtacttatttccatctttttattttaaacatatttacatttttatatctaaaattcagtagttgagtcttttaaaatttatttttactgtttttgccttttaattgaagtgtttagctgattaatatttaaattattattgatatagttagatttagtttgccatcttactggtttttttttctgttttgttcctctgtttttcatatctgttccttctatcctgacttctttgaattaattgtagtttttggaatcccattttaattcattcattggctttaaacttatatctctttgcattattttttattgttcactgtgaattacaatatatatc

SEQ ID NO: 837686 - DNA, 644 bp, Homo sapiens
taaactacatgtgccaacaatacaatttatgctttctccctgaaactctggaattttagtacatgctaagcagctggtgcctatgtgaccagcccccaataaaaaccctgggcactgagtttctaacgagcttgcctgtcaaacagcatttcacatgtgttgtcacagctcattggggaggaattaagtacatcctgtgtgacttcactgggagacgacttggaagcttgtcctgtttcctccctactttgctccatgcaccttttccctttgcagattttgctttatagtgtttcactgtaataaatcttagccatcagtacaactgtattctgtgtcctgtgaatcttcctagtaaatcaaacctggggatggtcttggggattcctgagacagcaagactcactggaaggactccagtagaaaacagctgctcagcattgacacagataagcacatatatttgttttaatttctatcttccagaataagacatttgattattttaggtgtatcttccttaacaactgtaactactcagaatctttcagattttaggaaggcactgaatataccatatattattaaatgccccaggaggcctggggaatacatrctaatgtactcaaatacattagtatggc

SEQ ID NO: 837687 - DNA, 656 bp, Homo sapiens
taatgggactgttgggaggttagctagagagggcccaccagaggtctatttgcatgaaagatcaggagccttctaagaaggttcttattctaaggaatcacttagttactgtaggacaaagccaattctgaatgttgcatgttgctactcgctcagatttgaagagtttatgtatcatgttgaaaccagaactaagtttttttttttctcttttttttttttttttttttggagacatcttactctgtctcccaggctcgagtgcagtggctcgatctcagctcactgcaacctccccctcccggttcaagcaattctacagccccccaggtagctgggactacagccacgtgccaccacgcccggctaattattgtatctttagaagacaagttttcaccatgttggccaggctggcctcaaactcctgacctgaagtgatctgcccgcctcagcctcccaaagtgctgggattacaggcatgagccactgcacccggccgagtaagttcttttgacttgacacagaagtttttatgagacgtgatggggaaaggactaccctgcacggcttgaacctttctgtgtgttggcacatcggagagtgcacctgaatatctccccattgtaggctragagaacacgcacgcatgggct

SEQ ID NO: 837688 - DNA, 473 bp, Homo sapiens; identical to SEQ ID NO: 825242

SEQ ID NO: 837689 - DNA, 529 bp, Homo sapiens
agcctaccaattatatttatagtagcataatgaaactgcctttgcaaaaactgtaactgagaaaattatgatggtaaaagaaatttgacttaaccgtccccatcttgcttctaacctccaagttgtccttgttcattcttgggcataggctgaactaactttgggaggtacttagtttatagttcaactttgagacaaagataataacaactctttgccaaaacaaacctccttcctccctggggactagactgcctttgcaggactaatgaattagccacaagatgagaaattatggtttaggagttatgcagctggaggctgcaagattctaaactcctccaaatggctccttgggataacatcactattgtaaaactgaaaatctgtgcttgagatatttcgcagaccctgcacttgatggatcagctggcaccgcccagatcgctacgagtggctcccacccagcaactgactcagtgcaagaggacagctttgwctccctatgatttcatctccgacccaacta

SEQ ID NO: 837690 - DNA, 633 bp, Homo sapiens
aatattaacaagtcaggtgggtttctatttcatcctggctggatatttttaagtgcttgctgcttgttagtcagggaagaaatggatcgtaggtcattaactttaaaaaaaaaaaaagaatatttattcttttgaatttttcccgaatgctttgaatggatttctgttgcattattggctgagtatattcttgtcaggataatccacttttagaggcttcatttacattagctatcactccagagagccatagtaacaggctgctgaattacccaagagaaattactcttgaaagcaatcattgtgaatgaattttcatcacttggtctcatcatttcatgctgttttgtctctttcctttttgcccctgataaaagatagtcataaagagggcttttgttatgatctcattttctttagaaaacttggtcttattaatcatagcagccagcttatggaggcaaccaaagcgtatctctctgtctctctctcacacacactctgtcacacacacacatacamacacagagtttttgaaatgcatttcaatttgtggggaacataaagactaatttacttccatctacgatatctcacacaaatttgcttttcatgtaacttcattggtacgag

SEQ ID NO: 837691 - DNA, 578 bp, Homo sapiens
tatctaaccacagattagaaagagcagctgatcttcagcctgggtgacagagcaagaccccatctctataatatatatatatatatataatatatatattttatatatwatatatatatataatatatatattttatatataaaatatatatattatatatataatatataaaatatatatatttatatatatattttatatatataatatatatatatatatatatcagattaggaaggcatggtggtgtgcacctgtagtcccagctactcaggaggctgaggaggtccaggagttcgaggctgcagcaagctacgactgtgccattgcactccagtctgggtgacagggagagatcctgtctctgaaaaaaaaggaggagaagaaagagcagccgatcctatcttcacatggcaggaaacaaggtcatgagcagtggccacacaggactgttttattttgatataatggaagtggcatgggaaaatgcgaaaagaaaggtcaccctgaatagctctagggaagaaaaagaatgttgggcatttcaacaaacagcattacagaaaagaagaagcag

SEQ ID NO: 837692 - DNA, 351 bp, Homo sapiens
atctttacaaccctgaggggggtctatatcaaccccattttacaaagtaggaaattgggtattagagaggctatataacttgttcaagatcacagrgctacacagaggattccctatcccaatacagatgtttaactccctgacttcccagcctctcctctgctttaacagcagacaaggaactaagccattaggagaatgattgggggcggggagcaaacactaatatagatgctggtcagtgtttaacagccagctctggagggtgcctggtttgtggcatttgccaacttccatggtgaaaatactctcaacacgttaaaattcaggctaccaaaagaaccaaaacaa

SEQ ID NO: 837693 - DNA, 477 bp, Homo sapiens
gcaaactatgggtgaataaaatagaaacgaaatagaaaataccgaagtgttctgtgaggtttaattctctccatttcagcagaccctcaaaaaagtaggtttcaacctcctgtcaagattaaagcagtccattaatcaaataactctaagaaagcaatgatcaaggtaaatagaataatgatatattaatatcttaagacaatgatactgaagagtttaagaactccttttagttttttaaaacaggccattaagtaacacactaaaaagcaatcagaagttatcaataggccacttataaaatgctgttttgttgatttggtttcagcaaataattttctggggcctatatatattgtccactaagggaaaattattttctgtgtttttttataattttaggcaaagaataaggtgttggttctttacagttccttyattctgcttttagaaatatgaattactacaaccttataa

SEQ ID NO: 837694 - DNA, 605 bp, Homo sapiens
ttataaaatctaggaggaaacttatccctttgtgtttagaacaaggcaaaagaaatttctgattggatattgttatgggcccatgacttctgttgcagagaaggtaatagaaaaaggtaaaatacttctacrctctataattcaccttgctggaaaaaaaacaactggattggcttgacaggggcttagacgggtgaccaggttactgtttggttggttgagagacggaagcagtacagaatgacaaaagtgtgtggtgggccaccggccactggttcatcatagcaggacctcaaaccaatgtctagtccatgaatgtttatatatgggttggtatatgaaggtggatatttgcaaacaaatgcttagttttagtgtcaggattttcttcctaattaatgaaaagagactgtatgttttcaagttctgtaggcctaactagaaagaaaagagttcaggatttcagattgtgctactttcacaagatgtaggtatatctttaccaaaacacacatggctatgcacatgttcaagtatcttgttataagaagggtgtggtgtaagtggaaaaattgcttctgttattcttgtgaggcagtgtaact

SEQ ID NO: 837695 - DNA, 625 bp, Homo sapiens
cccttgggggccccaggaaggatccccccmacaatccctgcaggctcgagggtgtcttctcccgctgcctggcctctctccagcccccgctcccatcttggagcaggagctggggctgagcctggggcatcacaaatggcatcaggaggcagactgattcctgggcagaagagggtgggtccccagtaaggccccacctttggaccagggtgggcctgaaggctgggggccaagctgccagtcgggcagatgggagtggggactcctggtgcctctccccgcctgcccatggtcacccatggaccaatcagcatgcacttcctcccctctgaggtccataaaagccctgggctcagccagaacagggcagaggaggaagaagacagagagaagatgggatggggtgaccagctgcagagaggagtatcctctaagctgagagctacagagatgacctgccgggagagaggaaccaccctctcagctgagagcttcagagacctccaagagcttcagagacctgcagagatatccgaatgacttgcttgaggagaggggccaccctctccagggcctcctgtctgctgagagctgaacacttgaagggaccacctgcctacagaga

SEQ ID NO: 837696 - DNA, 408 bp, Homo sapiens
atattattctttttctatcccctctgttttaaatcagtgcttcaaaaatctctttaagtgatctaaaaatattaccatatcaatagcacacctttaaggctactggtattttaaattacaaactaattaacattttctttcacaatctcaaagcatcaaacttgtatgaataggtttaatcataaaactccaaattacttggtgctttaaaatgccttcttcctataatgcctaatagttgagttaagtagaaaattataaatgtaattagttaaatatagtactgaaattacaaaratataatttgaaatgatagaatcctgctgtcaacacacaatattttaagcatgaaataatatttctgtattcactaaaatgcatcttttaaaaataatttagtaggttctt

SEQ ID NO: 837697 - DNA, 620 bp, Homo sapiens
ctatcaattgctgacacaactaacatttcaaagtgaaccatcagcagaaaagcttggggcagagagatttgtggaacactgtctaaaccatcactagaagayggctctctaacctgaaagaaggatagatcagatccagttcccagtctttcttaaaagtaaggataaacatgtcaatctttaaagtaatctaatagctacttccacatttaaaatgcagctgggcctgtgcaagcctttctgagtccactttctaattcatcaaaactttccttcttaccacaataataaagataattttccttgccctacggaaacctcacctagaaaatggcctacagcagaaaaacagtcacctatgtgaggtaaatgcactgttacaaagcactaaattatttcaaaattactgcttttaggtttctaattgttggctacgtaatttgtggagttaacgaacttcatactggagaaaagttcattatagtataaaatttccccatctcagttgaataaaattcttccccatcttcaggagattaattcagattttagacactctaggaaaaagacaatacactaagaatttctaaaaaaacaacaacaaaaagctgaagcaaggg

SEQ ID NO: 837698 - DNA, 531 bp, Homo sapiens
caaggatcctgggctgtctcacatcatgcttttgaatatgttctaccttagccaaagttggcctcccccattttgtctatctgggtaaatccttctgcgatcatcctctaataggtaaaggttcctcctctaggatttttttcttgactctcacaaccaaggatttttgagttcttctttattaatgtcctacggctgcctcaggacatgttctgtgagttacagatatttatttcattcttgactctgaggtctttagtgtcaggaactgtgacttcaacctccttaccaccacttcttagtctggctcctggcccatgacagatagtcagtaaatgtgaaattccggaggaaggagacggtggagggggaaattcatctccattcgtcttttaaaaaaaaaaatctacatcttgctaagggaattcaaggtcattctcttgcccacccttagctaaaatgcacagtaagctgkattcttgctcaaaggaagccttgtaatggagaatattttggataccaagattagtt

SEQ ID NO: 837699 - DNA, 631 bp, Homo sapiens
tgcttatttctattactttagtccacagatctagtgaagtatctggaaccaaatagatacttagttgattgtacaaatgagtctcaggcacaagcaatattaagtaatatatctattaatacatytattaagtaatagagtcataaggttgaaagttccttgggaggtcattatgatagataactgtgaaattacatatttctgtaacttctaaattcttaataatttttggtgcatgaattgattttgtcatgtctcatcattaagtaacagtatgactaataaccttactgtgcttctgcctgcttcttcgtgatatgtggagtgaccgaagaaaaacaaaagcttttcctataactaatctacttattagtacccacagattcccacagggcacagagatgtgcatgcctctttgactctaatttgctcaatttctttttttaagtaagtgttttctgttaaatcagtactttgccatcaccctgctcacctcctctacccttcctgcttatccctgtttgctccttttctcagctccactaacactgctgagtccagagcaaagtacaaatagagccccatctaccctatgtctaaatacttaaagctggaaatcaagtcaacaaac

SEQ ID NO: 837700 - DNA, 668 bp, Homo sapiens
tctgttcataagaaaaattctttatagcagcatgatttatagtcatttgggtatatacccagtaatgggatggctgggtcaaatggtatttctagttctagatccctgaggtatcaccacactgwcttccacaatggttgaactagtttacagtcccaccaatacctaatgctagatgacgagttagtgggtgcagtgcaccagcatggcacatgtatacatatgtaactaacctgcacaatgtgcacatgtaccctaaaacttaaagtataataaaaaaaaaaagaaaaaagaaaaattcttcttagggttaagttgttatcgttcaatcctatgctacaccttgaatatactattttaggcaaggaaaatatcaaacatagtctagtataacatgtgcccattttggccatgcctatctgtcttctttctgtaatgagaccatatatttcctcagaatgataggttgtgctcgggctttgatggggatttttgttttattttggaggatggtagtgtgttatttagcaagtccctatttctacctctttagtgagggtggtagacagagaaacctgaaaaaactttgattttgttgttagcgtctaaattacccattttagtatggaagaaaatagtcatgagaacatcctgagcttaactactcc

SEQ ID NO: 837701 - DNA, 577 bp, Homo sapiens
aatttatctatgcattaaggacacttttggttctaatattttatgattccttaaatattactttgaatgagaacaaaagacattgaaagaaagtaaatacaagctgaggtcaaaagaactgttcaatattcatgatgcttatgcaatacttcaatttggtatctaattttctgaagtataattaaacatgaaattacagtcataagaaagatagctgtatataaagataaattatacatttccacaatgaatgatcatcaaagtttcctcttctcaactatatgttatataatcctaatcattatcattaatattgagtaccttaattgaagacaagtttgactcagcagtaattcactttataggtgaccaattattctgtctgtcacagacagcattagaatatgaaaatggaagaaataaaatttcagtttccaaatattatggaatctaaaaaatgattttgtgaacttttaagttggagccaaatccattactttcagaaattytacgtaagctgtaaaaaatccattttctatataatagctccttaaagaagagagcaaagcagttaaaa

SEQ ID NO: 837702 - DNA, 622 bp, Homo sapiens
tgctggaggtacaactgtgactagcacagacattgccactgtccccctgaagcccctgggctaaaggggacattcatctattgacaacctcaccttgatcactccattyagacagtgcttacgcctgtgattggcatgttggagggtggagtatgtcactgtttcatgagatttaaaggtccttttatggtggaacacaacacaacactgacagatgaaaggcagtactccatgttacttacatctgcaaacaagagaaaaggttgccatgcagggccatgcatgggctgctcagactaaccagagtaacagagtgacaaccagctggggttggaaggggtagcctatatatgacaagagggatcaggggtgcagctaatctgtgaatcagctaatttgaagaatttgcagctcaggagggtaggagctgtttctagttgtctggtatgtggccctgacgtaggcatgcacatagtgtacctcgcacatagtgtgagagcttgataggagaagtagctggggtgtaaacttcatctactgcttaagaaaaaagactgaccggcctacagccagggcctcaaaactaggtcaagacagcatttaaaaaaaaaaaaaaaaaaaa

SEQ ID NO: 837703 - DNA, 622 bp, Homo sapiens
tgctggaggtacaactgtgactagcacagacattgccactgtccccctgaagcccctgggctaaaggggacattcatctattgacaacctcaccttgatcactccatttagacagtgcttacgcctgtgattggcatgttggagggtggagtatgtcactgtttcatgagatttaaaggtccttttatggtggaacacaacacaacactgacagatgaaaggcagtactccatgttacttacatctgcaaacaagagaaaaggttgccatgcagggccatgcatgggctgctcagactaaccagagtaacagagtgacaaccagctggggttggaaggggtagcctatatatgacaagagggatcaggggtgcagctaatctgtgaatcagctaatttgaagaatttgcagctcaggagggtaggagctgtttctagttgtctggtatgtggccctgacgtaggcatgcacatagtgtacctcgcacatagtgtgagagcttgataggagaagtagctggggtgtaaacttcatctactgcttaagaaraaagactgaccggcctacagccagggcctcaaaactaggtcaagacagcatttaaaaaaaaaaaaaaaaaaaa

SEQ ID NO: 837704 - DNA, 622 bp, Homo sapiens
tgctggaggtacaactgtgactagcacagacattgccactgtccccctgaagcccctgggctaaaggggacattcatctattgacaacctcaccttgatcactccatttagacagtgcttacgcctgtgattggcatgttggagggtggagtatgtcactgtttcatgagatttaaaggtccttttatggtggaacacaacacaacactgacagatgaaaggcagtactccatgttacttacatctgcaaacaagagaaaaggttgccatgcagggccatgcatgggctgctcagactaaccagagtaacagagtgacaaccagctggggttggaaggggtagcctatatatgacaagagggatcaggggtgcagctaatctgtgaatcagctaatttgaagaatttgcagctcaggagggtaggagctgtttctagttgtctggtatgtggccctgacgtaggcatgcacatagtgtacctcgcacatagtgtgagagcttgataggagaagtagctggggtgtaaacttcatctactgcttaagaaaaargactgaccggcctacagccagggcctcaaaactaggtcaagacagcatttaaaaaaaaaaaaaaaaaaaa

SEQ ID NO: 837705 - DNA, 382 bp, Homo sapiens
aaactggaatgtcccagccaatcagggcccgctggtcactctatgaacatgaagagactggctcaaacaaacatgccctttggctgttatgtttaaagagagctatgtctggagtcagctatcagtgagtttgaaacccccaccagtagaacttctagaaagacttgtcaagtcattggaaagctcttcctttttttcactacactgaccttgagcaaactgccacattcgtgtcagtgttggtttaggcccctggagtcacacaggacargccagccacctccctccccaggcagcagccacttcctccctttaatctccgccagcacttcctctgcatcattcttaaccctttgccagccgacccccaccaggccaactg

SEQ ID NO: 837706 - DNA, 382 bp, Homo sapiens
aaactggaatgtcccagccaatcagggcccgctggtcactctatgaacatgaagagactggctcaaacaaacatgccctttggctgttatgtttaaagagagctatgtctggagtcagctatcagtgagtttgaaacccccaccagtagaacttctagaaagacttgtcaagtcattggaaagctcttcctttttttcactacactgaccttgagcaaactgccacattcgtgtcagtgttggtttaggcccctggagtcacacaggacaagccagccacctccctccccaggcagcagccacttcctccctttaatctccgccagcacttcctctgcatcaytcttaaccctttgccagccgacccccaccaggccaactg

SEQ ID NO: 837707 - DNA, 658 bp, Homo sapiens
gctaggggaggacaagaggaagggcgaaagtgacagagaaaccaaagtaacagcaaacaaacaagtacagatcaggccatgagccacaacagccaaaaagtcttycaagtgattgcaaaggctttcctctgtttctcttaagaattagccaggtcacttgtcattgtttttctgacctcttccctgtgttgctgattgcttgacgcagtgggtctaattatctccagactcccagcctgttttaatgaagagggatgtttatctgtgtaagcagacagacttgtctgtccccttggtcctaaaattttttcttgggaaacctagggatgaaactgacagttgttaatggatcagccggaatataaacttttcgtttctggcttgtttgtagcaagaaatgaacatttcttctccctccttactgtgccttactgcgcagagcaattgtcatttggaaattcctagcagtatttgattttcctgtgagaatggcctctctcccctcatagttggctttggactgacagtaaactcagttacctagctagcccccgtcaaataatataaggtggtgcagaccctgcccagacaaaggactacacagcgttgaacttggctcatcagcaactggatcctgggtctttgaatctcaaacagt

SEQ ID NO: 837708 - DNA, 601 bp, Homo sapiens
cattctgggtagcatatggggcatagatagtccctggaatgaggtggtagtccagttgctgaaacttccactggtgttaacttggtagaatattctggtggacagtaaacatctgggttggtgcaaagattcagactctttcagcatggggatagcagcattttttttttctgagacagtcttgctctgttgcccaggctggagtgcagtggcacgatctcagctcactgcaagctccgcctcctgggttcacacctttctcctgcctcagcctcctgagtagctgggactacaggcacccgccaccacacccggctaattttttgtatttttcagtagagacggggtttcactgtgttagccaggatggtctctatctcctgaccatctgcccgcctcggcctcccagagtgctgggattacaggtgtgagccaccgcacccggccagggatagcagcatttgaaaacaatgaactggcttgctgtgatgaagcctaaagagaataatgggtaactgawgatagttgccaaacagttaagaactaagtgtgaggaccaccaggcatctttagtagcttacaaagtgtctctccctcctgt

SEQ ID NO: 837709 - DNA, 604 bp, Homo sapiens
taattgtctgtttctttctttatccaccattagattataagcttcttgggggtagagcctgggtctagttcactgtgccttctgagtactagattgtcaattaagtatttgttcagtcaatcagttgttcaatcagtccttcagtcaatcaaaggatgagtggataaatgaatgtgggtagttcttcaattcaagaaatatcaagaaaatcatttccaaaagatttctgttctacccctaacccagctggccatttcaaccagagagctctgtgcttcactccactcctgggctgatcaggagtcgatatttgagctcaatgcttagctttaaaaagcttaggtgaaaagaagcaggactatctaaatatagtccttattttcagatatgtaacttaaaatccttcctgaattaagtgagatcagcagagagccacattcctagacttcagcaaggtgccctagagctactttattgaatggcaggcaggagggggtagtctgatgttcatgacgtactgtgggaggattttataaraaactgccctgtgaagcttattactgtgtttactgtcaggttattattgaggacatttattattcta

SEQ ID NO: 837710 - DNA, 645 bp, Homo sapiens
attacagaagcaaactgagttccagcaggtcaaatacaaccttattagtttgatatgttaagcagccctttggaagggtcagtgggggtrgtatgatattgatgggcatggtacaatatatgcttgttgaagactgtggtagctcacacatcagctgaattttgtatctctttagcttttcaggggttctttaagcaacagggaggtatgctcatatgtgtgccttatgctcagaaaaatagctcgatcaccaagcagctgtaatccactcgactggtctctcttccttatggaaactgggtcctgaagttcggtgtcattcttttttttagaaatcatgccaccctcaaagcctcatccacctgtcgtgggcaaagtgactcatcacagcattgaattatactgggatctggaaaagaaagccaaacgccaaggacctcaagagcagtggttcaggttctcgattgaagaagaagaccccaaaatgcacacttatggtatcatttatacgtaggtgcagtgttgaattgcttgccactttgccttacttcctgattagctggaatgatttctgttgtctctaaaaagccactgcttgtttcaaattaaagaatgagtcagcatcatttgtattcatgctctttt

SEQ ID NO: 837711 - DNA, 666 bp, Homo sapiens
ggctaatattttgtatttttagtagagatggggtttcaccatgttggccagggtggtctcgaactcctgacctcaggtgattcacccacctcagcctcccaaaatgctgggattacaggcgtgagccaccgtacctggcctggtctcagtcttcttgctttccatggcacattccctgcacttccggctttctcaagatgctgacattttttcttctgttatgttatcactggaaatcttgtttctaggttcaagtacccactcttccaacactttttaatagagaaagtgagcactttctctattagcccagtgggtgtatattcataacctccacaactgaaccacccactctattgcttatgaaagtgaacccttaaaagctcttttaccagaataaccaaaatgggatgaagtcacagccgaagaataatatttaagcatgtgatagatgcacctgcctttttttaaacctgattttgtcaggcagccttgatgaacctgcgtggatgcaggatgatgagcgccaaagcgccttcccacctgctctgcgacatccaaaaggtgtggctgagagagtgacaggtcagtggttagcgattctttttgctgrctactttcagggggaagccttgttttatagctgggcatgtatggggtctaaga

SEQ ID NO: 837712 - DNA, 594 bp, Homo sapiens
ccagaagccccatagttgagtgtttataactacgatccatggataagtcttaaatgttacagaaaattttggcaagaagattaacagaggtcagcctccacccaccttgtatggtgacaggatgatattcaggaagcagggcctgtgccaagcggcaggccctgcttctcaggggcctctgctggctcctggtaagtgaccctgcctaaccctatgtttattgcaggggacctgtaagccaaacccccctcagaagcctctgcctgcagatcctctggccagaacaactcggctcactcatgccttggccaggaccccaggacaatgggagactgggctccgcctggcacccctcaggtttgtgtgacatgccatgcccatctctttctctctcaaactcttgtgggaccaaccacgactaatccaagccaggacaggggtgcagtggtctaggccgtgcttcctgctccccctacaactgggaataccgtaaaatagacatgacaattaccaggaaggaagcagtccmtgtgagcttataatcacaggcattggcacacagtgcctatcaacagccacagtggacctaagaga

SEQ ID NO: 837713 - DNA, 594 bp, Homo sapiens
ccagaagccccatagttgagtgtttataactacgatccatggataagtcttaaatgttacagaaaattttggcaagaagattaacagaggtcagcctccacccaccttgtatggtgacaggatgatattcaggaagcagggcctgtgccaagcggcaggccctgcttctcaggggcctctgctggctcctggtaagtgaccctgcctaaccctatgtttattgcaggggacctgtaagccaaacccccctcagaagcctctgcctgcagatcctctggccagaacaactcggctcactcatgccttggccaggaccccaggacaatgggagactgggctccgcctggcacccctcaggtttgtgtgacatgccatgcccatctctttctctctcaaactcttgtgggaccaaccacgactaatccaagccaggacaggggtgcagtggtctaggccgtgcttcctgctccccctacaactgggaataccgtaaaatagacatgacaattaccaggaaggaagcagtcccygtgagcttataatcacaggcattggcacacagtgcctatcaacagccacagtggacctaagaga

SEQ ID NO: 837714 - DNA, 559 bp, Homo sapiens
aggagactacactctagataaacaaaacagacaggcgaatgtaatccagggttttggtggtttttctgagtctagaaggactaaaaattagccttgataggcagaaagagcatcccaacctgtctgtcaaaaactctggccatttctaggacacctttgccgaactgaaacaggaaacaacaaaaattttacatgcttataaatgttttctccccctccgaggaaaatctttacataaagatggactcatttacctcattttttacacttgcatctgcccctttgtcaagaagtaactgaactaactcttcatgattatttaacacagccacctagaaaacaaaacccagggtggtgtgcatgagcttctccctccagggcacacacagcagggggcatgagcctggcacatgcagggtcccagcarcccccctgcaaccccaaaagaccactgtggctttgcatggcctgcaggcacagcgcttcctctgcagctgtatggtagcaactccagagaaaatggaaaatggactccctctatccacactaaaaccagaac

SEQ ID NO: 837715 - DNA, 624 bp, Homo sapiens
ggtggtttatatcaggaagtcgatgcacaatgacattcagtaaatcaatcctaaaggcctcagcccgccatcaaaatatggctgccagatatacastttcatattttaaggcaaaataaaatgcgtagagtatatgtctcccatgtaatgctttcctgcttcaaccgacttgttttgatgaatcaaccacctaccctcattgcttcagataagaaggccgactgtcaagataggctttaataagttagaaagtagactgctataaagcagaaattgagtagaacttgtcagcaagtggcagagcctacgtcaaatgtaagtgtcttgcctgtcccctcaaagatgctgctgtggacgtactagccccagattcatgcctgcccctcatggcttctctctgcaacttgtggtcatgcgccttgttttaaaacccacaggaaggtgctgccgggagcctgcccttgttagggtgggactgtggccaagctacccttcagcaaggctgggtaggctccacctacccagcaaatgcgggcctctccgctcccatgtgtggataaggccaaggggtattggaaagggagtggtccagggtcctcaaccagcttgcagcttgccggccat

SEQ ID NO: 837716 - DNA, 573 bp, Homo sapiens
ttattccacatcattctacaatggatttacaatagtttgyaatgatacacacaatacaataaatagaagaaaataaaaacaaaatagagcagagaaaacccagataaataggaggcagagtccactgcttttctgtacataatccatggagacctgggtgagggaaacaatttgctttcaaacagtagagtctttccagcagggccttcccctgaaagtctttgcttaatttagctaaagtgggaagagagagatcaaaaatatcaaatctaaaagcagttgtgagcataagactttgtagaaccattctccagtttacaaagatctttggcatctcctttcattgtcacagccctaaaaataaagaacaggtacaatcgtctccattttacaggtgagcacactgaggctcaggaaggccagagggcccacaggtggtcagggtcattctggatctcagcctgcagcctcaggctcctgatccattctttggcctttcactgggtacctgtgagcctttggctcgcaggcttggggatggggagggttgagagggacagctctttcccattc

SEQ ID NO: 837717 - DNA, 548 bp, Homo sapiens
gaaatttactcctagcattttatctaggaagttcccttcctatattaactctgattactctttatatacagaggctatttcttatttakttttccttcatcattatcatgacatttcacatcagaagggtgtgtggaccccatccctaataaaatgtaaaaggcacatgctgggaaccagcccccatctgaaggccagaacattactaataccagtggccccacttgtgtgctggccccatcctattgccctgaataacccccaaagacaccaccaccagttttgcatacattatccctatgatttataaaagtgaaataacattgtaatatgaattcttccgtattgtttggctttgctgctacaatgctaatgccactataacaatggtatcaaatggtatgattttgagacttgttttattaaatgtcatgttactgggatatatcaagttgtgagtagccgtggttcacacttttccattgctgtgttatatttcatcatgtgaatataccataatgtactcaggctcctcacaatgggcatgt

SEQ ID NO: 837718 - DNA, 621 bp, Homo sapiens
accccatctccactaaaaaaacaaaacattagccatgcacacctataatcccagctactcaggaggctgaggtaggagaatcacctgatcctgggagcctgtggctgcagtgaccaagactgcatcactgcactccagcctgggcaaccaaagtgagaccctttctcaaaaacaaaaaaacaactaacaagcgtagttacttagaagggatataggcagagggaacaatagcgtggtcaaatgtaagagccaagcttctcaatgtgtatttaaattgctttgatgtttgaaccatgtgaatatatattgtcttttcaaaacaaacaataaataaaatataacttaaaaaatataaaagaaacagacgcttagagtaagtagttaaagcaatgtattaaaaccattgttttcattttaaaactaatctgagctctttaatctttttcaacatactaaatactgaagataatttttgttctttcagaattttagccccatcaaattattgggatactaactttgaaaatggataatgacttcagcaatacattattataaaaacacacaacttgagaataatatttaatagctgactttttakacatcaaatacacaaaactg

SEQ ID NO: 837719 - DNA, 621 bp, Homo sapiens
accccatctccactaaaaaaacaaaacattagccatgcacacctataatcccagctactcaggaggctgaggtaggagaatcacctgatcctgggagcctgtggctgcagtgaccaagactgcatcactgcactccagcctgggcaaccaaagtgagaccctttctcaaaaacaaaaaaacaactaacaagcgtagttacttagaagggatataggcagagggaacaatagcgtggtcaaatgtaagagccaagcttctcaatgtgtatttaaattgctttgatgtttgaaccatgtgaatatatattgtcttttcaaaacaaacaataaataaaatataacttaaaaaatataaaagaaacagacgcttagagtaagtagttaaagcaatgtattaaaaccattgttttcattttaaaactaatctgagctctttaatctttttcaacatactaaatactgaagataatttttgttctttcagaattttagccccatcaaattattgggatactaactttgaaaatggataatgacttcagcaatacattattataaaaacacacaacttgagaataatatttaatagctgactttttagmcatcaaatacacaaaactg

SEQ ID NO: 837720 - DNA, 620 bp, Homo sapiens
gtatgtggctcacttctaatcatgtaaaaacactaacatacccaagagaaaatcactggttccaagtactttaaagaagtttccctttgttagactgctcagattaggcatctactgctatttttgtcttctgtgtaggttttaagagttttataaagcatccaccaaaccaatgcatcttagagagagatgcatgtatctacatggcggactttatacaacataactaatccaagttccaaggttagccaccaaatcaattctgcaagtcagttactatggaccttggcttgtagtacagcatagcagttagacaaggggatatatacaatatataacagaaaagagaaaagactgggcattaccatagttaagtttctgttcgtttgttcaaatattcttcataccacacagagttatactgaagtatcaaagtggtatcagaatgtaagcatcttggtaaaataatgatttaacaggccatcaaatcgaatggcagggaaacaatctgtgcactagtatttkacctgcctcaaacagaagatattactgtaaataattctaaacataagcacaatttagtgaataaggtaggagactggtagactctaactttcaga

SEQ ID NO: 837721 - DNA, 695 bp, Homo sapiens
gagaacatatactgaaatattaacaggagtatgattacaggtgttttttattctttttgactatatttttaattagttgttaaaaagttataaaaataagtgtgtacaataagttcataaaaacaaaatatcagaaaataatttaaagtattaacttacttttctgtaaaatcctaaaatctggagaatcttctattaaagtcccttctctataccactcaaccttaggagatggagctccttttactctgcattcaaagacaaccagctgaccctcagaagctgacaaattttgtagcatctataatgataagaagaatgtagttagaacaaaaaagtacacatttttgtaatctagtttcggtgttgaattttagaaaaagatgccgtctccatatttggatttttctccaaagcatctacatctctagcagcttcagttctgtggatgtgcattcaaaagtagttttgagagcttgtttggaggctctagcaggcgagcgtggctactcctatgcccttgacctaagattggtcctcctctatcagggatggtcatcttcttccactgagcgcacagcttcaggagggacgcacatggaaacaatgagggagaaaragggcacccgcatagccagcctgatcagctgaattaattctggccatcaatggggtgacagatgtcacagccagat

SEQ ID NO: 837722 - DNA, 695 bp, Homo sapiens
gagaacatatactgaaatattaacaggagtatgattacaggtgttttttattctttttgactatatttttaattagttgttaaaaagttataaaaataagtgtgtacaataagttcataaaaacaaaatatcagaaaataatttaaagtattaacttacttttctgtaaaatcctaaaatctggagaatcttctattaaagtcccttctctataccactcaaccttaggagatggagctccttttactctgcattcaaagacaaccagctgaccctcagaagctgacaaattttgtagcatctataatgataagaagaatgtagttagaacaaaaaagtacacatttttgtaatctagtttcggtgttgaattttagaaaaagatgccgtctccatatttggatttttctccaaagcatctacatctctagcagcttcagttctgtggatgtgcattcaaaagtagttttgagagcttgtttggaggctctagcaggcgagcgtggctactcctatgcccttgacctaagattggtcctcctctatcagggatggtcatcttcttccactgagcgcacagcttcaggagggacgcacatggaaacaatgagggagaaaaaggrcacccgcatagccagcctgatcagctgaattaattctggccatcaatggggtgacagatgtcacagccagat

SEQ ID NO: 837723 - DNA, 573 bp, Homo sapiens
ctgggcttttgatatgccttcttcactaagcataatcctttctagcttttgatttaaagtgagaaatgtgatttaaagtgagagattttcttttcacttatgtacttagaggccactgtagggttattaactggcctaatttcaacactgttgtgcctcaaggaataggaaggcccgaggagaggagagagataggactggccagctggtggagcagtcagaacataaacatttatcaattaggtttgttgtcttatataggtaaggcttgcatggcaccccaaaacaattacatcaatgaccactgatcacagatcaccattacagatatagtaacaacacagaagttttgaaatactgttaagaattaccaaaatgtgacataaagacacaaagtgagcatatatgctgttggaaaaatggtgccaactgacttgctcaatgcagtgttgtcaaaaaaccttcaatttgtaaaamttcagtatcaaaaattgagtaaagcttataagctttagtaattctcgcaatatttcaatatttttcattattattttatcttttatggtgatctca

SEQ ID NO: 837724 - DNA, 496 bp, Homo sapiens
tgattgcttcctaactcctccctagtttctgttttcttacacattgttatatttcttacctgctacacaaacctctagttatagtcagttagggagatgaagatggatttgaggctgagctcccatctcctcagctgcagcacctgattaaagccttcttccttggcaatactcatcatctaggtgattgactttctgtgccgcaagcagtaggacctggatggaaccctggtgttttagtaataaagtggtggtgatcgtgccacctaacttaactgacaaggtggtggtgaggagaaaatgggttgaaacaggtggaatgccacagaatactacacagccataaaacagaatgaagtcacgtcctctgcagtaacatagatgcatctggaggccattatagtaagtgaacctacacagaaacagaaaaccaaacactgcatgttctcacttataagtggaagctaaacackgggtactcatggacataaagaca

SEQ ID NO: 837725 - DNA, 533 bp, Homo sapiens
ttaaatgtttgatggaatttaccagtaatgtctttcattgtgggcagattttaacatataaattcaagttctatagtggacatagagctattcaaggtgtawgtttcttctttagtgaactgttgtatattttgcatctttcaaataatttgcttattttatctaagttatcaacttgatataaagttgctcataaaattcccttgtctgtaggatctttagtgatgacctctctttcatgcctgaaagttgtgtcttctctcttactatcttgatcagtctgctgagaaatttatcaatttcgccagtggcttcaaaaactaattttcgtttgttttattgtggtttctttttgtttctctgttttccattttatcagtttctaccattatctttattatttctttcttacttttacttttggatttaatttgttcttgttttcaagtttcttagtgtgggagcttagaccattgatttgaaacattcctttctaatataagcatttgatgctataaatgtctttcagtgcc

SEQ ID NO: 837726 - DNA, 558 bp, Homo sapiens
atcccacaagttgagggcttggtcccacaagactgtcccccacttccaatgccaattgtaggctccaggttctttacctgtgcttctgactgaccagctataaattggggttccataacacctttctcttcaattaattttttagagcagctcaaagaacttagaaaaacacttatgcttaccagtttattataaaggatattacaaaggatacaggtgaagagacgcacagggtgaggtgcaggggaaggagaatggagttgccatgccctctccaggcatgccaccttccaggaacctccgtgtgttcaactgtccggaagccccctaaacccagtcttttgcggttttttaatggaacattcattacatacgcatgattgattaaatcattgcccattggtgctccacttaactttcactccctctcccytccacagaggctgggagatgagctgaaagtcccaaccttttaatcatgccttgttctttcctgtgaccaacccccatactgaagctacctggggcttgccagtggacgtagcgggggtgttatga

SEQ ID NO: 837727 - DNA, 569 bp, Homo sapiens
tgataaggattaaatgagctgatatagaacaaacatgttgcacagtatcttgtcacatagtaagtgttccataaatgttcattcttgttttatgattattaaatctcgtagactcactccccttatctgtgggttggcttggctaatttcttttgctttatatttatgaaatgcttatagaatgcttactatgtctcaaggactgttctaagtgctatacaaatattaatttatttaattttcataaccacacaaagtaggttatccccattttacagatgaggaaactgaggagaaggttaagtatgttgcccaaaataactaccaagtggcagagctgagattcaaacccaagcaatctgactctggagtcctgctctgcacggccatacgctgcctcccaggaggagggtggggggacgctccctaccttttgcccaggtgtcacccacyaccttcctgtctgcatgctgctgccacctggtcctcagttcttctccctggagggcatcccagagttctcaaccagctaggattgtcaactttaacaaacaaaaaatacaaaatgc

SEQ ID NO: 837728 - DNA, 570 bp, Homo sapiens
aatttccagcaccaaatctgctaaagtccctgcctctgtgcccatattctgtgccttctttcctgtyacaatgtgtgttcgtaacctttctgtgtgccttgataccctttagcaatctggtgaagcctgtggactcttttcagaataatgttctcaatgcataaaatgaaatgcctatggatacaaaggagactgattttatttaaattccgttatctaaatatttttaagctgtgatttagtaatatatgtacttctttattaatgtataatataaactgacttagcaggcagcctaatagctatctgttttaatgtagtgagcatagtaaatgatattttaagatatttccaacagttgttatgtgatttgaaaatatttgtattagtacctaattctgatttgttgacaacatttaatattgaaggaaatgttaaatttcagtcagagattagtaaaaataaaaatgtcgtagtttgctcattcaagttcacaaactgtacgtatcctgtttatgggtttctgggaagtcagtggatctcaagtttaacatgccagataaggccaac

SEQ ID NO: 837729 - DNA, 523 bp, Homo sapiens
agcgttaaatgcatagattagaaaagaagggttgaaaattaatgaactaagcatctatctcamgattgagagaataaaagcaaaaataaactcaaggaaaaaagaagaaagataagagtaaaaatttaaaaattttaaaaatacatattagagggaattgacaaagtcacagcttgattacttaaaaagactaataagttggtaaatctgttgaataaaataatcaaaaatatccaaaagagacaacacataaaaccaaggaaatattactacagattctttagacactaaaaatgtatgagcatgttatgaacgactttatgctgataaaatattgaaaatttaagtaatatgaacaaattataataaagaatatctagcaatatgaataaagtagaatttttaaatataaatagtcctgtgattattaaagaaattaaatccataatttaaaacctgtcttaaataaaactctaggccaagatagcttccctggtgaatttttctaaacctgtaagaaata

SEQ ID NO: 837730 - DNA, 540 bp, Homo sapiens
aaacataaactacaaagcaataatattgatgaagcttttttcatcaaaatttagaatttttgctaaaaagcaaatgccatgcccaaggtttatggagagatgagaaaaggaaagaatatttttgcagttgctagaactgaagaaaaacaaattattagcatctattgaaaggaatagctccaaatcaatagtaggaggacaactgtcctgatggaaaaataagaaaagagtatgaacaggcaatttatgaaagaagatatactgaaagccaagaagtatgtgagattgtaagtttttcagtaaatatttcagtaaatatttgttttttgagttaagctgcctttgtaaaaaaaaaaaaggcaaaaaaataaagatgaaaacatagcatcttgtcagttcaggtcaggttctcaaactctctgcgaataatttgagtgtcctgaacatggtgttaggttgaggtagagagagagagagaggtctttaagacattctaaayaaggggattttgaataaagtcgttatagaggtcagagaaat

SEQ ID NO: 837731 - DNA, 511 bp, Homo sapiens
tattactaagtgaaagaagacagtctgaaaagactatatgctgtgtgattccaactatatgtcattstggaaaaggcaaaactgcagaggcagtaaaaggatcagtaattggccgggcacagtggcttacatctgtaatccaagcacttggggaggctgaggcgggcggaccatgaggtcaggagatccaggccatcctggctaacacggtgaaactccgtctctactaaaaattcaaaaaattagctaggcgtggtggcatgcgcctgtagtcccagttactcgggaggctgaggcaggagaatcgcttgaactcgagaggcggaggtttcagtgagccaagatggcgccactgcactccagcctgggcaacagagcaagactccgtctcacacacacaaaaaaagaatcagtaattgccagggattagggggagggagggatcaaacagtgcagcacagagggtttttagcacagtgaactactctgtatgatactatcatgatgggca

SEQ ID NO: 837732 - DNA, 511 bp, Homo sapiens
tattactaagtgaaagaagacagtctgaaaagactatatgctgtgtgattccaactatatgtcattgtggaaaaggcaaaactgcagaggcagtaaaaggatcagtaattggccgggcrcagtggcttacatctgtaatccaagcacttggggaggctgaggcgggcggaccatgaggtcaggagatccaggccatcctggctaacacggtgaaactccgtctctactaaaaattcaaaaaattagctaggcgtggtggcatgcgcctgtagtcccagttactcgggaggctgaggcaggagaatcgcttgaactcgagaggcggaggtttcagtgagccaagatggcgccactgcactccagcctgggcaacagagcaagactccgtctcacacacacaaaaaaagaatcagtaattgccagggattagggggagggagggatcaaacagtgcagcacagagggtttttagcacagtgaactactctgtatgatactatcatgatgggca

SEQ ID NO: 837733 - DNA, 529 bp, Homo sapiens
gacccagagtaacatctttctcatattttaatttttcacacatgcacggatctgtttctgggcactgtgtccaattcagtcagtcttttactaatactgctgtttcctactatggcttttattttgtttatttatttatttattattgagacggagcctcactctgtcaccgaggctggagtgcagtggcacgatctcaagtcactgcaacctctgctgcccaggttcaagcagttctcatgcctcagcctcctgaatagctcagactataggtgctcaccactatgcccggctaatttttttttttttttgtatttttagtagagatggggtttctccatgttggccaggctggtctcaaactcctcctgacctcaggtgatccacctgcctcagcatcccaaagtgycaggattacaggcgtgagccacggtgcctggcctcctactatgcctttataatatgctttgacatggcaatctccccaacacatcccacatcaccttgtttaatttcctcaagaatgttt

SEQ ID NO: 837734 - DNA, 667 bp, Homo sapiens
ggcaggtatcaccacctgtaggatccacatacycagtgggtcccccagggaataggaagagttctactataattgtattgctgtaatgtgtaatttaagtaacaagagtgctgtgtctcatttgggcttaggcaaaaatagacagtttagtttggttaaaaaagtccaggttggattacaaatgttattatcctgtacccattggcattggcatatccattcagaaatgttagcagggatgattctccaaggtagcccattcctggcggcctccggcagcttgatgcatagccagtgccgactgcagttggcttccgttgcagcagtggctacccagttgttgaactcattcccagcctcagacgtgatgacccaagtactgatttctagcagacagattattcgtaataacaaaactggaggggaacatgacattgtttttcatctttaggaaactgtattatgccttcattttttgctcctatagctacaaggtcaccagccttaggggcgggacctgatggacactgcacccatattttggctcaaggttttaagttgcccacccactccgatggacccaaattttccggttctatatgttgtttctattggggcagaaatttcctcaggggttaattgttgacaaggtaccactaacaattga

SEQ ID NO: 837735 - DNA, 692 bp, Homo sapiens
aggtgatgaagccaagatccgcggatccaccgagggtcaggggcccggcctgagtcgcttggctggcggcagctctggagttcagccacagtgaagctccctcctgggattccaggacccatcacagggcctrgctcggaagatgcgctgcttccgggcttgccagcgtgtggagcatttcaccggggatttctaagatcgtgtggctcttgcttaggtatgattaagacgtctcataagataaactctcacagaggaaagaacacgtctcctcctccccttggggccaggcttgggtagaggaggtacagccgctcctgggatcttcccatgtcccgggcggttctccagtgcctgaggcacagacaccagccccagagcccccacctcagcccggagccctgcacagggcctgcaaagaacatgggggtgattattgcggcgatacctggtgctgagactcaccaggtctcacacaagcattaactctatcaaccctcacaaaagcccacaaggaaactggggctcagagagggtgataaatgtgcccagggtggcacagcaggcacatccaacccaggtcctgctggttccagggcacactgagtctgctccccacccccaggctctgctcaggatggatgggtgggagctctgcccctcccagcccttctggcccagggaaaggtttc

SEQ ID NO: 837736 - DNA, 542 bp, Homo sapiens
ctcactggtgacagtctcaataagacattggagatcgctgtgtcctagagcttgtaagccttgccacagatgatgtgagcaaagagcacatgtgagaagcattttgatattttgaagttataaaagatttgcttagtttgtgtaccaggagaaactcaagagcagatggctaggagatgcagcaaggtggaaggcctgatgaaatccataatttgagaggaaaaaccagagtaaaatcaatcaacagaagcaatgttggttaagggtctatagtacatgtctgttttatgtatgtatagtttccctaaagaagggatttttcttttccctttgcaatcatgatatatgatgtattatggtgggaaatgcagaaagctcagctcagcaccaggtatcagattggtcctgctcctcactagctaggtttgggcttctgctgtataaaagacaggcttgcaccagatgatctctaaaacctcttgcagtgctcayggcctgtgattgatttaccatgcaacgttcaattgtgctgcagaggctgt

SEQ ID NO: 837737 - DNA, 582 bp, Homo sapiens
tcaaagcaaataataatggtaacaggtcaaaacccattgagtagaagggaaatccatgtgtccatgctgacacmaataaatggctgaataaaggagcaaatggacaagctgtatcacctaacaggatacaataagaataccccatcacttctgttattttcctgccaaaaattcatcgactgaatctaatcatgaggaaacactgcacaaacccaaactgagggccatgctacctaataatggtctatattcttcaaacatgtcaagatcatgtcacgaaagtcaacaagagaataagaaatacttccaggctgaaggagaccagagatgcgacaactaaatacagcgtgtgattctgaatcagatacttccactctaaggacattattgggacactcaggacaactggtgaaacttgaatgtttggggactgggtggtagcaatatatcaatatgaatgtcctgattctgatggttgctttgtggttatgtatgagaatttttttgtttacaggaaacctgggggagtggcaatgtatcacattggcaacttactctcaagtaagtccgaaaacaaaagaa

SEQ ID NO: 837738 - DNA, 595 bp, Homo sapiens
catcctgggctgcatgtggcctgcgggcggcaggtggacaagcttgctgtaaagggtacagagtgtgtctaattcagaagtcagcaaacttcttctgtaaagggccagctaktgactattttagactgtaggccagtctgtgtcacaactacccaactctgctgtggtcacacaaaagcagccatagatagtacataaatgaatggatatggctgcattgcaataaaaatttaaaaaaacaaagtagtaaaccagattgggcccaagggccatagtttgccaaccttggtctaattggctgttatattccctttttgctttctcaccttctcaactttccctagaagcctgctcactgctcctggtgtgcatgtgtgtacgcgtgtgtgtgtttgtgatccctgggcaggggagacctgaaaagggaaggaatgagcatactgtgtttctagaatagagtaacccaggctgatagtgtctcaggcagcagtggaaaatgttaaagaatattaagaacaaaaagcgaaatcatgactccttttcaaagacaaaatgaacatgcgtcaaagattttatttaactcattaattaatga

SEQ ID NO: 837739 - DNA, 595 bp, Homo sapiens
catcctgggctgcatgtggcctgcgggcggcaggtggacaagcttgctgtaaagggtacagagtgtgtctaattcagaagtcagcaaacttcttctgtaaagggccagctattgamtattttagactgtaggccagtctgtgtcacaactacccaactctgctgtggtcacacaaaagcagccatagatagtacataaatgaatggatatggctgcattgcaataaaaatttaaaaaaacaaagtagtaaaccagattgggcccaagggccatagtttgccaaccttggtctaattggctgttatattccctttttgctttctcaccttctcaactttccctagaagcctgctcactgctcctggtgtgcatgtgtgtacgcgtgtgtgtgtttgtgatccctgggcaggggagacctgaaaagggaaggaatgagcatactgtgtttctagaatagagtaacccaggctgatagtgtctcaggcagcagtggaaaatgttaaagaatattaagaacaaaaagcgaaatcatgactccttttcaaagacaaaatgaacatgcgtcaaagattttatttaactcattaattaatga

SEQ ID NO: 837740 - DNA, 545 bp, Homo sapiens
aaacaaatgatttttgccaaattcttctaaaacaaggaaacaactggcgaatgctttcatcatttaaaaagctaaccctctgaattaggaactcaggtaacacttaaagtttcttttaaaaagtattatttatttaaagctcaggagtctacctattttaggggtcttctctttgtctcactcctaagaaacaaaccatcatgttttagaaagcgaagctgagtccacctgtcaaacttctctttcacgtggtaacatctccatctgctggaaatttaaatgtctgcattaaaggcagataatgttagctttatttttctataaatttatgtctaattcacatttccattttctcttacatgtgtcagtattttattgaaaatatatgccccttttcccttttctctgaggttcccagtggtctctattgtcatggyatttgcagcacctcccctaaccccctcttggccttctccacatgctttgggcaggtcctcatcagtctttctttataattgtacatccttatgttagtcctggaaccc

SEQ ID NO: 837741 - DNA, 539 bp, Homo sapiens
taagaaataatgtttaacatttaaattacttttatggatatgatattaagatgactgttccaaaaattgtgtgggattactaaaaatctaatacggcagcagtcataatttcagttatgttaaaatgttctatgctacagaaataaccaaattttcttttcaattgctgattataatgaattctcattagatttttaactggacatgttaagtcttttgtcatccacagtcaactatcgataatccaaaagtgctttgtgtccaaggaggttcatggaaaggatggaaaggactctgacaagtacaggtttctgacaaccttaagataattccaatggaagggtaataattcccagaatgcttaggaagaaactgactgtctttataaaactgctagcccaacatcaagccaragcaaaacttaattaaatattaacaccaaggaaatgctttggcaggtttttatattaagtcagccaatactaaaattgttaagatatgcaatttgaatgaacttcataagattgatccaaattaaa

SEQ ID NO: 837742 - DNA, 608 bp, Homo sapiens
tattaaccccttttcagatatatgatttacaaatatttttctcccattcgatgagttgtctttttactctgttgatagtgtccactgatgcccaaaakttttaatttttatgaaaccaattaatctattttttcttttgttgtctatgctttaggtgtcatatctaaaaaattgccaaggtcaatgtcatgaagatttttctcccatgttttcttctaagaatgttatagtttttgttgttacatttaggtctttggtccattttgagtgaaattttgcagatgatataaatcaaggtccaacttcactcttttgcagtggatattcagttttcccagcactatttgttgaaaagactgtcccttccttattgaacagttttggcacccctgttgaaaattatttgactatatatatgatagtttatttctgggctctctgttctattccactggtctatatgactgtctttatgccactaccacactgtttgattactgtaactttgcagtaagttttaaaatcaggaagtgtgagacctcaaacttttgttctttttcaagattattttggctattcaggatcccttgataggtcacttcttttaa

SEQ ID NO: 837743 - DNA, 511 bp, Homo sapiens
aaacaataaaggttattaaaaaacagattgagtgccccactaattctttttaatttttaacttctaagtgttttacacttttttaagggaaaatcttgtgaaccagagctctttgctttgctggctttggagggcagagccagacaactctaagagcaacagaggaaatctctgctcccctgttttctgccccagtgggactgtgcttttctgctagttggagtctggcttctaattctaggtttacataatcaagctgagtgtttctataaaacttggattccattatatgtgtagttgtcacaaactatacatgtccataatcagcaactttatggaacacttaatatctagcagtattctgactggaacctattttctagagtttaataacaattattaactaaagctgcaaagtgtagacccacaactttaacagtgattgcagattttttttwaaaaaaagtgttagcaaatgacttcaattaaaacagaaaatgaatttgccaga

SEQ ID NO: 837744 - DNA, 686 bp, Homo sapiens
tgatgggacaggcctattctcaggatccctgaatgtatacaagggcacagactatggtgggtagggcagatctatccccaggtmcccagatggcttgaaaaggcaggcagggcttcttgcccagcctcctgatgatgttcacatgtgtcattggttgcaagcagtgaagactgacttgtagctccctgaacaatgtgccctggaattggcagggctgtcctcaggctcctgatgttttgtgcaggtgaagtctgtgaagggtagggttggtctatccccaaacactcagtctatgtgtacaggggctgacaggttaggcaggtctgtcctcaggcccctggaatgtgtttgtgggcaccagtggcagcaggtggagcaaattgacctccaggcccctggacaatgcacaagagaattggcaagggtggtgtcaggctggccagtcttgtcctcaggccacccactggtgtggcaagtaccagctgtggcttgccaggtgggtcaatccccaggccccagatgccagcttcaggaaagctgggcctgttgttaggttcccggctggtgtgcatgcatgccagtggttgcagacagggcaggttaatccctaggctccaccatgacacatatgggcaatggctagggtagcacccctcaaggggtccccaggcccctcattatgtatg

SEQ ID NO: 837745 - DNA, 675 bp, Homo sapiens
tccaccatgacacatatgggcaatggctagggtagcacccctcaaggggtccccaggcccctcattrtgtatgctgtcacaagctgtggcagataggtctggtcaaaccctagttcaccagtcaatgtttgtgaatggcagcaaaatgggcagtcctgtctttaggccctacaaagtgtctgcaggtgccagtggcagaggtggtggggggtgttttgactctcaagcaccaagacaacacatgtaggcattggcagggatatcccaaggaggagtagcctgtcctcagtttttctgactgtgttcatgagcaccagctgtgacagtaagggcaggctgtttctcagattctctggaagtacaggaaggtgcacagtgttcctgctgctaggggctgggggtggggttgttgtcagtgacagtggcctcaagcaggtggctttcaggtctggagagcatgtactttggccatctttgtcctggggcagccttccccatgcactgcactgaccattccccaaggtataggacactgcatgcactagagtgctggggagctggttgcaccattgggtccagctggtgttacaacactatagcaatcttgggcgaatgtggaagatcccagctgggatccttggatctggagatgcagggactcttaggccccatgga

SEQ ID NO: 837746 - DNA, 471 bp, Homo sapiens
ccctcaggggaagtgaatgggtgccattggtagtaggtgggattgggaattcccagacctttccagatgatgtgtgcaggcaatggtaggggtggcaccagttgtggtgagcctgtcctcaggcccctaattgtacatgtgacatgggctgtgctgagtaacatttcgatccccagacctctggtctatgttcacaggtaccagcaaactgggcaggccatccttcagatccctgaaaggcatgtaaagaaacaagttgcagcaactgggatgaacatatctctagatccctggagtagggtggcccctgatgggacaggcctattctcaggatccctgaatgtakacaagggcacagactatggtgggtagggcagatctatccccaggtccccagatggcttgaaaaggcaggcagggcttcttgcccagcctcctgatgatgttcacatgtgtcattggttgcaagca

SEQ ID NO: 837747 - DNA, 471 bp, Homo sapiens
ccctcaggggaagtgaatgggtgccattggtagtaggtgggattgggaattcccagacctttccagatgatgtgtgcaggcaatggtaggggtggcaccagttgtggtgagcctgtcctcaggcccctaattgtacatgtgacatgggctgtgctgagtaacatttcgatccccagacctctggtctatgttcacaggtaccagcaaactgggcaggccatccttcagatccctgaaaggcatgtaaagaaacaagttgcagcaactgggatgaacatatctctagatccctggagtagggtggcccctgatgggacaggcctattctcaggatccctgaatgtatacaagggcacagactatggtgggtagggcagatctatccccaggtmcccagatggcttgaaaaggcaggcagggcttcttgcccagcctcctgatgatgttcacatgtgtcattggttgcaagca

SEQ ID NO: 837748 - DNA, 620 bp, Homo sapiens
gatttttattttgtctttaggaatttaaagatgttgctccattgtcttttggcttgtgttgtttctgagcaggaatctgttgtcatccttattatctaktaggtatccctactccccctggctgcttttaagatcgattttgcgggatgaagtgtctcacacttgtaatcccagcactttgggagggtgagccaggtgggatcaggtcaggagttcaagaccagactggcaggaggtcaggagttcgagactagcctggcaaacatggtgaaacctcatctgttctaaaaatacaaaaattagccaggcatggtggtaaatacctgtagtcctagctgctcaggaggctgaggtaggagaatctcttgaacccaggaggcagaggttccagtaagccaagattgagccactggactccagcctgggcgatagagagggactccatctccaaaaaaaaaagaaagaatgattttaagtactttaattataaggaaacattttccttatgtttctatttcaacgtataattccatttatacaatattttaatcatgccacaacaatgcagttaaaaaaagagacaaaaataaaataaaaggaatatacaaagcaatagagac

SEQ ID NO: 837749 - DNA, 604 bp, Homo sapiens
gtgaaatacttttagactatataatttctggcttcctctaatttctagccactaattttagcatccagtggtggatatttttaaatacatttactactatgaaatttttctagtgatgataatttyctgttgttggcaatggtaccatatttatgtaagatgttaacatttgtgaagtgaggtaaacagtttaaggtctttgtactattgttgcaacttttccgaagtctaaaaccttccctaaaataaatatgaaatttatatactgagctgatcattataaaacatctacatgcattgaaacatcacactgtactccataagaatgtgccattattatgtagcaattataaataaaattaattttaaaacagtaaaaaaaagtgattttatttggaattatattgaattcacaggttaatttttttgttaatttgaggacaaataatatcataacttagctgccaaccaacacctatccagtagtatgacctgaccaccttttatgagtaaagtgtttcatgaataagaacatgatacattttgcccaatgtttcttccttgtaaatgaagtgagaatttagttttaaaaatcttatttaat

SEQ ID NO: 837750 - DNA, 527 bp, Homo sapiens
gcttgagaggtcaattctgcagtgagccrtgattgtgccactgcactccagcatggacaacagagtaagataccatcttaaaaaaaaaaaaaagaaaaaaaaagttgtgtacccatacaatagaatactatcaagcaacagaaagcaatggactactgatagatgcaaaaatatggctgaacttcaaaaatattaggctacctggaagaaaccaataaaaaagcctacatattatatgtcaccattgatataaaatattcagaaaaggcaaattcttggagctgaaaagcatatcaatgatggccaaagggtgagagtaggggtgggaattatctttttggggagatggcagtgttctaaaattggattctggtgataattgcataactctgtaatatttacgaaaaatcattgaattgtacttttgcagtgagtgatgattttgcatgtcagttaaaatctcaataaaggtgttgaaaattgacaaaggcacatgatagtttcaagattggggtgcttaatgtaat

SEQ ID NO: 837751 - DNA, 635 bp, Homo sapiens
ttctgtaagtagtggctgtttcttaacatctatttctatatcctgtagcactctctgtacttcctactggttctgttacagtaaataatcctttacactaaacattctctgctcaaattactgcatgatttctctttcctgactggacccagatttatataatcctgaaaaccagaaagactacacacaagccaccgaaataaagacagcagttgagcaataaaattaactaaaatacaacagatactgatacttggctaaagcatccacaacctcctcaatttaacttaaattactatatcccacaaacattctctcatccttttaactttaacttctaagtattggggggcggggaggatatcttcgcttcttggcaaaattttaaacacctgtcaccacattttctgtgttaagagagctgtcacaatgatcagagaggggaagttagacgccagccctgactaagagtactgagggtggcagttaccaattctgccatcttcaagttcctgcctaggacaatatatcatacaaacttttagacagraggatgccttagtggcttcatctactgcagtcggcttgaaaagaacttgttaactgaagcacatgttctttctggtgcccttgct

SEQ ID NO: 837752 - DNA, 608 bp, Homo sapiens
tatatatatagcttcagaaaccttaaatgatctgtagaaataacctgataaactagctacagaggctaaataggtagtacagtttacacaattaacagtgtgtatttacagcccccttgsatctaaaggaatcaaagaacattcactatataattacctggtatcccaccaccaccttcttctcttgttaaagattctgacttttaccattcattccatgtacttgttattcaacagaattctgactgacatttttaatatgcacgaatatattgtttctgtttatacataagtctgaaagcattcataccaaactgttaaaaaaccattaccccagcaaaccatgaggagcagacacagatgatgggggcctgcttgtttaactccatttaatttagtaatttaaatcttatttctgaatatacaataatttttcaataaaaagattaataaccacatacaatattgtaagccacaacatttccttctagatgacacaaagggatctaaattcatcccctgaataggtttcctacgttaaatatactagcataggccatagatccagacaccaaactccagataccacgtatcatttctaaacactg

SEQ ID NO: 837753 - DNA, 643 bp, Homo sapiens
gaattctggattgttatctaggctctatgaagaattcctatctgttaataagaaaaaagaccaagatcaacaacctcatagacaagtggataaagaagatgaccagttagtccacagaaaagaaaaygcaaatggaagtgggagggcccagaggaactcttgctttatctaaattgtgttgattacgggagcatatgcttatattaattttataggtaaaaaaacagaaaaagtacctgaagattaaacccaagcaatgcgatgtgtcagttttgacaacacacaggaaggggctctcagcctgtaaaataggagcccttttgtgtgaagctgaccagatgcggagaagtttcaacagtcctagagaagaggaccgcaggggacagagagccagggaacagggcagggaggatctaagagggcacccggccaagcggttcactgcagctggtgcagggctcagctataccctggggctgggcgcttagcacagtgtggtcagatgaaggcaagcaagcagtggcagggactctccatttgagtcaaagtgacaagcagtgcccccagtccctgggaaggatgaaatccaaatttaattcccttctgaacaacattctacaatctatgcttcatttaggtatct

SEQ ID NO: 837754 - DNA, 607 bp, Homo sapiens
ggaagtttcacagatgctagttcatttagattggatatgcctcctggaccagtgtgctgtccrttatggaaaatcaaaacagccattgcatttccatagtgttcacaaggagcctcatttctgggctcaggcaggctgaggcgttccagggttgagaatcagacttggtgactgagcaggaactgttgtcctttttctcttttgagatatgaaatttgcttcacatctcagaagagtgtgtgcctccatcccacacttgggacaagcgccgttattccttttttaaaacatctgtagaacatattaaatgctctgctttcttcacgggttaaatcatgctggggcgggaggcttgtggtgtaagagcggtgcactgtgcatccactagggctctcccgtcattccagttggtctccttgccacgccccagctcgctgcccccaggctgtcttggacagacacatttgtgttttgtaatagagcacatcatgcactattatatggggatattttataaaggagcccacgtgacacaaggaaactaggagaaaacaatcctagaaatccccaaagcttggaagcagggacatgcaagcgaggtacagca

SEQ ID NO: 837755 - DNA, 529 bp, Homo sapiens
atgctagcaatagcagacagattataataggagagagactatataataatcaaggcaccaaccgactcagaagctgtcacaggcccaartgtatatgtatgtgtctaacatacacgcacctcaaaatatagtaagcaaattgacagaactacaagtctaagattacaacccatttaacttgatcaaaagttgataaatcaagcaatttaaaaagtactaggttataaaagatttgaaaaacaaaagtaacaagcattatctaatgggtgtgtgtgtgtaaaactttgcggccaaacataaatggtcatcatagatcatttaaaaacagttggtgatatacagattatttaaaaatttgaccacatactaggtcacaaagaactcaacaaatatctagaatcatcaaataacacagatcatattctctaaacacaacccaattaaattagaagtcaatactaaaatacagtctcaaactcatatatgtgggaactaaaaaattcactccctagtaactaataggctgaag

SEQ ID NO: 837756 - DNA, 591 bp, Homo sapiens
atctgaatggaaccctcctctctgtcaaggrcattccaaagtttacctgaaaaagaagttcaggccatgatgggaaggcagagctggacaaacctggtaataccctcctcctttctggagttactaacagaacagactctaaatctgataagaaacatttacaatctagtctgtctgaagcctgctacctggaggcttcatttgcatgacaaaatcttggtttccacaacctcttatcataacccagatattcctttctattgatagtaactctttcaaccaattaccaatcagaaaacctttgaatccgcctatgatatggaaacccccacttccacttgtcccaccttcctggactgaaccaatatacatcttccatgtattgattgatgccttatgtctccctaaaatatgtcacaccaagttgttacccaaccactttgggcccatgttctcaggatctcctaaatgctgtgtcatgggccattggccactcatatttggctcagaataaatctcttcaaatattttacatagtataactctttttcattgacagagacttactagttcctgatccttaaagaaatt

SEQ ID NO: 837757 - DNA, 478 bp, Homo sapiens
tctatccatggtgttgcacatggcagtggtttgtttattgttgtgtgcattcagctttactaatattgcacaatatgtttatctgttctgctgttggctgacattcaggttcttccaagcttgggtccattatgagtaatgccattataaactttctttctttctttttggagatggagccttgctcttgtcacccaggctggagtgcaatggcacaatctcagctcactgcaacctccacctcctgggttcaagcaattctccctgcctcggcctcccaagaagctgggattacaggtccccaccaccacgcctggctaatttttttttagtagatacggggttttgccatgttggccaggctggtctcgaactcctgacctcaggtgatctgcytgcctcggcctcccaaagtgctggaattgcaggcatgagccactgttcccggccctgaactttcttgtccttacctttcggt

SEQ ID NO: 837758 - DNA, 478 bp, Homo sapiens
tctatccatggtgttgcacatggcagtggtttgtttattgttgtgtgcattcagctttactaatattgcacaatatgtttatctgttctgctgttggctgacattcaggttcttccaagcttgggtccattatgagtaatgccattataaactttctttctttctttttggagatggagccttgctcttgtcacccaggctggagtgcaatggcacaatctcagctcactgcaacctccacctcctgggttcaagcaattctccctgcctcggcctcccaagaagctgggattacaggtccccaccaccacgcctggctaatttttttttagtagatacggggttttgccatgttggccaggctggtctcgaactcctgacctcaggtgatctgcttgcctcrgcctcccaaagtgctggaattgcaggcatgagccactgttcccggccctgaactttcttgtccttacctttcggt

SEQ ID NO: 837759 - DNA, 581 bp, Homo sapiens
  misc_feature 474: n = A,T,C or G
tattacataaagataaatttgcaaaagtaatttactcaaggattatttacactttgatgagtggatctggatattttgatactaagtgaaagtggttcccctataattataagggaacaaatatctgcaagtattatttaaaacaatgtatataagccgggcacggtggctcatgcctcacctcaggtgatccacccgcctcggcttcccaaagtgctgggattacagtcatgttaagtgttactctaattatatcaataatttaaacctcaaaagagattcattatgtatacaaaattaatcttgtgtaattaaatttaaaagtataattaatggaataaatcaaaaaacacaaggtggctcacacctgtaatctcattgcttttggaagtctaggtgtgaggatcccttgacctaaggagtttgagaccagtcaagcaacacagtgggaccccatctctataaaaaaattanctgggtatggtggtccgtgcctgtagtcctagccasttgagaggccgaggcaaaagtatcgcttgagcctaggagttggagtctgctgtgagctatgatcacaccac

SEQ ID NO: 837760 - DNA, 488 bp, Homo sapiens
tggttaagcaggaaatttacagagatttttttctttgctgtaaatgtttttctaaattgaaaaacttctaatactgtcttctggagtagtcctakaaataagtgcaagtgtttttggcaggaggccacataaacatttctgcttctctgtgccttatgggtagcattgatataaattgttaaaaataatgattgtagataatgtatcagagtttgggctcagccgcggtagctgctgttgacccagagggaccactgggatcctcacatctcagggcagcacatcgtttgcagcaatggttgcttctatgcaaccttttatgaaattaggtgaggcccttgcttagaattttttaaaagcttaatatgagtttatatctctttaaatatcagtttctaatatttttttaaaggcctatgtttacaacaaatttgggagatacctatatgctctactaactagtgttcttttgtggtgctttagaaatt

SEQ ID NO: 837761 - DNA, 649 bp, Homo sapiens
atttaaaatatcactgggtagagaaaaaattaaaattaatatttatatctcttgagtcacttaaaaatacagaggaatgtttctattcataatctacagtaaacatctaaaaatmtctttatctcatctctctctcactatctcacttgtagtatagctgacaccaaaatcttcttcctctttctctcttaactttctaaaattatctttcaaaactttatttttgctgtatctctttttttactgtatctttttttatcttctatcctctctcactcttcagatgtctcaggtttcaaatttggatcctttcaatttattgaatctattaattattctaattattctcaacaaagtttcagagacagaagtgaaaaataaagaaagaacagaggagatagatatatcttgcatgtcagtctaaagagtggtcgttcctctgttgtatggtggtaggatattaaaggtttatgagaaatgtcatgataaaagcagtattcagtgaaggctaagtgggcgatattctgcagaataaattgtaggaaaggaaagaaatttgagagtaaaagttctgttataaggccactatatggacctaagattgagataatgaatactgatttggggtgtaggcagtaagaattgaaaa

SEQ ID NO: 837762 - DNA, 545 bp, Homo sapiens
tcatatctaattaaataagcatcattatcaaatctgacactctaggcaaggccttggttgcataactaattatttaaattatgttctcrtaatagaaagtacagattcttactgggcctatgcagatgcttatgtctctctgaaaataagaacattcatctggcagagataaaaggatatcatttacaaatgttttatttctatttacaaaagcatggtctatgatatggtttggctgtgtccccactgaaatctcatcttgaactgtagctccccagatccccacctgttatgggagggaccccgtaggaggtaattgaatcatagggccaggttttcccatgctgttcttgtgatagtgactgagtctcatgagatctgatagtattttacaggggagttcttctgcacatgctttcttgcctgttgccaggtaagacatgcctttgctcctccttcaccttctgccatgattgtgaggcctccccagtcacctgcaactatgagtccattaaaactccttttctttgtaatacctagtctct

SEQ ID NO: 837763 - DNA, 504 bp, Homo sapiens
aaaataaatgaaaaacattatgtcattataatggttmtcttttcagcctttcctttaaaatttgttagcctccagataacagaagtttctgttgcaaaaagaaaataataattccatttatatgtgtgtatatgtacatgtgcacacacatacatatataatcatcaatattccaaagtttcatcatcttctcatgacccttgacaactcagccaattcctctagcagcttgaaaacaagaaatgcagcatctctggtgtaagccatcaaaattagaattcaactctaggagcagtccatgtgagaacccacaactaaggacatatgtcagcgagacagtagacaggaatgattattccatctaaattacccccaggagactagaggtagcagcagaaggatccacctaattttaatgcagaaatgaagggagagaacttagtataacctcctgaagctgaacagaaatctccaatatgcttcaggaatgtcccagaccagctc

SEQ ID NO: 837764 - DNA, 504 bp, Homo sapiens
aaaataaatgaaaaacattatgtcattataatggttatcttttcagcctttcctttaaaatttrttagcctccagataacagaagtttctgttgcaaaaagaaaataataattccatttatatgtgtgtatatgtacatgtgcacacacatacatatataatcatcaatattccaaagtttcatcatcttctcatgacccttgacaactcagccaattcctctagcagcttgaaaacaagaaatgcagcatctctggtgtaagccatcaaaattagaattcaactctaggagcagtccatgtgagaacccacaactaaggacatatgtcagcgagacagtagacaggaatgattattccatctaaattacccccaggagactagaggtagcagcagaaggatccacctaattttaatgcagaaatgaagggagagaacttagtataacctcctgaagctgaacagaaatctccaatatgcttcaggaatgtcccagaccagctc

SEQ ID NO: 837765 - DNA, 487 bp, Homo sapiens
gctaagtgaatttttaacttttctcagcatacattggttatttctgttcctgagcctcataaaaatggaacctatagtaagcaaacttttgtttccggtttctgcccctcagcatattatttttgaggccaggtaatttttaggcatggtggactttgaaaaccaaatctttctaaagcagaaattgtcataagaaagtctaatattggaattcttctgaggtgatggagttgtctcaagttatctcattttaagggtgttttgcctttgaggcaggtccgttacatggttgccagataggctgttaagttgaactcttctgcaccaaggatttcactcttggagttgaaaccagcttaagaaatcarctactgagttttcattgtcatattttcaccgtttctaaagttacgtttgtcttcaatttgaaattccgtgagaggaatttttaaaacaccacaatgacaaccagtcaaaatttcagtta

SEQ ID NO: 837766 - DNA, 487 bp, Homo sapiens
gctaagtgaatttttaacttttctcagcatacattggttatttctgttcctgagcctcataaaaatggaacctatagtaagcaaacttttgtttccggtttctgcccctcagcatattatttttgaggccaggtaatttttaggcatggtggactttgaaaaccaaatctttctaaagcagaaattgtcataagaaagtctaatattggaattcttctgaggtgatggagttgtctcaagttatctcattttaagggtgttttgcctttgaggcaggtccgttacatggttgccagataggctgttaagttgaactcttctgcaccaaggatttcactcttggagttgaaaccagcttaagaaatcaactactgagttttcattgtcatattttcaccgtttctaaagttacgtttgtcttcaatttgaaattcygtgagaggaatttttaaaacaccacaatgacaaccagtcaaaatttcagtta

SEQ ID NO: 837767 - DNA, 504 bp, Homo sapiens
tctgcattttcataaacaattgacacccaagcaactatgaatgtgaattaataatagactttccataagctacaattctaataagtacatacttcttagaatatgtaaaattaaaaagaytaaccacaccacgtgttggtgagggtgtggaggaactagaacttcctttcactgctgatgggaatgtaaaatggtgcagccaccttggaaaacagcttgtcagtttcttaaaaaattaaacatatatttactatatgtgtgatctagccattcaattcctagatattttccaaagagatagaaaaatatattcatacaaagacttgaacatgaatcttcatggtaatgttaattgtaatagaccaagactggaagcaacccaagtatcatgaacagccaaatggatactgaaattttggtctatccatagcatggaatactgctcagcaatgataagcaatggcctactgacatacacaacatggctatgtctctaactctgca

SEQ ID NO: 837768 - DNA, 432 bp, Homo sapiens
acacaaggaataaaagaaaacttcttcaaccagacagaaggcatctacaaatacctacatctaacagcacatttaacgagaaatatctgaatattttctgtttatattcaggaamaaggcaaaatgtctgctttcaccaattttattcaactttgtgttgaagtcatagcacaaatatgacaagaaaaaaagagcagattcttggaaaaaaaaagaattgtattcattcacagatgatatgactatgaacctagaaaatcttaaggaaactccaaaataacctataacaaataattttgcaaattttcagattacgtaaatacaaaacctgttttttatactaatagtgaacattccgaaaagttccattcacagtgcataaaaagtaaaatacttaaaaataaatttaaatatgaatatgcactggttcct

SEQ ID NO: 837769 - DNA, 591 bp, Homo sapiens
  misc_feature 569, 570, 571, 572, 573, 574, 575, 576, 577, 578, 579, 580,581, 582, 583, 584, 585, 586, 587, 588, 589, 590, 591: n = A,T,C or G
ttcatctcacagagttaatcctttatcatgattcagaaaattggaaacactctttttatagactctatgaggggacattttggagaaaattgagatatatagtgaaaaaccaaatgtcgtgtgacaaaaactagaaacaagctatctgcgaaaatgctttgcaatgtgaggattcatctcacagagttaaacctttgttttgatttagcaggccagaatcacactttttgtagaatctacgaagggaaattttgtagccaattgaggcctacagtgaaaaactgaatatcctgtgataaaactagaaacaagctatcggtgaaaatgatatgtgatgggtgtattcatctctcagagttaaacatttgttttgattgagcagattaaagactctttttgtagaatctacaaagggacattttggagctcacggaccagcacagcgaaaagccaaatatcccatgacataaaatagaaaaaagctatctgcaaaaatactttgcagcatgtggattcatctcacagagttaracctttgttttgattgtggaaatgctttgtgatgtatnnnnnnnnnnnnnnnnnnnnnnn

SEQ ID NO: 837770 - DNA, 496 bp, Homo sapiens
ggatgtgtgcattcatttcatggagttgaacytttcttttgatcaagcagtttggaaacagtttttttgtagaatctgcaaaaggatatttggtgggatttgaggcctactctgagaaaggaaatatcttcacataaaaactagacggaggccttctaagaaacttccttatgatgtgtacattcatctcacagagttgaaactttcttatgattaatcagtttggaaacactgtttttgtagaatccacagatggatacaagtaagccctctgaggcctatggtgaaaaaggaaatatctgcaaataaaaactagacagaagattcctgagaaacttctttgtgatgtgtgcattcatatcacagagctgaatctttccttagattgagcacttttgaaattgtctttttgtatattctgtgcagggatatttgttagcagttaaagtcctttggcaagaaatgaaatatattcacataaaaaccacacagaagc

SEQ ID NO: 837771 - DNA, 496 bp, Homo sapiens
ggatgtgtgcattcatttcatggagttgaacttttcttttgatcaagcagtttggaaacagtttttttgtagaatctgcaaaaggatatttggtgggatttgaggcctactctgagaaaggaaatatcttcacataaaaactagacggaggccttctaagaaacttccttatgatgtgtacattcatctcacagagttgaaactttcttatgattaatcagtttggaaacactgtttttgtagaatccacagatggatacaagtaagccctctgaggcctatggtgaaaaaggaaatatctgcaaataaaaactagacagaagattcctgagaaacttctttgtgatgtgtgcattcatatcacagagctgaatctttccttagattgagcacttttgaaattgtctttttgtatattctgtgcrgggatatttgttagcagttaaagtcctttggcaagaaatgaaatatattcacataaaaaccacacagaagc

SEQ ID NO: 837772 - DNA, 695 bp, Homo sapiens
tttactctatatgtgttttgtattatgtgaataatttaatactaaataataatattccttctatgtattagcaaatcttgaattttgagagttctaagaagcagacatacagcacagttatcaggctagctgtgagttagataccctgagttttgaggtcaagtagaatagtgaaaaatattttgcaattaaagcaaatacagcattgtggggttgttggtttttttctctttttttttgtcattttaaaaagttttgtactaggtgttaacatttgagcagaaagtttcatattatttttcattagttaaaagcagtttttgcaatggataattgctaaacttgaccagaaacagtctttatcaccagagggaatactatataatgaaaacaatcttgtaatttttaagtcaaaaaaagaccattaaaatttttgtctaattgttatgctgaattttttcctcaatatattcataatgtcatcaaaaatattttattaataaagcactgaactagtggctatcacaactaattttgttaaaatagtgacataacatttaatttacatattatttrtttggcaggtcctgtaatgttttattgagttgtttgttacatatctcatgaattataatttataccttgccaactcagcaagggcaaagaactttagttttctctgattctcccaaact

SEQ ID NO: 837773 - DNA, 585 bp, Homo sapiens
cctgcaatggactgttactcagctatgaaaaagaatgaactactaatacacacaatgacagataaatctcaaaatctcaaaggcatttgctaagtgaataaagccagtctcaaaaggttatatgctgygtttccacttacatgacattttgcaaaggcaaagctagcagcagagaccagatcagtggttgctgggggctacaaaagggaggtaggaatgactacaaaggaggatcacaagggagtttttttggtgaataacattctgcatagttttagtataaatgaattttatcatgatctactcttctgaatattacccataaaatataccatatatgatgagagaaaatgagtatatgtgtctgagaaatagaaatagtctccatgagtgttaaaaataatccaaaataataatcatattttatttattatttattatatgtatacattaatatatacattttacatatttattttccccaattatactggacttcatgtaatgatgaatttggttttagttcctgagtttgatttggatgagtgttgcagtggggagcaggggaggtgtgagcttggggtg

SEQ ID NO: 837774 - DNA, 614 bp, Homo sapiens
cacttttttttattttagggatcatttctgaataatttgttaacttatcaaagtcacaattcaaaacagatttactctaccagtctatttaggcattcatttatgatttatatcccacctratcccaaaaagaatttgaggtggttatgagctattaattagtaattaatatttatagttttgaaagcactttatattagaccattgattctaatcaattacttattagagcatacattagtctgaatagttgttatagtactgtgtaataaatgtgcttttagcagtaaaaatctaaatccggaagtgggagttcattacagagaacagtgcaagagcagcccagatgtacaccagcaactccaggagagcagatgagtaatggatacttcaagtcatgtcagcaacagaatctgtggaagaactctggagaagcgaagataccggatattggtgacctgggaggatttaggaagcagtaaggaaaagtgaacttcgaaaaaaatctaagctatgtggcatgttacacctgagaaagagaaaaaaaataccaccaaaaataaaaagacagcatttgaaagtatgaaagcaaacagaatgagtaacaaagcttc

SEQ ID NO: 837775 - DNA, 480 bp, Homo sapiens
tgaagaagaaaagggagcaaaggaggaatccattttgcagacttctctgggtaggtggaggaacacttgatctcgtcttgtctttggcctgcccctgggaggacaagcttgtaaaggacattatcagcayagaatggaacagactctcattttaggagctggacttacattgcacacctaaatttatgattggcatgtccttgtttatgggaggccagcaaagaatgtactgatgaaagatctgtgggagcacttgcagacggctgtggcctccacctttctgtggggacctggctgatgtatcctattcatgacagctgtccatacggatgcagcgttgcatgattctcactccaggcttaatcttccctttggcataagaagtttgggcatcctgtgatttttacgcccacagccacttttttttttttttttttttgagacggagtctcgctctgtcaccaggctggagtgaagtgg

SEQ ID NO: 837776 - DNA, 585 bp, Homo sapiens
aagatcactagaacctggtaagcgatagctccccttcccctcccayttaaaatgagagttttcaaggagattgggtccagggtggctgtgagcactaaaattctggagcaaggtgaaaaatagaccccacttctccttccatgctaagccactgattcattaaagaaacacagggaaggagcctatactcaaaattagcatctccagtggaaacatggcttgagaattatgcgtccttacggaccagagaccaggcctccaagaattctcccaggaaacaaatgtccagcaggaccatggctgggctgtcacgtccagaagccaccaggccacagcaggggccccggcaggcaggccaccgtcggaagccggcaggccaccgtcggaagccaccagaccacagcaggggccccggcaggcaggccacggtccagaagccaccaggccacagcaggggccccggcagacaggccacggtccagaagccaccaggccacagcaggggccctggcaggcaggccacggtccggaagccaccaggccacaggaggggccccggcaggcaggccacggtcggaagccacc

SEQ ID NO: 837777 - DNA, 585 bp, Homo sapiens
aagatcactagaacctggtaagcgatagctccccttcccctcccatttaaaatgagagttttcaaggagattgggtccagggtggctgtgagcactaaaattctggagcaaggtgaaaaatagaccccacttctccttccatgctaagccactgattcattaaagaaacacagggaaggagcctatactcaaaattagcatctccagtggaaacatggcttgagaattatgcgtccttacggaccagagaccaggcctccaagaattctcccaggaaacaaatgtccagcaggaccatggctgggctgtcacgtccagaagccaccaggccacagcaggggccccggcaggcaggccaccgtcggaagccggcaggccaccgtcggaagccaccagaccacagcaggggccccggcaggcaggccacggtccagaagccaccaggccacagcaggggccccggcagrcaggccacggtccagaagccaccaggccacagcaggggccctggcaggcaggccacggtccggaagccaccaggccacaggaggggccccggcaggcaggccacggtcggaagccacc

SEQ ID NO: 837778 - DNA, 585 bp, Homo sapiens
aagatcactagaacctggtaagcgatagctccccttcccctcccatttaaaatgagagttttcaaggagattgggtccagggtggctgtgagcactaaaattctggagcaaggtgaaaaatagaccccacttctccttccatgctaagccactgattcattaaagaaacacagggaaggagcctatactcaaaattagcatctccagtggaaacatggcttgagaattatgcgtccttacggaccagagaccaggcctccaagaattctcccaggaaacaaatgtccagcaggaccatggctgggctgtcacgtccagaagccaccaggccacagcaggggccccggcaggcaggccaccgtcggaagccggcaggccaccgtcggaagccaccagaccacagcaggggccccggcaggcaggccacggtccagaagccaccaggccacagcaggggccccggcagacaggccacggtccagaagccaccaggccacagcaggggccctggcaggcaggccacggtccrgaagccaccaggccacaggaggggccccggcaggcaggccacggtcggaagccacc

SEQ ID NO: 837779 - DNA, 544 bp, Homo sapiens
ttgagagcagctttggaagacacagaaggtttaagttctgagatagctccataacccccaccagagagggaggctttctacaatactccattcttascccacagactaggacatgaagatctgatatgatttggctgtgtccccacccaaatctcatctggaatcatagtttccataatccccacgtgttttgggagggagcaggtggagataattgaatcatgggggcagtttcccccaccctgttctcatgatagtgagttagttctcacaagacctgatggttttcaggggcttccgccttcacttggctctcattctgtctcctgccgccatgtgaagaaggatgtgtttgcccccccttctgccatgattgtaagtttcctgaagcctccccagacatgctgaattgtgagtcagttaaacctctttcctttataaatgagccaggctcacgtgtgtctttattagcagcatgagaacaaacaaatacagaatcccaatgaaaatgcagcaatatcagaaacatgcacacattcaagac

SEQ ID NO: 837780 - DNA, 583 bp, Homo sapiens
agatcagcggacaaagagcaggaaaagcagaaaacaagtccctaagaaaggtcaaaggcaaattgagacaagaaggcaactgtagccaggggcggtggttcacgcctgcaatcccagcactttgggaggcagaagcgggcggacagcttgtgcccaggagttctagaccaacctagtcaacatagtgagaccctgtctctattaaagaaagaaagaaaaagtacaatacaaaattgaggccgggcgtagtggcttatgcctgtaatcccagcactttgggaggctgaggcgggtggatcgcttgagatcaggagttcgagaccagcctggtcaacatggtgaaacccctgtctctactaaaaatacaaaaatcacctaggtgtggtggcgcatgcctgtagtcccagctactcggtaggctgaggcggaagaaccgcttgaacctgggaggcggaggttgcagtgagccgagattgcaccactgcactccagccggggcgacagagcaagaytttgtcttaaaaaaaaaaaaaattatatgcagataacagccctgcatagatgaggatgcataggacctggg

SEQ ID NO: 837781 - DNA, 769 bp, Homo sapiens
acagtcccagccctgggggagctcatggtccaccaacggcattcttcctgactctaggggactctccgaccacttctgcaaagaagcaggacagggctgggtgctcccactgccatcttctttccccacctccctttattcattttctaaaccatcaatccccagagcaggtgctggacctgcagccggtgcccataaacactcagctgatttaagggggaacaaggtgggtgctgtgctggaagaagggggagagaagagttgagaaaagggcacgaggaaggtggtctcgaggactggagtgctacccccatgcggtcttcactccaaaagatggcacagtgtggggggcctacttggtgccaacagccgggctacctccgagacaaagcctggcacccgagaggaaggggagctactggcagggaaccccatgcactcttgtcccttggagaccccagaagatctcaaagaaaggggcagagccacagtcttccaaggcttctgtagggtctttcgtgcatgagagaaaactcaggcacaacctctgtgaacaacccctacagggactcaggggctgggagagacaccaactgccaccccttggaggttgtgcccagaggtgggggctgaagacccactggctctttgaagtggaattttcaaaaaatttctttatactgaagttcacaaatctgtaatctcgcctgggataatggggtaggggtcagggcaggagaggatcckagttcttgagactccatcgggc

SEQ ID NO: 837782 - DNA, 594 bp, Homo sapiens
tttcagtcatcacatcctatactttatccctaggtggcatacctggatacatattacttctgaggtgagtactgattctccctattctaattttaacacaagacacaatcatctcgagcaatgatttaaatttttttctgtggagtctatgattcctcttagttttttcaagaaacttgtcccacatccttgtttcacttttatatatatcgcactttgggtatttatacaaaaatgtggctgaatagaagttttcttagttaaaaatgtttgcaaactattggtctaggaagcaatgttagtttctacatcactagagttgcttaataaatacagtatcctacttctaacgctggtgataataataattagcataggtaacatgcattttagattaaatatagtttcaccaagtcatgggaaatagaatttataaaatatttaaggctcatctaatacaacaatgttagaatttattttatttatatatatatatatatatatatatatatatrgctttatctgtatatttttgccatgactggaattgtctgtggaggatttcatggctttgggtaaattgaggctcctaat

SEQ ID NO: 837783 - DNA, 616 bp, Homo sapiens
tatgtgttatgcatatatgtatgaacaagaatacatctctaaaccttataaatattccactgttctatataaaagagtcaactgacgtaaaaagttgactcattttactggtctttaaaataggggcttaataactctgaaacttatgatttctcatatactttgacttcaaaacttcacttgtaggaatttatcctacagatatgaccacacagaaaatgacatataacatattaagaacattttctaatatgaaataattagatataagctaaatagttaacgatatagaactagttacatatattatgaacaacagaataccctgctaccataagcaaaatgaggacttttattaatataaagtatatacagaagataaaaaggtagagtgcagtaatactggtatgcttacatttatattaaaagagaaaatattatgtatttaattaaaaatgcatattaaggctgggcgcggtggttcacgcctgtaatcccagcactttgggaggccgaggcgggcggatcaggaggtcaggaratcgagaccatgctggctaacacggtgaaaccctgtctctactaaaaatacaaaacaattagccgggcgttgtgg

SEQ ID NO: 837784 - DNA, 514 bp, Homo sapiens
tctataaggaaaatattattagagctaaagagagagttagacaccaatacaataacagctggagacttcaatgcctcactttcagcattgagcagatctcccagaaagaaaatcaacaaagaaatattggacttaatctgcactatagaataaatggacctagtagatatttacagaacattttatcaaagggctgcagaatacacattattttcttcaaaacatggttcattctcaaggatagattagatggtaggtcacaaaacaagtctcaaaacattctaaaattaaaataatatcaagcatcttctctgtccacaatggagtaaaagtagaaatccacacagctacagttaacctatttttgacaaagatgctctattagttcattttcacactgctgataaaaacataccagagactgggtaatttatacaggaaagggtttaatggacttacagttccrcatggccggggagcgtcataatcatggcagaaggcaaggagaagcaag

SEQ ID NO: 837785 - DNA, 523 bp, Homo sapiens
ccggactatagacacgggtgtcaggctttctgggaaagggctctctaacaacccccgactcttcagagttgggactgttggtttgcctagaaccagcttccacttttcctgtactactgggctgagcygagggtcaatagagaggaaagccatgcagctccggggtcccaacaacatgttggttgaccctgtggccatgagtggaactctcaaaggcatgtcgcccaagcgagactctcccatctatcctatctatcctgacctttgccccctgggtcctaatgcctgccagacaaacttccactcgcctctcttctttgaggttagacctgcttctaaaaattgctacctgtctctggtgcttttctagtttctcctataagaatgatttctagtataaactccaggactctgttaccttctttaggcacctgggctcaccaatcagaaagacataatttttgcccaaagccccgtcataccggggactacctggaatttaggatcccttctcagactaata

SEQ ID NO: 837786 - DNA, 619 bp, Homo sapiens
tgctttatacccaagcatgggaaatcactaggaatttccatacttcggcagtgattcagaaagaagacaggggtaggggcaggtaaaatgtaaaactaatccctttcattgaaaatagccattttgtttttattcattctaaagtttgctctcttagattagatcctctagtaacagttcttcatctcccagtgctgctctcttagacttgtagcaaaatattaaacctttgtacaggtgcttctcaacttacagtgagattatatcccaacaaactcatcctacattgaaaattttgtaaggttaaaatgcacttaacacatctaacctaccaaatgtcatagcctagcctaaccttaaacgtgctcggaacagcactacacttaggttacacttagcctacacttgggcaaaatcatctcacatgaagtctattttatgataaagtactgaatatcttatgtaatttattaatactgtactgaaagtgaaaaacraaatggttgtatttgtactaaaatatggtttctactgaatgtgtattgccttcacatcaccttgaagtaaaaaaaaatttaagtgaaacaattgtaagtcagggaccatctggatgggattt

SEQ ID NO: 837787 - DNA, 619 bp, Homo sapiens
tgctttatacccaagcatgggaaatcactaggaatttccatacttcggcagtgattcagaaagaagacaggggtaggggcaggtaaaatgtaaaactaatccctttcattgaaaatagccattttgtttttattcattctaaagtttgctctcttagattagatcctctagtaacagttcttcatctcccagtgctgctctcttagacttgtagcaaaatattaaacctttgtacaggtgcttctcaacttacagtgagattatatcccaacaaactcatcctacattgaaaattttgtaaggttaaaatgcacttaacacatctaacctaccaaatgtcatagcctagcctaaccttaaacgtgctcggaacagcactacacttaggttacacttagcctacacttgggcaaaatcatctcacatgaagtctattttatgataaagtactgaatatcttatgtaatttattaatactgtactgaaagtgaaaaacaaaatggttgtatttgtactaaaatatggtttctactgaatgtgtattgccttcacatcaccttgaagtaaaaaaaawtttaagtgaaacaattgtaagtcagggaccatctggatgggattt

SEQ ID NO: 837788 - DNA, 653 bp, Homo sapiens
tgtttcataattgcccaatcaaaagaaagtttcaactctgtgagatgaattcacacatcagaaaatagtttctcagaatgcttctgtgtagtttttatgtgaagatatttccttttccaccatagsctgcaaagggctccaaatatccacctacagatgctacaaaaagagagtttcaaaacttctccatcaaaagaaagattcaactctgtgagttgaatgcacacatcacaaagaagtttctcagaatgcttctttgtagtttttatatggagatatttccttttccacgattggcctcaaagtgctccaaatatccacttgcagatgctacaaaagagtgtttcaaaacagctcaatcaaaacaaaagttcaactctgtgagatgaatgcatacatcaaaaagaagtttctcagaatgcttctgtgtagtttttatgcaaagatatttccttttccacaataggcctcaaagcacttcaaatatctacttgcagattcttcaaaaagagtgtttcaaaacggctcaatcaaaagaaatgttcaattctgtgagatgaatgcacacgtcacacagaagtttctcagaatgcttccgtgtagtttttatttgaagatatttcctttacaaaaataggccacaaagggatcca

SEQ ID NO: 837789 - DNA, 560 bp, Homo sapiens
catgaaatgagctcttgctccatcaggctctattcacgccctgtggttttgtaacctccagtgtgtatgcgtgggttgcgggctggggtggggayggctgtggacagaggaggggataaagcggcagtgttccgcgggttcccgggacgtgggacgtgagtggggtggccagagcctagttaactcatcgcctgtcaggacatcttacctcctggtcccctctctgacctacgctccacatcttcacagttcagtggggaccttgtgggtggaagtcacaatccctttctactttagcctacgaaggccaggctcccaagagtctccccggagtcggggccttgggcaggctcacaaggatgctgatggtgacggttggtgacggcgatgtaaattggaggcctcgggccaatgcagaggtatccatttgacctcggtgggacaggtcagctttgcggagtcccatgtgtccttccagagactcatccaacgatagcaagcatggtcctgaggatcccagctcccagcagaggcacttttgttcacacagaatcctgggc

SEQ ID NO: 837790 - DNA, 617 bp, Homo sapiens
aatagttcagtaatctaaaaagatttgccttggacttgctaatttgctcaatctcttaagtaacaaaagggtctaaactctgcctctcaatttaaagtgagccccataaaagcttccagcttagcaagaaatctaagattccacaatgtgagcttttaaccccatttcaatttgtgcaagtgtaatatcattagggactgatttctactacaaggtagttgtggcttttcatggaatttagttctttatctgagaggtggcatggtagtggaacacacagaagaggacaaagtactgcagaaataaagtttgtttttcctgaaggatcagaatctgggaacactgcaaattcataagaaagcctcattcctatgaaacttttggttaaatactgccaagtaagaattggcaaaatctggattggactttgattagggggtgaaaaattcaactgtactcttcttcattttcatggttgaatctgaaaaggatacaattaggcagaattgtgtcactgtattcrcagctgtgtccccagtagctagaacagtgccaggcactaggatactcaataaatattgtctgaatgaatacactgcaatagaacagagtcatcc

SEQ ID NO: 837791 - DNA, 545 bp, Homo sapiens
aagacatttaataaatatagtaatttttaatcttgggaaacatttttactatggtratgttgtagaagggaaaaaaaaacgctttcacttaaaaatgccagttgattattaattgtctaaaggaatagtggctgggtgcagtggctcatgcctataatcccagcacgttcggaggccaaggtgggtggatcacttgagtctgggaattcgagtccagcctgggcaatatggcaaaaccctgtctctataaaaaatacaaaaattagccaggcatgatggtgcgtgcctgcagtcccagctactcgggaggctgatgtgggaggatcgtttgagcccaggaggcagaggttgcagtgagccaagattgcgccactgccctccagtctgggtgacagagaccctgtctgcaaaaaaaataaaaaataaaggaataatgacatatttgtataaaaatatagaagcacaaaatatgaaaaaaaattttaaccctataaaaatgaatttacactagacaaattgtctttattctgtaatgcatactattt

SEQ ID NO: 837792 - DNA, 576 bp, Homo sapiens
caaatgaacagtcagatgaagaggtacctagggggcggtcgggaaggatcctgaacacaggagcttgtgtccctgtggagtctggggtgcaccaccctcctggcacatggatatattcaacctggaagctctccagaccccgtcatctagagtggttatggaggctccgctacgtaggcatgcttgattaaatcattggccatttgtgactgaactcaatggccaccttctctcttccctccccagaggtctgggagtgggactgaaagttccaaccctctaatcacatggtgggttcctctggcaaccagccccatcctctaaagtggactcaggtgtggtggactcaggtgtggttgaaatgcttattatgaagaacaaaagacactcctctcaccccatcacttggaaaattccaagggttttagaagctctgtgccaggaattggagttagaacaaatacatatttctcattatatcacagttacaaaactctaycattatgtatttttggtagtctataaaagtacagtttttaaagtcctctcattatcatttattcaacaaatatttat

SEQ ID NO: 837793 - DNA, 689 bp, Homo sapiens
aacataagtagagggtttatttgggccaagtttgaggactgcaaccaaggagcacagattcaagttgcctgaatatatgctccaattagcagtagttacaagtgggtttttaaaggaaaagagaagaggcagyttgtaagttgtttatcaagaatttacactaaggtaacataaggtattgattggctaaacattgttctttcttttctcatttcccccttttgatcaaaatttttctcttctgaaggcatcgatgaccaaaattttagatgtttgtctcatgtcattgggaaggctcattcccaggtaatctcatcccatgtctgagggaaagaggacaggtacttatggcttaagaatttagtgatggccaggcactgtggctcacacctgtaatcccagcactttgggaggccgaggtgggaggatcacttgagctcaggagttcaagactagcttgggcaacatagcaagacccccatctctacacaaaaatataaaataaaaaaatttgaaattttaaacttaagaatttagagaggtctcaaggctgaattgactggcaacataaagggacagagcaacaagatctaggccatccacttacagaggagccacagcatgttggatcatttctttcttgatgttaagacatctagaaatacaaagcataatcaacttaagaacca

SEQ ID NO: 837794 - DNA, 623 bp, Homo sapiens
cagtggaacacccccagcactttgggaggctgaggcaggaggatcgctggagcccaggtgtttgagaccagactgggcaacatagtgagacccgatcttcaaaaaattagcygggggtggtggtgcacactgtggtcccagctgctcaggaggttttattttaatgtttgcagctaattgcagagacgacatgacctgtgtgaaggaagagatctttgggcctgttatgtccattttatcatttgacactgaagctgaggttctagaaagagccaatgataccacttttggactagcagctggcgtctttaccaggtatgtggagtgggacactgagagcagttttgaaggagcggggctgcagtatctgcttagatatttaattgatcctattctctcactttagtttgccctcataggagccatcagcactttctgtttgcttcaggttaagtcagaagacaccaaagcagcattttgcagtttgctgtaaatggccagagaaccctgctattgagttttaaattgagctcgtttaataaacacttaagattctgatctatgtaaagcattgggttagatgtcttttgaaaacacacatgtcaaggaatttagaaacctgt

SEQ ID NO: 837795 - DNA, 595 bp, Homo sapiens
aactgggctttccattggagtctgcctcactccaaagcccacgacaaattgtgaacataagttcctctttatctgatgacttgggactttgtctcaccttaggaccagtcttctgtatgtgagattattaggtagtttggtagctggagatgtagcagcagatgcagaggtctgagcacatggactggccttaggcagtgtccagactagtgggcctctgacttcagagtgcctaagcatcctctgagggactgctcacagttcagattcccaaaccctgcttcagagggtctgtcttgttatgacgcacctagggtgactctgatgcagatggtacatggttcacacttaacatcgctcttaatgaatttcttatatgaatttggttgtctctccctccctccctccctttcttctctcctgccttccattctctccctccttcccttcctcctttcctctctttctcccttccttctttttgcctttatttytttcttggtgttttgcttattctcagattgcaggattgggaaaagccaaaataatcaaggcttctgtcagttggttccaatgacttgaggaaatcactcaa

SEQ ID NO: 837796 - DNA, 635 bp, Homo sapiens
atactatgaaccagctcctgtttttagtcccattttacagatgaggaaactgaggcagagagaagttagtcatctgctcaaagctccatcctgaggaaacrgcagagcggggcctccaagcagagcagtcagcccttagagcccactgtgacagcacacaaacgcacagtgagaggaaagctcattttttgaaagggtccatgtgctgtgatccaggtggtcccttctaaatggggggactgggcagccctcaggatccctctggtaatgcattttcttcccaccagttttgttggttttggtttgagacagggtcttgctctgtcacccaggctggagtgcagtggtgcagttatggctcactgcagcctggacctcctgggctcaagcgatcctcctgcctcagcttcccaagtagctcggactacaggtgcagccatcatgcctgacaaatttttgtgttttttgtagagatgaggtcttgctgtgttgcccaggctggtctcgaactcacgggctcaagcaatccgccagccttggtctctcaaagtgctgggattacagaaatgagccactatgcctggcctcttcctactcgttttgatggctactgagtggcagcgagtttggtcatg

SEQ ID NO: 837797 - DNA, 656 bp, Homo sapiens
agaaggtgtgggtcctgtcagaaaactccagagcccgtaatcaaagcgaaggatctatcagcccagcaagtgccagcytcactaaacaaaacctccctgaaagaaatctcaggggaaaggctgagctcgatccccgaagcatctgtaagtggttcccgtgtggtttacagatgccggcaatacatcctgctgtgttccgttctgtccacccatgtttttagcagtatctctttttcatcatttgggtgatgagtgttgtattttctttcctgttctgatgtgttttagtttggtaatagcagctgttaaagagtctactgcacatcccaaggataatagaatacctcatgtttttaatgagaaagataattatgtaattttcatcataacagttattttattttctagttacttcccataatttgtagttatcactgcctgcaaattataaatgatgatcttatttttgagccaaaagcttgccagtaaaattgacagattttcaataacaatctacattaggagccataaaaacaccattattctattcactttctacagcagttccccaaataataaatgatatgagtgaaggttaacattaaaacagtgtcatcgaataaatccctcggctagtttggtggctgtattcgtgt

SEQ ID NO: 837798 - DNA, 570 bp, Homo sapiens
cttataaatatatatgtatataatacagaaaagttcttcattttctcgccatcccccaaccccaaataactacttatgaaaagtacatcaatgctttttatgttcacatactagcatgttattatgaatttttaaaaacataaatttaagatctatctgtaccttacaacttgatctttgaacttactaatttatcttgaatgtctcatgaattagtccatttttagttatttcattgcttttttaaccacaccttagtattctattaaggattgtattagtcacatttctctagagggacagaactaataggagatatagatatagatatagatatagatatagatatagatatagatatagatatagatatagatacagatgatatagatatagatatatcaaaaggagtttactaacttataagatcacaaggtcccacaataggctgtctgcaagctgaggagcaaggcaaaccagtttgagtcccaaaactgaagaacytggaatctgatgtttgagggcaggaagcatccagtacaggaaaaagatgtaggctgggaggctagg

SEQ ID NO: 837799 - DNA, 605 bp, Homo sapiens
tgaaccagggaggcagaggtttcagtgagcagagatcacaccaccgtactccagcctgggtggtagagcaagactctgtctcaaaacaaaaaaacaaaaaaacaaataaaattatcaagtttcaggactgtatacataacataatctcatttgtgttaaaatatattttataatatatatgttattatatgcatagaaaatttcttgaaagacccacataaataattattgttccttctgtggagtgggaacagacagtgagagggtaaggaatgaaaggaatgggttgggagactcaaaataattgagaaaatttaactttcattttccttttgcactgttttaactttgttaaacatgaagatatattacctttatgatcaagagcttttgaacagtgtcgcacacgctgtgtgtatgcatacatacatagctgcatgtcatttatttgtcaccacgaagggtaagaagatgttttagatagttctgcccacagtctaactaggaagrtgtaaatgtgtggaaagttaacaaaaaaaattacaatatctactgactatcactcagtagatattgatcacatcccaataattggtatccacagc

SEQ ID NO: 837800 - DNA, 521 bp, Homo sapiens
taatcatcagggaaatgctaattaaaatcacaacgggatttatcacctcataactgtatgaccattttaaaaaaaagaaaatagcaagtgttgatgaagatgtggagaaattgaattagaaccttatgtactgtcagtaggaatgtaaaatggtagagccactatggaaaacagtatggagggtcctcaaaacattaaaaaatagacctaccatatgatgcagcaatcccacttgtgggcatttttccaaaataattgaataattccaaaataattgaaaacaagatcttgaagtgatatttgcattcccatattcattacagaattattcacaatagccaaaaagtagaaacaatctaaaagtccatcatcaaatgaacagatgaagaaaatatggtatatatgtgtgtgtgtgtatatatatatatatatatatatgtatggtatatatatgtatggtatatatatgtatggtgtatatatatatgtatgatawatatagtatggcatatatatgtatg

SEQ ID NO: 837801 - DNA, 214 bp, Homo sapiens
gagacccatagtgggtagctcctccctaggttgttctgtcaagtgttcagctctcaggagaaagggaaaccctggagagggttgctcctgtctgcagctggtagttcccagacatctctgcaggtctctgaagcattcagcagagaaarcagctggccctcccattgtctccagctatcagcagaaaggatagctccttcctgcctctattctt

SEQ ID NO: 837802 - DNA, 214 bp, Homo sapiens
gagacccatagtgggtagctcctccctaggttgttctgtcaagtgttcagctctcaggagaaagggaaaccctggagagggttgctcctgtctgcagctggtagttcccagacatctctgcaggtctctgaagcattcagcagagaaaayagctggccctcccattgtctccagctatcagcagaaaggatagctccttcctgcctctattctt

SEQ ID NO: 837803 - DNA, 604 bp, Homo sapiens
cttgttttagtccattctcacactgctaaacgatactacccaagactggataatttacaaagaaaagaggtttaattgactcacagttccacatggctggggaggcctcaggaaacttacaatcatggcagaaggagaaagcaagcacatcttacatggtggcaggtgagggaacatgagcaaaagcagggaaaactgccttataaagccatcagatctcatgataattcactcactatcacgagaacagcataggggaaaccacctctacgatccaatcgtctcccatcagattcctccatccacacgtgaggattaccggtattacaattcaagaggaggtttgggtggggacacagccaaaaagtaacactttttatttattacaattttatatcatccctagaaaattgttccaaattcttgcccatcctccatcaatatctaaaattgcacttgtaattgagaatacttgctaaggttttacttgtacttgcatatagaatggactcaagatatgaaygctgtttgtcacgatttcataaatgaagacaaaacaggtattaaatattcaccctgttttctggatgctcagtttcatagt

SEQ ID NO: 837804 - DNA, 694 bp, Homo sapiens
ttatggtgatggattccccaggatgttcaacaaacagagaagaggccaaagcacgttgtctcaatctttcttcttgttttagtccattctcacactgctaaacgatactacccaagactggataatttacaaagaaaagaggtttaattgactcacagttccacatggctggggaggcctcaggaaacttacaatcatggcagaaggagaaagcaagcacatcttacatggtggcaggtgagggaacatgagcaaaagcagggaaaactgccttataaagccatcagatctcatgataattcactcactatcacgagaacagcataggggaaaccacctctacgatccaatcgtctcccatcagattcctccatccacacgtgaggattaccggtattacaattcaagaggaggtttgggtggggacacagccaaaaagtaacactttttatttattacaattttatatcatccctagaaaattgttccaaattcttgcccatcctccatcaatatctaaaattgcacttgtaattgagaatacttgctaaggttttacttgtacttgcatatagaatggactcaagatatgaatgctgtttgtcacgatttcataaatgaagacaaaacaggtattaaatattcaccctgttttctggatgctcagtttcatartaaatgcctgccttggttc

SEQ ID NO: 837805 - DNA, 628 bp, Homo sapiens
ttaaaaataaaatattttaattttaaaaaatcaatcttttaattttttattaaaatagaaattataagtcaaaagtagtgatggacacattatttagcagaaaattcttcagagaccacaggaaaatccaggttgttggagggttaatgttgagaagtaagaaaggacagaacagtgaatacatcaatttaaccgtaggaaaaaaaatgtttactgctgatgaattaacttggaggccctctatctagaagaggggcattttttccttgcctaataaaagggagtttataaaacttatagcatcattgtaattgagaaatgtattttgaaaaatggaacagaataataggtttttcatagattaaaataaaccacagtgtttaaatattacatgtatttatgtagttttaaagacatggaaaaagtgcatagcaaaattaaagttgacatagaaactatactttacagatcaaacttagaccaactagaatagaagggcaaggagagtctgcaatgagttgattagctctgctgcaggaaattgaccaactgcaagtgaactacttggggkatcgacgttttatatggatctttgtgaagcacaaaacaagatcagcaaatcataaag

SEQ ID NO: 837806 - DNA, 595 bp, Homo sapiens
gaaatttatacaagtattcccaggttggtttaacagcccaaaatccattaaggtaatacatcttatccatagaataagaaacgagaattgcatgatcatctcgatagattcggaaaacacatttaacaaaatccaaatgctttaatgattaaaaataaaaataaaaactcaatgaaccaggaatagagaactttctacaccagatacatggcacctgtgaaaagccaacagcaagcatgcaacttaatggtaaaggatgctttcccgctatggtcagagataagaataggatatataatttgaactcttctagtcaatactgtactaaagattttatgcagggcaaatcggcaactaaaaaaataagaatcacccatattgaacaggaagaaataaaactttatttgaaaataacattcttgtatatagaaaatgttaaggaatccactgaacgatagaagtwgtaaattatttcagcaatattacagcatacaagataaatgtacaaaaatcaattgcacacatctacaatgaaaaccccaaaatgaaattaagaaaacacttcaatttaaaatagcatcataaaaagaaataa

SEQ ID NO: 837807 - DNA, 410 bp, Homo sapiens
aaaattggggagatctagctttcagtagttactgttcgttttgcacccctaatttatgtatgaccattgaagatgatattgccagtactaagattccttgttmcctctctagacagcaaatgtctacttttccaccagcagaacctagaggcattcatgcggcttgatggagtggacattggaaacagtctttcaaccaatcttcctggggttttagccctacctttacttctactttcagaggtatcccgtgcaaccaatttatgaacattttgtagaatcagatttccccgctacttacaattttacactttttggtaagctaagtcagttaccagccatttatggacttcctgttttcaaaaatgttgctgttttctttttatatcacttgaataagccatttgtca

SEQ ID NO: 837808 - DNA, 477 bp, Homo sapiens
aaatcccttttaaattcaaagagtcataaagtttcaaaaaatgtaattcagataagaaattaatgtcagctacattcttccacagtaaaggtttgcatcaacttttcaactaatagctttagcattcattagaaaacttgtttcaaccattattttactaggtgttataacagggtactacattctttcatttttttcttcatttattagctggaataatttctaaaagaacatttcctcccaaatgtgtattgattacaccaaaacacagtttggacaggaaaaacaagataagtagacaaatgcttgatttttatacccctccccacttttcacagtaatgaattagtgcttcarcaaactttaatagtgattaaaaacttatttcccataataaaaattttaagtttttgtaagtaaatgataaataataatttatccagtatttcatgagtacctataaccagccaggatcca

SEQ ID NO: 837809 - DNA, 370 bp, Homo sapiens
taccatgattttaaatacactctatatgctgacggctcccamatttatatttccagcccagccctctcccctgaactctagactcatatatccaacctcttactgacagtgccacttttgtgtctatcaacaggtcctggtattcctctccatgccctcccacccccaactgcttccagccccaaatctgctcctcttacagttttttcaatctaagtaaaaggaaattttattcttccaattgcttgagtcataaaccatggtgtcattttgattcttgcctcacaacccacatttaatctatcagttaattttgtgggctctaccatcaaaatatatccatccagagtgcaaccatttttctcctcct

SEQ ID NO: 837810 - DNA, 590 bp, Homo sapiens
caggatttgaaaattttttacccattttcagtgttcaatattagtttcccagaaggtattaagtactatttaatgaccacagytttgtctctgtattgtacaacctctctttgtattatctttgattcttcaaccttaaggccagcatcgtgaaaagcgcacatgctctttaaatgttttaatgtgcatactttacattgtatggaaatttatctgcatttatttttatcatctcttgtccttcctaacatccttttacattcacgtaatatttttctgtttcaccatttcataaaagtgttttgcagtttgaatcagtgcttctaaatgactcgtttagagtagaaaaaacatttttttgagacagggtttggctctgctgtccaggctggagtgcagtggtatgatcatggctcactgcaacctccgcctcctgggctcaagtgatccttctgcctcaggttcccgagtagctaggactacaggcctacacaaacacatccagctaattttttttttttttttttttgtagagcctgggtttcaccaggttgcccaggctggtttcaaactcctgagctcaaccgatc

SEQ ID NO: 837811 - DNA, 561 bp, Homo sapiens
aaaagacaaattacatagggaagaacaaatacaataaatcacaattcttatctagaaaatatgcaaaacaaaaaaaacccaatggggtgacatctttaacttgctggaagaaaaaaaaaaagaaactattarccatagtgatgtgaactgcagtaatcagaatggctagctttgttttgagttcagtggtggcactcctctgtaggccagggctgacagtagaagatattatagaagtgggatcatgaagagtaaagagcatgaaataatcctgaaataacggaagtcaggtcgtgcacttaactatcagaagcaaggtgaatacaattgttgtaacaatcaaaggtcagagtggaagccaagcatgtctgacccagagtgagctgtggagatagagtatgatgttcccaagggcaaaacagatgggtagtcaacaatggtattttacaatctatacaaccaaaagaaatcaagtattaatgattaggaagctaagagcagccactgcaatttaatgtcataatcttttgttcagttgacagacctgagccagttcataga

SEQ ID NO: 837812 - DNA, 667 bp, Homo sapiens
attatgttttagtatcaatgacaaaagaagtttataaacaagactaaacaaattagaaactgaacactaaaagtgataaaattcaaattagcattatttatttaatatgatagatgatgtggttttgctgaaactaaactgccacttactcaaaatgaattgctgttctagcccaggttattttgagctttgcttcctttattactttaggtggcatggaaactcaattctcccaccatttttgtctctgagaatctttaactgagatagagcagggatcccccttttttaggcgcctgcagaccccaagtatggaaataaaggaaaatcctgagatccttcaagggaaattccaggcacctagctagccctgagaactaaataagtaacttgttaaataagaaggtaatagcctaaaacaatagctaaggaagttaaactcccagagatgtccattttccttatagaaactaaatgtaacatcttaacatagcttcccgaattgtctttcagatgctcagatccccacagatgaccctccaccaaacagctggagccrctgaccgtagaccacagataagggggaagggaagactaaactttaactgtcgccctttgttctaagtttcttcctgcgggtgcttggagaaagtcactccccctagcc

SEQ ID NO: 837813 - DNA, 625 bp, Homo sapiens
gtttcagagctcccaaggttacaagttactatgcccaggtaattaaaaaattctttttggtagcaatgcgggtctcactatgttgtccaggtttgtctccaactcctgggcttaagygatcttcccgcctcagcctcccaaagtgctgggattacaggtgtgagccactgtgtctggcccattattaactaattagtgcatcaaacaaatgtgtcagaaattccagtggattctaagtggacatgggcatgttgggatatccccagaacactagtaggtgtgggcctaccatctgcgtttgcaggaggactgagaaatatccagaaagcaaaggcctttaggagcagcaagaagcagggcctggaggaggataaggcaagtgaggcattcagggcacaacatttaaggagaccccactctcaggagctgaccctgcactttcacgagcctgagagtgagggcctccttaaattttccattctgggcacctccttggtctcaccctggcaagaaaatggacctatccagcttgttccagtgatcagagctggggcacagagttttatcataagactctgttgcagccagaagttaccacaatgatgttgcagacatttgtaatgca

SEQ ID NO: 837814 - DNA, 502 bp, Homo sapiens
gaaacccagctgtctcagcccaggtgtgcccccmacagggaaggggcttagtagcattgcacagccaggtctcattacactaatgattgtcagtacaacccagtgtgccttttaattgcaagaaacatccaggagagggaaaggtgctgcagtctctaatgacgaagtgaaattctgcataggttttcagagccacatggatatcttgcattccattctcccattaggccgttatagaaattcaaattctaattggttccataatcaggtcctggaatctttccacaatctttagctcaccactgtcagaaatactcagctgcccccaaattatggagccaaataaaagctcagtctggggtttcagcttccttcagatacaaggggaattgatcatccattggggaatagtctctactttgggggcccagaaattgacataacaggacagcaggcattctacaaatccttattgaatgtcacttgatactatgtgatctag

SEQ ID NO: 837815 - DNA, 637 bp, Homo sapiens
cctggtggtaatgagtgagttctcattctattcatgtgagatctggccgttaaaaatttagagcctgggaaagatggtgaccagaggctgcgaagggtagtggggggtgccrgttggtggcggggaggagttgggaaggctaatgagtacaaaaatagttagaaagaatgaataagggccaggtgcagtggctcatggctgtaatcccagcactttgggaggccaaggcgggtggatcacttgaggtcaggaattcaagaccagccttgccaacatagtgaaaccccatctccactaaaaatacaaaaattagccaggtgtggtggtgggtgcctgtagctccagctactcaggaggctgatgcaggagaatcacttgaacctgggaggaggaggttgtagtgagctgaggtcatgccactgcattccagcctgggcaacagagcgagacttcatctcaaaaaaaaaaaaaaaaaaaaaaaaaaaggagaattagacctagtatttgatagatttgatagcacaacagtgtgactatggtcaataataatttaattacacatttataaataactaaaagagtgtaattggcttgtttgtaacacaaaggataaatgcttccaatgatggatcccccg

SEQ ID NO: 837816 - DNA, 525 bp, Homo sapiens
tttcttggagagttgcccacggcagacacaatttaaattaacttaaactatttccttcccctcccccacctcgttatcctttttcasagagtagggaagagaaaacgttttcgggagaaagctacgggaggagctcctctctctctcttccgtccagcggatgccggggctgcagaggccaaagtttgcagcgggcgcggcggggcgggagcggggagcggcgggtggggcggctgctaagggaacgcgcgggcggctcccggagcccggggaaggatggcggccgcccccggtcccgccgccgcctctgcagtgccggcatcgccgctggggggcagcagggccccgcggaggccaagtcccgtcggagatcgcacagctcctggtctcgtaccccagacccgccttccctgacctccgccctggctgctcacgggaccccggggaccagaggtcgccgaggcagcagcccgctctccttgctcctcccctctttcatctatccctaattcattaattcatccg

SEQ ID NO: 837817 - DNA, 443 bp, Homo sapiens
cctacagcaacagttctcaaactttttgttctcaggaatcttacacttaaatttatttagaaycccataaagcttttgttaggttggttacatctattgatgtttacagtattaaacactgaaaactgagaaatgtcttaaatattaattcattttaaaataccaacaaacctgttatatgttaacaaatatatatttttattaaaaatatttttcaaaacaaaattaatgaaagagtgggactgttacacatttttgcaaatctctttaatgtctggcttaataaaaacagctaaacagctggattttcacatctgcttccacatttaatttgttttatcacaagtcatgttagtttctagaaacgtccattgaacactcatgaaagaatgacagtgaaaaagacaaataatgtcctagtatgaacatgaaataaaagaatc

SEQ ID NO: 837818 - DNA, 443 bp, Homo sapiens
cctacagcaacagttctcaaactttttgttctcaggaatcttacacttaaatttatttagaatcccataaagcttttgttaggytggttacatctattgatgtttacagtattaaacactgaaaactgagaaatgtcttaaatattaattcattttaaaataccaacaaacctgttatatgttaacaaatatatatttttattaaaaatatttttcaaaacaaaattaatgaaagagtgggactgttacacatttttgcaaatctctttaatgtctggcttaataaaaacagctaaacagctggattttcacatctgcttccacatttaatttgttttatcacaagtcatgttagtttctagaaacgtccattgaacactcatgaaagaatgacagtgaaaaagacaaataatgtcctagtatgaacatgaaataaaagaatc

SEQ ID NO: 837819 - DNA, 601 bp, Homo sapiens
actcacctcttcccatattccctttccaactgcatgggaggttctaagacgaattgtggtgctagattagtaaacatgacttttaatggaaaaaaaaaaaagaatgattcttcttagatttcttctgtaaaacacaatggccctactggcatacacagtggccctacgggcatactcatggaggataagaatataaacaaatagaattgagaatcctgaaataaatcaataaccctcacatttacatcaacaaaaacaccaagacaaatcaatggtgaaagaacagtcttttcaacagttggtactaccactgctggacattcacatgcaaaagaatgacttcgttttgttttttgtttgttgtttgttgttgtgtttttttggtcaccatctcaaaaaaaaaaaccaaaaaacacacacacaaggaggccgggcaccgtggctcacacctgtaatcccagcactttgggaggcccaggtggsgagatctcttgagcccaggagttcaagaccagcctgggcaacatgttgcagtgtgccaagatcatcccactccactccagcctgggcaacagagtaagaccttgtctcaaaaaaaaaa

SEQ ID NO: 837820 - DNA, 601 bp, Homo sapiens
actcacctcttcccatattccctttccaactgcatgggaggttctaagacgaattgtggtgctagattagtaaacatgacttttaatggaaaaaaaaaaaagaatgattcttcttagatttcttctgtaaaacacaatggccctactggcatacacagtggccctacgggcatactcatggaggataagaatataaacaaatagaattgagaatcctgaaataaatcaataaccctcacatttacatcaacaaaaacaccaagacaaatcaatggtgaaagaacagtcttttcaacagttggtactaccactgctggacattcacatgcaaaagaatgacttcgttttgttttttgtttgttgtttgttgttgtgtttttttggtcaccatctcaaaaaaaaaaaccaaaaaacacacacacaaggaggccgggcaccgtggctcacacctgtaatcccagcactttgggaggcccaggtggcsagatctcttgagcccaggagttcaagaccagcctgggcaacatgttgcagtgtgccaagatcatcccactccactccagcctgggcaacagagtaagaccttgtctcaaaaaaaaaa

SEQ ID NO: 837821 - DNA, 646 bp, Homo sapiens
gatcttttaccatggaattgatgtggtcagaacctctaaccactgcggagattctgttgactgccactgacttctctactggccttatrttatagtggccatcatgatgctgttgtgattaaaagcccaagccctatgcaaaattgcccgggtttgaaactgggctttgccatatattagctggatgaccccggacaaattatctaaactctctgactcccgattacctaattttaaattgaggatagcaataatatctacctcaaacagttgtcggaataaattaatgcagataaagcacttagaataattcctggcacatggtatcatataagggttaattattactcttgtctctaatagggataaaaaaatgtgcacttaatatttaggaaaattataccccccatgcaaactctatattaacattttttagattattttacatttaagttgcattttaagtagttcttcaagtaagaatttagctttaaaaggacttcaaataccttttaacacaatctctcctctagtgccatagcaaaaggcctggtgtggagtagactatagtatctactcaacaaatatttgctatgtgaataaataaagttgcaaaatactaaacattcaaaagacatgtaggtag

SEQ ID NO: 837822 - DNA, 540 bp, Homo sapiens
tgtgaaatatacattactgactatattcaccttgtgcaatagatctcaaaatttmttcctcctgttcatcaaaactttgtaccctttgatcaataacttctcattcccaaaccccattcccctcctcccgccttgcctctgataatcgtaattctactctctactccgtaagttcaactttctttgatctcatacataggtgagatcatgtgctatttgtctttctgtgcttggcttatttcacctagtataatgtcttctagattcattcatgttgttacacatgatagaattctcttgttttagaccttgaatatgattccattgtgtatatgtaccacattttaaaatccattcatctgttgatggacacttaggatgatttaatgtattgactattgtgaataatgttgtaatgaacatgggaatgcagatatccctttgacacacagttttcaattcctttggatgtatagccagaagtgggattgttggatcacatggtagctctattgttagtttatagagaaaacaccatcc

SEQ ID NO: 837823 - DNA, 654 bp, Homo sapiens
atagagaaaacaccatccataatagctttgctaatttacttttgcactagtgatrtacaagagtttctctgaatcctaaccaacatgtgttgtccttcatctttttgagaaaagccattgtaatagatgtgaggtgatatccgattatgattttagtttgcatttccttaatgatttagtgatgttgagagttttgtcatgtactgttggccatttgtatgtcttctttttaaaaatgtttattcaagtcttttgcccatttttaatcaggttatttaatatctgttttggatattaaccacctgtcaataaattatttgcaaatattttctcccagtatgtgggttgtctattttgttaattgttttcttcattgtgtagtagctttttagtttgatgtcatcccacttgtctatttttgcttttattgtctgtgctttcagggtcataggcaatcagttgttgcccagaccaatgtcatggagctttccccctgtgttttcttctagtagtttaatggcttcaggtcttatatttaagcctttaatccactgtgagctgatttttgtatgtagtgtgagataaatattcaatttcactcttctgcatgtggataagtagttttctgaataccatttcagaaaacttcttcat

SEQ ID NO: 837824 - DNA, 501 bp, Homo sapiens
cagaatcacactctgatttaacactccatggaaccctattctgaatcatgaatcaaaaaaagagaatgttaattctctgtctcctggaatttatattctcttacttctcttctgtctcctatcttttctcttttccctaaacacttggagagaacaattcagaagctcctcaaagatagagaaaatacaaacacatttgaatctgttgatgagatagattatcttaattcttggccaagtctggaaggcgagccaaagtgataggaacaatatattactatagttttgggaaagcacttttaagacagtgttggcagaagagatgtaagaacattaaacacctctgtgtactctgccttgctgtctaaaatgtcatccttaatatgccaatgtattgkgcacaaataagaagctgttacatcattttatgttttaaatataaggaaaccgatataacatggtgaattgagaaaaggcacagtatgtgtcccagtatcaaat

SEQ ID NO: 837825 - DNA, 602 bp, Homo sapiens
acagggcatgctacaatgtcagaggggcccaaattctgtggtaagtcaggagttcagatatacatttctggaaatacaaaaaggaatttttaaagctacttcccaaatgttcaaataaaattaataaattattactataaacccaagaaccacttactcttcagactatatttcatttctcaccaagttttctctgttaaatatgattaccttgtccagtttaacctcaaaaactacctttctagattttagtattaatcattattacattaaaaatctttcattattgccatctctgttcgatcttcacatagttaagttcatgcctgttcagcctctgtaaacagaaaactatggtctcctatgagtatcactctagcttccagtgtacagaaaggaattcatccttgtagtaaaacttctagttcagtttgttttaatacataaacgactcattatttaatattcyctcctttgttacatacttctagtcttgactccttcatttggaccctgtgttagttctgaaaaacaacctttctgctatttgtttcttcatcttgatctgtctccaaattactaacctcttgacatcaattttg

SEQ ID NO: 837826 - DNA, 602 bp, Homo sapiens
acagggcatgctacaatgtcagaggggcccaaattctgtggtaagtcaggagttcagatatacatttctggaaatacaaaaaggaatttttaaagctacttcccaaatgttcaaataaaattaataaattattactataaacccaagaaccacttactcttcagactatatttcatttctcaccaagttttctctgttaaatatgattaccttgtccagtttaacctcaaaaactacctttctagattttagtattaatcattattacattaaaaatctttcattattgccatctctgttcgatcttcacatagttaagttcatgcctgttcagcctctgtaaacagaaaactatggtctcctatgagtatcactctagcttccagtgtacagaaaggaattcatccttgtagtaaaacttctagttcagtttgttttaatacataaacgactcattatttaatattctctcctttgttacmtacttctagtcttgactccttcatttggaccctgtgttagttctgaaaaacaacctttctgctatttgtttcttcatcttgatctgtctccaaattactaacctcttgacatcaattttg

SEQ ID NO: 837827 - DNA, 582 bp, Homo sapiens
atacacattagtctactgctacacagcgtcaggatcactgataccactgtcttccacctccacatcttgtcccactacaaggtctctaggggcagtaacacacacggagcctccatctactgtgataacagtgccttcttctgaaatacctcccgaaggacctgcccaaggctgttttacagttaattttttttaataagtagaaggagtacactttagaaaaatgataaaaagtatagcaagccaggcatggtggctcactcctataatcccagcactttggcaggccgaggcaggcagatcaccagaggtcaggagttcgagaacagcctgggcaacatggagaaacccaatctttaccaaaaatacaaaaaattagctgggtgtggtggcgcacacctgtggtcccggctaactgggaggctgaagtgggaggatcacttgagcctggaaggtggaggatgcagtgagccragatcgtgccactgcactccagactgggtaacagagtgagaccacacctcaaaaaaaaaaagtatagtaaatacataaagcagtaacagtcatttgtcatcactatac

SEQ ID NO: 837828 - DNA, 644 bp, Homo sapiens
ataagcattttttctttctttttctttttcaactattttgttaaaaatgaagacacaaacatacacattagtctactgctacacagcgtcaggatcactgataccactgtcttccacctccacatcttgtcccactacaaggtctctaggggcagtaacacacacggagcctccatctactgtgataacagtgccttcttctgaaatacctcccgaaggacctgcccaaggctgttttacagttaattttttttaataagtagaaggagtacactttagaaaaatgataaaaagtatagcaagccaggcatggtggctcactcctataatcccagcactttggcaggccgaggcaggcagatcaccagaggtcaggagttcgagaacagcctgggcaacatggagaaacccaatctttaccaaaaatacaaaaaattagctgggtgtggtggcgcacacctgtggtcccggctaactgggaggctgaagtgggaggatcacttgagcctggaaggtggaggatgcagtgagccgagatcgtgccactgcactccagactgggtaacagagtgagaccacacctcaaaaaaaaaaagtatagtaaatacataaagyagtaacagtcatttgtcatcactatactg

SEQ ID NO: 837829 - DNA, 598 bp, Homo sapiens
gccgggtgcccctctgagacgaagcttccagaggaaggatcaggcagcaatatttgctgttctgcaatatttgctgttctgcagcctccgctggtgatacccagggaaacagggtctggagtggacctccagcaaactccaacagacctgcagctgagggtcctggttgttagaaggaaaactaacaaacagaaagaaatagcatcaacatcaacaaaaaggacatgcacaccaaaaccgcatctgtaggtcaccatcatcaaagatcaaaggtagataaaaccacaaagatggggagaaacgagagaagaaagtctgataattctaaaaaccagagcgcctcttctcctccaaaggatcgcatctcctcgccagcaactgaacaaagctggaaggagaatgactttgacgaattgacagaagtaggcttcagaagatcggtaataagaaacttctccaagctaaaggaggatgttcgaacccaggaagctaaaagccttgaaaaaagattagaagaatggataactagaataaacagtgtagagaagacattaaamggcctgagggagatgaaaaccatggcacaagaactacgtga

SEQ ID NO: 837830 - DNA, 297 bp, Homo sapiens
gaactttgatccattgcttgtgggagcgtgaatttttcaaccattttggaaaatggttttgtaatatataatatgcctgaacatgtccccactttgttgagcatacatccaccaaaagactcatacacgaatgtgcacatcagctttattcataaaaagcaaacattaggaagaatataaatgcctttcaccataattgtggcatatgtatataatggaatgctactcaacaccaaaaaggaataaatyactaacacccactacttggatacatctcagcaatattatgttaatgga

SEQ ID NO: 837831 - DNA, 645 bp, Homo sapiens
ctgcattattgtatatgcctctgggaggaactaagcactcgtttccatggggtgtgttgccaggagtagaactgctgggccatgcatatgtttaccaaaatgttttctaatgcatttgtaccaagttacacttctgtgtttcttaaatgacatgaaaggtaagatcatctgagtaatttactatcctatatttatcattaaagtatttatttacataaaatttttttaatggaagctttgactttgagattaaaacaaaattactggcattttattctcctctttgctttcttggactacttctaatctgttggacttggagaggttccatctttgttcttgctattttctccacagatacaagatgattcctttatggcactttactgttggtaatttgtgtgtcttgtacgtgcactggggtgaattgctggcaagagtatgtgctacactcctctatctcctactgcatgtgtggataagaccctgaccagcatcagagagggagggccatgacttaccctatgtgtgagcagacatgagacccaggaggcttgacaaaggcagtgtgatgtcttcaacagcatctcataaaactcagagatgtgcagcaacraactcagttccaaatgccatggtcaccag

SEQ ID NO: 837832 - DNA, 619 bp, Homo sapiens
ttgtggggattatcgtacataatccacaagattgagataaaaggatggaggtactcctccaggacacattccagagaatttccagggtgctccttggcctgcaggtctcctacacrcggtctgcattagcgatccagggcctggaagccataaagaatagtaacatatacaggaaatggttgtaaagagataagcaagaatgcttaacaaaagaaaaatcaaatgcccttgttcattataatcatttggggaaggaaaagggagaagaaaaatggaaactggctcctataaatgagacgcttaccatatggggactgaatatgcattttcatgctttagttgacatgattagggatgtttgtgtactcctggacccctcgttagataattatcgtttacaagtttgtatgaggagtatgtgtgtgtggccttttctgtctggattgtaggcttttgaaaaggaggtacaatgacttttgtttggtaggcaccggattaagagtatgcacttaagatcaaatccttgcttcaccacatacaaggagtatatttagggcaaggtaagtaacctctcagaccatcagtttcctcttctgtaaaattagataataatactgtg

SEQ ID NO: 837833 - DNA, 619 bp, Homo sapiens
ttgtggggattatcgtacataatccacaagattgagataaaaggatggaggtactcctccaggacacattccagagaatttccagggtgctccttggcctgcaggtctcctacacayggtctgcattagcgatccagggcctggaagccataaagaatagtaacatatacaggaaatggttgtaaagagataagcaagaatgcttaacaaaagaaaaatcaaatgcccttgttcattataatcatttggggaaggaaaagggagaagaaaaatggaaactggctcctataaatgagacgcttaccatatggggactgaatatgcattttcatgctttagttgacatgattagggatgtttgtgtactcctggacccctcgttagataattatcgtttacaagtttgtatgaggagtatgtgtgtgtggccttttctgtctggattgtaggcttttgaaaaggaggtacaatgacttttgtttggtaggcaccggattaagagtatgcacttaagatcaaatccttgcttcaccacatacaaggagtatatttagggcaaggtaagtaacctctcagaccatcagtttcctcttctgtaaaattagataataatactgtg

SEQ ID NO: 837834 - DNA, 583 bp, Homo sapiens
gagggctactaaagaaatctgatgtcctttctgaagtgaaggtctttgaagctaggtacagagcagcctcatttgggtaaaattcaggtttctggcaactttaagcttccaaatgcaatcattcagatatttagtgggttttactacaaaatttgacagtaacaaatgatcaagcttatcaaacccttgattaataaatgtgattatttgtcttttttccagcctccagcagattagaagaaaatgagaagtgaggatgagaaagctattactgcacagtctattcataaatgctcaaaacgatgtccctgagtcacttaaatgtgtttgacttatggtgggtatcctcttataaaaaggcagttttcacagaatagtagaatttggttaaaaaaaaaaagaaactattagaaaaatttactttaacctcctttccttttttctaactttttaatgaaatataatattcatgcagaaaactatcagattaaagtgtrtagctcactacattaaaaaaaagtgtattgtgatcagcatccagattaaagaaagaaaggttatttccagaaaccaataaccctct

SEQ ID NO: 837835 - DNA, 579 bp, Homo sapiens
aagcattggttggtcttctggatccattcattccctctaaaaattatttactagccctctaacaattgcctacaacacgccctccactgctgctcccatttccctcttccttgaagaagatatttaagccccaaccatctggcctgtttggagtctcatatttgagtgacttccatgttcatattcatgctaatacatttgttatgttttttttcctgttaatttgtatattgtcattcattttaggggatcttcaaagaaggtagaagggaagccttctctccatctctacgctacaaaatatgttattgagaattctgtcgtacttcatgcttattaataaagtcttaggtcattattaactttttttctggataaatttccaagagacagattaccattttaagaaatatgaaagctagcagatgtcaacttggtgtgtaaggaaaggaagatgycaaggctctggtaattttgagctattagtacacctagtcattttccaggtcaaaagcaaagatccacttcgccctcattagaagagaataattgaaatctatgaaggtgtttagtgtctaa

SEQ ID NO: 837836 - DNA, 629 bp, Homo sapiens
gatgaattatttcaggttagctttaaatcatatttgagagattgcaggtaggaagaaaaatgtgacaagtcagttaaggtaaaagtgggtgagaaggcaaacaaacaaaaaaactctgatataacagaaatttgggcaattagccaaggtaagggagggtaagaggacaagttgggactgaaacaaagaaagccacatgttgattgttgttcttaagtgtgaaagagatgatgggtggaggtaggaaaagaaaaaggaaaggaggccgggctcggtggcccacacctgcaatcccagcactttgggaggccaaggcgggcggatcatgaggtcaggcgatcgagaccatcctggctaacacggtgaaaccccatctctactaaaaatatgaaaaattagccgggcatggtggcgagcgactgtagtcccagctactctggaggctgaggcaggagaatggcatgaacccaggaggcggaggttgcagtgagccgagatcgggtcactgcactccagcctgggcgacagagcaagaytccatctcaaaaaaaaaaaaaaaagaaaaaggaaaggagagtagtgttagaataagtgatagaagatatttgctgcttagttgggcactaatt

SEQ ID NO: 837837 - DNA, 633 bp, Homo sapiens
gcctaaggtggaaaaggaaatmttttcacataaaagctagacagaagcattcttagaaacctctttgtgatgtttacattcaacacaaagagttgaacatacgttgtcatatctcagatttgaaacactcttttcgtggaatctgcaagtgtatatttggacagctttgaggccttcgatggaaatgggaatatcttcacataaaaactagacataagcattctcagaaacttctttgtgatgtgcgcattcaactcacagagttgaaagtaccttttcatagagcagatttgagacattcttttcgtagaatctgcaagtggatatttggactgctttaaggccttggttggaaaagggaatatcttcacataaaaattagacaggaggattctcagaaacttctttgtgatggttgcattcaactcacagaattaaacataccttttcatagagaagttttgaaacacacttttcgtagaatctgcaaatggatatttggacggctttgaggccttcgttggaaatgggaaaatcttcacataaaaacgaaacagaagcattctcagaacgttctttgtgatgtttgcattcaaccaacacagagatgaacataccttttcatagagcagt
